United States Patent Application Publication US 2008/0039413 A1 - sequence listing, part 22

SEQ ID NO: 2901 - DNA, 42163 bp, Mus musculus
  misc_feature (1)...(42163): n = A, C, G or T/U
tcagtcatctcccggcccgcccgcccccccccccccagcatctgactaattcttcccagcttgtatggcacatcctgcccctgctgtacccatgccagcgacaggccacatcacatggactacatctggctccattggacacacccttcctcccctctttctcccctctttctcccctctttcccagggccagaacttctcagacccccgcccccaccaccccatagaaggctctaatggcacgctctccctcctcctgcccagacatcatcctgacttcccctcagcgtgtcttccctcactcagtccctgcctcctggcagcccactcccccctcgagaagggggcactcattacacagcttctgttccccagagctaactggagcgcagggaaagcctgcaattaaaaatttccccttgttcagctagctctcctgcctgttgccagttgatatatggtgcacagggccagttgagcctccaggactcaggtgagggccagagcgaagtctaaggctcaccttccaagcctgttttttttttttttttttaaaggagggttggggcggagcctggaagagcctccagctattggcctccatcctccttcctgcctgcctagcaactgttgtcatcgggtaaatatttgccccaccaagatctgggactgatgtactggagtctggcagagtagttgcccctctcctcaattctgtctacccagctctccacttcagagtctgggcctgcactgcagatgtggtccaggccctccatcacggcagaattccccacagccttctctttccttcctctggccattctttccctcttccctgtgctcaactctcgctgattcaccctctacttcctgacccatcagacactctcagagactgagtaagggcttagcccaagtcaaagggttctcttcccctgcatatctctctctctctctctctctctctctctctctctctctctctctctctctccctccttctgactgtggatcctttgacagtgttggtgcttgctgggtcttgggattctatcctccaacaggaggtgtgtgtgtcctgcatcgaaatgtccttcattccagtaagctcctgggaaagaaaagaggcactgagccccatataagccaggcattcccccattaggaagccagcgccatattttacctcctctgaggtaggcttgagggaatcacaggaaagaagccaccctaaacctccctgagcctgggggtcacatctagcgaggggcctgttttcacctatgacctgactctcctctccagtcagggtctgaacttctgcagttccttttttctctttgtctgccacttcaggccaaagtgcttaagggtaccctgtgaactctgagcttcccagacttaaatggccagtgggtatccctccagggcaggcattgggctggcttagggacggtggacagggcaatctggccgactgcactagtgaaggtcaggaaaggaaggatttgcagcaagacacctgggctcctcccacgctgaagcttgctggcttctaggagtgactgttgctcaaacaaacggcccccatccccccaactccaccagctggtctcacagggacctagtgccctctcccacttggcaacccctcttccctactccttcatgaaatctcccttgcactcccttatcctcaaaagacttcctctctcacttccccaggagagggcagtggaggcagacctagggagtctgggggctagacacagttgcagaggataccccaaaacttagaatgtaaaacatcagcctcggggtcacccaggcccttctaagttagccttctgagagaagcctgcccatgcggtcagttgtcagagtgaaactcaagaccatatacagttgcagggcagtggtggctcacgtctttaatcccagcacttgggaggcagaggcaggcagatttctgagtttcaagccagattggtctacaaagtgagttccaggacagccagggctacacagagaaaccctgttttgaaaaaccaaaaaaaaaaaaaaaaccacacacacacacacacagttgtctttccgtttttaaagattgatgtattttatgtgtaggagtggtttgcctgcacgtgggtgtctgatacaagtggagaccagatgaaggcttcagatctcctagaactagagctaatggatggctgtgagttaccacatgggtgctgggaatcaaacccaggacatctgcaagagcgaccattgctcttaactgctgagccacctctccagccacccccaaacacatgcacatccacgcgcacacacaccttaaaatcaaaaccacaaaacaggatctcacacatgtaatccaagatgatttcatctggacatggggctgtgtacagccttcaacttcagtttttccttactccctcagcctccgaactgctggaatgtgccaccatgccaggctttggttgtctgtctgtctggtttttttgtttgtttgttttttgagatagactcactgtttaactagtccaggctggcctcgacctggggagcgctggattagagggtgtgctccacgttgtatttatttaattctacttttcagttttgtctgtatagccctggctgtcctggaactgtagaccaggctggccttgagctcagaaatccatcagactctgcctccaaagtgctgtgattaacggcatgtgccaccatgccacggcttcgggctggatttctaagtaaaaaggacctctcttactataaaactgtgtgctttagctaattaatcagccatcccaagattagtgataaacgttcctttttagaggaaacccctcagtcctgagcagaacagaacaatggtccaccctcgttccaggcctcacaaacatttcggtcacctagacaaggattccctgtccccgcccccactcgacttcctggaaatgttgggggttgcggtgaaccgacccttttctcttgctggcatcctgcagttgtggcgcttctgtttgttgccttggcaacagggaaaggaaacccccatttaggaggccggggaggccccagcaaccacacacacagatacacacaggctcacatgcggccgcccacacgcaatagcgtgcgtcactcgccttctgtactgaagccgcaggctgtagagggagcggcccgtcggggagcagccgggatgcccgccccgatccagtccctggaggaaggacaaccacgtgccccgcccccgtcctgccctttccgttcagatgcccacccctcctccaccaccatcacctgccctcccctctctccccgcaagctggtggagaggaaagctggagctgaggaaggcctttagccccgagcctgatctttattttgatctagtctggtgtgtattgtagagtggtgagtgctgacacagtccagggagctcgaggcacccaagtggagggaggggaaggtggtttagaacgctgagatagagcgcctcctagatagagccagttcctgcgcacactacaatttgctgttgggttgggttcctgtctagtgtttagggctttcttatgtcacctgtcagctatgtggccttgagcaaatcagttaacctggccaagcctcccattcttttatctgtaatatggggataatggtagttgcttgtgctcctaagttttgattgtgaaagggttgccaagccagagccctgtccaggtgtgagtatgagtgcgaatggattggcccctctcctcctgctgcacctaccctcctggctggagcagtgagatcagctgcctccaatttcataggaagggcaaagacagcctgggggaggggcagcagctggcccctctctgctaggagcctgtggtataggaccagagcctatctgggggtctggcccaccccatcctgtcttttgatcctcggcgctcagatgccaacttttttgttgttttctttgtatgtgtgtgtgtctctgtgtctcccccaccccactaacccctctctctctgttttcgagacatttttttttttttttcctgtgtagaccaggctggcnnnnnnnnnnnnnnnnnnnnnnnnnnnnnnnnnnnnnnnnnnnnnnnnnnnnnnnnnnnnnnnnnnnnnnnnnnnnnnnnnnnnnnnnnnnnnnnnnnnnnnnnnnnnnnnnnnnnnnnnnnnnnnnnnnnnnnnnnnnnnnnnnnnnnnnnnnnnnnnnnnnnnnnnnnnnnnnnnncagcctggtctacagccagggctacacacagagaaaccctgtctgaaaagacaaaacaacaacaacaacaacaaagatagtcgtacttagtttgtgttggcctcagtttatgcaaccacagatggctttgggttgatctttctgctttcacctcccagataccaggatttcaaacctgtgctgggcgacagaagctcattttgaagacaggaaaatctttatccctcagtgatatgttccttaagggacctcttaagacaggtacaaggaattactggaaagggattccaaatgtccaggcaactagtgaggtttctgtctctgttgcatagtatattggagagttttgatgagacttcatttagattagaggtctgcaggcttcacagatagttgtcaatcacttgtaaggaccatccttgccccggcccacctccaccccagtcggctaggagtttgcatcactcttgagacccagtgggaactttgttgtttttccggccatttttctcagcctctcagagtttggggtttctggcataccaagtatagataataatgcctttctcacggtgaagattaatcagatgcacctccacgtggccccggccctgtccctgccacgtgcagcctctaatagaatgggcgaggtctcccactgtaggggcaataactatgaccctgcacacctgatggcctcacctcagcagtgtttggtcacagaccctgtgatccaaggaggaatgactcaaggccagccctcaggaactcactctgaagggattcctaagcccttcccaccctgtgagggagcaaaactggctctccagtggtcggactcctctctctcctcctacccaggatcatagatagccaaatgctaacatctcagcctttacagcccgacgaacctgtattagaattccagttttgctactaaccatatacattagacaagtggttcttagatgggtgatggtgatgcggtcctcccctagggataattggcagtgtctgaagatgttttctgattgtcctaactagggacagaagtgctcttggcttccgtcagtaagattctgagatgctgcaaacatctcactcagcacagcctctcccatgagagtgaattatctggctggaaacagctatggtgccaaggttggcaagtcctatgtcacacagataacttagaaccctgagcttcattcttaactgcaaaacagaactaatgatgtatctgctttgtgagccattgaagacacacaaatacctggtacccaggagtaggaggcacccataaacactccctacattagttattattagcatgcctgtggtcctctgctgagcccattccacccatctgggcatagctcttgctaaggccagtgtctctgtattattgttggttgtttgttttgagatagggtttcactacatacccttagctggctgcaaactcaagatgaccacccacctctgcctcctgaatgtcatactcctgccctgacacttgctttccgtcttctcctctgcaagccctgcagagctgaacagctcgagccctccccttaggctcagcatcaggtctcacctccacctcccatttctcccatcctgtcccctccattcacacctttcccagggccaggccacagcttctgctgcttctcagtttggatctctgcacagagttgccctggcacaggtctagtccctgcacctcccacacgggcactggcagaggtggtaaagcgtgtcctgggtgtagacaaggctgagtatctgagctgacttcctgctgcctccttggtgtctgattagggcaatggccgactgacatgaagaatagggagcagatttccaacccatgcagtttgtggtccgccttgggacacacaagtgtaaagatgatagaggggctagctagatgacaagtaaaggtcacaggtcaacaagcttggtgacctgagctcagttcccagaacacacatgtgggcagaagagaacctactccacaaagtcatgctttgactttctgcgtgaaatgtgtgcccatatatgcatagtgctcacacacacacacacacacacacacacacacacttataaaacaaattataggagctgtgtgtgctgggacatgcctttaatcccagcactcagcaggcaggcagatctcagaattataaaacaggcaccaggatgtagctccattggctgagtacttgcctcccatgcacaaaccacaaaccctgggttcaatctccaacattgtataggccaggcatggtagcatacacttgggaagtagaggcaggaggatcagaagttcaagtccatgtacatgtatatgtatatgcgtgtctgtttacctgtctgtgcacatgtatgtgtgcgtgtatctgtcaatgcacatgtatgtatatgtgtgtgtctgcagacacgtcttgcacatgtgtgtggtgctaaggaatgagtcccaggcctttcccatgttacacagtgctctactgctgagctatacttccagtccagtccagtccagctcctgcctctgcctcttaagtgctgggattaaaggtatgtaccaccacacttggctccccagttcattttgtatgtgttttattcattattgtatccctagtgcctagaaaaaaacatggcacacagtaggttctcaataaatatttgttcgaacaagtacattctccatctctgctggaggcacatctgtctcagccctgagctggcctttagcagggaactttctgcacagtgtgtgttacctactgtcagaacttcctcgtagaggtggaggaaactgagcccgtaagacatgaggtaacccacccaagagtgacaggccagatgcatttcttccttagagggcacagaatagaacttggtgtgtacacagatacccaaggctcagtccctcatgttcctccctcatagcactcccaggaggaggagttagaggcggccaggcacacagagcagcgccctctggtcctgacggcaagcaccaaacaacccctctgactccatgttggatttcaagaagctccggcccccagacttctgggttccatgtggaactcattatccagttttgtgttccaggctgctctttaatatacattcttctcggtttggaccctccccacccttctctgccagtgggaagaggctcttgtgacaccaagcaggggagtgcggctcggctctggctctgtggcttggtttgcagaactccacgccctgggagcccagtccccaggtctttgtctgccactttgctcatgtgacagttgaccagggaaggcaggtgtagagttcatgtcacaacaaggagaggcatggttgagagctgctcatcttctgtcatgcctggcctctcctgctcgctcgcgaagctcctggcattggtttgtgctttcacagaggaaggcagacactggtctttgggacacagaattagggattagggtggaaggactccctctgaagatcagatttaggactaaagccatcttgattgtagtggtgacacagatactttgctaagagctcagtacagtttgggatgaaagccctccttcgtaccttttccacaaaatgggggcgggtaggataagaagggttaaatgtggttttgctactgaagccaggaagagaagccaggccagggagggattggggggtgggtaggaagggctgagacagcgggaacagggaacagcatgagccccactgctcacgttccaccactggctcacccacccgcctctgcttcttggttaggaagtaggggagggagaagcagaagaaatggtttttgctgttgttttgtctgggaagttgaatggcaaccacacagcccgagggactacagggaaaggaagccatgtcctaggttccctcccctagatgcatcctgggtcctcaccacactggagtcaccctcacagaaataagaactctcccagaacccagcgcagtggcagtggcacgtgcctttgattccagcactctgggggcagaggcaggcagatctttgagttcgaggctggcctggtgtacaaaatgagttctaggacagccagaagttcatagagaaactctgtcttgaaaaaacaaagcgccaggcgcacgcctttaatcccagcactcgggaggcagaggcaggtggatttctgagttcaaggccagcctggtctacaatgtgagttccaggacagccagagctatacagagaaaccctgcctcgaaaaaccaaaaaaagaaaaaaacaaaaaaacaaaaaaacaaacccccccccccaccaccaacaacaacaacaaaaaaaaaaacaaaaaaaaaacaaaaaaagcagcagcaacaacaaaatctcttaagagtcccaactcaagcccactgcctggacctgcaggaactgcaagctaatcagcaatggacaggggaaagcacatggcaaaaggggaaggaacatggcagaaggggatgccagggccagtaaggcttaggctagggttacaggagaggattagacagctgatcgggagtctttgatggaggctggagaccccgggacatggaaccaggggaccaggttactgtattgggagatcatctagtcagggcccacccagaactggctagacaggcatgcagtggctgaggagggggtagctttgctgttcttgctcacaccgtttaagatggaaccaggatggagaccctgcattaacaaccctctgaccccgttcctcttttcaggcccttctcgaagccacaaaaatctggaacctggtgtcctggccatgtgctgaatgcacgcacagcacagctctggtatctgttttaaattatccattaaaataagtacagtcctggaaaaaaataagtacagtcttggatttggttgggtggagtgagctgaagaaaggggctgaaacgagggatttcagcagcccctttttccagctgtctaggtccaaatgaaaggggaggggggagtgggcggggccaacttctggcttctattcttggccttctcttggggactgaggcttatttcttagatctaaaacccaatgtttggttttaaagccaaaaatataagggaagtgcataggtttgggttttgttttttgttttttcccgaggtccttgatctttgcccccaaatttgagggcataaagtaatccctcagttacctaaaaacacagccattcctttgccattccactctcctggattggccgcttctgtgcgcgggggagaggtgactcactattactactgaggaaaggggagccagtggtggaagtggggtgagtcactgatgggcagcagcttcagccctccccccaacttccttggctctctggggatgcctgatcctctccctcactttgcacctacttcccctggtccctcaccactaccctttgcccacccactcaaattctttggctctgctctttactccagaaggccaaaggcaagcttagagttgagtaggcaggaaccaacattgtgaagccccaggccagaaaggggtgttctgcagagtgagggttggcatgctggctcctcctcaccatacctgcccccgcccctttgggtacaggatggctcctttaagagcagtggatccaccccctgtagaggagggcctattagagcctctgcctggctgtcagtgactcagtgttcgcgggaacgctgcctcagcctcaacaccagccaacccagatcccgaggtgcgccagcgcccagcccagatctccacgcctgccaggagcgagcttcgccggctcgctgtccccctgagcagcctctgtccttctgtccaagtcccgcgcccttctcgggacccctgcccagcgggcagcactgtcaccctgccggccatggagaccccgtcacagcggcgcgccacccgcagtggggcgcaggccagctctaccccactgtcgcccactcggatcacccggctgcaggagaaggaggacctgcaggagctcaatgaccgcctggccgtgtacatcgatcgcgtgcgttccctggagaccgagaacgcggggctgcgccttcgcatcactgagtctgaagaggtggtcagccgagaggtgtccggcatcaaggcggcctacgaggccgagctgggggatgcccgcaagacccttgattctgtggccaaggagcgcgcccgcctccagctagagctgagcaaagtgcgtgaggagttcaaggagctgaaggctcggtgagtgaggcccggccggccggcaccagggaggcagcagtcgcctgtaactggccatctagtcccctccctccccggaactgcctcccgcgggtgactggcagtgccaagggtaatagacatgataggacatagaagggagggggtctctgtgagagggtgggggatataaagagtggtgggggcattgagaccaagtagcgttggtgacagggcctatgctgtcaaggtgggatttttcagtcatttggagcttgggggatgggcttgaggaaggtagaacaggctctaccaggtcttggaactcccgaacgccgcccgggacacatcagaatgggtgaaagggttttattagaactttcttggtaggtttggcactttgccaatcttgcccaacgtggctctgaacacatgatgtccactaagacatagcgcccacactgacatttgtccagtggtactgtaatggagttaccaaggctgcatagcccctttctcccatggctgtgtaagcacggccttctcctggttctttctaggagctgagaatgtctggagcttttcctagactctcaggcccaccagaagcacaccaggagatctgctcccccgcagctcccacagcccttggcctccctggtcgaggaatgcaagggagggtggggagggagaccgggcacagaagctaatggctctggaaattctgttatgcctgagtcggggacaccccagtctgggccctctctgtttggtgacttaagggttttggaagctctgtcctttccttgctcagccagcgagccactttcatttttctagtcaagccagactttactctggcccatcctctgaactgttgatgtcttgatcttactaaacctctggaatacaatgacatttttgaaatccagccgttagggagcctcaggccactcccattgcacccatccctaccccaccctaccccaccctacttggctccacctactttctaaaaaggctttccaaagcctggaagtttgggctcttgctccctgtacttccatttcgctctgtgtctgtggtcttttcttctatgttgtagacccaagacaaagagctttggacattggacgtgcgcactgatacctaaggggctggtagctttgacttctcttcctctttttcctttttgcattatcttctgacaaaacccactgtgtatctgtggttggtcattctattccttaccagattccagccctaggtggtgagtatggcaagcccattgcctcaagtgtgagcagaggtcatgtgcacagatgggtccagcttttctttctgctaacaggaattagctgccttttcatccatccactagggatatgaacaccttatcaagaaatacatgaggcaagttagaggagtcccagtgagttaactagttagtgatctaaactagttaagtcagccaccaaagctcttgcagatcctggtgtagaacttgtatagtagatgtggggacagggacagtggaatctatagcttcttgttcatctagccatgccagtctcctgcccccagtgcagctgtccagcctgggacaccaggtggtgtgtacacacgttgggtaggggctgggtgatgtgtggactttttaaatttagccacctgcctctattctccactgatggtaactgaggaggctgggcttccgggaagggggtgggtatacacacctaggtccctgctggtggggtggagcagaggctaagtgcctgaccttctgtgtccatcatagaagaccacggctgctacccctttctatagctgttgagctcagactgaggtggagaaatgccctggaagtctggggaggatgaaaggcattgtccagtagcccctcccaccaggggccgggtagggaaaagtgaccagtttaatgtttaattggagctcagagttcagggtcaggcttggagttagacagaactgtgagaccctgtgacaatctgtggcatagctcaagttgggtctctcaactgcacccacaggcctctgcttttcaaggtggattgtaagttacaaggaggaggtggagaagaggggggacaaagccaggcagtggtggtgcatgcctttaatcccagcacttgggaggcagaggcaggtgaatttctgagttcgaggccagcctggtctacagagtgagttccagggtacacagagaaaccctgtctgggggggggggaagaggggggaggagacaaaacaactctctccttccctctttcctcctcttctcaggaggtttagacatctaagctgggagaaggggacagttggaagcgagggaaggctcaccgcaggcttagggctgggcaagccttcctccagctagacagctgcatgaatgactcagacgccacccctcctaccctagtggctttataagagacaacaggagacagggagtatagactgtctgcatatctgcatcggctatcctctctccacagcatcctggggtccctttatcgtctcccctatcttgaggtttatttaagtgtgtgtgagagtacacacacatgggccacggtgtgcacggtaggacacaacttggggaatttggttctctcctatctaatatggggcttgggggtcaaactatgtcatcaggcttggcagcacgcactgttacccataaaaccttcttaccttcttccttggaacctctgatagtaattctagcacacaggaggcagaggcaggaggatcaccagaagttctggttaggctagcctagcttacagagttagtccaggctatatttatagtaagacctcttctcaaacaaaacaaaacaaaacaaaacaaaacaaaacaaaacaaaacaaaaggatacaggcagtactgtagttactacccaactcaccactcttgtggaacactcaatactcttctttgtgaggaatgacacaaatggaggtcagagggcaacgtgcaggaggcggacctctccttccacaacacgggtggaactcagttgtcaggctttgtgtcaagggcttttactcaccaaggaagcatctgccggcactccataaactatcttttatttttctccagatctttaacatttttatgtgtataagtattttgcctgcatttatttgtttgtttgtttgtttgtttttcgagacagggtttctctgtatagctctggctgtcctggaactcactttgtagaccaggctggcctcgaactcagaaatccgcctgcctttgcctcctgagtgctgggattaacggcgtgtgccaccacgcctggctcaaattttttattttgaaacaggatcttgttttgtagccctggctggcctggaacccactgtgtatatcaggcttgcctcaaacgtctgcctgcctgtgctttaggggtggcggaaataaagacacgtgccaccatgccatgccatccctatgcatacattaattaattaacttttttttttgttttttgagacaggatttctctgtagttctggctgtcctggaactcactttgtagaccaggctggtctcgaactcagaaatctgcctgcctctgcctcccaagtgctgggattaaaggtgtgcgcaactactgcctagctaatttattatcttttgagactgggcttttctgtgtagttggctgttttggaactcactctgtagatcaggctggcctccaactcagagagatccgctttcctctgcctcccaaatactgggcttaaaggcgagcgccagcactgctgcctgatccaccctacgcttttaagaacagataattggtgctagagagatggtccaggagttatgagcactgctgctcttcagaggactttattcagttcccagcactcacaggcaatttaaaactgtctgtgactccagttccagggaatctgataccttcttttggttttcacatgtctataggcaacctcacaatacattttacacacatatacacacatgcacacacacaaatttttaatttttttattaaaaaatgaaagactggtagaattggaaccagggttcagaacaggcactatacataggaatagaatggcaaaaagggataggacgtggctctgtagtacagtgtctgcctatcaccacacagacagagacacaggcacacccacacatccacacacatatacagagacacagacacacatacaaacacacataaacacacagacacacaagcacacacacacacagacacacaagcacacacatatagaaacataccacaagcacacacatacacacacagacacacaagcacacacatacagagacacaccacacacacacacacacacacatacagacacacacacacacatacagacacatacacacacatacagacacacacacacagacacaagcatacacatacagagacacaccacacacacacatacacaagcacacacatacagagacacaccacacacacacatacacacacaagcacacacatacagacacacatacatacacacacacacacacacacacacacacacacacacacacacacactgggctgtagctaaggttcagttgtagagcactcatctagcatgattgggcctgatgttcagtttctagtaccagttagctttggcagcacaagcttgtaattcccagagcttaagaggctgaggcaggaggagtatggtgaattctaggctaaccctggctatatggagacccagagtgtgaccagagtgtgcttccatgagaaactgttggagtgaggctgatcagaagtggggacaattcctgacccacaatgcagtagcacctttccccccaagacctttgtgctccattgtcccctgcattagcggacttctgagactccagtgcagagaagcagggggctgcaggctgaagtcatcacagaagcagcacaggctacggaaggcagaggtttgtcccacaccctgcggggtgaaaggtcaggacatgagcttctgacttctggtggctactctattaaactttctctagcatgaaagacaggttggaaatctagccaaggctcacttctgctgcctagagattctgaggccaatgacacatttgcctccatcggtacctggaaagacccagagccctgctaggctatatatacatcattgaacagtaacttgggagtgtggagattgtgccttcagtctcaagacctggggtaggaatcggctacctagattggaaggaggctgtgcccttgggcagaactgttatgtcaatagagacagggtctttaagggtaccaggccctaggtgaccccattcacattcctaatagaaggaaagaagccagtgcagctacacccgggggctgaggagtacttaaggagcccaagggaaacagaaaagcctgcctttaatcccagcatttgggaggcagagacaggtggatttctgagtttgaggccagcctggtctacagagtgagttccaggacagccaggactacacagagaaatcctgtctcaaaaaaagaaagagagagagaaagagagagagagagagagagagagagagagagagagagagagagagaagaaagaaagaaagaaagaaagaaagaaagaaagaaagaaagaaagaaaggaaggaaggaagaaagaaaaaaagaaagaaagaaagaaaagccattccccactagggtccccagactgccttcccctggcctcaagtggtcagtgacactcctcagtagctcattgtcaaggctgaagcctgggcagctgggaggacagctgggaggacgctttctgccttcacctacagctgtgccctctgctctccttacagcctgccagccctgcccggctctaacagccatagctagacatgagactatctggagacccagacactaggaagagtctcttctagtctcccttccttggtccgggtaaatatgctgaaggtgacccaggccagctctaacatacatggagacactggagaagttacaagacctgttatctctcagtaagatgttccactaacaaagtgacagagtgacagatagtgttagttcatagttaaaacagttgtggccctcagtgtcagtggtgtccctatctctaggttcacccttgtccctaaaattgctgtgtgaccttgaattaatcaaccctctcccttaatttccctaacagtagaagaaagggagttaggacagacctgcaccttgggtttcaaagcagtacaatgacccataaagtaagggaaagtcctctaaacaccacgtgagagtaataaagccaagcacaataattggaatatagttaatagccagtgcaggttgttttttctttattattattttttatagaactatttcccacagcagtgggattataaccagtagtctccttccggcttctcggaaagcgcctgctggagttggttaattattatgacaccactgtcttggcgtaggctttgttttcactgctgttgagaaaatgaagttcatcttagtgtctgcctaccttcaggacaatagaatagccctaccgtgtagcaggatagccgcccgtggcaccgactgaccagtttctgggctggaaggggggctcccaggaaagacaggactgatctgtccgactgccaaggtcagctatcacatgccagaagccagcgggtggtgcgcagtgaccttacctatcacctgcccctcatattggtgtacccagccaataccctgtgagtcttggcccttacaaatcccttaagaaaagggacaatatttgggaaggggatcaccctaccttactgtccagttataggagaggaagccagaatcctgcctgccgaagcagggaataattcaggcctgggatcctgggcccggaagtgggagctgagtcatggatggtgtgcagggttcagagtggatgggagaccaagcgcttgtctgctcagtgcagaagctgctgaggtgggctttccttacatcaagccacagcaagaatgagtctgggtttggtgggggatttagggtcacctcagagagctaataaccttttttaaaggataaggcttctggacagagtggccacgggtgaggaagcttttggaaagggaaaggctcctttgcctccctgaagaagctctctgcctgccatctctgccagccgggaggacctgttgcatcgcatcgttccaggtttagaagtgctgtgagaccagaagttcaaagctttcctctgcttcctctcctgacttggggtgtggctcagacttcctcctgagacagtcagggttaataagtgtgtgctaccagatagagggtggctgataagtcccaagaagtcacacagcggagtgtgacactttccgaggagtccctcgggtcatgctgctttgttaggacacccttaccttcctgctgtctcacttttatctgtcctcaggccctaccctgacaatgcaagcttgactgctggaatagtaggctagaaagaagagaagtggagttcagcaggagactaaagggaaggcaggagtggggaaaagctgctattgggtatctaggacccctatgttctggcctctggctccaggcttctcttctgtacaatgccacgttgatatatccagcagctgtgactcaggcctggcctcttgccaggcccagtgcctctgctggagtagtgtctggacatgtcaacaggcctcctatcctgttctgggcaccagagccctaccagactctccctcgtcctggaattaagacttgcctttgtttgtggggaaaggcaactgagatcctggttgctctggaagcagatctgaggcctgagatcccattagagtctaggcctgtccagtagtctaccagaggaagctgagctttgccaaccatgggcacacgtgcctgcgtggggaggcctgaggtggtccagaccgtggcacttactgtgtgcttttcttttttcttttccttcatcccttccttttctcttttctcttttctctttccttccttccttccttccttccttccttccttccttccttccttccttgttgttgctgttttgagacagggtttctctatgtagccctggctgtcctggaactcactctatataccagactggccttgaacactcacagatctcctcctgcttctgcctcccaagtggtgaaattaaaggcttgtgccaccacctcccagccttaacctcgtggttttcaaatgacagacatccagagtttcacaggacaggtttggaggacggctcaggaatacctgccttgcccacttctatccttgctcagcatgccagagtggggcagcccacatcctgccagaatttgaaggtggtcacagaaccacggaacagccaagaaaccaagtagtgggcagtggttttcttggatggctgcagaatccagagctggtgtaagctttgaaagtagttagggtggtagattccttaggcctttgttgttttgatggggtctcccagcagcacagagtgaggacttctaaaaggactgactgtgtatccccattgctctctgcagcccatgtgcctcctacgacttccttctttctccttcctcacattcccgaaccatctcctcccttctctttttgtcctggagttagacccaggacattacaccccagcctctaggtcagtttctttactcagtgtccctgagtgttctgagtgtactccggtgacttggtgggtaggtttgtagtgtctagggctttcctgtctacatctgtgagagaaagtgcagaaattagtccaaaggttagtccagaagccctgaacactaaactttaaggtattaagaggacgtatacaaaaactcaaagatcccgctggtaaaaactgggctgaggtggagctctgaacatgtggagaacgggcgggcggggttgctgtgctaggccagatatagaaagctttctgtatttaatacacagtacatgcatcattcatgtctacataattaagataaaggaagctgcattgttaatgggaaaaaaaatagggtctgggaatgtagtgtgcctagcatttacgaacttcggggtttgggtttgatcccagcatctcacaaaccacgtgtaatcccagcacttggaaggtagaggccggaggatccgaagtttaaggtcattcttgactacttagcaaattcggggcaccctaggatacctgagaccctgtcatgaataaaaataaataataaataaaccaatatgggtctaggttgagcagcagcttgggcagggtagggccggaagttagccaggtagagggttgcagtcccaggaggaccctggctgggagcagcacctcagtcccctgcccaaccacagggggccaccgggtctttccggaactcctgagggcgcaaggccttgctctctctggcccagccatggggaacgcggagggccggtgaggcaggcggcaggcgggcgggcggggcgcgggccgtcatcccctcctgctccttatttttagcccagtgtagagtctgggccgcctgtccctcccccaggacagggggaggaaatgcaggccactccctccgggcttaggctgttgctccgggcaaccaggccaaacaggccgcgcggcttccatatctggcgtctgaggtggctgaggaggatgactcagtgggcgggtcagcgcctggccccgtgcccagcccagcccttctgctactgctgcctttcttccctaaagcagcccgggggaccccagcctggccccccacccctcacccgcgtcggcttctcacttaccttgttcctgactgctctgctcccctcccccatgcccctccgtgtgccaggattgcccaccgggatgagttaaaccggatacccaacccttctggccccggcccctggaggcagcagggatgcaaccactcctttgctcacgcagagcatggcaccgggcctggcacagggtataggcaggcagggtctcactgaccccctgagagcactagaccacttcccgccccctgccctggtattgtggctctgagcatgagtcacaggaggagccccggttactaccccttcccagcacccctggtctgccccacccagccttccataccaacccagcacaaatccagctttcccactaccacgcccagtgggctggaactggaccacacctctatgcagacacagccagcctcctaggcctgtccggtgtctgcatggccagccaggctgaggtctataactctcctaggaaggaaatggtgtttgatagaggacagctatttacctcaaaattttttctctcttttaaaaatctgttttaaatgatatcaaataactgttacagtgttaaacatgtaccctgcgttactatacatgaattcttttcttttcttttcttttcttttcttttcttttcttttcttttcctttcctttcctttcctctttctttcnnnnnnnnnnnnnnnnnnnnnnnnnnnnnnnnnnnnnnnnnnnnnnnnnnnnnnnnnnnctttctttctttctttctttctttctttttggtttttcgagacagggtttctctgtatagccctggaattcactctgtagatcaggctgctcagaaatccgcctgcctctgcctctgctgggattaaaggcgtgcgccaccatgcccggctcttttctttcttttttaaagaatagtatgtcactatgtagtcctggctggtctggaactctctatgtagatcaggctggccttgaactccctgagatacgactgcttctgcttcccaagtgttgagactacagttgaaatcaccataacatgtttaaagtatgaggtttttttttttttaagatttatttatttatttatttatttatttatttatttattacttgtaagtacactgtagcttcagacataccagaagagggcatcagatctcattacgggtggttgtgagccaccatgtgtttgctgggaccttcggaagagcagtcgggtgctcttacccactgagccatctcaccagcccctaaagtataagtttttaaaaaatgttaaaaaaaaaaaaaaaaaaaaaaaaaaaaaaggaatttctgggcttggtggtgcagctttaatcccagcagtcaggaggcagaggcagactgctctctgaattagaggccagcctgggctgcaaagttccaggacagccagggctacacaaagaagattagagaaagggagaggtggcatgccctaccccccatttcttagggcgtgcttgtggctctgtctatagagtcccaaggtctgagtcatgagcccatgggtgatagtggcttcttccccctagatggggctcctaatgcctgactaagaaaaccacaagttcttccttgataatgtgtgcttgaggtttccctcaactgcagggtatgtcttagtccttaatggagtctcttcagcgctgggcaaagcactggaagagaccagagggatggaggaacagccccctgaattttgctcaaggcataaacacaagctctgcgttctgcagggccctggctggagctctcaacccctgccttttctgtatcacactggtaatagcatccatctctgagggcagttagttctgtcatcattacagtggtacctggcatgcaataagctcatgacaagtatttgctattacagccaacttccacataacaatgtttctgtcagtggcaagtcatgtatgacgagggtcccaaaagcttctctcatctagtgtgatcacactgtgatgtttgcacaatgatgaaactagttaataacttctcacaacacaactccgtggttatgtgacacatggctagatgatcataaaaacccagccctgtgcataactcctggagggacaggacttttgtactacttctcagtacagccaaggacaaggggaaccctgggaattccgcctctagtgcccaaggagtcagggctaggaggtgtcctcgaggctaagcatcctcagctcagtcagagatgagtttgttgaaagggatccactcctgctcctggcttctttctgcagtctctccacccacagagcttaggagggcagtggggggcgggggagagtgtgagaatgtcagcttagacactgcccctgtggctgtctgccatgctccatgttggccacgcaccatcctctgtgactcagtttcctcatctgtaaaagggggaggtcgaaggactcggagctcaccagcagcaccccagccggctggccttcaggatacagaggcccatctgggaagccgctgccagccttggagctggcccaaggagctcggattctgtctctgcaacttgctgcctgcacccgtgtttttttcttcattttctttcctcccctgcagctgtctcagcttcggaaaagttctgaagtcatggaaagttgggctgtgcttctagccagggctgggccggatggcagccagaacctgagctggggtttgactttatttttagcttttcgtgctaagatggaggaggagaaatagtctttggttctggaagggcctctgcaggagaaagacaccgtggcattaaatcgtttgtttcttggtgtggagggagcaacacacagcttggggagcagcctccaggcctctgcactcttccctgaccctctgtggtcctcccagaccagtacaacctaggtggaggacggaggaggacgagactctctgaaacctccttagtttccaagtctagccttttctctactgctgcaggtggactgctaggcctataactgcctagagacttggtagcaagacaaacatgttgacagggctgctcttcctgaagtgggcccccctgccttacttgctcacctagttccctttttaattttgggatgtatcatgcgcatgcagacacgagcaagcgagcgagcgctggtctgctggaggtagaggtcggaggacagcctctgccgtgggtcttttacccttccccttgcttgaaacacgtttttgttttgttttgttttgttttgttttgttttgttttgtttgtttgtttgccgctgtacagccagaataattgagccacaagcccctggggatgttctctggagctcctgtctcacctcagaaacgctggggttccacaggcaggtgttaccctacccagccttatgcagctggggatccacactcaggtcttcatgtttgtgtggaagttcctgacccaggaccatctccccagcccttagttttcattttgctgtggtgggctcctcatgataatcctgcagatgctactagtgcctgccccctcccagggtctactgctccccctccctctagtacttatgaaaggattatggctggaaagttctcaggctttccagagatttttcaggaaattaggacttctctgcttctctagttcactagcagaaagaatcaggaatgttggggaggcagaggcattcccgggtggtagagactaactaaatagctttgtctactttaagggtagggtgtggctccagactggaaccccatgggtctggagtcctgggatagacatctggaacagatgccagaaagccaagcagtagggaggatttagtctactgtcggggatctgagggaggattcctctgttgtgtggggatcagaggtcttaagactaaatcccaggaagagaaaggtctcatatacttcccttatccttgtccctggtctccctagggagacgtttcccctcaaagtcccacataggcaaaagggatgaaactaatttgaaactccaactggagatggggcggcagtgtgtgtgggagggggagccttggggtgtgcgtggccaagacactcagtctgtcagctccagggagggaagcaagctgaatggggaaacgggtggagtgcagggaggaaaaggttaaggccctgtgtgggaaggggtaggagacaaaggtgccctgtctattttagagggaataggaggcaaagagagccaggcattcatatcatctgatctagcttcgccattggccccaggcacgttcttgggccctgagtcatgggaagggtagagaagaaggggcttttgggaaatctcaggggtggtgagaacccagcctcagaaactggtggatgccaacaatcctaatgtaatgatgccctcttctgacagctgcggggaccgcagagaggtcccatcccagatgcactcctgaaacctgcttttctttttctagcaacaccaagaaggagggggacttgttggctgcgcaggcccggctcaaggacctcgaggctcttctcaactccaaggaagctgccctgagcactgctctcagtgagaagcgcacattggagggcgagctccatgacctgcgggggcaggtagccaaggtaggccgctgtcctgtgaccccagtgaccccacctggtccgacatatcattcggtcccatttgcctgctcaccttcacttctccagtctagaacactgctcatcctaaagcaacccacagcccagttctggttcccctcctcctgtctccctagacagctccaagcacttcagaggagagctgtccactgaggccataacagagttgggttttttttgtttgtttgttttgtttttaaaaagatttatttattttatgtatatgagtacactgtagctgtcttcagacacaccagaagaggacatcagatccccattacagatgattgtgagccaccatgtggttgatgggaattgaactcaggaccttgaggaagagcagtcaatgctcttaaccactgagccatctctccagcccccataacagagtgctgatagctaattatacctaggtgtgctgcctgtgtgtgcagtgtccgctactttccaagctctcctctctgcaactctgctctctcatgctgctcaggagtgaagaagttagggacacagttccctgctctcctccctccccagctcttccaggcctgcagttgcccaagatgaacaccttagcttggtgcttcccctggaaaccattctccagggcagttaagggtctctcctcctggtctaacccttgcctgcgggtcctactccctcctcctgcacaccacaccccagcagcacttcagctccagcaagacctgtcttcctgacagttaaggatgatgtctgtacctgacctgccactgcagccactcatgtcccttcccagcctccactcacatgcccttcccaggtcttcccacccccacccccatgctttgttcccatcttcctgctcctgctgcagtctatgtggacctccttcatagtaactgctgctccaagagagggagatcctgcacaggggaatttactattaattttaaattctttgttttttcacttttttttttcttttgtgggcccctgacatgccccagcacacatgttaagaccaggggacaacttgcaggaacctgtcctctccttctgccatgtaggctctaaggatggagctcaggttgtccgggcctaatggcatgcgccctcacctgctgggccatcttacaggccctcacccttgatttcttagtgccatgggtagaatgtgggtgtcctttcttccccccgtgggcactgaaggccttccctgcctctagaccctgcctctagatggggacagccatcacctctcctttggcatttcctgaaccccctcccacctctccatgaacttggctttctccctctcagcttgaggcggccctgggagaggctaagaagcagcttcaggatgagatgctgaggcgagtggatgctgagaacaggctacagacgctgaaggaggagcttgacttccagaagaacatttacagcgaggtaagcgtcccgctgtacaggtctttcttactgtggacagctgggaggggtcacctaataatgccaggctaagcgagggctgcccgtgcctggccggtggagttacgacttctggtctcagcttctaaggaaccattgcgatgttctaatctaagtgtctccccttaaccctttcaggaactgcgtgagaccaagcgccggcatgagacgcggcttgtggagatcgataacgggaagcagcgagagtttgagagccggctggcagatgccctgcaggagctgcgggctcagcatgaggaccaggtggaacagtataagaaggagctagaaaagacatactccgccaaggtgctggcctcatcctgtcctctccctggtgctgccctggggacgggtgggtggtggcagggggccagggatgccttcctcaggcccccagctccaggttcctgctctcataactgtgtgctccctgcagctggataatgccaggcagtctgctgagaggaacagcaacctcgtgggggctgcccatgaggaactgcagcagtctcgaatccgcattgacagcctctcggcccagctcagccagctccaaaagcaggtgaccctcagtttacccctcccaccttggctctggtctaagcagatactgcagaagcccactgagaagggggtgggggagggactccaggaccacatgctatggttctgaatctgatgcctgtctggctttccagggctctcctttagctagccctgatcctcagagcctctattttactgtgcatgaagggtttttcatgtttcttctgtgcctgccggagactgaaccagaggcctcttgcttggtagataggtgctttctcactgagttacaaacccagccgcattccctacttggagatagagcttcccttggactggacatgtagctcagttggtacagtgcttgcttattatacacgatggcctggcttctatccccaggaccacagggaactgggtggtgcatgccttttatctcaggttgaagtatcagagattcaaggtcacccttaactatacagcaagtttgagaccagcctagactaccagaccttatctcaaaaaagaaagaaaagaagccaggttgtaatagcacaggcctttaatcccagcactcgggaggcagaggcaggaggatttctgagttcgaggccagcctggtctacaaagtgagttccaggacagccagggctatacagagaaaccctgtcttgaaaaaccaaaaaccaaaccaaaccaaaataccacaaacaaacaaacaaacaacacataaataaaaatccttaaaaaaaaaagtggaaaatgatgaacattcttgtcctccgggactcccaggtctgtcatgacactgcagtgtgaaatgttacttgtgtcgatattatttgtcacaatagctacactatttgtgacaaaagaagatgggggtctagcctcggaatgagaggtttcagacagacattaggaagggcttcctggtcactggataaggccatggtggctctagagagagcctacagatcctgagtgtccctctgcctgcccctgtgcccctccctcttcatcgacatcagcccttgggagctcatcagaccctttgtcttccccgccccagttggcagccaaggaggcaaagctgcgtgacctggaggactcgctggcccgtgagcgcgataccagccggcgcctgctggctgagaaagagcgagagatggcggagatgcgggcgaggatgcagcagcagctggacgagtaccaggagctgctggacatcaagctggccctggacatggagatccatgcctatcgaaagctgctggagggcgaggaggagaggtgaactaggaggggtctacagaacttgtcaggggcctctggccgcaactaccatgactaaccccgcaccgtgtctccaccttccccaggctgcgcctgtcccccagccctacctcgcagcgcagccgtggccgcgcctcctcccactcatcccagtctcagggtggaggcagcgtcaccaaaaagcgcaagctggagtcttccgagagccggagcagcttctcgcagcatgctcgcactagcgggcgtgtggcggtagaggaagtcgatgaagagggaaagttcgtgcggctgcgcaacaagtccaacgaggtgggcctgtgaaccagggtggtcttttcagtggctgggagttcttggttctcgtggagcatctgtctccctatctgagaatttggagtgtgtggtagtcctgtcatctttaaattgttgggaagatgcatgatatagggatgggtgacccttgagccaatagtctaggtttgaatgccagaggtagtggtggcaagcctgtctttcttttctttttctttttctttttctttttctttttctctttcttctctcttttttttttttccgatggggtcttgcccaggttggctttgatctccctagattaagctgttcccctgcctcagcctccatagtagctggaactgcaggcgcacactggcgcccagcctacctaagctcctgagtgagataatccaagagtcggttgaactccctgtcctccttcctccttcctccttcctccaccctacttcaggaccagtccatgggcaactggcagatcaggcgtcagaatggtgacgatcctttgatgacctatcgcttcccaccgaagttcaccctaaaggctgggcaggtggtgacggtgagtggaagggcacttgggactctggctggagtggagaagttggcctcaggacaggagcattaaaaataagcacatctcttaaaccatcttttcccagatctgggcttcaggagctggggccacccatagcccccctactgacttggtgtggaaggcgcagaacacctggggctgtgggagcagccttcgcaccgctctcatcaactccactggagaagtgagtatgttgcagccggtagcttgctggacaaggctccccctggtggccataatgggaactagctacctccaacccaagggaacctgccttgggtttaggatcgctttcctgagcccaagtcccacccagtaagcaagccagaagtctccccagtagaataatgggtggaagtcagccagtgagtgttaatagcagactccagcttacagagcaccgagctctcagttgtgtcctttttgcgcgtgcgtgcgcgcgtgtgcacatgtgcatgtgtttatccttagtccccagcatcagaggttggacaaggttgtataaaggcccgggacagttctaagtggttactatgggtagacaggctgcacagccctcaccccctgactcttgggcctgggcttatgtccccacaggaagtggccatgcgcaagctggtgcgctcactgaccatggttgaggacaatgaggatgacgacgaggatggagaagagctcctccatcaccaccgtgtgagtggcagccgccgctgaggcccagcccacaagggtagccctgccagcctagggcagctctcccacctccatgccaaagtcttttcattaaagaatgttttggaatgccacttgctgccctggcctttcttctctctcctccctctaccttgaacagggaacccaggtgtctggtaaggaagggagtggggacttgctgatgccatggatactccacggtggcagtggacagggttctggatttgtgtcctgggaaggggctgggaggacagaggtggccccagccctgcctctcttcctcactcccattgcatgcacacttctctcctctctccttccaccctattgcatgcttctcctcagatttccctgcaacaatgttctctttccttcctgtcccctcacaaattaagtctctccatctttgctcttcctcttgattgccccataagtgtctaagattcaggagagagttaaagccacagctctttatttcgaaggcttcctggctatttcccccatcatgcccttcctcccagccacaggtctcccaagtccccatcacttggttgtctgggtacagacagaggtcaccttcctgcccaatggccaggaagctccaagagcccacagcctaggtgccggtcctaagaagtcagtcccaaactcgctgtccctcctgagccttgtctcccttcccagggttcccactgcagcggctcgggggaccccgctgagtacaacctgcgctcacgcaccgtgctgtgcgggacgtgtgggcagcctgctgacaaggctgccggtggagcgggagcccaggtgggcggatccatctcctctggctcttctgcctccagtgtcacagtcactcgaagcttccgcagtgtggggggcagtgggggtggcagcttcggggacaacctagtcacccgctcctacctcctgggcaactccagtccccggagccaggtgagtcatctctgccctacagcaggacactgctcactgagcagcagggcagggcagcccaagggagtggggtccccctccttgcagtccctcttgcatcctgcccctcctgtctgaaccccagactcgaggtcagggcaaggcccagagtgtgagggttggggagacaaccccctttggggtcagggagggagaggaagggccagccactgctgctcacacctctgccttctcttctctcttagagctcccagaactgcagcatcatgtaatctgggacctgccaggcagggctgggggcagaggccacctgctcccccctcaccacatgccacctcctgtctgctccttaggagagcaggcctgaagccaaagaaaaatttatcccctgcctttggtttttttttttttcttctattttttttttctttttctaagagaagttattttctacagtggttttatactgaaggaaaaactcaagcaaaaaaaaaaaaaatctttatctcaatcctaagtccttcccctttctttccttgtatctgccttaaaaccaaagggcttctctaggagcccagggaaaggactgctttttatagagtctagatttttgtcctgctgccttggctttaccctcatcccaggaccctgtgacaatggtgcctgagaggcaggcatggagttctcttcaccagcctcctccaacagctggcccactgccacgccagctgcagagaaatggggcgcagagaggatgactgagaaggtcaagcccctccccggcactacacgaggccgaggctcctctgcctgccttaccttcttcctgcccttccctagcctggggcgagtggattcccagaggcaaatctgccgtgcttgctttttctatattttatttagacaagagatgggaatgacggggaaggagaagggaagatcagtttgagcctaccttttcccagcttctgagcctggtgggctctgtctcaatgatggagggcaatgtcaagtgggatacagggaagagtgggggacgaaggctcccagagatggggagaacctgctggggctggtgagaagtctagaggtgcggcgattggtggctacagcaaacactaaggaacccttcaccccatttcccatctgcacctctgctctcccctccaaatcaatacactagttgtttccatcccagatgctgtggtgtctctttgttgggtgtgatgtgtgttttcaggggcagacacatgcacacagaggtgccacacattcactatatattcactacccagctataaaggtgtgtatgagggagacttctagaaaggtcagcatatgtggggtgagcgaggggtgtccttcctatccctcatccatccagcaccttttaaaaggggccagcaatccacatgtgcatcagacacaggagcacagagagacggagggtagagtaggggccagaagtagcagagcttcccttgctgcccctgtagtcgcagggctctggatgctgtgattgcctctgtaggccgagatactcttaggaaaggaaagaaaaggtggggtgtggtgagtttgaggctaatctggtattcacaagaccctgtttcaaaagtctttcttggagcccagcagtggtgatgcacgcctttaatcccagcatttgggaggcagaagcaggcagatttctgagttcgaggccagcctgctctacagagtgagttccaggacagtcagggctacatagagaaaccctgtctcaagaaaccaaaccaaaactaaacaaaagtcttttcctgggagaagagctgggcgttcagtcaaaagtgattgagggctggagcaatgactctgaaatgaagagaacctgagttgggttcccagccccccagtcaagtagctcccactgcctgtaactccagctcgaggacatacaacatgtctccagaatgccaagtctatgtacttcacatatgagcacccaccccacacacatgtacacccgaattcacatccacacacaatcaaacctttttaaatcattgaaccagtcatgctattgcatgcctttaattccagcactccagagtcaggtggatctctgagttcaaggccagcctgttttacataacaagttccagcaaccagggctttataggagagaccctgtctcaaaaacaaaacaaaaaaatcacaacaacaaaaacaaaacaagaaacaaaacccaaagtgattgagtccaagagatgtcttcattggtagagacacgtgctaaacctaaaccccacccctgagacacgcatggtggaaggagagagctaattcctgcacgtgatcttctgacctccatgttgccatatgcagtgtgattccattcttggggagattgaacaaattacttatttttaaaacgaaagagagagagagaacccagctgccactcttcaactgacttaccagaaggaaaaagaaaactggttctcctctaccctgttataaaaaccaaccctaccaactgaatgttcctccattctagatcccatgtgtctctctatccatcctcctgacctctcactctatggtttttttccctgtgttcactccctgtcaactggttgcttgctccacctcttgacctgtggttgactttattaatcttgtttacaataaacagaaagcttttgaattaaaggtgtgtgctagagctgagctacaccaagactagaaacaggtttttccagtgtccagtcttggggttcacaatatgatataacagtgactactaatctcagacagaaaaatgacaatagatcaaagtaagggccaccaaagcccaacttggtgaaccagtgaagtttattgggataactgacagagtagaggtgaggggttaatgaatcaaagatggctgcctcaccaaagctcgcccagcatgggtgacagatagctcaggagagctgggaacctggaggtcagcccacagctgcaggcagcacagcaggtcagagaatgtcctttccaggtgactcagcttccaggcagatcaactagtctctgccctcgagcagcttagtctgagtgtttctgagtagtccttactgcttagatatctcgaggacagagacagccacctggtcagtttcaggaacttcctgaagctattaagttaattactttctgagcttaacaagttatcctgccgggcggtggtggcacacgcctttaatcctagcacttgggaggcagagacaggtggatttctgagttcgaggccagcctggtctacaaagtgagttccaggacagccaagactacagagaaaccctgtctcgaaaaaccaaaaaaaaaaaaaaaaaaaaaaaaaaaacaccaacaacaaaaaaaacaaaaaacaaaaaacaaaaaacaagttatcctagcaagatagagtgtttcatcttctgtcagacaagcaggacatcctgctgctttagacccagtacttttgagacaatgtctcactgtgtatagctggctatcctggaactccctgtgtagacagactcccttgatctcccagagatctacctgtctacctccctagtgctgggatcagatgtgtgggatcaccatgcctggtcctaacattctgtgtgttaataaacttccctgtgcatgtgagagcgtttccccacagaggccagaagaggatgctagatccctcaggttgtatttaacaggcagtgtgatgtggagaatcaaacttaggtcttacacacagtctgaactcttaactgttgagccgattctccagctccaagatggaaggtttaactctcaaaggaaattgctacacattgccccatccacagtaaacaaatgtaattttaaaagtcactttaattatttgagagggccatctgtaggcaggagcacgtttctaacatcctggctgccctggtccatacccagcatggaaaaaaaaaagacatcacgatgtggcccttatctctgtaatcccagcacttaggagactggagtaggaggattgccatgagtttgagacgctgtttcaaacaaacaaacaaacaaacaaacaaacaaaacaaaacaaaataaatacatttaggggcaggctgggggagaggaagaaattaacgaaaggagaaagggctctggaatcacactgaaagtccgtggcatctcctaagctgaggccccacagcctcaggagaagggaacaggaagaggtagaagttggtgagaatccagcccaggtgtgtatcctctgccagcctgccagccctgcacaatggcagcaaggggtaagagaacagttcacgcacggtccactcttctgggatgtacaatgtacatacatgcactttccagctagggcaccagggggcgccaagagtctcatcacgccgcctccccaccccgccccgcctcaggcatcaggaatgggtagggcaggctcagagcagactgggaacctgagaaaggataaagcctgaggccttaccttcacctgcacccacaggtctcaaagccagctcttgccaagcgccaaaggccattaaggcaagtggtaaaataccaaggtaaactggccttgagggtagatccgcagttaccctctgaaacccttggagatagacacaatttagcatttgggcctcaaaggattactttgtctatatttttgttaaagaatgtaatactggcattcattaatttttttattattgtccatgtagtacttggccatgatagagaatacaaaatgaaaaaatagcaatcgagatctcactgtcttatgtatatttactttccaattttcttcttcttcttcctcttcttcttcctcttcctcttccttttccccttccccttccccttctccttctcctccttctccttcaagatttattgtatgtatgtatgtatgtatgtatgtatgtatgtatgtgagtacactgttgctatcttcagacacatcagaagagggcatcagatctcattaagatagttatgagccaggcggtggtggctcacacctttgatcccagcacttgggaggcagaggcaggtggatttctgagttcgaggccagcctggtctacagagtgagttccaggacagccaggactgaacagagaaaaaaaatggttgtgagccattatgtggttgctgggaattgaactcaggacatctggaagagcagtcactgctcttagccgctgagccatctctccagccctacttttttttttttttttaatgttgttcattttaattttctttgttccttttcttttttccttcgagaccgggaatcaaacgcaggtgtcaggcttagtggcaagtgtgcttatcttctgagccatttacctatgtcgttggcttagttctgagccagtccgtctctgcagtaagatatgacaggagaagggtgaggcagtgggtcacattgggtcctagagcagaaagagaccatggctgacacttttgcgcctctcttattttttcttagaggctcatcatatgtctctggctagctttgagaattcactgtgcagttgagggtgaccttgatgccacctctcttccctgagttcgaggctcccagtcaggagccacaccagcacaactggtttccatgatgcttggccccagggctttgtagatgttgcgaaagcccttggctaagcttccgcctcaccctctttgctcttttcctttttattcactctagggggcgctgccaaccttagttgaacatctctagagctgccccactccagacatacagaggtgtggttcaggtcgctccaaacaacggcaggtggacaacagagagcatcacactggctgtggtggcacacacttttagttccagcacttgggaggcagaggcaggtggatatctatgagttcaaggccaactttatctagtgatcaaccttatgcaggccaccagagatacatagtgagaccctgtcttttttcgttttgttttgtttttttcaagacagtttctctatatagccctggctgtcctggaactcactctgtagaccagtcaggctggcctcaaactcagaaatctgcctgcctctgcctcccacgtgctgggattaaaggcaagcgccgccacacccggcttttttttttttaatgtaatactgtttatttaacttcaaaaacatttcagcattctgaacatacaaaaaaataacagaatgttgcaaattgcatttagctccagagggttcttggacttccactgatgcagtagttctttgctttgctgacaacgatgagttctacagtttctttaaaaagtttaaaaagtgcatggtggcgcacgcctttaatcccagcactcgggaggcagaggcaggcagatttctgagttcgaggccagcctggtctacaaagtgaaatccaggacagctggggctatacagaaaaaccctgtctcgaaaaaccaaaaccaaccaaccaaacaaaaaaagtttaaaacctactgcacttaactaaaaaaactccaaacacttctcatgctgtcctacccctcccccatccacaactaagaatgtcaaatgtcagcagaatgctatgccaccgtatacaaaaacaagacaacctggagccaaaggatgctcaccgcagtatcaacaggtccagcctcacagtgcacaccctgagctatgccccctccaaaaggcatcttcccctcagagcctccacgccaaacaaggagcatcaagaatctgtctgggttgttttgttctctttaccaactatagatatgtacagttgaaaactcaggttttctagccaataaccatatagttaacactaccttacgagttgagaacaaaatgccagaaacatcttcaaatgccttgtcacaccaacagccaagtgcactgagtgaggaggactcgagagtgccttttcatttaaaaaatggagttatgtacaactttgatacagcttcagggcactctggacacccacagccacttcatgtaaaccactgacacattgagaaactacaatatgatcctgatcaaattttgtaattaaacctaacaagggcaatagacacaactcaaataagagatgtgtcaatcacagcgctctcctactctaaggtagtcacaaggagacagagcttttattcatcatcttcctcttcctcctcctcttcctcttccacctttatctgggcaactttagcaggccccttggccccctcaaacttccctttagactgacagtcagcgacacccttctcatgcttctccttcagctttgctgccttagtgacgcaggctgcttcactctcactcaagttcttccacatctcacccagattttttttaccacatctccaatggagatgccagggtttgtggatttgatcttggggcagaattcagagcagaataagaaaaatccagatggaggtcctttgaggcatttgggtccttcttcttgcctcttttagctgctatataatctttcatctcccaatcatagcttattttatctgcctttgccatttcatcaaactcttgatttctctttgctagacacggtcttccacctctcagagcacttcttggaaaactccacaaaattgactgcaacctctgggtttttcttcttgtgttcttccctgcgtgtctgcatgaagaaagcataagcaaacatcttgccccttggtttcttggggtcacctttagccatcctggctgtattgtttgctagtctgggcagcgcagggcacgcctttaatcccagcactagggagacacaggcagacagatctcttgagtttgagggcagccagagttacacagagaaaccctgtctcgaaaaacaaacaaacaaacaaaaaacaaacaaaaagaaagaaagtaagggaggacagaaggtaggaaggtaggaaggtaggaaggtaggaaggtaggaaggtaggaaggaaggaaggaaggaaggaaggaaggaaggaagagccgggcagtggtggcgcacacctttaatcccagcacttgggaggcagaggcagggggatttctgagtttgaggctagcctggtctacagagtgagttccaggacagccagggctatacagagaaaccctgactcgaaaaaactaagaaagaaagaaggaaagaaaagaagaaggaaagaaagaaaacggatctgtaattgtaccagaagggcctgaactttccatatgtctttccaaatgccagaattcttgtcaggttttgcaggcaggaaaaacaatatcaatgggaaaggaagggccaggcatgatgtttaatcccagtttaatcccagcacatgggaggcagcagcagaagaatctctaagagttccaggctagcctgggctgaccctgccaaaaacaacaacaatatcaaacacacacacacacacaccaccaccaccaccaccaccactaccccaaaatcaacaggagtaaaatcaataggaaaatgagaactgagatccagctgaaggaggctgggggtttgccagcatcttgaatcagcagacttctggtgtgccaggcaagaggtggtggcacgtgccaagtgagggattgctatagttgagaacttctctgagggctttggggtaccagctgagacagttcctctcagaccatgtttacagactgagggaagcaacagaaacagatttctttgtctctgatggatcttgaaggctggaatcttaggtctctggtggctgaggaaggaatggaatgagttatcctgcctgcggcagctgttaaaggttgagtcctggaagttggtctgcctttggtgagtcttgaagcaagggtatgtgtgagggctgagcgctaaaatcacctgtgcctttcattataaagctcagacgagaaagtgtcatgaagcctaaggtatgtctgaatttactgagaaaccacctggttctcattggctgaatggggtatgcaaataaggtgagacttaggaccaaccagtgaagagccctcaatcttaaaagtttcctgctgtgcgcagttgctgtgggtctgcgcaggcttgtttcagtgccttaggctctgactgccaattctgttcagcaggggtttgtgcggctgggtcttttgtttcctttaagtcagctgctgttttgacagctgtcagcagccagctctttgccccgagggaattcagttccatcagtaagaaagtctggcatcagatgagtttcctatcagggacccatcctcccccaactctcattgtacagtccccaccaaactccaaactaaaatcagcccttctttctttaagttgttggggaattttttttctttgttattgtttgctttgtttttccagacagggtttctctgtgtatccctggctgccctggaactcgctctgtagacaaggctggccttgaactcacagagatccacctccctcttcctccctactgctgggataaagctgtactccaccatgttctcagatgtcttgccaaatctgcgagataagtagctaacacagttggttctgtgagacagagcctcactctgtagctccggctggcctggaactcatgaagatcctcctgcctcagcctcctgagttccgggatttccagcatgagccatagtaagcatatttgtttttcagattaagagagttttctcctctgaagtttatctatctctagctacacatatgcaaacatttaacaaatgatgcttggtatagaagtgtcccaagctttatgaaggtatatatatatatatgtatgtatatatatatacatatatatatatatcttcatgtctcatatatatatatatcttcatgtctcatatatatatatatcttcatgtctcatatatatatatatatatatatatatatatatatatatataaaatgacatgcaatatgatgttttaagatatgtaatcagtgtaaaacaatgatcaagctaattaactgtgggcagctattttttcaaaactgaagggagcttcttactattgaggaagtagatgaaataaggctcaagcagtaaacaaggtctcaggaagctccttaaaccgagaagatccacgaggcaacataagcagtaagaacagctgggcagaagagatttgcagaccctccaggccgtgcacggagctctaggtgtgcaatggtcaggcatgcaacggtcctcagccctaccccagctgggggtggcttttagcttgtgcagctcctttgagtcaccgaagcttctatgaggaactctcctccacgcacttgtaagtaacatcagtaaactcgctggcttattaaagagacttgggggctggtgagatggctcagtgggtaagagcacctgactgctcttccaaaggtccagagttcaaatcccagcaaccacatggtggcatacaaccatctgtaatgagatctgactccctcttctggagtgtctgaagacagctacagtgtatttacatataataaataaatatatatatatatataaagagagacttgggcagaataacttctttctcttgttctttctttctttctttctttctttctttctttctttctttctttctttctttctttctttctttcttttgaaacaaggtctcactttgcagcccatgttaacctgatcttgttatatagaccaggctagccttgagctcacagagatccatctgcctctgcctctgcctcccacttattaggattacagggacgagccaccacgcctggcaacttcctgagtgctgaggctggaagccacagaggtctctttgacccccacatccaacctcgtaacaactgaagggaggcaagagggtagttaggttcaacatgactaaataatgggtgttggttcaagatctggagtctgaccccaagtggtttattttaggcctacttaaattagcaccgcacaatttggtttaaagccttattctggtaatcattaactcaatcccgagttcacaacaaagcattcctaaatagctttaaaaaaaacaaagtgagctaaacacaaaccaggcatgacgacagcgaactctttgtgaggtccacgaagataggttctatagattgagaaaaacaaattaacgataagggtctacgagatgatctggtgctggaaaagtctctggc

SEQ ID NO: 2902 - DNA, 3126 bp, Mus musculus
agtgttcgcgggaacgctgcctcagcctcaacaccagccaacccagatcccgaggtgcgccagcgcccagcccagatctccacgcctgccaggagcgagcttcgccggctcgctgtccccctgagcagcctctgtccttctgtccaagtcccgcgcccttctcgggacccctgcccagcgggcagcactgtcaccctgccggccatggagaccccgtcacagcggcgcgccacccgcagtggggcgcaggccagctctaccccactgtcgcccactcggatcacccggctgcaggagaaggaggacctgcaggagctcaatgaccgcctggccgtgtacatcgatcgcgtgcgttccctggagaccgagaacgcggggctgcgccttcgcatcactgagtctgaagaggtggtcagccgagaggtgtccggcatcaaggcggcctacgaggccgagctgggggatgcccgcaagacccttgattctgtggccaaggagcgcgcccgcctccagctagagctgagcaaagtgcgtgaggagttcaaggagctgaaggctcgcaacaccaagaaggagggggacttgttggctgcgcaggcccggctcaaggacctcgaggctcttctcaactccaaggaagctgccctgagcactgctctcagtgagaagcgcacattggagggcgagctccatgacctgcgggggcaggtagccaagcttgaggcggccctgggagaggctaagaagcagcttcaggatgagatgctgaggcgagtggatgctgagaacaggctacagacgctgaaggaggagcttgacttccagaagaacatttacagcgaggaactgcgtgagaccaagcgccggcatgagacgcggcttgtggagatcgataacgggaagcagcgagagtttgagagccggctggcagatgccctgcaggagctgcgggctcagcatgaggaccaggtggaacagtataagaaggagctagaaaagacatactccgccaagctggataatgccaggcagtctgctgagaggaacagcaacctcgtgggggctgcccatgaggaactgcagcagtctcgaatccgcattgacagcctctcggcccagctcagccagctccaaaagcagttggcagccaaggaggcaaagctgcgtgacctggaggactcgctggcccgtgagcgcgataccagccggcgcctgctggctgagaaagagcgagagatggcggagatgcgggcgaggatgcagcagcagctggacgagtaccaggagctgctggacatcaagctggccctggacatggagatccatgcctatcgaaagctgctggagggcgaggaggagaggctgcgcctgtcccccagccctacctcgcagcgcagccgtggccgcgcctcctcccactcatcccagtctcagggtggaggcagcgtcaccaaaaagcgcaagctggagtcttccgagagccggagcagcttctcgcagcatgctcgcactagcgggcgtgtggcggtagaggaagtcgatgaagagggaaagttcgtgcggctgcgcaacaagtccaacgaggaccagtccatgggcaactggcagatcaggcgtcagaatggtgacgatcctttgatgacctatcgcttcccaccgaagttcaccctaaaggctgggcaggtggtgacgatctgggcttcaggagctggggccacccatagcccccctactgacttggtgtggaaggcgcagaacacctggggctgtgggagcagccttcgcaccgctctcatcaactccactggagaagaagtggccatgcgcaagctggtgcgctcactgaccatggttgaggacaatgaggatgacgacgaggatggagaagagctcctccatcaccaccgtggttcccactgcagcggctcgggggaccccgctgagtacaacctgcgctcacgcaccgtgctgtgcgggacgtgtgggcagcctgctgacaaggctgccggtggagcgggagcccaggtgggcggatccatctcctctggctcttctgcctccagtgtcacagtcactcgaagcttccgcagtgtggggggcagtgggggtggcagcttcggggacaacctagtcacccgctcctacctcctgggcaactccagtccccggagccagagctcccagaactgcagcatcatgtaatctgggacctgccaggcagggctgggggcagaggccacctgctcccccctcaccacatgccacctcctgtctgctccttaggagagcaggcctgaagccaaagaaaaatttatcccctgcctttggtttttttttttttcttctattttttttttctttttctaagagaagttattttctacagtggttttatactgaaggaaaaactcaagcaaaaaaaaaaaaaatctttatctcaatcctaagtccttcccctttctttccttgtatctgccttaaaaccaaagggcttctctaggagcccagggaaaggactgctttttatagagtctagatttttgtcctgctgccttggctttaccctcatcccaggaccctgtgacaatggtgcctgagaggcaggcatggagttctcttcaccagcctcctccaacagctggcccactgccacgccagctgcagagaaatggggcgcagagaggatgactgagaaggtcaagcccctccccggcactacacgaggccgaggctcctctgcctgccttaccttcttcctgcccttccctagcctggggcgagtggattcccagaggcaaatctgccgtgcttgctttttctatattttatttagacaagagatgggaatgacggggaaggagaagggaagatcagtttgagcctaccttttcccagcttctgagcctggtgggctctgtctcaatgatggagggcaatgtcaagtgggatacagggaagagtgggggacgaaggctcccagagatggggagaacctgctggggctggtgagaagtctagaggtgcggcgattggtggctacagcaaacactaaggaacccttcaccccatttcccatctgcacctctgctctcccctccaaatcaatacactagttgtttccatccc

SEQ ID NO: 2903 - protein, 661 aa, Mus musculus
MPSQRRATRSGAQASSTPLSPTRITRLQEKEDLQELNDRLAVYIDRVRSLETENAGLRLRITESEEVVSREVSGIKAAYEAELGDARKTLDSVAKERARLQLELSKVREEFKELKARNTKKEGDLLAAQARLKDLEALLNSKEAALSTALSEKRTLEGELHDLRGQVAKLEAALGEAKKQLQDEMLRRVDAENRLQTLKEELDFQKNIYSEELRETKRRHETRLVEIDNGKQREFESRLADALQELRAQHEDQVEQYKKELEKTYSAKLDNARQSAERNSNLVGAAHEELQQSRIRIDSLSAQLSQLQKQLAAKEAKLRDLEDSLARERDTSRRLLAEKEREMAEMRARMQQQLDEYQELLDIKLALDMEIHAYRKLLEGEEERLRLSPSPTSQRSRGRASSHSSQSQGGGSVTKKRKLESSESRSSFSQHARTSGRVAVEEVDEEGKFVRLRNKSNEDQSMGNWQIRRQNGDDPLMYFPPKFTLKAGQVVTIWASGAGATHSPPTDLVWKAQNTWGCGSSLRTALINSTGEEVAMRKLVRSLTMVEDNEDDDEDGEELLHHHRGSHCSGSGDPAEYNLRSRTVLCGTCGQPADKAAGGAGAQVGGSISSGSSASSVTVTRSFRSVGGSGGGSFGDNLVTRSYLLGNSSPRSQSSQNCSIM

SEQ ID NO: 2904 - DNA, 1536 bp, Mus musculus
accgggtctttccggaactcctgagggcgcaaggccttgctctctctggcccagccatggggaacgcggagggccgcaacaccaagaaggagggggacttgttggctgcgcaggcccggctcaaggacctcgaggctcttctcaactccaaggaagctgccctgagcactgctctcagtgagaagcgcacattggagggcgagctccatgacctgcgggggcaggtagccaagcttgaggcggccctgggagaggctaagaagcagcttcaggatgagatgctgaggcgagtggatgctgagaacaggctacagacgctgaaggaggagcttgacttccagaagaacatttacagcgaggaactgcgtgagaccaagcgccggcatgagacgcggcttgtggagatcgataacgggaagcagcgagagtttgagagccggctggcagatgccctgcaggagctgcgggctcagcatgaggaccaggtggaacagtataagaaggagctagaaaagacatactccgccaagctggataatgccaggcagtctgctgagaggaacagcaacctcgtgggggctgcccatgaggaactgcagcagtctcgaatccgcattgacagcctctcggcccagctcagccagctccaaaagcagttggcagccaaggaggcaaagctgcgtgacctggaggactcgctggcccgtgagcgcgataccagccggcgcctgctggctgagaaagagcgagagatggcggagatgcgggcgaggatgcagcagcagctggacgagtaccaggagctgctggacatcaagctggccctggacatggagatccatgcctatcgaaagctgctggagggcgaggaggagaggctgcgcctgtcccccagccctacctcgcagcgcagccgtggccgcgcctcctcccactcatcccagtctcagggtggaggcagcgtcaccaaaaagcgcaagctggagtcttccgagagccggagcagcttctcgcagcatgctcgcactagcgggcgtgtggcggtagaggaagtcgatgaagagggaaagttcgtgcggctgcgcaacaagtccaacgaggaccagtccatgggcaactggcagatcaggcgtcagaatggtgacgatcctttgatgacctatcgcttcccaccgaagttcaccctaaaggctgggcaggtggtgacgatctgggcttcaggagctggggccacccatagcccccctactgacttggtgtggaaggcgcagaacacctggggctgtgggagcagccttcgcaccgctctcatcaactccactggagaagaagtggccatgcgcaagctggtgcgctcactgaccatggttgaggacaatgaggatgacgacgaggatggagaagagctcctccatcaccaccgtgtgagtggcagccgccgctgaggcccagcccacaagggtagccctgccagcctagggcagctctcccacctccatgccaaagtcttttcattaaagaatgttttggaatgcc

SEQ ID NO: 2905 - protein, 460 aa, Mus musculus
MGNAEGRNTKKEGDLLAAQARLKDLEALLNSKEAALSTALSEKRTLEGELHDLRGQVAKLEAALGEAKKQLQDEMLRRVDAENRLQTLKEELDFQKNIYSEELRETKRRHETRLVEIDNGKQREFESRLADALQELRAQHEDQVEQYKKELEKTYSAKLDNARQSAERNSNLVGAAHEELQQSRIRIDSLSAQLSQLQKQLAAKEAKLRDLEDSLARERDTSRRLLAEKEREMAEMRARMQQQLDEYQELLDIKLALDMEIHAYRKLLEGEEERLRLSPSPTSQRSRGRASSHSSQSQGGGSVTKKRKLESSESRSSFSQHARTSGRVAVEEVDEEGKFVRLRNKSNEDQSMGNWQIRRQNGDDPLMYFPPKFTLKAGQVVTIWASGAGATHSPPTDLVWKAQNTWGCGSSLRTALINSTGEEVAMRKLVRSLTMVEDNEDDDEDGEELLHHHRVSGSRR

SEQ ID NO: 2906 - DNA, 83148 bp, Homo sapiens
  misc_feature (1)...(83148): n = A, C, G or T/U
gggaggcggaagttgcagtgagccgaaatcgccccactgcactccagcctgggtgacaaagcgatactgtgtctcaagaaaaaagtgtcagctgggcgcggtagctcacacctgtaatcccagcactttgggaggccgaggcgggcagatcacaaggtcaggagttcgagaccagcctggccaacagtgaaacccccgtctctactaaaaatacaaaaattagccaggcatggtggtgggtgcctgtaatcccaactactcgggaggctgagacaggagaatcactcgaacctgggaggtggaggttgcagtgagccaagatcatgccactgcactccagcctagcgacagagcaagactctgtctcaaaaaaaaaaaaaaaagaaaaagaaagtgtcttccagtcagtgtgaggcctaagcatgtgaaatggggtctgtttgtgtgtatatggggtggatagcacttgccagggggcaggaagcaagagtcaggggctttggttacacatgctcctcgttacctgatctcttatgagcctcagttgactcatcaatgaattgggagttagacatcactagtctgaagacatcccatccaactccaagagggagactggatgctttcagtgatgccttgaatggtcaggccagggactgctgcaagaggtaggcattcagctaatcctagaaagaaggccacgggagagaacaggccactgttaaggagccatgtgaggaagatcttgaaggtggcagagttggctaaagcccagatgtgcactggtggagagtaggggctaaaatcaggacgagaacctgagaaagtagaggggctggctgtgaggaagccaatagagattttagagcagggaggtgaaactttatttatttagttagttagttgagacaaattttcactcttgttgccgaggctggagtgcaatggagcgatctcagatcactgcaacttccgcttcccgagttcaagcaattctcctgcctcagccttccgagtagctgggattacaagcatgcgccatcatgcccggctaatttttgtatttttagtagagatggggtttctccatattggttaggctagtcttgaactcctcacctcaggtgatccacccgccttggcctcccaaagtgctgggattacaggcgtgagccaccgcgcctggccgagggaggtgaaactttacaggctccaagactagtgtccctggaaggcagaggagccttgggctgctctgttgggttctgggcccctggccgcaagtttctgtatttcctgatctctagtactctgatcccgggtgttccagcttgacggctctgctctgatgctgggtccaatgcctctgatcgtatctctgtccatccttctcattcccacccaggtactatcgtggtgcagtgggggccctcctggtgtttgacctaaccaagcaccagacctatgctgtggtggagcgatggctgaaggagctctatgaccatgctgaagccacgatcgtcgtcatgctcgtgggtaacaaaagtgacctcagccaggcccgggaagtgcccactgaggaggcccgaatgttcgctggtgagagcctgccactacccaggctgactcctccaagcttagcccacctttcccttgcagtctcccagcccctgcccccacccatagagcccctagcctggccttcctccatacagtcctctaccccatcccctcttcctcaggatttcccagcacttcccctttgggaccctgtgtctcccatgatgtcccaccacttgccctgagattgtctttattgattttttttttttttttttttttgagaccgggtctcaatctgttgcctaggctagagtgcagtggtgcgatctcggctcgctgcaacttccacctcttgggttcaagcaattctcatgcctcagcctcctgagtagctaagactacaggtgtgcgccaccatgcctggctaatttttgtatttttagtagagatggggtttcatcgtgttgaccaggctggtctcgaacccctgacctcaggtgatccagctgcctcggcctcccaaagttctgggattataggtgtgagccactgtgcccggcccgtagttaattttaaggcagccccaccctgtaatgctcaaagatcctatggagaggataggcttcccaggagttttctgagtttagaggcagcacaatatggtggttaagggtgttctggagtcccatggcccagtctcccatctgctcttggccagttactaaatgtgggacatggagcaatttccttattctttttctttttctttttttgagaggagtctcgctccgtcacccaggctggggtgcagtggcacgatcttggctcactgcaacctccacctcctgggttcaagcaattctctgcctcagcctcccgagtagctgggattacaggtgcccgccaccatgcctggctaatttttgtatttttagtggagacggggtttcaccatgttggccaagccggtcttgaactcctgacctcgtgatccacccacctcagcctcccaaagtgctgggattacaggcgtgagccaccgcacccagccccttatttgttttctttgtgtttctggattcagttttctaaatgaacctaccttgtaagttgttttaaggattaaatgatctgctacatgccaagagtttagcacatggcaaatgtatatagcaaacattaatattattattattattgcctttgactcccacaattaatggtgtgtttcccttcctggcagaaaacaatggactgctcttcctggagacctcagccctggactctaccaatgttgagctagcctttgagactgtcctgaaaggttagagcctacctttattctgcacccctattccatccccgtggcttctacaggcagcagtaggaatgcagacactcagccctcaccccagctaatttctcagctcctctgtgggtcctggcaccactgcctgtccccctcagtccctccccagtgcctcccactcagtctggagctcagggagggaacaggccacactccccatggggctgactcttggttccttctccacccaagtaagtagaagggacccctatgtccacacttcatttccttcctgcaaaacctcctgcaagtgtggccaccccccatgctcagaaggggcatgcagtatgtatgggggggttggggagaagggagcatgggctctaaatcttctggcctgatcactgccctctgccctcccagaaatctttgcgaaggtgtccaagcagagacagaacagcatccggaccaatgccatcactctgggcagtgcccaggctggacaggagcctggccctggggagaagagggcctgttgcatcagcctctgaccttggccagcaccacctgcccccactggctttttggtgccccttgtccccacttcagccccaggacctttccttgccctttggttccagatatcagactgttccctgttcacagcaccctcagggtcttaaggtcttcatgccctatcacaaatacctcttttatctgtccacccctcacagactaggaccctcaaataaagctgttttatatcaatgcctggtcattccactgcctcccgtctgttcctccctcttctccttgtctgtgcctccccttcaactttggcccctcctctgagtccctaatccccttcctctgtcctccccaccatacctactgcccctcagggccagctgcctctggagttctgtggtctggggacagtgccaaggggataggaggtgcctgcccttccctctgccaacccccagggcaggtgggggagggaggagagcatggaggggagggggtatatctggaaggcgagacaaaggaaaccatcggcgggcaccatctggtgctgagggccctggtgccaacaactgaggtcactccaatgccaggggcaaggggaggaggcagcgggagatacaaggggagaagagggagtgggggccagtcctgtaggtgtgtactggggaaggggtttttaagcctgagaggtgcaaggtccaagtcctccatccagtcttttttttttttgagatggagtctcactctgttgcccaggctggggtacagtggtgtgatctcggctcactgaaacctccacctctcgggttcaagcaattctccctgcctcagcctcagctgggattacaggtgcccgccaccacacttggctaatttttgtatttttagtagagacggggttttgccatgttggccaggctgctctcaaactcctgatctcaggtgatccgcctgcctcagcctcctaaagtgctaggattacaaacttgagcccttccagtcttcttcctgatcccaaagaagaaggatggattgaatctggtggggtaaatggggagggtccctgtctcttagctctctgccccctttccatggagcataggagatggctgtccaggtagcatctctgtcaccctgcctcaccttcccctgttcttttttttttttgagatggagtctcactctgttgcccaggctggagtgcagtggcgtgatctcagctcactgcaacttccgcctcctgggttcaagtgattttcctgcctcagcctcccgagtagctgggactataggcatgtgttaccatgcctggctaattttctgtatttttggtagagacagggtctcgctatgttgcccaggctggtcctgaactcctggccttaagcggtccatccacctcggcctcccagagttctgggattacaggcatgagccactgcgcccagtcaccttcccctgttcttcaggtcagggtggaacaaggcctgactgcacctccaaagaagagaagggagtaaatggagagaaaaggcaggggattagagcttggagactcaagcagagctatggagagctgaaagggggagcttaagggtggcaaggaactccagagacatccactactcacaggtgtgtagggagcccaaagctacactagaggaaaccccaagctgcaatccccacccagatcctcccactcaccccaagatggcacagacttacatgcagagaacgaagacagagccttaagtaatagtacttttaataaaattaagttcttaatagcacatttaatacattaaccctcccccttcttggtttctctgcattttgtgcaacatcactttgacttgattattcttgggtctgttttatttcccgcttttattttgcttttgaaatctttttccttggtggatttgtacgtgtcttcactagatgcctcaaattaagtctgaccacaatcctactctactttctacagtggagagaccatcctccctgccccagggctgtctccacccacccccccttccccacccgcaccctcgagtggggaaggggaagccctccccaccccagacgctaccatcccaaactagcggggtttctaggacaaaaagagcagggggaatctgtccctaggtggggcgagaagagtaaattgggtagagggagatgtgtttggggtctagggccagggagggggatggcagagtcattggtgtaatgaagcaggctcctcctgccaaaaggagagccaaggggcccctccaaccccttggataggaggggaaggcccagtgattgcaagctggggttggtagaaggcaagtgctttaaaaatgttgatttctcacacgcagaagccaagccctccagttttgtgtggggagggcaatgtgttcccaggccagggtacagtagatgacccctacctgaacacatatagatggaggtgaactggagcagagggtcagggttagggtcacccaaagtccctgtgcctttccccagcctctgtgcccatggggatgcctttctcccaggccttcaaggacagtgtttccactccactccgtgggaagtccttcttggaatctaacttttatgagacaagaaagcactttgcaagtaggtgaagaacgagtcagctttaaagaacaattactgagattgttactgctactgctgccatggaggtcaaagctaagtggaaagctggatgggaacaggggtaggggactgatcgcctcagtgctcttgaagctctgaaggtgagaagcgtgtgtgcatgtgtgtctgtttgtggaatgacttcccaggctcttaaatcaatctgtagagaagtggaccgaggtcacacttcaagaaggacttcctcagttaggcctgggggaagcaggcatgggagggtttgagctgggagccccaggaggggacataccacattggagtatgggctgcccaggtactaggggtgcaggtgaatgtgcttggcctcctctgctgcccccaacccagcccctgtcttattgagatgatcagtgtgcatcctttccaagaccctgggaaatgaacccctcatttctttgtcctacaatttaaaaatccaaggattctcagaatcaaccccagcagactggaagctcccaatcttaaactagcaacctgatccaaccctggtatctgaagattgggcaactcagggtggactcagccacttccctcctctatttatcttttccttacaacttttatacattctactggacccaggggccctcaatgctactaaactttaagctatcttaatattgtctactaagtaactagtaattgtttctttctctctctaggattatatgaaataaatttgaattattattattaataattattattttgtagtattcttttcttttaaacccctcggtttctctttttcttctctttctctcttgtttttggttaaaaaaaaatctagatctcttaaatctcacacatctctgagggttcctataggcctgctaggccttaattctggattccccctcctcacttgcccctgcgacagggcaggggaaagtggtgggggacaccccaggatcctcagtccttagtcctacagcttcttcctttcttgttaatccctttctttgtttggctctgccggctcccctgagggggagggggagaggggaggaggagtccatggagtgaaatccaatctactggaagggtcccaggagggaccgggttcccccagctcctctctccaccattcacccccgggatgctcccccaagaaaagcaaatgacattcctccccaaaaaaaaagtgggggaaaaaagcaacgtaaacccaaacatatattaaaaacactttttttttttaagatttaactctgaatacaaatgtatttttttcttcttctctccctacatatattctaaaccttctaaagtttttttatttttttaaggatcactttatcataaaataaaatatccttttcatataataaattacctaataaaaagtctttttttttcatattagcccaggttctttgctacatttatatggtaataaacgcctttattaaaatagaatattaaattataaagaactgctttttttttttttttttgctatttttgttttctctcctctgtgttggtcgcctgtctcgctccctctcatgctctctttctctcctctattttgtctctcactattcgtgttttgtgtttgtttctaggtttggctcaattggtaagggtgggattgaatttgctgagccccctagtgtaacagtcttctgcctttgtgggtaaagagtggagagggggagggggacgacagacagacatcccttcttcccacccccctccccacctgccccccggcaaccgagggtgcccatttggtttggtttctattgtacagacatctcaggatggctcacataggcgggaaggagggaagtcgtcacagggcagttttcttggctgtgacctccttccccacccctccctggctggtgttctggaggggaaggctgtggagaggtgttaattctcgacaggaggaaggagaggaggaaatcccctctgcacctccacctgctccatccaggaagaatgggactctggagctttaagtgctcgggtgatcactcagaacagtcccaccccactatttacaaggatctcctgggactcccatccctccatcctctcttggcccggccagcggaaccaggagggtggagagctggtggcagccccaaatgagcaggagggaagcagcaaagggggtgcaaggcctgtaacaatatgtgattctcagaataggccctgctgcccacctccccccagtcctgctttgccccaggctgacccctctttgaagacctggcttctcctcaaccacatcaggtgggacacagactccatgatttgcatggaggattcaagctaataaggattcaagctaataaggattcaataaaggttcaggtcaggttgagaggggtgcagggagtcgggcactgcatgggaggagcagctcttccctccaccagtctctcctcctgcctcacgccctttcctgctcctttaaatagcagacacactactctggcgcccccacttccacaaccagaaaatccagcccaagaactactccctaaatataatgcccatagtgatgaaggtgggggtttgaccctttaccccagtattagtcccctcctcacattttcactgagaatggggatacattccatcaataatttgagatgtttctttggaggagtgggggagagggcctccagatgcctgaagaggaatggagggaccatccaaatattcctccccctacttctccccagaaggatggtgtccccaaagctgggctggtaggggcaggggcagggggaagggaagaaagacaaagacaaggaacaagacagagctgggagtgacagccaccaaaagaaagcaaagcaaagagctggagggaaaggaaagagttgaggaaagggaagatcccaaaggaagggaagataggcggagagagtgaagggaaacactgcaggggacaggggcagagaggaggactcctctccagattcctctagcccagctttgtggggacagatggcttctgagcctttcagccacagaaacgattgacatgcttctctccccaacccctagaagatctatgcaacttctgataggactccaactcccttacactgctggaaactggtgacagtttcccaaacaggatatgggggtggggtgggaggtaaagggtcatgttaggaggtcggaggtcaggaccagagggcttagggattgcaaagagcacctctagatacaggtggtaattctccctctcccttttacccaccccctcctcggaagaaggggtggagtgacacacagcgggggaggtgggcagagggcgtcagaatgccttagtggccacctctggcaaaacaaaagtttctcttagctgcttccagatttaagggtgtgttgaggtatcagagttgtaactctagtaaaattttcagtctggccccctcccaatctttccaggacagggtgaccagaggctctgaaagtggcgcaccctccagccaccactgcctccctccccccttccccagcgagcgagtatctctaagcaccttgcccctcaaatcaccgctttccaaaaggctttagtggaaaacaggtccagggtgggcccagtggagtgggccccggaggcatggggcacggggcttaggagaatattcggatggcttgcgtggctgtgatgtggcagacgggacactctgggtccgtcctctcgcagatgcgtactgcacactccatgcagaacaggttgtgtccgcagggcacaagggcggcagtcacttcgctctcaaagcagaccatgcaatcccgcccgccgccggggctccgcaggccgcccccaccaagtttagagaagccctggagcggctctcccggggggcgcctcgggagtccggccagctcgggtcccgcggaagtggcaggggagcggtgtgcgcccgggggcccagcgcgggccttggcggaagaggaggaggaggaggaggcagaggagaagagcacggaggtgggcgtggcgttctcctggcccgcccacagcggggggctagtctcggccacgccgtagtacacatcctgcttgcccacgccatagcccggaaagaggtacccgccgtagccaaagtccccgccctgctcacccaggcgtggggcctcaaagccagagtccactccgcactcgccgatgcagcccaggctgttctgccggaaggtggagaggggcttgcagccgggctggtgcacccgccaggcgtcggagtagcggctatcgattgctgcgtcggggctccccgccaggaagtcgttttcattgttgtactcgaggatcttgccagtgcgcaccgcgatgtgcgtctcgatctcctcgcgcgcacgctccacgttgcctggggcacccgtgatctcgaacacggggtcgcggtcacggcttggtgtgataatgtatgtgttggtttgctgctggatgcgcttgatggttgcccctttggggcccaccaccagccccaccacgcggtagggcacccgcacacggatggtcacctggccgggcagagcaggagccacaccaaaggcggcgcctgacttgttgcgggaggcacggatcatggagaagtgctccgctgctgagatgatttcccgccgggctgtggccacgtcctcccgtcgccctgtcaccatgaacactggttcctcgcccctcaccggtgtcttgatgtaggtgttggtcttggccctcaaggccttaatcttgcagcctgggatagggcggggaaggagagagacaaagaaacgcacacagcaaggtttgtgctgggaccaataaattcctgatccttacccaaatacctagcctcccaggaacacttcagtctaccctttgaaatgcccactgctgcacacacagtccaccctgacttgaagaaaccatttatcagatctcagatgtgcctaatgtctctctcagccacagatttcaaaatgtactaactttccctgagttccattcagggccctccaaattcattcactcctcaaaacccccaaataatcactgaccctcccatacaagctggtaactcaaatccattcacaaactacactcctttctcccaacatttgctcttccttcaatttctctactgattcctggctactcacaaacttccaaatcacttaatcaccccccacatctgtcactgaccctgatctttccacagaaccccaatgtgctcagtaacctcataatctactcatctgacccttgatcattaaaagtgtcctccaaactacccagggaccactgaagtctatctgctctatgaccgccccacatgccttccactcagtagtttctctcagtgggcctcaaattcatagcgagtttgcagcaacgagtagagtgtaggggactgggaaaggtctgacaatcataagttcaaggaggaaaggaggagtatggagttaaacttctgtgtgagggaacagtgcccaaccccgtgtcactcttgtccccctgtcccctgggggcaagacagctgagctgggctggggctgagtacggtgagggagaggtattttggacccacactcctgctttgaagtagaagtgagttaaagctgggaggttagggaaaggcaggaagagaaagaagaaaaatgagacaaagagagacaaagagggagaaggctagagagaaaagtaagggctattctgtttctaaaagctgccgacctgggggtctggacaagtccctctcctccttacccaccttcctcttccctgctcctagcttcacacagagcttccaagactcatacccttttgggaagcacacgtcacgtgtgtgagttcacacacatgtacctaagaggtgtgcctttatctaaataatacttatggggccaatctaatgtacacttttatacacctctttcacacacacatcaagtccctgtgtttcggcctttcatacatcccactgtccatccccatcctccccagcacacaaacagcacattcctatacacacccgcacccatgactttcacccccaatcacatatagacccactcacacccttctctgagcacaactcactattccccttctctctccaaccgaaaccaagtggtcctacttttctgcctctgccccaaccctccaacctgagacctgaggtgagctcattttttcctccttcctccactccagatggctgcttcttcaacgctggcagattggggggtgaggggaagagagtaggttgggggaccctccctcactttttttgtttgtttttttttgagatggagtcttgctctgtcacccaggctggagtgcagtggcataatctcggctcactgcaacctctgcctcctgggttcaagcgattctcctgcctcagcctcccgagtagctgggatcacaggcacctgccaccacgcccagctaattttttgtattttttagtagagatggggtttcaccacgttggccaggctggtcttgaactcctgacctcaggtgatccacccgcctcggcctcccaaaatgctgggattacaggtgtaagccaccacaccctacaccctcccctcacttttaaaagaccttaagaaggaaaatttgcttgtttcctcttgtcttcagacctcttagcagttatgaagtcctacctgttgtccagcccacatccttgctgctttaatgtcagtaaatgattgttctattttcgaggtatggagggtcacaaaacagtgaactcccctctcctaccatttctactcacatatcgtttgatgggcacctgggttctggccgtaagttttgggtccaaaaacttaaatgagagctaggtatctttagcggttggggttggggtgaggaggacaggccaaggcatcgagtaagaagaaacgctagaggcctggaggtgcaaagctggtggtgggtctcttcctgggttctgcaaccccaaagaagcatctcttgaagggaagacccactgggcttcaccttcctagaggtcaaacagaggagcactaacactgcagcaggaggagggaggttagacaagagggaggacttccatatacttgactgaggggcaggcttatcttttgtgaataaaaatccccttacttttatgagggacaagcccatctgatgcggaggcagaagaggaaagaatgactccattaaattccggggcctcccaagaccacccccacacccaagaaaagatagcaatgtccgtccccacccaattccagggctttggatccccagtttctgacaagaggaaatccaactttctaaatcagaaatctcaagagatggagtgccccagggggatgagggctgtgcaggggagtggcatcttcccctcctccattctggatctctccgtgaaatccccctaacccccagcactcccagtggataaggtgggatgtggagtaggggcccccctggcccgcctccccttttcctctgccagaagctggcctcctcccgcactcccagccggaatgcagctcctctattgttccccactgtgggacagctcctcccccaccccacacctccccagcccagcctctttgcaatttccaaatcctgccccccacactctcctttgagaagccaggagagggaagggtccccaagatcccgtctgctcaatttggaccttcaccaacacccccactcacccacccagggatgctggagcagcagagggtgtggtaccagacatactacgctggattaattctgcaccccctcccaacacacccagacacacgccctccaccaaatttccaggtgaaggtttcttaccccccagcattccccctcctaccctgtcctactctttcactaccagagacccctctctaggcctctggcccaaggccgtggccagcccagaacaaaagccagagagggaagaggagaggtccaagccaggacgtagcacttccttggagacaccccttccaaaaccccagagacaatccaactttggggtgtgggtgaccacaggaccccctcctctcagcagcccccctcaccgcctcttccccaggctgggaccctcccctgggccacacccccttccattcctacactcagcccaacaaagagacagatactcagtctggcttcgagggccaggtctcccccaaagtctgtaactccaggcggctgggggccccagggatgccccctccccagcctaggagcagataccagagtacaggcttctgagtaactctttgcacattccgtcagtttttctggttaggagtggacaccccctcaggacagcctccctggattgggagaccgatcccctcccctttccctcttccagtgcgaggatatttctttgtctaaaggcagagtcctgggggaggaaggatctggagaaccgtcccgactaggggtaacggggaactttgtggcactttgaaatcagggtagggggcgggtccccctttgtggggaagggacagagccggaggcgggcaagaagggaagaaatgaactttccgcgctagggacgagggtgcccccactacagtccctctcagtggtcccggcgccccgcttaccttgcctgcccacgatctcggccacgtgctcggaggtgggcacgggaacacactccgtggtgttgctgctgcccttcaggcgcagctcggcctctttgtagagagcgcagagcttggcgtcgctcgcccctttgggggcggtggggggctggggcgtctgcgctgcgggggccgtcgtcggggcggccgggggcgccgcgggcggcggcggcggcgccggctgcgggggggctgtcggctgcgcgggggcgccgccccccccacctcccccgtcctcgcccgccctgggggcggggggctcccccaaacccaggaggcagagttgatcgagagccagctgaagggcgcgctcgtcttccagcagccctcggtccttagcgcttcccccgaaacatcctagttctccaaagcccccatttctttccattattccagataccactagactaggcatggcgaaacaaaagctgggggagagagagagggagagagagagagagaggtggtggaagggaaaagaggagagaggaggggaggggagaggagaggagggggtgtnnnnnnnnnnnnnnnnnnnnaaacaccctgtaacccgactcccctcgccccagcccccggggtgggggtggggggaaagagaagcaaaaccaagaaagcagatctcctctcctctccgggggtgacggggggcggggagctgcaggatctctgcccccacccctcccgcctcggacctgggagtctctagcccccgctgtccaggcgcccccgttaggctcccgcaccgagccccagtccgggagcggcgctcagtggcccccaatagagcccagccccttccagcgctcaaactcttttgttttaaatgaactggatggagcagcatggaactgacgggaggggggcgcgccgggggcgcccggggcatgccgggagttgtagtttcccgcccttgggggcgcggggacaaattccttgacccgaggaggatagggatgtggccttcggtctttcctcgcagctccggggcaagctaggagtgggatggaagtcgaggtccctaattttttaaggggagggtgcggggagaaggggtagtatgcggaaacagagcgggtatgaagctggctaacgccgcgcgccccctcccaggacccgctcctgccccgcgccggccggtcctgggggcccgcttttttatggaaatgaggagggggggccggggccgggggcggggagccgggagccgtccccgctcgctcactgcggctttctctctcgctcccctctccccgctccctgccgcgctcactctccgcttccccctcccgctctcccagagtcgatcccggagcccggccgcggggagaggttctcggcagagaagacaaagcccgcagcagcgatggggggagagctgggctctgcgtgttgtgggggccaggaaagggtgccaggctggggctggaaccccctggcaaaggatggggtcccctcatccctaaacagcaagccatctcccctcgcccgccccccgcccccccagtctcggagatctcagaggcaccgactgggaggtgagttagttcacgtccttctgctcggtggagggggtcgggagggcggtggagtgatgaagtgcagaggttgaaggagtgcagggacagaactgggggtcggacggagagtgggcaggcaggaaaagtcttaaaggcctggggtgacttaaccgtttggggtgagggccttgagctttggatatgacaggagggaggagagaccaggatggactgggaacccaggcttccttcaggcctgggctgtgaatacagcttggggtgatctgtcctttagcactcatcgtaatttccactctgtttcctccacctctctcccattgaaaacctattcagggccgggcgcggtggctcacgcctgtaatcccagcacttcgggaggcagaggcgggtggatcacctgaggtcaggagttcgagaccagcctgaccaacaaggtgaaacctcgtctctactaaaaatacaaaaattagccgagcatggtggcagacgcctgtagtcccagctactcaggaggctgagacaggagaattgcttgaacccgggaggcggaagttgcagtgagtctagatcgcagagtgagactccgtcccccccacaaaaaaacaaaaacaaaacaaacaaacaaaaaaacccattcagtcccgtttgactccggaaattcggtgagaatgaaaataagtttttaaggcttggagagttaggcacttttagagtttcaggaaggtggagtgtaatgcaattttttcttctccctttaccccatattttctgcatttattttatatcaccctttttatgtctggatctttcccaagggaagaagggatggcactgcagcttgagggctcgaggtcagacttgaagaagaacttccataaagagttttataatagtgggtgggtgagccacagtggtaaggtgtccttttctggagtgacttgaaaaacaaaaatctgaactagtttgtaagataaagtcctgctgagaggcaaggaaacagatgaattgacttcacagacttagcaatgtggggccttgagggctgagctgtttagtccagttccctaaactgtttcttggaaagagtgaatttgcacactaatgggagtgctggaacctgagctgaggatctcagaaggtcggggggtggtgggggcagttggcacactgcagggatttttttcctttgctaggcagaagatccagggaaggagaaccttgactgaggaacccgggagggtcctggagttggggaagtttgccccctggactggggatttaacataagatcaacagtaaaccttattgtgggatttgatgctactgccaccaagcaagagtgaaagaggaagaattagagagacagggccctggagagtgggctatttctgcctcttgtcccctccgtctgccccaggaacctggattgcagagactgtggtactggggaccatggggtctctttgggagaaagtttttgctttgtggaccaggtgactatctttcacataaatagaaatagcaaacagttgcataggtcttattgtgtgctaggcatttttgtggggccaccagctggctgagccttcctgtccccactgaaatgagattccccccagactcccaccctgaacttgcgctgcctctgctttcctcctcactaagctaattaaggcaggaggttaatgaccaaagaagccttggggatttggccagggaggaaaacaaagggcagaaacaagtatgtgtcagtggggagggtccagctgctgaatggggaaggggctggctgaaaggtggggtgggcgaggcagggtccctactggacccacttcgtccctgacccaccaacaagaatgaatcagccctctgggtaagttaatgtccaccctcagggtcccactgggactccagacaaatttccttcacagcagatgtgagcctggcacctggagggcaaaggatatgtgtgcgaatgcagttaggtgtgtggcatggtgtacatgtgagagtgtgtgctgcagatcatgtaggagagtgcccaggtgcagaggaggcccagggtgggcaccttgaggagctggattctcagagtgttttttacgaatccttcgctctctcccggaggctggtggcctcctttgttcaggagaccccctccctcaactgagaaggtagatttctgtatacaggctctccttttccctgcttgcctgatccagaattatggcaatgagagcagaaggtcttacttaaacaatactccccactctctgccttatgaccagaaaggtgtagaggtggcatacttctccctttcaggactttggaggacagcactatgtctctcatcttcatcatggtccccaaccctagctgcccagaacctagcatgcagccctgcccagagcagaggctcaataggggtatgttgagtgtaactgcatttttaaaacttcatggtgtcaggaggaaagagcaggtctccaaagataaacatgctgcttattctgccactttggggagtcatttattgctaagcctcagtttccttatctctcaaatggaaataataagccaaggtctggcagggcatggtggctcgttcctgtaatcccagcactttgggaggccaaggtgggtgaatcacttgaggccacgagttccagaccagcctgggcaacatggcaaaaccctgtctctactaaaaatacaaaaattagctgggcatggtggtgcacacctgtaatcgcagctacttgggaggctgaggcatgagagttgcttgaaccaggaagcagaggttgcagccaagattgtgccattgcactccagcctgggcaacagagggagactccgtctcaaaaaataaaataaaataagccaaggtcctaacacagtgcctggctatcttaggtgttcaatcagttttagtttcctggccctggttgttctccccttgtggttgactttagccagattgtggtcttcatgaattttcattcattcgttcattcattcagccagccacttcctattgagctcctgggatgtgccaggcactggaggagatttattctgacccatcataggtcacttgaagtcacttctaggtctagactcgctgaaataaggtcattctaaacaaacagcaaataattctaaaaataattcctgttaagccctggaatgcaggtgacctctgactctctctctctctctctctctctctctctcttttgtctttcttacacaagccaggcttctggcctcatgcctggggaacaaaggaccctgttgagttgtttagtacatacacacacacaagccaggctgcagggcaggaaaggtgacacagtggagagtccaggattcttgtggaggttgggggaggagtggggtggatgatccagactgtgtgcttgtctgtgtctggagttgtatcccttcttcttccttttttttccttttgagacagagtctcgctctgttgccaggctggagtgcagtggcacgatcttggcccactgcaacctccgcctcctgggttcaagctattctcctgcctcagcctcctgagtagctggcattacagcatgcaccaccactcctggctaattcttgtacttttagtagagacggggtttcaccatcttgaccaggctggtctcaaactcctgacctcaggtgatccgcccccaccttggcctcccaaagtactgggattacaggcgtgagccaccgcgcccggccaggaattatatcccttctttcctctgagcacttctgggcacctgttatcactgtctgaacactcagtaccaagggatgggggtgcacacctaacacttgcccctccttagccctattctcagaaccctgagggagggagacacaggaggctgccaccaaggctgccttaccaagcagactggcccttaaagaggtcatctcccccatcttcatacttctctcaggatgccttctctatctgtcctagttagctgagccttctctcccatgtataatgagattttcccattttcttttctttcctttttttttttttgtggggggacagagtcttgctctgtcacccaggctggagtgcagtggcgccatctcggctcactgcaacctccgcctcccaggttcaagcagttctctgcctcagcctcctgagtagctgggattacagatgcctgccaccacgcccggctaatttttgtatttttagtagagacagggtttcatcatgttgcccaggctgatcttgagctcctgaccttgtgatccacccacctcagcctcccaaagtgctggaattacagtcgtgagccatcgcgcccggctcccattttcttttcttttcttttctttttttgagacaaggtcttgctctgtcacccagactggaatgcagtggcttgatcatggctcactgaagccttgatctcccaggataaagtgatcctcccacctcagcctctccaatagctgaaccacaggcacatgctgccatacccagccaatttttaaattttttgtagagatgagatctcgctatgttgcccagtctggtcttgaactcctggcctcaggtgatcctcccacttcagcctcccaaagtgctgcgattataggaatgagccaccatgcccagcctttctttccttttttttctttctttcttttttttttttgagatggtgtctcgctcggtcaccaggctggggcgcagtggcaccatctcagctcactgcaacctccgcctcctgggttcaagtgattctcctgcctcagcctcctgagtagctgggactacaggcgcgcaccaccacacccagctaatttttgtatttttagtagagacagggtttcaacatgttggccaggatggtctgtatctcttgacctcgtgatccgcccgcctcggcctcccaaagtgctgggattacaggtgtgagccaccagcccggccccagcctttttttccttaataaccctttcttgtgggaagtctgtgttgctatctaaccaccgtcctttctgctaagagtccagacagttttctctcctttgatagaatgcactcaacacattaattaatttaatttaatttttttgttttcttttttttaaccttataccagcagtccaaacctcactagcattaattaattttaatcaatgagaatatggaataaaattctgtaggccacacaaaagaaatgtgagacttgatccccaccctcggtaagacacagaaactggcctgcatgacccagagaacatgggtaagcaggattaaatgtaaggacaaaatggtctttggggtagagcacggtggctcctgcctataatcccagcaccttggggccaaggtggaaggattgcttgagcccaggagtttgagaccagcttgggcaacaaagtgagacctcatctaatttatttttattttattttatatattttttgagacggagtctcgctctgttgcccaggctggagtgcagtagcacaatctcagctcactggagcctctgcctcctggattcaagcaattctcctgcctcagcctcccaagtagctgggattacaggcatgtgccaccacaactggctacttgtttttgttatttttagtagagatggggtttcaccgtgttagccaggatggtctcaatctcctgacctcatgatccacctgcctcagtctcccaaagtgctgatattataggcgtgagccaccgcacccagcctattttattttattgattaatttatttgtttgtttgtttattttgagccagggtcttgctctgtcgtccaggctataatactgcggcatgatcttgactcactgaaacttcgaactcccaggctcaagtgagcctcccacctcagcttcctgagttgtttggtctacaggcatgcgcaccctgcctggctaatttttgtattttttgtagagatggggttttgccatgttggccaggctggtgtcaaactcctgagctcaagtgatccgcctacctcagcctctcaaagtgctgggattgcaggcatgtaccaccatacccaacccttgtttatttatttatttatttatttatttatttttgagatgaagtcttgctctgttgctcaggctggaatgcagtggtgtgatcttggctcactgcaacctctgactcctgggttcaagcgattctcctgcctcagcctcctgagtacctgggattacaggcgcgcacccccacgcccagctaatttttgtatttttagtagagacggggttttaccatgttggtcaggctggtctcgaactcctgacttcatgatctgcccgccttggcctccattgcactccagcctgggcagcaagagccaaactccgtctaaaaaaaaaaaagaaagaaagaaagaaagaaagaaaggtctttgggactcggagggctacagaggttgggggagagaggtcactgtgagtccttctgttgttgtggatctgatctccaagggctttgcaggctcagcctaggtttggagatggacaaacgtctctgcttctcccctgggactacactggcacttcctctgccaggtcccctgcattgtctgatttccccagggagagtagctcagaggggctggggtggagtctgggccccttaggacagctggttgatgaggcccctctgggacttagggctggacccaggcgtccaggaggcgggtgatactggagctgtgacagttggtccccagattccacacccagtggcgccagctctggtttcgagctgcggtgagggagggggaggggcacctggtgccagccaggggctggatgctgtcttggggcagggagggggaggcagtaaacatgtccttcctaggttgttgaggattttctaattgccctctctgtgccaggcactgtgcaaggtactaacgagattctgcaatgcaagatgcagtctggcacagatgaattgacagcatacagtatagaattagaatgtcagagctggactagaagttgaatgaatgaatgagtaggggaatgagtgaatgaatagttcatcagttacctaatgcactcattttacagaggagactgaggcccagagaacccgagtcctgtgactcccttctgctttctgatctgtcatgcttcctttttcaggaaagggaagcaaaaggcagagagaggggtgggaagggacttgacgtttcctgagtgcatgtttggtgccaggctctgttctggtcttttcagacttgatgtaattgtcttcacaattctgtgaagatggacttggtgtctctgcttcacatgaagggacctgaggttcagagaggctaagtaactttcctaggtcacagagctggtaagtagagactttagtgttcaaaaccagagcagtctgaccccagagcctgggaccccagaggtagacagtgatactcagtgagtgcttggagcccacagagggtggagggagtggttcctggatgaagtagatctgaagggtgggtgaggttcatttgaaaggcgagaattggaggcatgtctggaagttggtgctggaggtgcccagggagacttgctggttgagcaggtggccggcttgcatggatcttggggagcaggggacaggttcaaagaaacacatctttaaacattggccaccaggtggcgccgcaggccaattcctagaagcggctccagcctcagcgccctcactagggcccaggtatgacttcgctgctcagccagggctccatgctcggcttgcttcctcaggtgtcatctccagcttccgcttgcccctggcttctggcatccaacacatgggggataatgatgctaccagtcgtttcctgactcgggacgaacacccaggtagctgagacctgggaatccccgtgggtctgagcagctcccccggtcacccggagacccctccagtcgcctaaacctggcttcatgtccagcgcccttctgagtttctgggagacactgttcagaggacaggctgaggaaacaggcatttgagtccaactgacctgggtctgaagggaaataataatatctaccttgtaaggatttaaaacatttcatctatggccaggtgcggtggctcacccctgtaatcccagcactttgggaggccgaggcgggcagatcacctgaggtggggagttcgagaccagcctgaccaacatggagaaacccggtctctactaaaaatacaaaattagccgggcatggtggcgcatacctgtaatcccagctactcaggaggctgaggcaggagaatctcttgaacctgggagacagaggttgcggtaagccaagatcgcgccactgcactccagcctgggcaataacagcaaaactccgtctcaaaaacaaacaaacaaacaaacaaacctttcatccaataaatatctatcaaatacatgctgtgtcaggaactattctaggccctgaatacatcagagaacaagatagacaaggtccctacttgcacggagctgatactctactggggaggaaggcagacagtagtcaagtagataatgtactttctggtagtgatcatcactgcaaagaaagataagccaggatatgggggcagaaaggtttgaggtggctaatttagaaaggatggtcatgctatctggccaggacaacatagtgagaccccatctctacaaaaaaaaattttttttttttgagatggagttttgctcttgttgcccaggctggagtgcagtggcatgattttggctcactgcaacctccgcctcctgggttcaagccattctcctgcctcggcctccctagtagctgggattacaggtatgcatcaccacaccgggcaaatttttgtatttttagtagagatggggtttcgccatcttggtcagactggtctcaaactcctgacctcaggtaatccactcaccttggcctcccaaagtgctgggattacaggcgtgagccacagtgcccagccaaaaaaaattttttttaattagccaggtgtggtgagttgctcttgtagtcttagctacttaggaggctgagataggaggagcacttgagttcaaggttacagtgagctgtgatcgtgccactgcactccagattgggtgacagagcgagatcccatcactattcaaaaatttacaaaaaggctgggcacagtggctcctgtctgtaatccaagcactttgggaggccgaggcaggtggatcacttgaggtcgggagtttgagaccagcctgggcaatatggcaaaaccccgtctctacaaaaaatacaaaaattagctgggcgtggtggtgggtacctgtaatcccagctacttgggaggctgaggcaggagaattgcttgaagttgagaggtggaggttgcagtaagctgtgattgcaccactgcactccggctctagacaacagagcgagactccatctcaaaaaaaaaaaaaaaatgtgatcatgaaatgcccctgataaaagcaccatcttagttccccgttgccatcagattcacactccttagtgtggtgatgatgtccctcttgtcctggccagctcctgcccacctctccagcccatcctgctcctccttcccttactccagccacatggactttctcctttctttcttttcttttctttttttcttttttttttttttttgagacagaggagtcttgctgtgtttatgctggagtgcagtggtgcgatctcggctcactgcaacttccgcctcctgggttcaagcaattctcctgcctcagcctcccaagtagctaggattacagatgcctgccaccacgctcagctaattttttgtattttttgtagagacagtgtttcaccatgttggccaggctggttcgaactcctgacttcaggtgatctgcccaccttggcccccccaaagtgctgggattacaggtgtgagccaccactcccagcccacatggactttctttcagggctttggcctgtgctatcatcatctgctattccctgacccttcacctggctaatgtttgttcatcttgcaggactcaatttatatgtcaattttttttttttttttttttttttttagataggttctggctctgtcacccaggctagagtgcagtggcacgatcttggcttactgcaccctctgcctcctggctcaagccatcctctcacctcagcctcccaagtagctgggattacaggcgtgcgccaccatgctcagctaatttttgtaatttttttagagacagggtttcaccatattgcccaggctgatctcaaactcctgaactcaagtgatctgcccgccttggcctcccaaagtgctgggattactggtgtgagccactgcgtccaactacatgtcactttttcctagaaatctcccctggtcacttctggatatcccttacaattcatcatgctctattgtaactgtatgtttacacttctgtttccccagtacacgggaagctctttgagaacagggattggatctagtctactcctgtattctcagcacccagcacaaagtaggtgcttaataaatgtttgctgttcggaaattgtgtatgctcatccatccttccctcttgaacaccctctcacccatatattgccaaatattccacttctccctctgcttttctggcatacctttcactcccacatccagctccatctctcctctccccttccatccccactcctacacctgggccctcgcagcctgccctcatctgatctccaaggggctactgtctgcatgaggtttagtatatcctgtcactgggttcctccactctccagcacctggtctggggccgtacacagcaggaactcaatagtgttgctaactcactgacatgacttggtggatggctcagaagggatccctaagcatgcatacacctcctctcagtcaccgctagtaaaatgagtctatcacgagaagtatacatgggtcacatgctcctggccaggccctgtctatcctctagggctttgcacacactgttccctctgcctcgaaccctctctctcattttggctatctcccactcatccttcagacctgagctgaagtggaggagtcatgtcttctctttttttgagacagtcttgctgtgtcacccaggctggagtgcagtggtgcagtcttggctcactgcaacctctgcctcccgggttcaagtgattcttctgcctcagcctcccgagtagctgggactacagaggcgtgccaccatgcctggctaatttttgtatttttagtagagacagggttttaccatattggccagggctttggcctgtgctatctcaaactcctgacctcgtgatctgcccaccttggcctcccaaagtgctgggattacaggcgtgagccaccgcacctggccaaggaggagttgtgtcttctgagaggccttcctgaccatgctgatggtcttacatatacccccaagtctgctgtggcactcagtatttacccatttgttagcacttagctcctagtgctttctttttttttgatggggtcttgtgctgtcacccaggctggagtgcagtggcatgatctcggctcactgcaacctccgcctcctgggttcaagtgattctcctgcctcagcctcccaagtagctgagattacaggcgtttgtcaccacaaccagctaatttttttttttttttttgagaacggagtcttgctctgtcgcccaggctggagtacagtggcgtgcactcactgcaacttccgccttgctggttcaagtgattctcctgcctcagcctcccaagtagctgggactacaggcgcacgccaccatgcccggctaccggctaatttttgtatttttattagagatgtggttgcaccatgttggccaggctggtcttgaactcctgacctcaggtgatctgtcctcctcagcctcccaaagtgatgggattacaggcgttagccactgcacccggccaactcccagtgctttcaaagccagtttgtgtgttcatgttactcggactgatcgctctccatgaataagggatgtgtctctccaaaacctagcatataggaggcattcaataaaaatttattgagtaaatgattgattgaatgaatgaaaggaataaaatgaccatgtgatactgaatgagtcactccccatctcagtttcctcttctcaagtgattctcctgccttagcctcctgagtagctaggattacaggcacctgccaccacacccagctaatgctttttttttttttcttttttgtatttttagtagagacggggtttcaccaggttgggcaggctggtctcgaactcctgacctcaggtgatccacccgcctcggcctctcaaagtgctgggattacaggcgtgagccactgcgcccggtgtccaagacacttctaacgccaacatccttgtactaggccctcttccagctcccccaggagtctgggggttagaggtcaggctgctccccactctattacctccccacacttctaattaattcttgtgttcagtcccagaacctggagagttacactcaggctgcctggtcctgcttattgcccatatcctagaggcacttgcatgcccttccaggcgggtaactgtacatgtctctcccaggcagccttcacagactactcaggggtatggattggctccagctctgacactcagacctgagcagaggcgtgatctactctggcctcctgtgtttctgtgccccaccttcccacactgcccagggctccctgagagtgatgctgagtctagtctcagcttttatgttgctttgcttttgacctctgacccaacacatgcctcctttccctctgaagtcttgattttctccctggcttttctccaccttctgggtgttcctttttggccttctttgcccatctctcctcctctgtctacacagccaggggctcccccttccgtttcctctgcctggaacacacttgcttctccctttctgactggctattcaagcaggatcctgtaggtgggtggcagtgcactgtgtattacctgtgagccctatgcaaattaccgcacatctctgaacctgttttcccatctataaagtgaagctaatagtagcaattacctcatgggattgttgtgcaattagtgggaagaggcatgtaaagtactgacatactgtctagtacacagaaagtgcttaataaatgttggtgattattatccaggactcagcttaatcatcccttcctcaggcaggcctgccacacaaccgcagaccgggttaggtgccgggttttctgctccccagcgtttggaggcactcatcacacattaattactttatccatgaagatgaaagctgtctttggcacccagatggtactgagtaaatatctgtgaatgaatgaatgatgtggaatgtctcctctggaaggacacagtcagggcctcctgccactcaggactagcctggatgcacccacagggaaggagaaggtggggctggtctccgctgggccagcaggtggcgccagggcctgtcggtctctccccttggccacctcccttgcgcttgctcatctcatgcccaggcgctgagggttctcagctggggcaggagagatggggtcctgaggcctgggtgaagttccaagccctggggctcgggggcagactctcgctcacccctcccagaaagatgttttcctaggggatgtccagcctaacacggcagggaaggaagtggtggtcacctgggaaaggggccaacctgagaggttgggggtcctgatgaggctgctattctcttgaggacatgaaatgagaggcggtgaagtcagtcagtgagtcaaaagctgagatctaggaaccagacacaatgtgggagaagctgcggtgaaatcaatcagtgagagaggaaggggaggcccggtttccatgacaacggtagtgtttgtggcaagctggggactcctgggtccccagggcccgcaagcagtgattcaccacaggaaagggaaggctgcagagtgacctggtgctggggaccggatgccttgtggctccttctcactgctgagcatgcattcccccagcccaggccttggatctctgctctgccagctactggcagggaaactgagggatggcagaactgagccccaataaggggcaggcgctttgctccacgccgtacatgcacatatcacttatatcacttattgctcacaacagtcctatggaattaccgttatccctgttttatcaaagaggaaactctcagcctggcccacggtgccatgggcaggacatgagtggcagagccaggattggaacccaggctagcctgactctttaccatgcttgggaaggcccagaaagcagaaaaggaagagcaggagcatgagagttagaggatggttcagaccccagaggagatggaccccaaggcccctagcctccctgcctgccctgccctatgcgagcccaacactgatacggaggaaagctggccaactgcatggcctaatgtgggccagaacctgggcagccagcctacctctcactctcctccaagcccaagagagtaggccccagttccagtccatccaactggatggtagctcccccaccgttttctctctgccctggtcctaggggcaggggtgcgtgtgcgtgtgtgcgtgcgtgtgtgtgtgtgtgtgatcatcatgtctacaccacccaccaccatcacccctatcctccagcttctgctatagcctgggagttcccagccttttagtccctgtcaggatagtttcattcttgttcagctttggggcccacacaatttcagtacaaaaggggtatgcccatctcaccctgggccttgatagcatgcaagagcatagttcaggccctcatcatctattcccttgtagtagaagggatggaggttggaaagaccttagaaatcttccagtctggttctcttgttttgaaggtgtgaaagctgaggctcatagaaggggagcaatttttctgaggtcacagagcaagttaatggaagagtgaactagattccctgtccacagacttcaggttctgtaatcccagaaaggacttcttgaatttggcattgagttcttaggatgggagtcaggtagatgaacagatggagtgagacagatgaaattggataacctagcataaaatgccatgtgaaaagaaggtacgcaactcatggcccgactgtctaccatgttacatcaggaataactgaggtgagatcatgggaaagacttctcacatatgtatgttaggggtacaagatctgtggtcaaaatgggctgtgtgatcccagacaaatcacttaccttttctgagccccagtggtaactcaggataccctacctgcaggcttgtggagaggatggagggggtggtgggagagtacttgtgaactgtggggtgacatgaatgttgtcagttgtcagggaaggcaagtcatgtctagtgggactgagatagagctaccctgcagtgcaaaggtaaggggtaagccatgatgctcacccctcccacccccatccttgggagagaaagggaggaacataaacttccagtatgcttgatacaagcaacagttctccctgggggtgggcagcaggttcctgtagacccctggggtgcccagaggctgtgggaagctgagcactaattagctctggctttctaatcgggcttaattgcctcctcatgatgggcaattaggaagctgcatcaattagcacagggaggtgacaactcagctggggttggtcagggctccccgttggcagggagggaggcaggcaggcaaaggctgccccactgtcagccccttccttccctttgaaggagagggccctggagccctctccttagcaattaggccttagttccttagctcctaggagctactagccttctaggcctggattgtggcttttctggccttggtttattcaccttcactggctctctgacttttctgcccagaggagacttgcattctgggcctagctccaccactggctgctttgcaactttggggttgacagctatggagtcaaggttgagaatgtggcctttgaagctaggtctctagggtttgaatcccagctccaccgtttattaattgtgcaacattggaccctttgtgctttgttttctcacctgtaaaatggaactgataataaaagttctgtcctagctacacatgaggctggggcaggaggattgcttgagcccaggagttttaaggctgcagtgagggacaatagagtaagacaccatctctaaaaaataatttaggccaggcatagtggctcacaccgtaatcctagcactttaggaggccgaggtggtggatcatctgagcttgggagttcaagaccagcctggccaacatggcgaaaaccctacagagtctactaaaaatacaaaaattagctgggcgtgctggtgtgcacctgtaatctcagctactcaggaggctgaggcaaaagaattgcttgagctcaggaggcagaggctgcagtgagccgagatggtgccactgcactccagcctgggtgacaaaaaaaaaaaaaaaaaaaagaaaaatgcccatgtgtcaccccagatcaattactaatcaaaatatccaagactttgggcatttgcagttttgaaagcccccttcctccaagcaatgttgatgcccagtgagggttgagatcactagatgaatggtctggagggctccatccagcctggcatagcacctccctgtcacataccactcaggacccctctgcatagccctggaggtgctgcactttggaagagagctcattaccaccagtgtggctggaagcaggttcctctccactcacttagagggagttctcctctataaaatgagaataatgaccttgccatgctcacctcccagggctgcccagacataatgttttactagtgataggacctgctttataggtaggcaattatattgttccttcccttgaaaaacttttatcgaggtctagtgcacacccatctcctttacacatggtgactatggagttaataatctcctggagggacctgtcctgaaccatcagacaagttaggtcatagggccaacccccttttttagctcctgctggttatgaaatgagccaaggaatggaaagagcctagaacaggtcctgacacatggtgagtgctctctaaacagtagctctccttactattgttattgtgaccgtgccccaggctaggttggagggaggcctggttgcagtgcacacagggagctcagatgaagggaggcagtgaaggtggggcctgcaggaggaaggggagtttagaatgaggtgctgaggagtaaggtgtgtgggaagagtagaggaaggagtagagcacatcgaggttgctggttggtgagggggctatgatgaggatactctactcaaacatgtattgagaaccttttgtgcaccaggcactgtgccaggtgctggcagagcaccagatccacccagtctctacccttgaggagtccctctaatgggggaagacacacatacacagacaatgtcacagacagtgtgacaagggatactggtggcgagtggggacatttaatccagacttagtggcacttttagctgagcctggatgatgagtaggagttgatcagagggtaaagtaaatgccatgtctggaaaaattagtcagaaagcaatgagagaggttgagattgctggaatttagataaggctagagatgcaagcagagcctaggtctcggagggcattacaagtcaggtcaaggaatttggacttatcctaaatacaatgtggagccactgttagtttaaagtcttctggaaacaaaatgaggctttcattttgaaaagatcgctgtgggctgggcgtggcacctcacgcctataatcccaacacttttaggaggtcaaggtggaaggatctctttgagccccgcagttcgagaatagcctgggcaacaaagtgagaccccagctctacaaataaaaataaaaataattagttggttgtggttgcatgaacctggtcccagctactcaggaggctgaggcaggaggatcacttgagcccatgaattttggattgcagtgagctatgattgcaccaatgcactccagcctgctggatgacaaagcaagatcctgtctcaaaaggagagagggaaggaaggaagggagggagggaatcactgtgggaaggagaaacaatgggagcagaggcaagggtggaggcagagagactggttgggaggctgctgcagttacccaggaaggaaggacggaaggaaggaagggagggagggagggagggagcgagggaatcactatggtttatagaggagaaaggatgggagcagaggcaagggtggaggcagagagactggttgtgaggccgctgcagttatccaggtgggggttggtggtgagcagaccagagagctggaggtagaacatagaacagataacaattctggaggtaggaaccacaaggacttgggggctcattggccaagggagatgaaggaggagaggctgaggaaggaggagcagagtgaagctgtgtgttgggagacatgaactccatctgagatatccaaggagtgatgatgagttatggatgcttaggaatcactcctggtctgggaatacttggggtcgtcttctaagaattctcaagagtggaaggccactcacccttggcccagtgccaggccctcgccttccctagtctctctgggacaggctgggaattcctggctcagaaataccctgttggggcaggccggccttgatgctccccagcccaaagggaggaatgtgcctgtgcacctgctccgtgatacacgggggcgggacagtggagtggaggtgagtgaattcaggggtgttcctcacttcccccatcctggacttctaggctcagttgtggccccaggaatggattctgagtaagaggccagaaagcaagttctctgggcctggggtacagagggcagcaaggtacagttgacataccgcagacacccaggcagggcaagggcacccaggtttcagtcctggttctgtcacctctggttaggagctgtgagcacccaagggctcattcttgtcctaaaactgggtcttcaagatggtttggtttaggtggtgtgaatgaacccttccatctccaccctcgagagagctgaattttcccccacccgaggcgttccacagtgggcagaacgccgcagcccagtctgccctggcccacccagtgctcatctccatttccagcccctcctgggcgcctctggcctcctgcagccggctctttgcgctccttcattaagctttggtttctgtgggaatgtgacttgaattaactcttgggagaaaaatcacagaaatcaggaaaggggggccatggggagggggcagtgagtcacgtttccatgtgtatttttcaaactttccgatgggagtttggaaaacaacagtcttttggttgccagcttgggcccagctctccaagggtcccatatgctgtgtctataggtcttcccgtaactgctgcgtcccggcccacccttcgggtctgccttatttcctgggatcccttcccacttctccctggggacttgtgctgttgcagaggcactgagaagtccatcccgtggtgcagcttccgtctctcccctggtttcatttcacagccaagccctcatctatccttgcctcaaggtggacccatgggggctgcagctgagctggggactttgtccctgcagctgctctggccaaccctccaaccctggagaacctccataggcaccaggaagtcctgggctctaggaacctccttcctgcccccacagcttcctctttgtgtcctgcctaccagtccttcccgcccatctctgcatcccagtttccagagggcctgtggctgagggtgagaagccagcgatcgacccccagggagaagtcttgcagaggagggtcctcatcctaatgaggccgccaaggaagagggcccccagtatgcccctcttgtgtgctgggccctcgcacttcctctgtctgggactcctctaacagctgtggggagggtgccaggatccccattttgcatacagtagctgaggctcagccaggaaaatgggtgggaaccttaaggatggtgggcagatggtggcccccttgaggaggagatgggagggcagcgcatacccctagccaacccctccttgcaagccctcattcgggcggggagaaggaaggggtcctggactagctctcctgtgtcccctctccgggggctgccccctcccagtttctgactaatcctttccatcggcagtggcatgtcctgcccctgctgtgcctgtgccaacaacagcccacatcacagggccacatctggctccatttgaacataccccaccctccctgctctttatccctcaacgccctcccctgcccaaggaccagagtagggagtggccctctggacccccttctctggctccaccagccctgctcccctgccctttcgaagcctctagtggagtcactcctttccttccccgaacccggcctcagttcctgggacatcctggctccattcttcagcacaccctccctcatcatatccacactccttggctccccccttcacagcccccactgaaggagggattgggaaggggacattttgcaaggtctgagccccaagagatgtcccagagtagagggaaggcctggcagcccagggattttcccttagcccagctctctggcatattgccagcttgggcgtgttgggcggcaggggtcggggtgatcccaagaggtgcgtgtatggaggggtatagctcagcctcccagctcgggtggggagcggtggctcaggcctgtgtaggctggcttttgttggggaggagcctggaagggcctgcagctactggcctccctcctccttcctccttgcttagcaactgttgtcgtctggtaaatatttgccccaacaggatctggggctggagcactggcgtcagccgaggtagttgccccctcctcaatttatgagtctcccctctgttcagttccctattccagagccccctggactggattctaaatgtggtcctcaccccctccctcatggttgatttcctccccaacctcttccctgtctcccttttactctccttcatccccactcatcctctgtgcccaggtctctctcgtccatcctccactcctggatccattcaccaaggggcctgagtgaggtcccaccccctaagccacacaggtcctctgcttctcccccgctacatctcactgggaccccagcctggcaacggctagtgcgtcgtcggtgctcagttagccccaacatctctttcctttcctccaacaggaaacacaccttccacctctaaaccttagctccaccaagctccaaggggagagaagagagggcatatgggaatgttttgctggaccccatactgcactcccaggccaggaagctctgcatcaggaagccagcaccattttcacctcctctggggtaggactgaggggaccatggccaagaggaaacagatgcccccttagctcctccctgggtagcctgagcgggccagggcctgagagcatgccagttttagcctgtcttcctgtccttcccagccagacccctctcatcctcctcccccagtggttttctcattacctgtcactgacggagagcccctcagaggtcaaggccaaagtgaggtgggctcttggcatgctgtgcaagcttggagctcacccggcaaagagggccaatggggtgctcctctggggcgggcctgtgggctggcttagggatagcagacaggggaatctggggagttggactaatgtggatctagaagggaggtggttgggctgcacgatgccttaagactcctcccagctctgaagttctacttctaggcaatgaatgatgaaacgctggcccaagtgcagtcccttccccatcccacagggcggagaccccagccatccctactctacttggcagcccccctccccactcctcctgagagtgccccttgctccaccccagcggccaggaaatctcctgcagattcaccaccaccctcctggctgggagttcactttcctagttgacctcctggcctgagggccagaggagagctttcaacggggaccttgaggagtgtgagggctgcaggggctgtggactggagtggattcaccagggagcaaaggaaagtgaagtttcagggcctctcagttgcacgggccctttcaagacccgaagaggagccctgccaaactttccacatgatcccatgtccataacatttgcaaaaagatcattttgtatttcttaaagagggcctccccacaaaattgtgtgcactttaggtaggatgaacaactgtccctattttagcattaaaagtcccttatctggccaggcacggtggctcacgcctgtaatcccagcactttgggaggccgaggcaggcggatcacgaggccaggagaccgagaccatcctggctaacacggtgaaaccccgtctctacttaaaaaaaaacagaaaacaaaaaacaaaaaaatagcggggcgtggtggctggctcctgtagtcccaggtactagggaggctgaggccggagaatggcgtgaacccgggaggcggggcttgcagtgagccgagatcgcgccactacactccagcctgggagacacagcgagactccgtctcaaaaaaaaaaaaaaattcccttatcctaggagactcctcagtccccggcaaacccagggcaattgcccaccctagtttcaggctccacaaacatttggcccacactgggttgagggtgagggagaaagggaatccttttctgcctcacttcctggaaatgtgtaggggcgtgagctatggggcgagggggccctctcctccagctccagtcctggagttgtggcgcttctgtttgtttccttggcaacagggaaaggaaacccccatttaggaggccggggaggccccagcaaccacacacacacagagacacacagactcacacgcggccgcccacacgcagtcgcctgcgtcagcaccagccgtcaggccctcgctgcccgcctgcggggtgtggagtggggagaacagccccgcctgaatccagtccgactacccgcccctactgatttgcctgggacgccgccggcccacatggccccacccacgcctctgtccccacccccccacgcctctgtccccacccccccaccgcccccggcagcgttccccccttaacaccttcccccaggtggtgaggggccaaagctcggggatggacaagagaaaggaaggagatgtcactgctgaatttctgctgaatttccttctgcctgctgcccgatttctatttgactggcaatagtctggtgtgtattgtgacagttcagggagcctgagactcacaagtgaggtggcgatttgggcctggttgggtgggggaggtggtttggaatgccgggaatggagctcctggggagactgtaggattttgctgttggattgggttccttgggatctgggtcgaagagggaaagagtatatttaacctggaggcagaaacctggggtttgggcctgcttctgtcacttgtcagctgtgtggcctggagacaatcagttagcctgcctaagcctctgtctcctcagctgtaatatgcagataatggtgcttgcctgtgcacctcaaagaaatttgagaaggctaaggtagtaaccttgattgtgaaaagcttgtcaccggggggactggggcaggtgggagggcttggttactacttatccagtcgcccctccagccccgctggctcagtgagcccagcagccacttcccgactttgtaggaacccatgccagtccctaagtggacctgctctttgacatctgtccagtgtggctgccctgtctcccatggcagcgtggcactgagctgcagtgctgtcttggaggttttgaccctgcctggctgtgtgactttgggcaaatctttcctcctctggcctcagaattccacttataaagaaaggggcttattcctcagagcccaggggcctcctggaagtgggctggggggatcaaccaggcaggggcctcaagctccctaagtagagaagctctgcctctgtcatttagtagattgtgctttttgggtgagatttcatttgagtgagggggatctctgactttacaaatagctgtcattcacttgctccatctaagggcccgcttctcacccggcaccacctatgagcctgcctcattcccccttgctgagcctgagaagaaatctactcagctgtgctacctcaggtcaattacaacctcgtggagtttgggttgttgttttttttttcttttttttctttttttttgagatggagtctcactctgtcacccaggctggagtgcagtgacatgatctcctgcctcagctccctgagtagctgggattacaggtgcatgccaccacgcccagctgattttttgtatttttggtagagatggagttttaccatgttggccaggctggtcttgaactcctgacctcaagtaatccacccacctcagcctcccaaaatgctgagattacaggtgtgagccactgctcccagccggaatttgggttcttgacacataaaatgcagataataatacctacctcataagattgaggtgaagattaaatgggatcacctccatatagcccctagcctggttgctggcacatggcagccccttaaagagtaggcacggtcttccactgtcaaggttataactatcacctgcacatgagtgactcagcacttcaatcattgtttaataccctgtagtcaaaggatgaataagaccctccctcaagaactcactataaagagattcccaaaccatgtcccagaatctgtacatcacctccacctcctcagaccctcctccaaagagtcgcctgtctctgactcctacctgtccagggttctagccacctgatggtaagatcttggctttccaattcaggcaaactcgtattaaaatttcagttctggctgggcgtggtggctcatgcctgtaatcccagcactttcggaggctgaggtgaccagatcacctgaggtcaggagttacatggtgaaatcccgtctctactaaaaatacaaaaaaattagctgggctaattttttagtggcgcatggttgtagtcccagctactcgggaggctgaggcaggagaatcgcttgaattcaggaggtgcaggttgcagtgagctgagatcgtgccattgcactccagcccaggcaacgggcgaaactccatctcaaaaaaaaaaaaatccagttctgttactaaccatatgaccttagacaagtgattctcaataaggggtaattttatcccccaggggatgttaggcaatgcctgaagatatttttgattgtcataactgggaatggaagtgctactggcctaaagtcgggagaggctagggatgttacaaaccatctcagagtacaaagaaccttctctgacaacagagaattatctggcccaaaattcagtagtgccaaggttgagaaacctgaccttaaatgaataatttaacctttctgggcttcagtttcctcatctgtaaaatagggctattaatagtatctaccttgtagagctattgtattggtccaacaaaataatgcaagtacctagtgcctaataataaaggtagtccataaatattccctacacgaatggttcttagcatgcctctggaatccctcctggcttcatcactgggctgaacccaccggaccctagtttggcttatttcttgccaaggccagtgctcctgattctttcttcactggtcttgatgctttccttctctccttgacctcaaggcctatcaagcagctggaagcctctccctcaggccccatcccagcaccaggcccctgcctccacctcccacttctcccttcccgtctctcttccccctctttccagccttacctctagtggctccccatgccccttggcaggtcagagcacactcagctttttcccacttcagcacctctgcacagacttcctccagccagagtggcagaagacagagaagcatgtccaggatttggaccagactgcctggtcccagttctgcactgggcctgttacttacggcctagttttaggaaagtcagcctcatctgcaaagcagggaaataatttccaacccatgaggttgttgtatggacccagttgagaatgtatgaaaacatgcaacaactataaagattgttaaaatgtaagttattcactgtgtgagcattattctgctaaatgtatgcatgtatgtatgtgtgtgtgtgtgtgtgtgtgtgtatatatatatatatatatacacacatatatatgtaattttttttttgagacagggtttctctcttgctcaggctggagtgcagtagtgcaatcacagctcactgcagccttgacctcccaagctcaggtgatcctcccatcttagcctcctgggtagctgggactagaggcatgtgccaccacccccagctaattttttttttaagagatggggtttcactatgttggccaggttggtcttgaactcctgggctcaagcaatctgcaatctgcctgtctcggactccccaagtattgggattatgggtgtgagccaccatgctcagcctctgctttatatttttatttccatagctcctaccgtgttctaacaaactataactttgtctttggtttattgactgtctccctccactagaatgtcagctccataagggtagggatttttgtctgttttattcacttctgcatccctggtgtctagaatagttcctggtatatagtagatgttcaataaatatttgttgaatgaatgaattctctgtgtataaggcagttctgtaaagcccctaaatcttccttctccaagaagccctccttcaaatgtatgtaaccttatttagttattgcacatccccattttacagatgatgaaactaacgctggaaaaacttgtccagagtcactgacctgaaaagtggcagggccagatgcatttgtttatccaagaaaccctgagagggctgggcatggtggctggcacccgtgatcccagcactttgggaggctgaggtgggaggatcacttgactccaggagttcaagaccaacttggcaacatagtgagacccccatctcttaaaaaaataaagaggctgggtgcggtggctcatgcctgtaatcccagcactttgagaggccaaggcaggcagatcatctgaggtcaggagttcgagaccagcctggccaacatggggaaaccctgtgtctactaaaaatataaaaattagccgggtgtggtggtgggtgcctataatcccagcaacccttgaggctgaggcaggcaaatcgcttgaacatggaaggcagaggttgcagtgagccgagattgtgccactgcactccagcctgggcaacagagcgagactccaactcaaaaaaaattagaaacaccgagtgcctgctgtgtgccaggtgttagggagacagatgaccaagacttggtcctttctgtccctcacagcactttcaggaatgggggtcacagaggaaacactaggatgctataagaacacagaggagcccccccacccaatcaaggtcattggtcttcaagataaagtgcctaggcctggtgcagtggctcatgcctgtaatctcacactttgggaggctaaggtgagggggcacttgaggtcaggagttcgagaccagcctggccaacatggtgaaacctcatctctactcaaaatacaaaaattagccgggcgtggtggcacacgcctgtaatcccagctactcaggaggctaaggcaggagaagcgcttgaacctgggaggcagaggttgcagtgagctgagattgtactgttgcacttcagcctgggtgacaagagcaaaactctgtctcaaaaaaaaaaaaaaaaaattctcaaaccgtccgttggacccaaccactgcatgctgatttcactcatgcatgctccagctcccagacttctgggatccctttggaattcatccaattcagagtcctctactgctctttaatcatttgtgcttgttggttttgcttctccctctgtctttcccactggtgggaggctcccttgggagcaagcatagtattgctatcaccctgtggcatagtgtgcagaactcttgcacacccaggagctcagtccccgtctttgatagccactctacccatactacaggtaagaaaactgaggtccagagaattcagtagcagatctagcatcactcagcagttaagaggtaggattagaatgtggtcaccctctagccaccactcccatcacctctcacctccagcaggctcagctcctctggacctggctgctgcttctgggttggtgatttttgccctggcaaagggagagcagacttatgacatctggagtccagagttaggattgaatattcaggataaagtttcactttgaagttcagatttaggattgaggccattttgatggtggtcgcagggaacctttagaaagagcttggagtgaaatttggggtgaaagccctccttctttctcctgcaccttttccacaagatggggaggtctggccagacacagtggctcacacctataatcccagcgctttggaaggctgaagtgaggatcatttggggccaggagttttagaccaaattgggcaacatagcaagactccgtctctatcatgatagcctatagtctcagctactcaggaggctgagataaaagaatcacttgaacccaggaattcaaggttgcagtgagctatgatcctgccaccgcactccagcctgggcgacagaccaagattctcaaaaaaagagcggggaggtctaggacaggaagggttaagtgtggtttagctttcccagcctggaaaggaagccaggccaagcagctgggtaggggaaaagggggcactgagtgccagggaggggctgaggcagtgggaacagcatgaacccttccctcacgtttcactggcttacccctcctgcctctgcttctggtgtggagaagaacaagactttttattgtctgggaagctgagggtgggtgccacgccctgggggagagaagccatattctgggccccctcatccgggtgcatccctagtgctcaccatgctgcccaggcaccctcactgagatgagaactttccttgttcccctcccctaataaccaaagttcctgccttaatcccactccagtccctcatccaccccgaggccaggcttcagaacccagaactgagggcctgtccagccctgctttccttgtgtttgagggaagccctgatatcttggagctgtacaaggtagcaacataatttgatttccctggttgctcatcggaggataagctgtgggaggcagttgggcagggcatgcaggcagatgggacccaggcctcaatgctgtcacctcttagagaggataaggtgggacgggcatggtggctcacatctgtaatcccagaactttgggaagctgaggcaggcagattacctgaggtcgggagtttgagaccagtttggccaacatggtgaaaccccatctctactaaaaataaaaataaaaaaaaaattagctgggcttggtggcaggtgcctataatcccagctactcaggaggctgaggcaggagaatctcttgaacccgggaggtggagattgcaatgagctgagatcatgccactgcactccagcctgggtgagagagcaagacttaatctcaaaaaaacaaacaaacaaacaaaaaaaacaaacaaacagaggatgaggtggatggtgggaccaggataggggccaggatgaggggaggggagtggaaggcttatcaaaagggtccttggtgaggcctgaggatggaggctccagagcctgaggtagcgaaccctggggacctgagtgatctcgttttgtgagagagcctggcccctccccagagccagctgcagaatggacctggccagagaggaaagtagagatgagtatggtgctggcctttgcagccagcaaggctgtggggtctttgctgttcctgtcccccactaccttcttgccccccactaccttctttctggctgaaaccaggatagagacccaacattggctgtccagcccccagccctgctccccctttcaggcccctctgggaaccacagaaatctgggacctagtgtcttggcaacgtaatgaatgcatgcacagctctggtatctgttttaaattatccattaaaataagtacagttctgggggaaaaaaataagttgactgggtgcggtaagcagtagaaagggactgaagggggaaggaacccaggcagtgcttgggtccaaaggaaggggacaggagatggaaggggcagtgcctggctcctattcttggctttctttaggggacttctttaggggactgtggcttgttgcttgggtctaaaaacgaatgcttggctttgaagagagatagattggggcaaaagaaagaaaaaaagggaccccccaaactccttgatccctggccccaaactgggggcataaaggaactcaggttccagaactttgctccccccagggaacccaggcattccttctccaccccactcctggcacactgagatgcagctctgaatgggctgcccacgtgtggaggggggttggggtgactcactattactactgggaggacagggggagccagtggtggaagaagggtgagtcacactgatgggcaccagcctcagccctccccccactttcctggctcccagccctgcctacctgaccctctcccttgctttgcgcccacttccctctctttctccccgacccttttgcccacccactctccctccttggctctgccctctagcccagaaggtctgaggcaatgggggcaagcttggagccgacagtgctgagcaggcaggagccaagagaggggaagcttgagcctcacgcagttaggggtgcgctggagagggtggggcccgactccgccacaccccaacggtccttccccctcctcaccactcccgcccccacccccaatggatctgggactgcccctttaagagtagtggcccctcctcccttcagaggaggacctattagagcctttgccccggcgtcggtgactcagtgttcgcgggagcgccgcacctacaccagccaacccagatcccgaggtccgacagcgcccggcccagatccccacgcctgccaggagcaagccgagagccagccggccggcgcactccgactccgagcagtctctgtccttcgacccgagccccgcgccctttccgggacccctgccccgcgggcagcgctgccaacctgccggccatggagaccccgtcccagcggcgcgccacccgcagcggggcgcaggccagctccactccgctgtcgcccacccgcatcacccggctgcaggagaaggaggacctgcaggagctcaatgatcgcttggcggtctacatcgaccgtgtgcgctcgctggaaacggagaacgcagggctgcgccttcgcatcaccgagtctgaagaggtggtcagccgcgaggtgtccggcatcaaggccgcctacgaggccgagctcggggatgcccgcaagacccttgactcagtagccaaggagcgcgcccgcctgcagctggagctgagcaaagtgcgtgaggagtttaaggagctgaaagcgcggtgagttcgcccaggtggctgcgtgcctggcggggagtggagagggcggcgggccggcgcccctggccggccgcaggaagggagtgagagggcctggaggccgataactttgccatagtctcctccctccccggaactgcccccagcgggtgactggcagtgtcaaggggaattgtcaagacaggacagagagggaagtggtggtctctgggagagggtcggggaggatataaggaatggtgggggtatcagggacaagttggggctggggccggcctgaattcggtcagattgggatttgccaactatctggagccggggggaggggcttgagcaaaacagaactagccctgccagctcgaagaactctgggcacccaggacacatcggagtggcagaaagggtcctgttagaactttgttagcgggcttggcactgtgctagctttgcccaagctggctctgaacacatgatgcccactaagacataactctcaagttggcatctgtccagcgtgttggagcgaggtcaggaaggcagggcaatcccccttttccctcccaagggcttggcggtggccccccctcagcatgaccttgtcctgggttctaagggttgggaagttctccctcactctgccactctgcgtgtctgggaccttccttgggctctgacaggcccaccaaaagagctccgggagatgagagatcggctcccccgcagctcccacagcccttggcctgcttggcccaggaatgcaagggagggagggaggcagagggcagaggctcccagctcaggaagttgtgttatgcccaggtctggccgcactcctcccttggccctctgcctagtgtcttcgagggttgggggcactgtccttccctccttggggtgagccactttcattttcccagcggggccaggcagtctttgctcgggcccatcctcttagctgctgacgttttgatctttgtcttattgaagtgctggaatacagtgacatttttgaaatccagccgttggaagattcaggccactcccactttacccacccctgccccaccctaccccaccctactcaactgcaccttcttcttttctaaaaaagcctttgggagcttggaagtataggccctctcttccagccccatcaaaatttgtttcccttcttcctgccttccctttctctatgcagacccaggccaagagcactaagggtgcttggagatccgtaaagggctgttggctttgacttcttctctctcttttatcatctactccaaacttctgctcttcctagaaccctttgctaggtgtggttttgttgcccaggctggagtgcaatggcacaatctcggctcactgcaacctccgcctcccaggttcaagtgattctcctgcctcagcctcccgaatagctgagattacaggcatgtgccaccatgccgggctaattttgtatttctagtagagatggggtttctccatgttcgtcaggctagtcttgaactcccaacctcaggtgatccacccgcctcagcctcccaaagtgctaggattacaggcatgagccaccacgctgggcccatcacccttctttctgaagagtcaatggaagttgtgtgtaggaagacaggcttaacggtttttttttgagacagggtcttactctgtcacccagactggagtgaagtggtgcgatcttggctcaccacaacctctgcctcccaggctcaaaagattctcctgcctcagcctcctgagtagctgggattataagtgtgtgccaccacacatggctatttttttttttttttttttttttaatttttagtagagatggggtttcaccatgttggctaggctggtctcaaactcctgacttcaaatgatccacctgcctcggcctcccaaagtgctgggattacaggtgtgagctaccatgcccggccatcaacctttattttgtttttttgagacggagtcttgctttgttgcccaggctggagtacagtagtgtgacctcaggtcactgcaacctctgcctcccaggttcaagccatgctcctgcctcagcctcccaagtagctgggactataggtgcctgccaccacgcccggctactttttatatttttagtagagacggggtttcaccatgttggccagggtgatctcgaactcctgacctcaagtgatctgcctgcctcagcctcccaaagtgttgggattagagacgggagccactgcgcctggcttctttttttcttgagatagggtttcactctgttacccaggctggagtgcagtggcaaggtcatggctcactgcagcctctacctctctggctcaagccatcctcccgcctcagcctcctgagtagctgggaccacaggcaggcaccaccacccacagctaatgtttttgtattattttgtagagatggggttttgccatgttgcccacagtcttgaactcctgggttcattctgctgaaagagaccacacctgtccttttctttatttttattatatttttcagagacagggccttgccctgttgctcaggctagagtgcaatggtacaatcataacttgctgcagcctggaactcctcctgggctcaagcgatcctaccgtctcaccttccggaatagctgagactaagggcaggcaccaccacgcttggctaatttttttttttttttttttttttttgctttttgtttgtaaagatggaaacttgctatgttgctcagctggttccgaagttttggcctcaagcaatcctcctgcctcggcctccggaagcactgggattacaggcataagccaccaggcctgacgccaggcctgtcttttttctactagtgatatgaacaatttagttagcaagacagataggaagcaaggaaggggagacccagagaattcgttgcattctaaactagtccactcatctaccaaagccctgtgaaggacatttttagcagttttagcagttttctggtcaaaactttgatcgagaaacagattgagtggattcgatattctcttgctcacccagccacgccagtttgtctcctctgcctcctagtgcagctgtccaggcctgggacaccaggcgggtatgtgcgcatgtggggcagggcggaggtggtgtgtgtacttgttatatttagccacctccctctgttctcccccactgatcctggctggaaaggctgggcttccggaaaagagaggtggatttgcacacctggatcccaagctgatagaaagtggggtgaagacaaaggggactcagactggggtgtctgtcctcttctatgcccacagtaggaggagccaggattggttactccctgctgggtctgctgtgctcagagtgaggtagagaagtgggtagagtaaagaatttgggagaggaaaaaaggcattttcccaacccctcccaccaaagcctagagagaaggtgttgtctggtttaatgtttaattagagctcagagttcagggccagatttggagttgggatggaaagttgtttttaagaccctgtagcaatttttgacccagcctgggtacctcaaccacactcaggagtttgggggaccttctgttgggctggattataggctccaagaagaaacccctttcgccaatactctctctctcttctttttttgagacagggtcttgttctgttgcccaggctggggtgcagtggcatgatcacagctcactgcaacgtcagcctcacaggctctggtgattctcccacctcagcctcctgagtagctgggattacaagtgtgtgccaccatgcccagctaattttttttttctttttttttttttgagacggagtcttgttctgttgccaggctggagtgcagtggtgcgatctcggctcattgcaacctccacctcccaggttcaagcgattctcctgcctcagcctcccgagtagctgggactacaggcacatgccatcacgcccagttaatttttgtatttttagtagagttggggtttcaccatgttggccaggatggtcttgatctcttgacctcgtgatccgtccaccttggcctcccaaagtgctgggattacaggtgtgagccaccgtacccggccactaatttttatatattttgtagagatggggtttcaccgtgttgcccaagctggtctcgaactcctaggctcaagtaatccacctgccttggccttggcctcccaaagtgctgggatgtataggcatgagctaccgcacctggtaccccctgccccttctctgtctctttctagtctgtagcccaagggatttggatacccaagtgcaggcagaatgggaaggttgtaagcaccagggaagcctgtctggagtccaggcttgcagctgggccccaccccaggcaaggcagctgggtggatgactcagatgctgcccccctccctcccaccctggtggctttacagaagacagcaggagacagggtggagacagcagttgtcttaaagggaggagtggtggtctgaatgtctacctcttctgcccccctccccattgcatcctggagtcccttgcctggctccttcctgagaccctctggtggtgtctggacacatagctctctctggacaggtaacatgcacaagtaattagaatccagagttgagttcagagttatggattgggctgcaggatagtgccagggtctgtgccttcccatgtgaaactgatggaggaaggctgagtcagaagtggggagatccgaggcccacaaagcagaagcgctacttccactccaaaaaggccctggtgcttgacaacttcctggattgcccactgttgcagccccagtgtggacaggcagggagatgcaggctccagttcatgtaggctctgatcaagacaagaacagcaaaggccacagaggcacagatgcttgtcccatgtcacacaataaaggggtcagcacttgatcacaggccttatgacttccagctgggtgtgctcttaccattaagcctcacttctctagcttgggggacaggttggagggaggatctagagggtgaggtaaggtgaagtcaggtagctgaggctcacttctgcagcctggaaactctgctctggggccagtgacaccttagtgctctatggccatacttcgtggctcatgcctgtaatcccagtgctttgggaggctaaggcaggaggatcacttgaggccaggagtttgagaccagtctgggcaacatagcaagacccccttctgtacaaaaaaattagccggtcaacacctgtagtccagctgcttgggaagctgaggcgggaggatcacctgaagccaggagtttgaggctattgtgagctatgactgcactactgcactctagcctgggagagagaaagaccctgtctctgaaaaagaaaaaaacaaaacaaaactctgctgtcctgcagggcctgttagcatatgatcgatagcctttgctccagcctatacctggacccaggacccctgccagcccctcaatcgtgagacggtcagagctctgggaggctggtgattcttgtcttgagactatcttgagacttgtcatgggaattgtccacccggattgaaaggaagctgtgccttttggcagacccattaggttaatggggttggagacctttgaggatgcatgggccctgggctttatctgagggtatctcctggtgttacctctccaaccctccaccaccaaatccattctttttttttttttttttttttttttgacagtctcgctccctggcccaggctggagtgcagtggcatgatcttggcttactgcaatctccacctcccaggctcaagtgatcctcccacctcagcctcccaagaagctgggactataggcacgtgccacatgctcggctaatttttctatttttagtagagaccaggtttcaccatgttactcaggctggtcttgaactctggggcttaagcagtccacccaccttgacctcccaaagtgctgagagccactgagcctagcccaaatccacgttctgattcaaagggaaagaagaagggtgcagctaaacctggggggtgagaagtacttaaaaagcccaagagaaacaaaagagagaataattcctcactaggaccccctattgccttcccactattggtgcccttgcttggcacttcccctggcctccaggagtctgagacttactcttccatggatgtgcccattgcccccacttccaggtccaccccccagtgattcggtagcttagtgtctgcgctgaagcccaggacagctggatggacaactggtagatcccttcacctaccaactgtgctttctgctcccctcccccttgcttccctcctccccagcccctcgccacccctagcagctgcagcagccaagaccaagtcttcagagacccagacacaagggcagggttcattccattctcacctccttggggtcccagtgtactgataggccgaactctaatattataggagatctctggaagattgcagggtctcttatccctcaataaggggcaaggcaagccgggcgcagtggctcacgcctgtaatcccagcactttgagaagccgaggggaacagatcacttcaggtcaggagttaagagaccagcctggccaacatggtgaaaccctgtctctactaaaaatacaaaaattaaccagaaatcgcttgaacccaggaggcagatgttgcagtgagccgagatcacgccactgcactccagccagggcgacagagcaagattccgtctcaaaaaaataatactaataataaataaataaataaggggcaaggtagtccaccaacaaaatgacaggcagtgtgatatagtggacaccctagccctcggtgcccttagttctgtgtgtggccctttcactaaattgctgtgtgaccttgagcaaatcgcctcccctttctggctttccttagctgtaaaagaaagggattggagcggaaagtctccagagaccttttaggttccaaagtagtacagtgacccacaaagtgagaaaacagtcttctaaaataccaagttattaatagtaaaatcaaatataaataatgtgaatatagttaatagctaatgttgttctcaatagaaatgtttcccacaagctgtggaattaaacatactaccacatttctctatttccccgtgaaagtttgttagaaatggttaaattgtgacattaccctcttggcaaatgttttgttttcattgctactaggaaagggcaactcgttttcgatgcctctcccttctggacggtggaaagggctgtgtcatagagtaggaacgggagatgcggcacaggaatggctcccattgacccgggttgggggctagggcgaaggcctaggagaggcagaactgttaccttagagctggccaggattagagaacagtgcctggaaccggggggaggggcacggtgaccttgggctgcccaccttctacccttccagcacccatactggctcccccaacctgcggctgggctgggaggaggtcttggcccctaccaatcccttaaggaaggggaaagagtttgggaaggggagtcctcccttcacccctgcctcccccaagttgtgagagaggaagccggaatcctgcctgctgaagccaggaataattctggctgagatcccaggcccggcaggggcgctgagtcatggtagagggcagagtggagagtggacaggagaccctaagcttgtccagtcagaaaagcagaggctgaggggtggccttttcttgagaactacattcaagttgcagcaagaaggacagtggtctgaatttgacggggacaaatggaagggagataggacacatgagttcctttaggtctggctcaggggagctagacttcatttcaaggggtctaggttctgggcagttgagaaggaggctatttggggtcaccaaggctcccctttcttcccaaagctctaacactgccaccttctgctggctaggagagagctgtgtcttctgaggctagagctggaatgcagtgagaccagactgcctaggtcctccctcacttcttctcctgaccttggggtgtggctcccactctctcccagtgtcctcagggttaataactatgtgccaccagatagagagttaaggggctgctgaattggcttcttgtgaagggaatcccctaaatgtccctcgttttggtcactggcctccctcccgcccccttcaggacattctactatcttcttaggccatccctccctcctccaggcactacttcttttgctctatccccaagccccacccctgcatttttgtgacaacaccggaatgatttctagagagagaggccaggaagaaggaaagtggcacttggcaggagaccttgcagggggcggctggtgaggaagccagccgcccattgtccaggaccccagtgccctggcctccggcctcaggcttctcctgcctctgtacaatgccacgttgatacgcccagcagctgtgactcaggcctggccccctgccaggcccagcacttctactggagttgcgtctgaacatgtcaacaggcttcctatccctctctcagcaccagttctccccacttcagcccctccctctgcctggaattaaaacctggctttgtcttagggaaggacagctgggagcctagtggctctggtaggggatctgagaggcctcagaccctaggcatatttggctgtttggcaggtgtcacgcccaagggaagcgtgtggaagcagagccatgcctgctgtgggtgcacatgcccgcgtgagggagtcggggtgtttcatcctggggcacctgtgggcttttgaggtgtatgatattcagaacttcacaggttggggtttggggaaggctcaaggggcttctaagtccctggaacagctgcccccctcagttcctctctctctctctctttttttttgagatggagtctcgctctgttgcccaggctagaatgcagtggcgcgatcttggctcactgcaaactccgcctcctgggttcaagtgattctcctgcctcagcctcccaagtagctgggactataggtgcccgccaccatgcctggctaatttttgtatttttagtagaaatggggtttcaccatgctggccaggatggtctcaaactcctgacctcgtgatccacccaccttggcctcccaaagtgctgggattacaggcgtgagccactgcgcccagcctcagttcctctctttaaggtctcctttccagagagggatagcacctcaaatgccagggaggggaattctccacatcctgcccttacccgagttgtggcagacccacagactagccaagaaaccaagcagtggttactttgccgggttgggggggaggtaggggctatcaaacctcatgattggccgcacacaaaggtgtgagtatgtgtatatttgagggtgggtgggagtggcactttcactaggcctccgtatcactctctgactggggtatctcccagcaagcgagacagaggcagacacgcttcccagactgtcttactgggtctctctgtgttattctctgcagtgtctgtgtgtatcgtgccattttctatgttttgcaccaatctgctgtgagtgtcctcaggtgacctgggggcaggtttttagtgcctgagcctacccgtctccaggctttagtttccccctgtaaaagtataggagttggttcaagagaaggttcctctagaagccttgagcctgtgaaccgtctagtctccgggtatttgtgggacacacagaaaaagccccacgacccaacaggtagaacactggctgaaatcagcagggcagagctgagacaggctcaagtaggctgaggggtagggaggttttgggtgaatgggagggagggacagagagaaggaggatatattgcagtaggaggagttgctggaacaaaaggaggggtggtaggagtggcttggggtggcagcagaagacgccctgtcacatggcgggaagtcagcctgggcagaggtctaggtgtccaggaggggctgggtgtggtggctcacgcctgtaatcccaggactttgggaggctgatgcaggaggatcacgtgaggtcaggagttcaagaccagcctggccaacatggcgaaaccctatctctactaaaaatgccaaaaattagctgggtgtggtggcaggcgcctgtaatcccagctactctggaggctgaggcacaagaattgcttgaacctgggaggtggaggttgcagggagccgagatcgcgccactctactctagcctgggcaacacagtgagactctgtctcaaaaataataataataggggctgggcgcggtggctcatgactgtaatcccagcattttgggaggtggaggcgggtggatcacctgaggtcaggagtccgagaccagcctggccaacatggcaaaactccgtctctactaaaaatagaaaaattagctaggcatggtggtgcaggcctgtaatccagctactcgggaggctgagaagcaggagaatcacttgaacctgggaggtgaaggttgcagtgagatcacctgggcgacagaatgagactccacctcaaaataataataatagtaataataataaatgaaaaattttaaaattaaacaattaaaaattttaaattaaaattaaacaaattagatgcccaggaggatacaggagagcatttgccaccaggcggactccctgtacccacccggccacagggggcgatgttcctgggagacaggaaatgcccaggggctgggagaccctctgctcttctgctcccttcctgtgtgctgcctggcaatggggaactctgagggctggtgagcagggctgctgaggagtgggtctaaggagtccctgcagggctgggccagctcctccacctcccctttgtcttcccctcccacttgttatttttagctacagtgtctgtccctcttgcttctcccccagattgggagaggaaacggaggcctctccctccgggcctagcctgttgcccccagcaaccgggcccaaacaggcctgtggccggccctggcttccatatctggcatcagagttgggctgagcagggtgactcagagggtgggtcagcgcctggcccggtgcccacctagcccctttgctgtgctggtgcctttcttccccaaacagccccaagggcccgggcctgctgcagctggggagccggacttccttgtcccaccaggcacagctcttcagacccctgccttgggtcacatttgcaagtgccaactctcatttctaccttattcttttcctctctgttcccctccccaccccctctcttccctctttctgagatcagatttgccagtgatgggaagagttagaaacaggatgcccagcccttctcgcctcaagaggccactgggatgcagccactcctgtgcttggggaacctggaggatgcaagggaaaggactggcactctgctggcacagcacccggcctggggcaggacacgggcgaagccagggtctcccctgtgagcactagaggatttcccgacccctgcccgggtattgtgtgcctgagcatgagtcacctgaggggcccaggttcccacccttcccagctcctctggcctgccccaccctgtcctccctgccaacccagcacggggacggcactcagcgtgtgctcagctttcctgatgccaacccccagtggagtgggctgcaccaccaccctgggaccgaatgcctggctagggtctactttggtccctgctaggtctgaggacccctcctaggaaggaaatggcacttgggggcgggggcagggaggagggaggagagacactgggctctactgtacccctagtcatctcttggggtgtgcgtgtggctccctggccacagagctcccaaggtctgagtcatgagcccatgggtgatagtggcttcttccccgcagatgggagctccccgtgcctaagaaaaccacaaaggttcttcctcacttccctctctgctcgtggtttttctcatctgcagggtgtgtcttagtcctttaatctcctctctttgcagtgctagtcaaaacctccaccagggaaagacaaataacccccttactgtttttttttttttttttttttttttttgagatggagtctcgctctgtcacccatgctgtagtgcagtggcacaatctcggctcactgcaacctccgcctcccaagttcaagtgatcctcctacctcagcctcctcagtagctgggactacaggtgcacaccaccgtacccagctaaattttttttttttttttttgagatagagtctcactctgtcacccaggctggagtacagtggtacaatctcaactcactacaatctccgcctcccaggctcaagcaattctcgtgtctcagcctcccaagttgctgggactatggacgtgcaccaccttgcccgactaatttttgtatttttgatagagtcagagtttcaccatgttggcaggctggtctcgaactcctggcctcaagtgatccacctgccttggcctcccaaagtgctgggattacaggtgtgagccaccacactcagccagcccccttactttccttggagaccatatactgtggcttgtgccaaagtggtacagcatggatttccagctcccctatctacttgctgcgggaccctagatatagctttctgtgcctatttcctcaattgcataggaatagcacctatcgcatagggtagctgtgaagatgacgtgagttaacataatatttagagcagtgcttggtacctaataagctctatataagtgtttgctattatattattattatcactgccaccaccgcttttgcaagcagcagaaggtgaagaggttagactgaagaaaaaacttctgtgctcatcagcccataagctcgcagagcacagggatcatgcatctatgttttcctcagtcagtgtctgccaggcactggcaaggaaaggctgttaccagggggaactccaggaattcctcctggcacctaaggaggctggggagacaggactagggaaaaggtgcccttgagacaccttctgaaatcatcccattgccttccagcttctttcagctcaggctggctggtcagggaaacgctttgtgccatagtgtctgccctcttcctcctcctggcttctccattctctctggaacttgtggcttaggaaagcagtgaggtggaggaggaggaaccctagatcagcagctagaattgactggaatgctgctgctggctttcggtaattgacactgggccattcaccttcctcctttgcacctcagtttcctcatctataaaagggagagggttgagctgaatcaactctaagctccttctagttctctaaattctgagagcctcctagtacagccagcagcagccattagccttcagggtagagaggcctcttctgggaagccccagccagcctgggggtcagcccaaggagctcggaatctaagttgccccagttgcttcactttaccagcggtttttcttcattttccctcctccccctgcagctgcttcagcttcggaaaagttctgaagtcatggaaagttggggctgtgctcccagccaggggctaggccggatggcagccaaaacctgagctgggttttgactttatttttagcttttctgactgagacagaggagggaatacattctccggttctggaaggggctcttttttgcaggagacagacacttacattaaacaacttgttctgaggtgtggccagaggcctggactgagcaagtgtgcaggctgggggagcttcctctggcttctcatgtccttcccctgcccctctgagtgtcactctatcctcctccctgcctggtggggggaggtgggggtgactccttttttggactctcctaagcagaacactgcctgggtctcgtcctccagagcttctgcaaatctagccttccctatccctcttcacagtgaattgctgggcctcttggagtttaggacttttgtggtagaagaaaaatgttggcagggctgcttttctcctttccaggatagatttttccttctgcccacgcttggttttccttttttccatctgctgtggtgggctcatgcttaagcactgatgagttacagatggcagctggaaccaggtcctctggatctttccctccgctccctgggtctgctgctttctctcaccctatatttgtgaagcaattgtaacatctagaaagttcttgggttctctggaggtttttaagaaaataggacctttctatttctccagtccactagcaaaaataatcaggggcccagaaaaggtgagggaggtggcagaggcagcgctgttcgactggttatagctaaagctttacccactttgaggagcagggaggcttaaagctggggcccagatggacctggaggcctgggatccacatctggaaccagatgctgaggctatggtagatgggtagggctcagccttctcccagggcacggatgaggcaggagggagggaggcagggacccctctgttcagtgcagatcagggcacccagactgggtcctgagaaaggaaagggtcaatattgtgcctggtcatccttgtctgaggtccctctgagctctaaccagactttccttccccacagtcccacatgtgtaaaagggactaggagaggtgaccagtacctttggggctcagatcgagaagtgctagggacatgtgggccatgagcttagttgtcaggctcctcagagggagggaagcttggccaaagggaagtgagtagagtccagggagaaggctaagtaaggccctgtgtgggaaggggcaggagacaaaggtacccctgtctctttgggaaagaatgggaggagagagagggaaaagcattcatatcacggggtagagctctgcccttggccccaggcacgttcctgagccctgagtcatgggaagggtggagaagcaggaagggggttttcaaggaccttggggaggtgggagcccagccccagaggcaagcagatgcaaaccaacctaatgcaaggatgccctctcctggtaattgcaggcatagcagcgccagcccccatggctgacctcctgggagcctggcactgtctaggcacacagactccttctcttaaatctactctcccctctcttctttagcaataccaagaaggagggtgacctgatagctgctcaggctcggctgaaggacctggaggctctgctgaactccaaggaggccgcactgagcactgctctcagtgagaagcgcacgctggagggcgagctgcatgatctgcggggccaggtggccaaggtgaggccaccctgcagggcccacccatggccccacctaacacatgtacactcactcttctacctaggccctcccccatgtggtgcctggtctgacctgtcacctgatttcagagccattcacctgtcctagagtcattttacccactgaggtcacatcttatcctaatttggctgccaatgggatctaccacagtgaatttaaaataatccaggaggccgggcatggtggttcacgcctgtaatcccagcactttaggaggccgaggtgggccgatcacgaggtcaggagatcgagatcatcctgactaacatggtgaaaccccgtctctactaaaaatacaaaaaattagcctggcatggtggcgggcgcctgtagtcccaactactcgggaggctgaggcaggagaatggcgtgagcctgcgaggcagagcttgcagtgagctgagatcatgccactgcactccagcctgggcaacagagtgagactccgtctcaaaaaaataataataataataataaaaataatccaggccatgtgtggtggctcatgcctgtaatcccagcattttgggaggccaaggaggcaggattgcttgagtccaggagtttgagaccagcctgggcaacacagaccccatctctagaaaataaaaatttaaagaaattagctgggcatggtggtgtgcacctatagtcccagctacttgggaggctgaggcaggaggatggcttgaacctgagaggtcgaggatacagtgagctgtgattgcaccactgcacttcagcctgggtgacagagggaaaccctgtctctacataaataaatacataaaataaaataatccacaagccatttctacttaactttgcaatgaactgtacctgaccctagatccctcccagtttggccctccggtatacaagggcctcctataggcccttgtgatttctctggggaaaaggaggactggagttgatcatttattgaggccatcagaagcggatggctaattacatatgggacatgtgttaataatgctttgtgtatatagagtggcctttactttcaaaacactcttctccaatttatcatgttaaaagctaggaattgggctgggtgcagtggctcacgcctataatcccagcactttgggaggccaaggcgggtggatcatttgaggtcaggagtttgagaccagtctgaccaacatggttaaactccgtctctactaaaaatacaaaattagccaggcgtggtggcacacacctgtagtcccaacaactacttgtgaggctgaggcaggaaaatcatttgaacccaggatcagaggttgtggtgaactgagattgcaccattgcactccagcctgggcaacaagagcaaaactctatctcaaaaaaaataaaaaatagccaggcacggtggctcatgcctgtaatcctagcactttgggaggcagaggtgggcagatcacctgaggttaggagttcgagactagcctggccaacatggtgaaaccccatctctactacaaatacaaaaattagctaggcatggtggcagccacctgtaatcccagctacttgggaggctgaggcaggagaatcgcttgaacccgggaggtggaggttgcagtgagccaagatcgggtcacagcactccagcctaggcaacagagcgagactccatctcaaaaaaacataaataaataaaaataaaaataaataataaataaaagctaagaatcaaagaagcagtttattcctaatttcacagtctcatctgttcatagtggggccaggattagagtcagtggccaagcttccatcctgggttctttcccttcccaggccctaccatcatagtataccagggaaagacctggagaagccagcaggttgaccaccgaaccaaggctgggccaccttcctcctgggtctggtctccagcctcccagttgtacccttcccccagcccttcctggatgcactgatcagcctgtgcttccttgccctgtttttctttataaatagagccatgttctcctctctctctctctcttttttttttttttttttttgagatggagtcttactctgtcacccaggctggagtgcaatggcacgatctcagctcactgcaacctctgtctcccaggttcaagcaattctcctgcctcagcctcccgagtagctgggattacaggtgcccaccaccatgcccagctactttttggatttttagtagagacagggtttcaccatgttggtcaggctggtcttgaactcctgaccttaggtgttctgcccgcctcagcctcccaaagtgctgggattacaggcgtgagccaccacgcctggcaagacgtgttctctctatgttgttgaggctggtcttgaactcctggctgcaagagatcttcctgcctcagcctcccaatgtgctgggattataggcatgagccaccacacttagcccagcctgtgctttcttaaatgaaaatctaagcatacggctgggtgtggtggctcacgcctgtaatcccagcattttgggaggccaaggtgggcagatcacgaggtcaggagatcgagactatcctggccaacatggtgaaaccctgtctctactaaagatacaaaaattagctgggtgtggtggcccatgtctgtagtcccagctactcgggagactgaggcaggagaatggcatgaacctgggaggcagagcttgcagtgagctgagatcgcgccactgctctccagcctaggtgacagagcgagactccatctcaaaaaaaaaataaaaataaaaaaaagaaaatctaagcgtggtgctcccctgctcaaacatcctcaggttcttttcatggcagataagggcatctcttcatgagccagcccctgcctactgacccagccacctctcccatcccttcccaccccgtacttcaggcttcagcagtactgatctttccaaagaccccagaacacacatgccttcatacctctgtgcctgtacatgcttgtttctgcccttgaaatcatgacagtagctctctgtaggccccgctagcctgtcccttgggtcttagcctcttggaggccttcccagagccccccaaaagtaccccaggcatactttggttccttctctcatgtcccctcagtactttgcacatacctcctttatagcagttgctatgttgtgccagagaagggagtcctgtggctggggggcatatatcttttctttttgagacagagtctagctgtgtcacccaggctggagtgcagtagtgcgatctcggctcactgcaacctccacctcctggattcaagcgattcttgtgcctcagcctcctgagtagctgggactacaggcgtgtgccaccatcatgcctggctacttttttgtattagatatatattttctctcttagcacagtacctaccaagagtgagtgagtagatgtcctgacccctgcaggcatccaaggccctccttccctggacctgtttccacatgtgtgaaggggtgcacaggcagcagcccacctctcagcttccttccagttcttgtgttctgtgaccccttttcctcatctctgcctgcttcctcacagcttgaggcagccctaggtgaggccaagaagcaacttcaggatgagatgctgcggcgggtggatgctgagaacaggctgcagaccatgaaggaggaactggacttccagaagaacatctacagtgaggtggggactgtgctttgcaagccagagggctggggctgggtgatgacagacttgggctgggctaggggggaccagctgtgtgcagagctcgccttcctgagtcccttgccctagtggacagggagttgggggtggccagcactcagctcccaggttaaagtggggctggtagtggctcatggagtagggctgggcagggagccccgcccctgggtcttggcctcccaggaactaattctgattttggtttctgtgtccttcctccaacccttccaggagctgcgtgagaccaagcgccgtcatgagacccgactggtggagattgacaatgggaagcagcgtgagtttgagagccggctggcggatgcgctgcaggaactgcgggcccagcatgaggaccaggtggagcagtataagaaggagctggagaagacttattctgccaaggtgcttgctctcgattggttccctcactgcctctgcccttggcagccctacccttacccacgctgggctatgccttctggggatcaggcagatggtggcagggagctcagggtggcccaggacctggggctgtagcagtgatgcccaactcaggcctgtgcctccacccctcccagtcaccacagtcctaaccctttgtcctcccctccagctggacaatgccaggcagtctgctgagaggaacagcaacctggtgggggctgcccacgaggagctgcagcagtcgcgcatccgcatcgacagcctctctgcccagctcagccagctccagaagcaggtgataccccacctcacccctctctccaggggcctagagtctgggccggatgcaggctggaagcccagggttgggggtgggggtgggggtgggaggttcctgaggaggagagggatgaaaagtgtccccacaaccacagagaagggtcgcaggatgtggagtcagatggcctgtgtgctgtttctgtacactcttacctcaccttcacttctcagggctttggttttcccattcgaaaatggaggctgttcttaatctccctaactcagagttgccacaggactctgcaatgtgaggtgttaaaagcatcagtatttttctagttggctgtgctatttgtgacaggagaaaaagtctagcctcagaacgagaggtttcagttagacaaggggaaggacttcccagttgccagccaagactatgtttagagcttgtgatgttcagagctggctctgatgagggctctggggaagctctgattgcagatcctggagagagtagccaggtgtctcctacaccgacccacgtccctccttccccatacttagggcccttgggagctcaccaaaccctcccaccccccttcagctggcagccaaggaggcgaagcttcgagacctggaggactcactggcccgtgagcgggacaccagccggcggctgctggcggaaaaggagcgggagatggccgagatgcgggcaaggatgcagcagcagctggacgagtaccaggagcttctggacatcaagctggccctggacatggagatccacgcctaccgcaagctcttggagggcgaggaggagaggtgggctggggagacgtcggggaggtgctggcagtgtcctctggccggcaactggccttgactagacccccacttggtctccctctccccaggctacgcctgtcccccagccctacctcgcagcgcagccgtggccgtgcttcctctcactcatcccagacacagggtgggggcagcgtcaccaaaaagcgcaaactggagtccactgagagccgcagcagcttctcacagcacgcacgcactagcgggcgcgtggccgtggaggaggtggatgaggagggcaagtttgtccggctgcgcaacaagtccaatgaggtaggctcctgctcagggtctaaggggatacagctgcatcagggagagagtggcaagacagaaggatggcatgtggagagaggaacatccttgccctcagagggtggaccagggtgagcctgtatatctcctccacactctggttccaggcctggctcctggactctttggctgtgagaccttgagcaggttatttaacctctcagagcatcagtttcctcatctgtaaaatggggatgaatactgatccctaagtctttgagttgtcaggaagatgaaagataaggtatccgtgtgcctggtgctgcgtatgtgtccacagatcatggctattatccccgggggaagggcagtgacaggggtgtgtgtagatggaaggagaggcctcaattgcaggcaggcagagggctgggcctttgagcaagatacacccaagagcctgggtgagcctccccgaccttcctcttccctatcttcccggcaggaccagtccatgggcaattggcagatcaagcgccagaatggagatgatcccttgctgacttaccggttcccaccaaagttcaccctgaaggctgggcaggtggtgacggtgagtggcagggcgcttgggactctggggaggccttgggtggcgatgggagcgctggggtaagtgtccttttctcctctccagatctgggctgcaggagctggggccacccacagcccccctaccgacctggtgtggaaggcacagaacacctggggctgcgggaacagcctgcgtacggctctcatcaactccactggggaagtaagtaggcctgggcctggctgcttgctggacgaggctccccctgatggccaacatcggagccagctgcccccaacccaagtttgccaattcagggcccctttctagagctctctgttgcaggctccagacttctccacccagtaggcaaaccaaaagatgcttcctcaacagcacaaggggtggaagttagacagtgaggattgttaaaggcagagccatactcctacccggagagcttgacagtgtccctctggggtggaaatgagttccttagctccatcaccacagaggacagagtaagcagcaggccggacaaagggcaggccacaagaaaagttgcaggtggtcactggggtagacatgctgtacaacccttccctggccctgacccttggacctggttccatgtccccaccaggaagtggccatgcgcaagctggtgcgctcagtgactgtggttgaggacgacgaggatgaggatggagatgacctgctccatcaccaccacgtgagtggtagccgccgctgaggccgagcctgcactggggccacccagccaggcctgggggcagcctctccccagcctccccgtgccaaaaatcttttcattaaagaatgttttggaactttactcgctggcctggcctttcttctctctcctccctataccttgaacagggaacccaggtgtctgggtgccctactctggtaaggaagggagtgggaactttctgatgccatggaatattcctgtgggagcagtggacaagggtctggatttgtcttctgggaaagggaggggaggacagacgtggggcatgcccgccctgcctctctcccccattcttgttgcatgcatatcctctcatttccctcatttttcctgcaagaatgttctctctcattcctgaccgcccctccactccaattaatagtgcatgcctgctgccctacaagcttgctcccgttctctcttcttttcctcttaagctcagagtagctagaacagagtcagagtcactgctctggttctctgtccccaagtcttcctgagccttctccccttttatgtcttccctctcctcctccgggcccctagcctcccaaacccccattgcccgctggctccttgggcacagaaccacaccttcctgcctggcggctgggagcctgcaggagcctggagcctggttgggcctgagtggtcagtcccagactcgccgtcccgcctgagccttgtctcccttcccagggctcccactgcagcagctcgggggaccccgctgagtacaacctgcgctcgcgcaccgtgctgtgcgggacctgcgggcagcctgccgacaaggcatctgccagcggctcaggagcccaggtgggcggacccatctcctctggctcttctgcctccagtgtcacggtcactcgcagctaccgcagtgtggggggcagtgggggtggcagcttcggggacaatctggtcacccgctcctacctcctgggcaactccagcccccgaacccaggtgagttgtctctgctttgtctccaaatcctgcaggcgggtccctggtcatcgaggggtaggacgaggtggccttgcaggggggagagcctgccttctcttccgcagcccgggggagtgggagcctcctccccacagcctgagtcctagacagcccacctctgcatcctgcccctcttgtctgagccccagactggagggcaggggcagggctggagtgtgagggatgggggagatgctacctcccttctaggggccaggggagggagggtctgggtccaggccctgctgctcacacctctctcctctgttttctctcttagagcccccagaactgcagcatcatgtaatctgggacctgccaggcaggggtgggggtggaggcttcctgcgtcctcctcacctcatgcccaccccctgccctgcacgtcatgggagggggcttgaagccaaagaaaaataaccctttggtttttttcttctgtatttttttttctaagagaagttattttctacagtggttttatactgaaggaaaaacacaagcaaaaaaaaaaaaaagcatctatctcatctatctcaatcctaatttctcctcccttccttttccctgcttccaggaaactccacatctgccttaaaaccaaagagggcttcctctagaagccaagggaaaggggtgcttttatagaggctagcttctgcttttctgccctggctgctgcccccaccccggggaccctgtgacatggtgcctgagaggcaggcatagaggcttctccgccagcctcctctggacggcaggctcactgccaggccagcctccgagagggagagagagagagagaggacagcttgagccgggcccctgggcttggcctgctgtgattccactacacctggctgaggttcctctgcctgccccgcccccagtccccacccctgcccccagccccggggtgagtccattctcccaggtaccagctgcgcttgcttttctgtattttatttagacaagagatgggaatgaggtgggaggtggaagaagggagaagaaaggtgagtttgagctgccttccctagctttagaccctgggtgggctctgtgcagtcactggaggttgaagccaagtggggtgctgggaggagggagagggaggtcactggaaaggggagagcctgctggcacccaccgtggaggaggaaggcaagagggggtggaggggtgtggcagtggttttggcaaacgctaaagagcccttgcctccccatttcccatctgcaccccttctctcctccccaaatcaatacactagttgtttctacccctggctgctgtggtgtctttgttggtggacgtcgctgtgtgtactgaggtgcagactcgtgggcatgcgcgcgcgtacacacacacacacacacacacacacacacacacacacacacacagcgccgcacggtcactgcatcctcctgctcattgctgcccagccctgccctgctccaggggaaacaattagagatcagagcactttgggtgcacatctgggcactcggtggtggctgagggggaaggctttgatataaccatcaccacccactgtacggctctctcccaacggaagtccttcagagaagcagcacctgaaggagggcatttgctaactaacttccctcgtccaccagcacttactgagtgctttctctgtgctgggccctgagcgaagcatgaatataagacatatgatatagacccagtctgagggtggtgacatatcaggacgtaaggacaaggacacccggggaggagggaacagaagctgcaggagagggcagaggaaaggagcagttaatgtccctttgtgccatgttgtgctcaggttgggggattgggaaatgaacaagacaagatgcccactgtcctcagagaaattacaccccagtgggagtcagaaaatagactgcagacaaagggatatgttaggccaagtaggagcctccgagggggttccaacctgggggcatgaggtgcccagactgaggggaggggccccaaacagggaaaatgagctatagaagccagcctttctctggcccttcctagtttccaaagcatttctgcagcatctcatttggccttcgtactgtcttgagaggtaggtattgtctcccagccctctggaactcaggccactcagctcgaaggtggcacagatcccaagattctggaagtttatttatgttccttgggcagagttgagcctgcagtcaagagtcagtgagaaacgggcatgtctggctgggatcgtgggaaaacatgtgagaaagcaaaattactgagaggagaagggcccctgaggtcatgctggacgctcctgattccaccataggctgagaccccacagtgcctttagggaagggaagttaagcggaaggaggtttgaggaaggggtccctgcttgggttggcagtttccaagaaggaaacccttcctctcctaggcctcagcaaagaccctgaggccccgcagatatggggtcttagatgtcagcgagggagtccgtgtgtcccaaaatgaggactcccacctgcagttcctgggtcgggcaccttggggcgccagagccccaccacggtggtgcctgcacatcctgggtaggggtccttcgctactcagctgaaccctggtgagctggctgcatgggcactgtgggctggggaacaccaggggcagcaggcgacgttcctagctcttgaggaggagggctgagggcatagggccgcacacaaacactgccccacaagctggcagcacggcgggggcggcagccggggactcagcagttaaggtgtccacacacgtggtcacctcacatgatgctcacagcacaagtcagcactcagcagccacatttcattatgtaaaaaaaaaaaagttgttgttgttaaaatgtaatacatgcttggcctagcgtggtggcacgcacgcctgtagtcccagcaactcctggcctgaggcgggaaaattgtctgagctcaggagttctaggccagcctgggcaacagcaacaacaaaaatacatatcatatggtaaaattcaaaacacaggtaagggatggacacagtggctcacgcctgtaatcccagcactttgggaggctgaggtaggcggatctcaggtcaggagtttgagaccagcctggccaatgtggcaaaatgcctctactatacaaaaattagctgggtgtggtcgtgcatgcctgtaatcccagctattcgggaagctgaggcaggaggatcgcttgaactgggtggcttatgttgcagtgagccaagatcatgcaactgcactacagcctttacagcctgggcgacagagtgagactccctctcaaaaaaaaaaaaaaaaaaaaaagtcaatatgttgctcagggtatttatttatttatttatttatttatttatttatgagatggagtctcgctctgtcacccaggctggagtgcagtggcgcaatctcggctcactgcaagctccgcctcccgggtacacgccattctcctgcttcagcctcccgagtagctgggactacaggcacctgccaccatgccctgctaattttttgtatatttagtagagatggggtttcaccatgttagccaggatggtctcgatctcctaacctcgtgatccacccgcctcagcctcccaaagtgctgggattacaggcatgagccaccgcgcccagctatttatttatttatttttaataatttttttttttaaaacaggtaagaacaaataattttttttaaatccatttttttctttctttttttttttgagacagtctcactctgtcacctaggctggagtgcagtgtcttgatctcagctcactgtagcctccacctcttgcgttcaagtgtttctcctgcctcagcctcctgagtagctgccattacaggcatgtgccaccacacccagctaatttttggcatttttggtagagacggggtttcgcatgttggccaggttggtcttgatctcctggcctcaagtgatctgcccaccttggcctcccaaaatgctgagattacaggcatgagccaccacacctggcctggaaagattatctttttcttttctttatttttgagatggaatctcactctgttacccaggctggagtgcagtggtgcgatctcagctcactgcaacctctgcctcctgttttccagtgattcttgtgcctcagactctgaagtaactgggactacaggcatgcaccaccacacccagcttccttctttctttctcttttcttttcttttctttctttttgcattttttttttttttttgtatttttagtagagatggggttttgccatgttgcccaggctggtcttgaactcctggcttcaagcaatccactggcctcggtctcccaaagcactgggattacaggcgtgagtcactgtgcccggcaagattatcttcgtcatatcgctttttgtttattggtgtttggggtttttttagaattggagcctcactatgttgcccaggctggccctgaactcctgggctcaagcaatcctcctgcttcagcctcctgagtagctgggactataggcaccccagcttcatagcagtccttaagattaggagggggccaggtgtggtgtctcacacctgtaatcccagcactttaggaggccaaggagaatggattgcttgagtccaggagtttgagaccagctggggcaacatagtgagaccctgtctctattaaatttaaaaaataataataataaaataaaagattaagagagggaggctgaggtgggtggatcacgaggtcaggagttcaagaccaccctggccaagatagtgaaactcgactctactaaaaatctttcaatttgtaaccacatgcacacaaacttttgtccctagcccagtcgtctccattctccagaggacgatttcacacctttgcctctctctttactctcagctgctttacaccaaggagactgttccctgctttacaccaaggagactgccctttgtcaaggcccccagcaccctgcacattgctaacccagtaaccacttctcagtcctcatctaacttgaccttgtttgtcatgggagtgtggtcctcagcctacattgccaatcctttcttttctccctggccgctaagagatggagtgccccagggcttgattctcttctctgtctacactcaggccctaagagatttcctccaggcccgtggctttaatgactgtgcctatgttggtgactctttatccttcagcccgttcctttgcctggaaccccagaccggaatccccacgtaaaggtctgacggcatctcgaagttaacatgtccaacactgctacccagatttccacctacccccagtctgctctgcttatcatcttctccatctcagctcatgaccgcaccatcctttccagttgctttagccataaatcctggagtcatctttaacttctattttcctctcatacttcacattcagtccattagtaaaactccatctttaaaatatgtctggaatctggccaggcgcagtggctcacacttgtaatcccagcagtttgggatgccgaggcgggtggatcacctgaggtcaggagttcaagaccagcctagccaacatggtgaaaccctgtctctactaaaaatacaaaaattagccagctgtggtggcacgaggcctgtaatcccagctactcaggagactgagcaggagaattgcctgaacctgggaggcagaggttgcagtgagcctagatcatgcccctgtactccagcctgggcaacagagtgagactccgtctcaaaataaaataaaataaaaaataaatacaataaaatagtctggaattcaggccattctcatcaccgctgctgccaccaccatcatctgttgtctggattatggcattagttttataactggtctcttgcctttgctctgtacagtttattctccacacagcaacagagtgatcctttaacagtttggtcactcctctgctcagaaccctcagtgtcttcccaaagcacgaaaatgttaaagccaaagtcttcacaatggcatacaaagccgtgcatgatgacccctcccacctcatctgtcactattctcccttgttctcaccccattggagctaccgtggctgcctagatattcctagaacacgccacgcacacacctgcctcaggacctctgaactaatggttccctctgcctggaccatttttctcattaggtatctgcatgccttgttttcactctttcttcagatctctattcaaatgtcagtgtccagtaaagccttccctgaccaaattacattttatattttattttactttttgaggtagggtctcactctgtcacccaggctgagtgcagtggtgtgatcatggctcactgcagcctcgacctcccaggatttaaacaatcctcctgcctcggcctcccaaagtgctaggataacaggcataagccaccatgcccagcccccttaccaaatgttgttattattatttttttttgagatggaatcttgctctgtcacccaggatggagtggattatgtgatctggcacactgcaacctctgcctcccaggttcaagcgattctcgtgcctcagcctcccgagtagctgggattacaggcataagctgccatgctcagctaatttttgtatttttagtagagacggggtttcaccatgttgaccaggctggtcttgaactcctggcctcaagtgatccacccatctcgacctcccaaagtgctgggattaccctaccatacccagccccctgaccaaattttataaaagagtagcatcttcctcatcccgagttttaacctcccagccactctttcttctttatttttctctgggacatttaacactattgagcatacattacacttgtgtatttgtgtcttccaccaaaatacatacacctgaggggcaggtcttttgttgtttttttcatgctaagtccccagtacctattgcagtgcctgactatattgtaggtgctttataagtatttaaagtaaatgcatagactcagaaattgaatcgctcaatgtgagaactttttttttttgagacaaggtctcaccatgttgtccaggctggagtacagtggctattcacaggcttgatcatagcatcatagctcacagcagccttgggttcctggcagcttcccaagtagctgggaccgcaggcacgcgccgccatcctgcccagctatgtgagcacttttgcagaacctgagacctattgccaagtatcatcccaaagagtggaactaattttcactttaaccactagtgggcaggttattaccattctcattttaatgaaggcggctgagacccagcgagagaagaggtttaccccaagtcacccaggactccagattctcagaaaatacagtggcaactcagaatactgtgggaggaccaggggggctttgcagaggaaagggttgttttggcatgaaaggacaagaagggtttcatcaagtggaaatgagaactactatcccggaagagtacatcttccaggtgggagataccgtaggaacagaaactcagagaaaggcggagtccaggctgcctggggaaaagccctccctcactaaagggtcgggaggggcctacagtaccctgcggggagtttgaaattaattgcatgggctctgggaagccagggagggttgtgagtagaggggtgatatgagaattgaggctttctgctatttgtctgtctgctatcttctgtctccattttctttgtccttctcttctgccatgggtttctctcagctgccccagcccctcctggagtaactaagattttccttttctacgtcacaatcctgacagcccatcaggaagcagagggagcgggtgagccaaggtcctcctcagagcctcggtgccccctttgcgctgtgcccagaggggcagagaaaacaagaattggagaggcaactggaaaggaaggtgcctcctacgccccctgactgactctggggtgctggcctccccctgccttctggggccaggcctcaggcccttccacttcttgggctgattctccgtgcctagtaccagttggtgccagctggcagctctcactggagactgaggtggcacgcatatgggggaggggaggaagtgggcaggagcccaaggggaacagggggcagggtctgaggaggtggagtcggaagctgcgtggccagcatgggggtctcatgggatgagggaaaagtgaggcagaggaccctgggggcttccaggggagtaggggaggtgtcaggtggtcctagctctggctttcctgcccctggcaagtccagtcctctccccaccacctactttcctctacactcacccccttaagctgcccctggctaattctccttggtccctttaagagctgcctgggaactggggcactggagggggctggcagggcccccaccccctccctgccatgcctggccctgctccaccccctgtccggtgcagactctgctggaagtcttggacgcctgggttagggtctccacttctgggctgggggtaaggcttaaaagtggtggggaagggggactgtggtccctggggtgggagggaggggcgggatgccagaactctgggactatggacatggagtgtctgtgtgtcaactccagtgaacaatgcagggggtggtcctctggcctctactgggggaggggcagcctcagggatcttgaggggcatatcctaaggagcaggatgcctgggtctcctccctccactcccccatctcatttccccaagaccttcattttctaaattccatcagccactccttgccccctgcaatcaaagacacagggtcccaacatccccactccccacaggtggggaaattgaggctagacaaaccagaggaaatagaattatgtatgctgcagcaggagaaatggagattagcttgtggaaaggctctctctccctctccaccccacagaactgcaaacaggaggtctgggtgtccagctcactccagcgagtttctaactgtggctatggccaccaccctggactatgtccctactctctcatcaagactatttagctcttttctggaagttttgattctcatatggcaaggccaggggaggcccccaaagtccggctgggtgacctggattgaagtggagccaggtaggatctataggctcccccattcccttgggttatttcagaaaggtagctccttccttctctgccacagagactggatccaattcccctaaaagggaagaaaataggggcagggacacaaggatgtccaatgggggtgtgagggcttcctgcagttcacctgcttccttcctgttatcatactagttcagggtcctctactccccaccatcttaatttcaaatcatgtgtcccagtcccaggggagagaagcctgaacaggcaggtcctttctgagtccccacagccgagatgcagagaggcagtgagggtggagtgtcaggaatcagtggggacatggcggccccgttcagggtccacttccgatttcagcacatgccatgccctccttgcttcaccacaaagcaaatgctcaaccaccaccccagctcagatatgaaggggaagcagtcttggtccatgaaaccctctacccagggccgacaccagcacactcatttccttcctcttaaaaatactatgaagtctggcggagccatgctgctcccaggcaggttaaaaagccattattttatggatgtgaggcagggagggtaaatgctctgcccagcatcacacagcaggctacaggcaaccaagcctgggatctagggcccttcgccccagactcatggtgccttttctagtcccctgccagctgacagagaggccagcctggaaggggctttttcttttttcttttttttttttttttttgagatggagtttcgctctttttgcccaggctggagtgcaatggcatgatctcggctcactacaacctccgcctcctgggttcaagtgattctcctgcctcagcctcccgagtagctggtactgcaggcatgcgccaccatgcccggctaattttgtatttttagtagagatggggtttctccaggttggccaggctggtctcgaactcctgacctcaggtgatccgccagcctcagcctcccaaaatgctgggattacaggcgtgagccaccgcacccagccggaaggggctttttcaactcctcattttgccaacaaagttagggcccagtagagacataagggagctctagtaacaaggctgtttaggatcagggctgggagagggcacaggcttggctctcaaaaaggctccatacaaaccgctgcctgcctgtgctcctccccgaatgggaaagaatccggctgtcttctttccctatgtccatctagtctagacccttggaaagtcctgtctgaagtctgctctctacagcacaaaccttccccttttaatacatctcagagggtgttagccacagaaggcttctgggggagccaccttcttctcaggcagcttaggaaggagaggcagaacctgaacctggcagtggaccccctccctcagaagtcaggatactgtaaatagaagagggctccttggggttcttaacagagtctgtcccttggcttatttgcatagttgcatagatatttgtgggctcattcgtgtcctcattggcaaactgaatttgcatggggttgggctgcggtccagctgtgtcgccccggcatatacacagttcccggggtagagggaaacccagaggaactggttgtaaagaggaatgggccccagctgaccccctgaacccaggtggtgacatgtgcacggtggtgcctgctgaaggtgggcaagggagctgagcagggaccgggggctactgtacctccttttcacctcctcccgcatctggagcccctcctcctccacatgtgcgaatccaggagccacagaaggtggggcgcagtgggacatgggtaggaggaggaagaatatggggagattctagtccctcccacttagagatgcggtcgccatggtgactgaggaccagtgaggcgggatggggttgagaatgggggtgggggtgtggcaggggctgaggcactgagagaccggaaagcctggcattccagagggagggaaacgcagcggcatcccc

SEQ ID NO: 2907 - DNA, 3585 bp, Homo sapiens
gtctttcctcgcagctccggggcaagctaggagtgggatggaagtcgagagtcgatcccggagcccggccgcggggagaggttctcggcagagaagacaaagcccgcagcagcgatggggggagagctgggctctgcgtgttgtgggggccaggaaagggtgccaggctggggctggaaccccctggcaaaggatggggtcccctcatccctaaacagcaagccatctcccctcgcccgccccccgcccccccagtctcggagatctcagaggcaccgactgggagtgttcgcgggagcgccgcacctacaccagccaacccagatcccgaggtccgacagcgcccggcccagatccccacgcctgccaggagcaagccgagagccagccggccggcgcactccgactccgagcagtctctgtccttcgacccgagccccgcgccctttccgggacccctgccccgcgggcagcgctgccaacctgccggccatggagaccccgtcccagcggcgcgccacccgcagcggggcgcaggccagctccactccgctgtcgcccacccgcatcacccggctgcaggagaaggaggacctgcaggagctcaatgatcgcttggcggtctacatcgaccgtgtgcgctcgctggaaacggagaacgcagggctgcgccttcgcatcaccgagtctgaagaggtggtcagccgcgaggtgtccggcatcaaggccgcctacgaggccgagctcggggatgcccgcaagacccttgactcagtagccaaggagcgcgcccgcctgcagctggagctgagcaaagtgcgtgaggagtttaaggagctgaaagcgcgcaataccaagaaggagggtgacctgatagctgctcaggctcggctgaaggacctggaggctctgctgaactccaaggaggccgcactgagcactgctctcagtgagaagcgcacgctggagggcgagctgcatgatctgcggggccaggtggccaagcttgaggcagccctaggtgaggccaagaagcaacttcaggatgagatgctgcggcgggtggatgctgagaacaggctgcagaccatgaaggaggaactggacttccagaagaacatctacagtgaggagctgcgtgagaccaagcgccgtcatgagacccgactggtggagattgacaatgggaagcagcgtgagtttgagagccggctggcggatgcgctgcaggaactgcgggcccagcatgaggaccaggtggagcagtataagaaggagctggagaagacttattctgccaagctggacaatgccaggcagtctgctgagaggaacagcaacctggtgggggctgcccacgaggagctgcagcagtcgcgcatccgcatcgacagcctctctgcccagctcagccagctccagaagcagctggcagccaaggaggcgaagcttcgagacctggaggactcactggcccgtgagcgggacaccagccggcggctgctggcggaaaaggagcgggagatggccgagatgcgggcaaggatgcagcagcagctggacgagtaccaggagcttctggacatcaagctggccctggacatggagatccacgcctaccgcaagctcttggagggcgaggaggagaggctacgcctgtcccccagccctacctcgcagcgcagccgtggccgtgcttcctctcactcatcccagacacagggtgggggcagcgtcaccaaaaagcgcaaactggagtccactgagagccgcagcagcttctcacagcacgcacgcactagcgggcgcgtggccgtggaggaggtggatgaggagggcaagtttgtccggctgcgcaacaagtccaatgaggaccagtccatgggcaattggcagatcaagcgccagaatggagatgatcccttgctgacttaccggttcccaccaaagttcaccctgaaggctgggcaggtggtgacgatctgggctgcaggagctggggccacccacagcccccctaccgacctggtgtggaaggcacagaacacctggggctgcgggaacagcctgcgtacggctctcatcaactccactggggaagaagtggccatgcgcaagctggtgcgctcagtgactgtggttgaggacgacgaggatgaggatggagatgacctgctccatcaccaccacgtgagtggtagccgccgctgaggccgagcctgcactggggccacccagccaggcctgggggcagcctctccccagcctccccgtgccaaaaatcttttcattaaagaatgttttggaactttaggctcccactgcagcagctcgggggaccccgctgagtacaacctgcgctcgcgcaccgtgctgtgcgggacctgcgggcagcctgccgacaaggcatctgccagcggctcaggagcccaggtgggcggacccatctcctctggctcttctgcctccagtgtcacggtcactcgcagctaccgcagtgtggggggcagtgggggtggcagcttcggggacaatctggtcacccgctcctacctcctgggcaactccagcccccgaacccagagcccccagaactgcagcatcatgtaatctgggacctgccaggcaggggtgggggtggaggcttcctgcgtcctcctcacctcatgcccaccccctgccctgcacgtcatgggagggggcttgaagccaaagaaaaataaccctttggtttttttcttctgtatttttttttctaagagaagttattttctacagtggttttatactgaaggaaaaacacaagcaaaaaaaaaaaaaagcatctatctcatctatctcaatcctaatttctcctcccttccttttccctgcttccaggaaactccacatctgccttaaaaccaaagagggcttcctctagaagccaagggaaaggggtgcttttatagaggctagcttctgcttttctgccctggctgctgcccccaccccggggaccctgtgacatggtgcctgagaggcaggcatagaggcttctccgccagcctcctctggacggcaggctcactgccaggccagcctccgagagggagagagagagagagaggacagcttgagccgggcccctgggcttggcctgctgtgattccactacacctggctgaggttcctctgcctgccccgcccccagtccccacccctgcccccagccccggggtgagtccattctcccaggtaccagctgcgcttgcttttctgtattttatttagacaagagatgggaatgaggtgggaggtggaagaagggagaagaaaggtgagtttgagctgccttccctagctttagaccctgggtgggctctgtgcagtcactggaggttgaagccaagtggggtgctgggaggagggagagggaggtcactggaaaggggagagcctgctggcacccaccgtggaggaggaaggcaagagggggtggaggggtgtggcagtggttttggcaaacgctaaagagcccttgcctccccatttcccatctgcaccccttctctcctccccaaatcaatacactagttgtttcta

SEQ ID NO: 2908 - protein, 694 aa, Homo sapiens
MGGELGSACCGGQERVPGWGWNPLAKDGVPSSLNSKPSPLARPPPPQSRRSQRHRLGVFAGAPHLHQPTQIPRSDSARPRSPRLPGASREPAGRRTPTPSSLCPSTRAPRPFRDPCPAGSAANLPAMPSQRRATRSGAQASSTPLSPTRITRLQEKEDLQELNDRLAVYIDRVRSLETENAGLRLRITESEEVVSREVSGIKAAYEAELGDARKTLDSVAKERARLQLELSKVREEFKELKARNTKKEGDLIAAQARLKDLEALLNSKEAALSTALSEKRTLEGELHDLRGQVAKLEAALGEAKKQLQDEMLRRVDAENRLQTMKEELDFQKNIYSEELRETKRRHETRLVEIDNGKQREFESRLADALQELRAQHEDQVEQYKKELEKTYSAKLDNARQSAERNSNLVGAAHEELQQSRIRIDSLSAQLSQLQKQLAAKEAKLRDLEDSLARERDTSRRLLAEKEREMAEMRARMQQQLDEYQELLDIKLALDMEIHAYRKLLEGEEERLRLSPSPTSQRSRGRASSHSSQTQGGGSVTKKRKLESTESRSSFSQHARTSGRVAVEEVDEEGKFVRLRNKSNEDQSMGNWQIKRQNGDDPLLYFPPKFTLKAGQVVTIWAAGAGATHSPPTDLVWKAQNTWGCGNSLRTALINSTGEEVAMRKLVRSVTVVEDDEDEDGDDLLHHHHVSGSRR

SEQ ID NO: 2909 - DNA, 3401 bp, Homo sapiens
gtctttcctcgcagctccggggcaagctaggagtgggatggaagtcgagagtcgatcccggagcccggccgcggggagaggttctcggcagagaagacaaagcccgcagcagcgatggggggagagctgggctctgcgtgttgtgggggccaggaaagggtgccaggctggggctggaaccccctggcaaaggatggggtcccctcatccctaaacagcaagccatctcccctcgcccgccccccgcccccccagtctcggagatctcagaggcaccgactgggagtgttcgcgggagcgccgcacctacaccagccaacccagatcccgaggtccgacagcgcccggcccagatccccacgcctgccaggagcaagccgagagccagccggccggcgcactccgactccgagcagtctctgtccttcgacccgagccccgcgccctttccgggacccctgccccgcgggcagcgctgccaacctgccggccatggagaccccgtcccagcggcgcgccacccgcagcggggcgcaggccagctccactccgctgtcgcccacccgcatcacccggctgcaggagaaggaggacctgcaggagctcaatgatcgcttggcggtctacatcgaccgtgtgcgctcgctggaaacggagaacgcagggctgcgccttcgcatcaccgagtctgaagaggtggtcagccgcgaggtgtccggcatcaaggccgcctacgaggccgagctcggggatgcccgcaagacccttgactcagtagccaaggagcgcgcccgcctgcagctggagctgagcaaagtgcgtgaggagtttaaggagctgaaagcgcgcaataccaagaaggagggtgacctgatagctgctcaggctcggctgaaggacctggaggctctgctgaactccaaggaggccgcactgagcactgctctcagtgagaagcgcacgctggagggcgagctgcatgatctgcggggccaggtggccaagcttgaggcagccctaggtgaggccaagaagcaacttcaggatgagatgctgcggcgggtggatgctgagaacaggctgcagaccatgaaggaggaactggacttccagaagaacatctacagtgaggagctgcgtgagaccaagcgccgtcatgagacccgactggtggagattgacaatgggaagcagcgtgagtttgagagccggctggcggatgcgctgcaggaactgcgggcccagcatgaggaccaggtggagcagtataagaaggagctggagaagacttattctgccaagctggacaatgccaggcagtctgctgagaggaacagcaacctggtgggggctgcccacgaggagctgcagcagtcgcgcatccgcatcgacagcctctctgcccagctcagccagctccagaagcagctggcagccaaggaggcgaagcttcgagacctggaggactcactggcccgtgagcgggacaccagccggcggctgctggcggaaaaggagcgggagatggccgagatgcgggcaaggatgcagcagcagctggacgagtaccaggagcttctggacatcaagctggccctggacatggagatccacgcctaccgcaagctcttggagggcgaggaggagaggctacgcctgtcccccagccctacctcgcagcgcagccgtggccgtgcttcctctcactcatcccagacacagggtgggggcagcgtcaccaaaaagcgcaaactggagtccactgagagccgcagcagcttctcacagcacgcacgcactagcgggcgcgtggccgtggaggaggtggatgaggagggcaagtttgtccggctgcgcaacaagtccaatgaggaccagtccatgggcaattggcagatcaagcgccagaatggagatgatcccttgctgacttaccggttcccaccaaagttcaccctgaaggctgggcaggtggtgacgatctgggctgcaggagctggggccacccacagcccccctaccgacctggtgtggaaggcacagaacacctggggctgcgggaacagcctgcgtacggctctcatcaactccactggggaagaagtggccatgcgcaagctggtgcgctcagtgactgtggttgaggacgacgaggatgaggatggagatgacctgctccatcaccaccacggctcccactgcagcagctcgggggaccccgctgagtacaacctgcgctcgcgcaccgtgctgtgcgggacctgcgggcagcctgccgacaaggcatctgccagcggctcaggagcccaggtgggcggacccatctcctctggctcttctgcctccagtgtcacggtcactcgcagctaccgcagtgtggggggcagtgggggtggcagcttcggggacaatctggtcacccgctcctacctcctgggcaactccagcccccgaacccagagcccccagaactgcagcatcatgtaatctgggacctgccaggcaggggtgggggtggaggcttcctgcgtcctcctcacctcatgcccaccccctgccctgcacgtcatgggagggggcttgaagccaaagaaaaataaccctttggtttttttcttctgtatttttttttctaagagaagttattttctacagtggttttatactgaaggaaaaacacaagcaaaaaaaaaaaaaagcatctatctcatctatctcaacaaagagggcttcctctagaagccaagggaaaggggtgcttttatagaggctagcttctgcttttctgccctggctgctgcccccaccccggggaccctgtgacatggtgcctgagaggcaggcatagaggcttctccgccagcctcctctggacggcaggctcactgccaggccagcctccgagagggagagagagagagagaggacagcttgagccgggcccctgggcttggcctgctgtgattccactacacctggctgaggttcctctgcctgccccgcccccagtccccacccctgcccccagccccggggtgagtccattctcccaggtaccagctgcgcttgcttttctgtattttatttagacaagagatgggaatgaggtgggaggtggaagaagggagaagaaaggtgagtttgagctgccttccctagctttagaccctgggtgggctctgtgcagtcactggaggttgaagccaagtggggtgctgggaggagggagagggaggtcactggaaaggggagagcctgctggcacccaccgtggaggaggaaggcaagagggggtggaggggtgtggcagtggttttggcaaacgctaaagagcccttgcctccccatttcccatctgcaccccttctctcctccccaaatcaatacactagttgtttcta

SEQ ID NO: 2910 - protein, 786 aa, Homo sapiens
MGGELGSACCGGQERVPGWGWNPLAKDGVPSSLNSKPSPLARPPPPQSRRSQRHRLGVFAGAPHLHQPTQIPRSDSARPRSPRLPGASREPAGRRTPTPSSLCPSTRAPRPFRDPCPAGSAANLPAMPSQRRATRSGAQASSTPLSPTRITRLQEKEDLQELNDRLAVYIDRVRSLETENAGLRLRITESEEVVSREVSGIKAAYEAELGDARKTLDSVAKERARLQLELSKVREEFKELKARNTKKEGDLIAAQARLKDLEALLNSKEAALSTALSEKRTLEGELHDLRGQVAKLEAALGEAKKQLQDEMLRRVDAENRLQTMKEELDFQKNIYSEELRETKRRHETRLVEIDNGKQREFESRLADALQELRAQHEDQVEQYKKELEKTYSAKLDNARQSAERNSNLVGAAHEELQQSRIRIDSLSAQLSQLQKQLAAKEAKLRDLEDSLARERDTSRRLLAEKEREMAEMRARMQQQLDEYQELLDIKLALDMEIHAYRKLLEGEEERLRLSPSPTSQRSRGRASSHSSQTQGGGSVTKKRKLESTESRSSFSQHARTSGRVAVEEVDEEGKFVRLRNKSNEDQSMGNWQIKRQNGDDPLLYFPPKFTLKAGQVVTIWAAGAGATHSPPTDLVWKAQNTWGCGNSLRTALINSTGEEVAMRKLVRSVTVVEDDEDEDGDDLLHHHHGSHCSSSGDPAEYNLRSRTVLCGTCGQPADKASASGSGAQVGGPISSGSSASSVTVTRSYRSVGGSGGGSFGDNLVTRSYLLGNSSPRTQSPQNCSIM

SEQ ID NO: 2911 - DNA, 3445 bp, Homo sapiens
gcccgggggcccagcgcgggccttggcggaagaggaggaggaggaggaggcagaggagaagagcacggaggaaagggtgccaggctggggctggaaccccctggcaaaggatggggtcccctcatccctaaacagcaagccatctcccctcgcccgccccccgcccccccagtctcggagatctcagaggcaccgactgggagggaaaggaaacccccatttaggaggccggggaggccccagcaaccacacacacacagagacacacagactcacacgcggccgcccacacgcagtcgcctgcgtcagcaccagccgtcaggccctcgctgcccgcctgcggggtgtggagtggggagaacagccccgcctgaatccagtccgactacccgcccctactgatttgcctgggacgccgccggcccacatggccccacccacgcctctgtccccacccccccacgcctctgtccccacccccccaccgcccccggcagcgttccccccttaacaccttcccccaggtgtgttcgcgggagcgccgcacctacaccagccaacccagatcccgaggtccgacagcgcccggcccagatccccacgcctgccaggagcaagccgagagccagccggccggcgcactccgactccgagcagtctctgtccttcgacccgagccccgcgccctttccgggacccctgccccgcgggcagcgctgccaacctgccggccatggagaccccgtcccagcggcgcgccacccgcagcggggcgcaggccagctccactccgctgtcgcccacccgcatcacccggctgcaggagaaggaggacctgcaggagctcaatgatcgcttggcggtctacatcgaccgtgtgcgctcgctggaaacggagaacgcagggctgcgccttcgcatcaccgagtctgaagaggtggtcagccgcgaggtgtccggcatcaaggccgcctacgaggccgagctcggggatgcccgcaagacccttgactcagtagccaaggagcgcgcccgcctgcagctggagctgagcaaagtgcgtgaggagtttaaggagctgaaagcgcgcaataccaagaaggagggtgacctgatagctgctcaggctcggctgaaggacctggaggctctgctgaactccaaggaggccgcactgagcactgctctcagtgagaagcgcacgctggagggcgagctgcatgatctgcggggccaggtggccaagcttgaggcagccctaggtgaggccaagaagcaacttcaggatgagatgctgcggcgggtggatgctgagaacaggctgcagaccatgaaggaggaactggacttccagaagaacatctacagtgaggagctgcgtgagaccaagcgccgtcatgagacccgactggtggagattgacaatgggaagcagcgtgagtttgagagccggctggcggatgcgctgcaggaactgcgggcccagcatgaggaccaggtggagcagtataagaaggagctggagaagacttattctgccaagctggacaatgccaggcagtctgctgagaggaacagcaacctggtgggggctgcccacgaggagctgcagcagtcgcgcatccgcatcgacagcctctctgcccagctcagccagctccagaagcagctggcagccaaggaggcgaagcttcgagacctggaggactcactggcccgtgagcgggacaccagccggcggctgctggcggaaaaggagcgggagatggccgagatgcgggcaaggatgcagcagcagctggacgagtaccaggagcttctggacatcaagctggccctggacatggagatccacgcctaccgcaagctcttggagggcgaggaggagaggctacgcctgtcccccagccctacctcgcagcgcagccgtggccgtgcttcctctcactcatcccagacacagggtgggggcagcgtcaccaaaaagcgcaaactggagtccactgagagccgcagcagcttctcacagcacgcacgcactagcgggcgcgtggccgtggaggaggtggatgaggagggcaagtttgtccggctgcgcaacaagtccaatgaggaccagtccatgggcaattggcagatcaagcgccagaatggagatgatcccttgctgacttaccggttcccaccaaagttcaccctgaaggctgggcaggtggtgacgatctgggctgcaggagctggggccacccacagcccccctaccgacctggtgtggaaggcacagaacacctggggctgcgggaacagcctgcgtacggctctcatcaactccactggggaagaagtggccatgcgcaagctggtgcgctcagtgactgtggttgaggacgacgaggatgaggatggagatgacctgctccatcaccaccacgtgagtggtagccgccgctgaggccgagcctgcactggggccacccagccaggcctgggggcagcctctccccagcctccccgtgccaaaaatcttttcattaaagaatgttttggaactttactcgctggcctggcctttcttctctctcctccctataccttgaacagggaacccaggtgtctgggtgccctactctggtaaggaagggagtgggaactttctgatgccatggaatattcctgtgggagcagtggacaagggtctggatttgtcttctgggaaagggaggggaggacagacgtggggcatgcccgccctgcctctctcccccattcttgttgcatgcatatcctctcatttccctcatttttcctgcaagaatgttctctctcattcctgaccgcccctccactccaattaatagtgcatgcctgctgccctacaagcttgctcccgttctctcttcttttcctcttaagctcagagtagctagaacagagtcagagtcactgctctggttctctgtccccaagtcttcctgagccttctccccttttatgtcttccctctcctcctccgggcccctagcctcccaaacccccattgcccgctggctccttgggcacagaaccacaccttcctgcctggcggctgggagcctgcaggagcctggagcctggttgggcctgagtggtcagtcccagactcgccgtcccgcctgagccttgtctcccttcccagggctcccactgcagcagctcgggggaccccgctgagtacaacctgcgctcgcgcaccgtgctgtgcgggacctgcgggcagcctgccgacaaggcatctgccagcggctcaggagcccaggtgggcggacccatctcctctggctcttctgcctccagtgtcacggtcactcgcagctaccgcagtgtggggggcagtgggggtggcagcttcggggacaatctggtcacccgctcctacctcctgggcaactccagcccccgaacccag

SEQ ID NO: 2912 - protein, 568 aa, Homo sapiens
MPSQRRATRSGAQASSTPLSPTRITRLQEKEDLQELNDRLAVYIDRVRSLETENAGLRLRITESEEVVSREVSGIKAAYEAELGDARKTLDSVAKERARLQLELSKVREEFKELKARNTKKEGDLIAAQARLKDLEALLNSKEAALSTALSEKRTLEGELHDLRGQVAKLEAALGEAKKQLQDEMLRRVDAENRLQTMKEELDFQKNIYSEELRETKRRHETRLVEIDNGKQREFESRLADALQELRAQHEDQVEQYKKELEKTYSAKLDNARQSAERNSNLVGAAHEELQQSRIRIDSLSAQLSQLQKQLAAKEAKLRDLEDSLARERDTSRRLLAEKEREMAEMRARMQQQLDEYQELLDIKLALDMEIHAYRKLLEGEEERLRLSPSPTSQRSRGRASSHSSQTQGGGSVTKKRKLESTESRSSFSQHARTSGRVAVEEVDEEGKFVRLRNKSNEDQSMGNWQIKRQNGDDPLLYFPPKFTLKAGQVVTIWAAGAGATHSPPTDLVWKAQNTWGCGNSLRTALINSTGEEVAMRKLVRSVTVVEDDEDEDGDDLLHHHHVSGSRR

SEQ ID NO: 2913 - DNA, 3471 bp, Homo sapiens
ccttcccccaggtggtgaggggccaaagctcggggatggacaagagaaaggaaggagatgtcactgctgaatttctgctgaatttccttctgcctgctgcccgatttctatttgactggcaatagtctgaggaggacctattagagcctttgccccggcgtcggtgactcagtgttcgcgggagcgccgcacctacaccagccaacccagatcccgaggtccgacagcgcccggcccagatccccacgcctgccaggagcaagccgagagccagccggccggcgcactccgactccgagcagtctctgtccttcgacccgagccccgcgccctttccgggacccctgccccgcgggcagcgctgccaacctgccggccatggagaccccgtcccagcggcgcgccacccgcagcggggcgcaggccagctccactccgctgtcgcccacccgcatcacccggctgcaggagaaggaggacctgcaggagctcaatgatcgcttggcggtctacatcgaccgtgtgcgctcgctggaaacggagaacgcagggctgcgccttcgcatcaccgagtctgaagaggtggtcagccgcgaggtgtccggcatcaaggccgcctacgaggccgagctcggggatgcccgcaagacccttgactcagtagccaaggagcgcgcccgcctgcagctggagctgagcaaagtgcgtgaggagtttaaggagctgaaagcgcgcaataccaagaaggagggtgacctgatagctgctcaggctcggctgaaggacctggaggctctgctgaactccaaggaggccgcactgagcactgctctcagtgagaagcgcacgctggagggcgagctgcatgatctgcggggccaggtggccaagcttgaggcagccctaggtgaggccaagaagcaacttcaggatgagatgctgcggcgggtggatgctgagaacaggctgcagaccatgaaggaggaactggacttccagaagaacatctacagtgaggagctgcgtgagaccaagcgccgtcatgagacccgactggtggagattgacaatgggaagcagcgtgagtttgagagccggctggcggatgcgctgcaggaactgcgggcccagcatgaggaccaggtggagcagtataagaaggagctggagaagacttattctgccaagctggacaatgccaggcagtctgctgagaggaacagcaacctggtgggggctgcccacgaggagctgcagcagtcgcgcatccgcatcgacagcctctctgcccagctcagccagctccagaagcagctggcagccaaggaggcgaagcttcgagacctggaggactcactggcccgtgagcgggacaccagccggcggctgctggcggaaaaggagcgggagatggccgagatgcgggcaaggatgcagcagcagctggacgagtaccaggagcttctggacatcaagctggccctggacatggagatccacgcctaccgcaagctcttggagggcgaggaggagaggctacgcctgtcccccagccctacctcgcagcgcagccgtggccgtgcttcctctcactcatcccagacacagggtgggggcagcgtcaccaaaaagcgcaaactggagtccactgagagccgcagcagcttctcacagcacgcacgcactagcgggcgcgtggccgtggaggaggtggatgaggagggcaagtttgtccggctgcgcaacaagtccaatgaggaccagtccatgggcaattggcagatcaagcgccagaatggagatgatcccttgctgacttaccggttcccaccaaagttcaccctgaaggctgggcaggtggtgacgatctgggctgcaggagctggggccacccacagcccccctaccgacctggtgtggaaggcacagaacacctggggctgcgggaacagcctgcgtacggctctcatcaactccactggggaagaagtggccatgcgcaagctggtgcgctcagtgactgtggttgaggacgacgaggatgaggatggagatgacctgctccatcaccaccacgtgagtggtagccgccgctgaggccgagcctgcactggggccacccagccaggcctgggggcagcctctccccagcctccccgtgccaaaaatcttttcattaaagaatgttttggaactttaggctcccactgcagcagctcgggggaccccgctgagtacaacctgcgctcgcgcaccgtgctgtgcgggacctgcgggcagcctgccgacaaggcatctgccagcggctcaggagcccaggtgggcggacccatctcctctggctcttctgcctccagtgtcacggtcactcgcagctaccgcagtgtggggggcagtgggggtggcagcttcggggacaatctggtcacccgctcctacctcctgggcaactccagcccccgaacccagagcccccagaactgcagcatcatgtaatctgggacctgccaggcaggggtgggggtggaggcttcctgcgtcctcctcacctcatgcccaccccctgccctgcacgtcatgggagggggcttgaagccaaagaaaaataaccctttggtttttttcttctgtatttttttttctaagagaagttattttctacagtggttttatactgaaggaaaaacacaagcaaaaaaaaaaaaaagcatctatctcatctatctcaatcctaatttctcctcccttccttttccctgcttccaggaaactccacatctgccttaaaaccaaagagggcttcctctagaagccaagggaaaggggtgcttttatagaggctagcttctgcttttctgccctggctgctgcccccaccccggggaccctgtgacatggtgcctgagaggcaggcatagaggcttctccgccagcctcctctggacggcaggctcactgccaggccagcctccgagagggagagagagagagagaggacagcttgagccgggcccctgggcttggcctgctgtgattccactacacctggctgaggttcctctgcctgccccgcccccagtccccacccctgcccccagccccggggtgagtccattctcccaggtaccagctgcgcttgcttttctgtattttatttagacaagagatgggaatgaggtgggaggtggaagaagggagaagaaaggtgagtttgagctgccttccctagctttagaccctgggtgggctctgtgcagtcactggaggttgaagccaagtggggtgctgggaggagggagagggaggtcactggaaaggggagagcctgctggcacccaccgtggaggaggaaggcaagagggggtggaggggtgtggcagtggttttggcaaacgctaaagagcccttgcctccccatttcccatctgcaccccttctctcctccccaaatcaatacactagttgtttcta

SEQ ID NO: 2914 - protein, 568 aa, Homo sapiens; identical to SEQ ID NO: 2912

SEQ ID NO: 2915 - DNA, 3372 bp, Homo sapiens
gtctttcctcgcagctccggggcaagctaggagtgggatggaagtcgagagtcgatcccggagcccggccgcggggagaggttctcggcagagaagacaaagcccgcagcagcgatggggggagagctgggctctgcgtgttgtgggggccaggaaagggtgccaggctggggctggaaccccctggcaaaggatggggtcccctcatccctaaacagcaagccatctcccctcgcccgccccccgcccccccagtctcggagatctcagaggcaccgactgggagtgttcgcgggagcgccgcacctacaccagccaacccagatcccgaggtccgacagcgcccggcccagatccccacgcctgccaggagcaagccgagagccagccggccggcgcactccgactccgagcagtctctgtccttcgacccgagccccgcgccctttccgggacccctgccccgcgggcagcgctgccaacctgccggccatggagaccccgtcccagcggcgcgccacccgcagcggggcgcaggccagctccactccgctgtcgcccacccgcatcacccggctgcaggagaaggaggacctgcaggagctcaatgatcgcttggcggtctacatcgaccgtgtgcgctcgctggaaacggagaacgcagggctgcgccttcgcatcaccgagtctgaagaggtggtcagccgcgaggtgtccggcatcaaggccgcctacgaggccgagctcggggatgcccgcaagacccttgactcagtagccaaggagcgcgcccgcctgcagctggagctgagcaaagtgcgtgaggagtttaaggagctgaaagcgcgcaataccaagaaggagggtgacctgatagctgctcaggctcggctgaaggacctggaggctctgctgaactccaaggaggccgcactgagcactgctctcagtgagaagcgcacgctggagggcgagctgcatgatctgcggggccaggtggccaagcttgaggcagccctaggtgaggccaagaagcaacttcaggatgagatgctgcggcgggtggatgctgagaacaggctgcagaccatgaaggaggaactggacttccagaagaacatctacagtgaggagctgcgtgagaccaagcgccgtcatgagacccgactggtggagattgacaatgggaagcagcgtgagtttgagagccggctggcggatgcgctgcaggaactgcgggcccagcatgaggaccaggtggagcagtataagaaggagctggagaagacttattctgccaagctggacaatgccaggcagtctgctgagaggaacagcaacctggtgggggctgcccacgaggagctgcagcagtcgcgcatccgcatcgacagcctctctgcccagctcagccagctccagaagcagctggcagccaaggaggcgaagcttcgagacctggaggactcactggcccgtgagcgggacaccagccggcggctgctggcggaaaaggagcgggagatggccgagatgcgggcaaggatgcagcagcagctggacgagtaccaggagcttctggacatcaagctggccctggacatggagatccacgcctaccgcaagctcttggagggcgaggaggagaggctacgcctgtcccccagccctacctcgcagcgcagccgtggccgtgcttcctctcactcatcccagacacagggtgggggcagcgtcaccaaaaagcgcaaactggagtccactgagagccgcagcagcttctcacagcacgcacgcactagcgggcgcgtggccgtggaggaggtggatgaggagggcaagtttgtccggctgcgcaacaagtccaatgaggaccagtccatgggcaattggcagatcaagcgccagaatggagatgatcccttgctgacttaccggttcccaccaaagttcaccctgaaggctgggcaggtggtgacgatctgggctgcaggagctggggccacccacagcccccctaccgacctggtgtggaaggcacagaacacctggggctgcgggaacagcctgcgtacggctctcatcaactccactggggaaggctcccactgcagcagctcgggggaccccgctgagtacaacctgcgctcgcgcaccgtgctgtgcgggacctgcgggcagcctgccgacaaggcatctgccagcggctcaggagcccaggtgggcggacccatctcctctggctcttctgcctccagtgtcacggtcactcgcagctaccgcagtgtggggggcagtgggggtggcagcttcggggacaatctggtcacccgctcctacctcctgggcaactccagcccccgaacccagagcccccagaactgcagcatcatgtaatctgggacctgccaggcaggggtgggggtggaggcttcctgcgtcctcctcacctcatgcccaccccctgccctgcacgtcatgggagggggcttgaagccaaagaaaaataaccctttggtttttttcttctgtatttttttttctaagagaagttattttctacagtggttttatactgaaggaaaaacacaagcaaaaaaaaaaaaaagcatctatctcatctatctcaatcctaatttctcctcccttccttttccctgcttccaggaaactccacatctgccttaaaaccaaagagggcttcctctagaagccaagggaaaggggtgcttttatagaggctagcttctgcttttctgccctggctgctgcccccaccccggggaccctgtgacatggtgcctgagaggcaggcatagaggcttctccgccagcctcctctggacggcaggctcactgccaggccagcctccgagagggagagagagagagagaggacagcttgagccgggcccctgggcttggcctgctgtgattccactacacctggctgaggttcctctgcctgccccgcccccagtccccacccctgcccccagccccggggtgagtccattctcccaggtaccagctgcgcttgcttttctgtattttatttagacaagagatgggaatgaggtgggaggtggaagaagggagaagaaaggtgagtttgagctgccttccctagctttagaccctgggtgggctctgtgcagtcactggaggttgaagccaagtggggtgctgggaggagggagagggaggtcactggaaaggggagagcctgctggcacccaccgtggaggaggaaggcaagagggggtggaggggtgtggcagtggttttggcaaacgctaaagagcccttgcctccccatttcccatctgcaccccttctctcctccccaaatcaatacactagttgtttcta

SEQ ID NO: 2916 - protein, 756 aa, Homo sapiens
MGGELGSACCGGQERVPGWGWNPLAKDGVPSSLNSKPSPLARPPPPQSRRSQRHRLGVFAGAPHLHQPTQIPRSDSARPRSPRLPGASREPAGRRTPTPSSLCPSTRAPRPFRDPCPAGSAANLPAMPSQRRATRSGAQASSTPLSPTRITRLQEKEDLQELNDRLAVYIDRVRSLETENAGLRLRITESEEVVSREVSGIKAAYEAELGDARKTLDSVAKERARLQLELSKVREEFKELKARNTKKEGDLIAAQARLKDLEALLNSKEAALSTALSEKRTLEGELHDLRGQVAKLEAALGEAKKQLQDEMLRRVDAENRLQTMKEELDFQKNIYSEELRETKRRHETRLVEIDNGKQREFESRLADALQELRAQHEDQVEQYKKELEKTYSAKLDNARQSAERNSNLVGAAHEELQQSRIRIDSLSAQLSQLQKQLAAKEAKLRDLEDSLARERDTSRRLLAEKEREMAEMRARMQQQLDEYQELLDIKLALDMEIHAYRKLLEGEEERLRLSPSPTSQRSRGRASSHSSQTQGGGSVTKKRKLESTESRSSFSQHARTSGRVAVEEVDEEGKFVRLRNKSNEDQSMGNWQIKRQNGDDPLLYFPPKFTLKAGQVVTIWAAGAGATHSPPTDLVWKAQNTWGCGNSLRTALINSTGEGSHCSSSGDPAEYNLRSRTVLCGTCGQPADKASASGSGAQVGGPISSGSSASSVTVTRSYRSVGGSGGGSFGDNLVTRSYLLGNSSPRTQSPQNCSIM

SEQ ID NO: 2917 - DNA, 2918 bp, Homo sapiens
tgttcgcgggagcgccgcacctacaccagccaacccagatcccgaggtccgacagcgcccggcccagatccccacgcctgccaggagcaagccgagagccagccggccggcgcactccgactccgagcagtctctgtccttcgacccgagccccgcgccctttccgggacccctgccccgcgggcagcgctgccaacctgccggccatggagaccccgtcccagcggcgcgccacccgcagcggggcgcaggccagctccactccgctgtcgcccacccgcatcacccggctgcaggagaaggaggacctgcaggagctcaatgatcgcttggcggtctacatcgaccgtgtgcgctcgctggaaacggagaacgcagggctgcgccttcgcatcaccgagtctgaagaggtggtcagccgcgaggtgtccggcatcaaggccgcctacgaggccgagctcggggatgcccgcaagacccttgactcagtagccaaggagcgcgcccgcctgcagctggagctgagcaaagtgcgtgaggagtttaaggagctgaaagcgcgcaataccaagaaggagggtgacctgatagctgctcaggctcggctgaaggacctggaggctctgctgaactccaaggaggccgcactgagcactgctctcagtgagaagcgcacgctggagggcgagctgcatgatctgcggggccaggtggccaagcttgaggcagccctaggtgaggccaagaagcaacttcaggatgagatgctgcggcgggtggatgctgagaacaggctgcagaccatgaaggaggaactggacttccagaagaacatctacagtgaggagctgcgtgagaccaagcgccgtcatgagacccgactggtggagattgacaatgggaagcagcgtgagtttgagagccggctggcggatgcgctgcaggaactgcgggcccagcatgaggaccaggtggagcagtataagaaggagctggagaagacttattctgccaagctggacaatgccaggcagtctgctgagaggaacagcaacctggtgggggctgcccacgaggagctgcagcagtcgcgcatccgcatcgacagcctctctgcccagctcagccagctccagaagcagctggcagccaaggaggcgaagcttcgagacctggaggactcactggcccgtgagcgggacaccagccggcggctgctggcggaaaaggagcgggagatggccgagatgcgggcaaggatgcagcagcagctggacgagtaccaggagcttctggacatcaagctggccctggacatggagatccacgcctaccgcaagctcttggagggcgaggaggagaggctacgcctgtcccccagccctacctcgcagcgcagccgtggccgtgcttcctctcactcatcccagacacagggtgggggcagcgtcaccaaaaagcgcaaactggagtccactgagagccgcagcagcttctcacagcacgcacgcactagcgggcgcgtggccgtggaggaggtggatgaggagggcaagtttgtccggctgcgcaacaagtccaatgaggaccagtccatgggcaattggcagatcaagcgccagaatggagatgatcccttgctgacttaccggttcccaccaaagttcaccctgaaggctgggcaggtggtgacgatctgggctgcaggagctggggccacccacagcccccctaccgacctggtgtggaaggcacagaacacctggggctgcgggaacagcctgcgtacggctctcatcaactccactggggaagaagtggccatgcgcaagctggtgcgctcagtgactgtggttgaggacgacgaggatgaggatggagatgacctgctccatcaccaccacgtgagtggtagccgccgctgaggccgagcctgcactggggccacccagccaggcctgggggcagcctctccccagcctccccgtgccaaaaatcttttcattaaagaatgttttggaactttactcgctggcctggcctttcttctctctcctccctataccttgaacagggaacccaggtgtctgggtgccctactctggtaaggaagggagtgggaactttctgatgccatggaatattcctgtgggagcagtggacaagggtctggatttgtcttctgggaaagggaggggaggacagacgtggggcatgcccgccctgcctctctcccccattcttgttgcatgcatatcctctcatttccctcatttttcctgcaagaatgttctctctcattcctgaccgcccctccactccaattaatagtgcatgcctgctgccctacaagcttgctcccgttctctcttcttttcctcttaagctcagagtagctagaacagagtcagagtcactgctctggttctctgtccccaagtcttcctgagccttctccccttttatgtcttccctctcctcctccgggcccctagcctcccaaacccccattgcccgctggctccttgggcacagaaccacaccttcctgcctggcggctgggagcctgcaggagcctggagcctggttgggcctgagtggtcagtcccagactcgccgtcccgcctgagccttgtctcccttcccagggctcccactgcagcagctcgggggaccccgctgagtacaacctgcgctcgcgcaccgtgctgtgcgggacctgcgggcagcctgccgacaaggcatctgccagcggctcaggagcccaggtgggcggacccatctcctctggctcttctgcctccagtgtcacggtcactcgcagctaccgcagtgtggggggcagtgggggtggcagcttcggggacaatctggtcacccgctcctacctcctgggcaactccagcccccgaacccag

SEQ ID NO: 2918 - protein, 568 aa, Homo sapiens; identical to SEQ ID NO: 2912

SEQ ID NO: 2919 - DNA, 91670 bp, Mus musculus
  misc_feature (1)...(91670): n = A, C, G or T/U
tttaagaatactgactgctcttctgaaggtcctgagttcaaatcccagcaaccacatggtggctcacaaccacccgtaatgagatctgacatcctcctctggtgtgtctgaagacagctacagtgtacttacatataaataaatcttaaagagagagagagagagagagagagagagagagagagagagagagcgagagagagagagaaagagaggagagaaaacctgggtttaattcccagtacctacatatatatacatacatttacaaccaacagggcagggcatccaatacccccttcagaactctgtgggtaccatgtggtatacagacatacatgcaagcaaaacacccatatagatgaaataaaaataaaataatttttaaagttttaaaaaatatttaaaatttttgttgctacatgtaaataagggcagtttcttatattttgagctttggtttgggtttttttttttttttgataaaaggcttcatattgattaagcatcaaaattacactttttgtttgtgtatgtcctgataagatgtataattttacaattactgaacactgaatgtttaagatcaaagttcagttcattcctaaagacttcccaagttgggcgtgctagttcacagccgtactttcagaacttgggaggcaaaggcatacatattgccgtgagtttaaggtagccctggagattgtgtaagaccctgtttcagaaaagcaagcaagcaaccacacacaaaaaaaaaacttcccattttgtagggattggatgatggttcacataaagggagggtgcttgccaaacaagtgagggcagtgtcctcgtcccttaaatcagtgtcctgcctgccactgattctctaatacttatcttttcgtttctgagtgaagtcataatataaaatataaaagctcttaaagcaccaggctagtctatagtctgtgcgttgtgttattatatatacgctcttcttgattgggttgatacaaaaggctcacccttttagtaaaatcattgtttaaatgcttactgctagaagccatgtatcaaattacacacacacacacttttgggttgtttttttgtttgtttgtttgttttttgtttttatttttgtttttgagacaaggtttctatgtgtagttctggctgtcctgaagctcactgtgtagaccaggatagctttgaactcaaagatccacctgcctctgcctctgcctcccaggttttgtgatcaaaggtgtacacaaccatgcctggctccaattttcatcttattttaaagctcagttactaaaaaattgttgccgctcagtctgtctttccacaagattcctccagtagtctctccttttgtcattactaagatttcctaattgtctcagtaagggttcaatgaaactctttttttttccattttttattaggtatttagctcatttacatttccaatgctataccaaaagtcccccatagccactcacccccactcccctacccacccactccccctttttggccctggcgttcccctgtactggggcatataaagtttgcgtgtccaacgggcctctctttgcagtgatggccgactaggccatcttttgatacatatgcagctagagtcaagagctccggggtactggttagttcataatgttgttccacctatagggttgcagatccctttagctccttgggtactttctctagctcctcaatgaaactcttataaagggcaacattcaattgggggtggtttagtctgttattatcagggtaggaagcatacatagtgccatgcaggcagatatggtgctaggaagatagttgagagctctatacccagaccccaaggccgcaggaagagactgagacaccttttttccaactatgccacaccttctccagcaaggccataccccctaacagtgccactcccagtgagtcttttgggggccatttttttcaaactaccatactagtttattttcaaaatagggttataaatagatcttttcatatctcaaaatcactctgtctgtctctttgtgtgtgtgttgagtcaggattgtgtagccctggctagcctagaatactctatataaattaagcttgccttgtgtcagtctcttgcctctgcctctcaggttctaagattacagcctgtgccaccaccccagccatatctcaaactcttattttaatagtatccattaccatatgccttgttctcatcttgatgtggagctgaggagtttagaaaatgatcataattgttactcctacatcttttggtcagttttcaaaaatcctgaagcttaggttgcactccgtaccaattaaacaagagtgtctggaggagggagccccaggcactggcgttttgaagattgccagatgattccagtgtgtagcaaggtggaaaccactggcttttcttacttgccatataataacttagccactccacctcaccgttacctactttcttgtcagggtttaatagatgacttataatgatgtatttatctactttaaaatgttcatacgttacataagtgttctgcaattatcactgttgaaaaaaaagtcccaagcttgtacttgcactgacaattttgactacttttcactcttgataaactgctttgcctcttgatccctatgaggatatgctgaatcggggtgtgtgtgtgtgtgtgtgtgtgtgtgattttgtttgtatattttacttcctttttacacattttcttttaagtttttgtttgtttagtttgagacaggatctaaatgtagcctcagctacgtaagcctctctaagtagctaagactggctttgaactcccacccctcctccctccacctcccaacagctaagattacaggcatgtgctatcacatctggctatcccctttaaatagatagtaaaaggcaatactttaaactttgttgatctgcttggattcatacctagctcctgggtgtgctttaaagagtgaaaaaatgtcctaaaattgggagtctggtgaaaaaacctaatttatgattatttatagacgacttgttcttcttgtctgaaggcatgtctgttgacgtctgtagcctgaggggctgagagtgagtaaaccatcctttcttcctagatcttcatctgctggtggacgtggcctgcaagcaggaacacttcccaaaggaggaggagttaaaagaatgagaagctgggtgacagccgtgacatcgtgcgctagccacagctggaggggacaggcgctgcacatgacacactgttgggagtttttcagttctgttaaggaaaaaaaaaagcatcttttttgtttttgttaattgagattttgttaaattggaaattgggagtttgatattcactccaactgttcagtccagatcgcttaccttggcaaactgctaaacagctagcggccttttttttttttttttaattttttttatgctgcccagattcctttcaaatgaaaagtcctggccttcaagaagcatctaaaaactactgtgttgatggtactggagcagtgtgtgtgctgagtcgtgatgccatcttgaactgtagtcagcacagtgtcgcctgtctggagtcacagtgtgaccctttaaggaagagggtatgataaaccaagacacaagaggtcaccaatagcacaagtccaagcgggtcagggccccgggaggacgctggaaaacgctcgttttctaagtgagtaaccaagaacgggctcttgattctgaacccacgtcctgtttgaagagcaaggcatccggacttggcccatccatcacactaacagcctctgagtctttaatattcatgggagtgttttttcccattttcatgtctttctttaatttgaatgataaattatcataaatagtaagaaagttttgttaatatcacttacataaatgtcttctaaagaaaaatatttaatttgtttaattatatttataaatgctgatagatgtaaaagttttaaagctttgtgtttgtattaacattgcagagtggaaggattaaaggacgcatgtgtaattttatgtttgaagggtaaatgtacaatatgtagacaaaagcactgagaggttaacactgttttcttattttagatttttacattcagctagtatagattctcatctataaggggtattgtgtgcaaatctggggggaaattgcttggtatcatttactggaagctatgctgtaatttgaaacaaacctatatttgaaatattaaatggcttaagcttctgagagacttttggacagtggagtagactatcaccaattttcttatccctctgttggactgtgcacttgagtagtcgaattgtggggctgtttttaaggagaaggaggagattttagatgtccagtttttgtagccaatccatgtccacccagtgacagcaagaacttttgtaatttaatggattttcaggactagaactttcttgctgaatacccccccacccccacacacacacccagtttcctaataagcgctgcagaaataaaaggaaaggtctgtggatttaaagctaatgaagcaagcagcgcttcagtggcattgccactgtaccagccattgcaggttcacagctcacttcctgctttgcgctgggccttcccaatggcattagacccagaagtgtcgcagaggtcgagctgctctggagggtgagctctggattagtccacagcgactcagtttaattttgaaactaggttttgaaaaatgactctctgaccatctaattagactatttgtgctccttcctgggcacctaatcatctttactagggaggcttgaaagatacccagacgattgagacgtctacatctatctgtgccaaatgtcttggcaaaatatgtgaaaaggagaccggcttctaatgaaggacctttgccttttctctgtcacattgaagagctggtaagctgtgtaggtgatagttcttcccctcgagatgcctttcttagccttgtggctatggaaagaggtaatacctttagaggaacgtgtgtcaggcagagccttggcacagacatggtttcagtggtcttcaggcttgatcgatgagatgccttgatctgctctccaaacgtttttacagacgagcataccagatagaggagctggatctcctgctctgctcactgcctggagcccatctcctaaagccatcgtcagtgacttgtgcaaatagcaagcagtcaagtggaatgtgcatgtgaacaagccagcagggcctgacacacacttgagttcctgtctagcacattcgcgtttcagcaccttaagcaccgatcagtttcagtcagtcaacaataaaatgaatgttccaactagactcttgtcttggttgttttactgttgtattggttgccaatagaaaatttagtcattataagcagctgggtaaagttcaaaaactcaatgcattctgtttttcaaagaatctgatttctctctctttctctcttctacagtgctggagatgaactcagagcctggcatgtgtgctaggtaaacactgtacctgtctccttgttgagacaaggtcttgctatatagaccaggctagccttaaacttgcagtgatcctcctgcctctgtatctggagttctgcatttcaggtgtgtggcactatacacagtctgcatcaaggttatgcttggctacataaagagttagaggccagcctgggatctgtgagaccaagacactgcctcaacaaaacagttgtccagacctttaaaaatgttccttttaaataacgattaaaaattaaatgttttaaagaacaaggacagttcttatatatacttcatagagtcctgggttttagaaaaggatgagccgtcttcagtaactttagtcaatccagacaggaaagtgattgctaaggatgctctgtcggatgcgcaggatgaggctggggctgaggacgccactgagacccagagcactggccccacatgcacaggccctgcatttagatgccatgggcaccacaaagaacacagtgctatctacagcattttcaggaagaggccatggcatatcagacctaatttgaataataatctaccttgttattttggtaatgtaagtgaactatgtattagtgcactaaagtacagggttgtttggcttgatcccaagttcatgaaagatttatttcatcatttctagatttcagaatttccgtgagagagaacaaccaagtttataagtttatatttttagttttcaactaaatatgtatattaactattagttgattactctgtgagtttcaagaaggaaaaggtgcggtctacttagaagttattttgttgtttctctttaccctgaagatatttaacttgtactagtgttctataattacatgtagttttcattattttgatatgtcactctattgccatggttaagagcaaaacatttgtgctagtgagacagctcagcaggtaaagccccatgcagtcttgatgacctctgaattggaccccagaactcctgtaaaggtggagggagagaaccaactgcacaaagttgtcctttgatcttcacacccgtaccccccatcacactccacctctctctttcttctcctcttcttgctctctctctctctctctcatacacacacacagagaattatacatttaaaaattcaaacaaatttacttcagagctaaacactatagactatgcttgtaatcccacctagaaagtttaagcaggagtttcagaagtttttggctagcctgggctaaaaacaagacacctaccccctttttgaagaaaaaaattagaatttctctctcccaggttagttattaactataaaactctgagaccatctaaaacctatatagaaaaatatcagtgggcaacttaatgctttctgagatactatattacttaatccttacagcaagcctaccattgcaattatccacagggcatttttttgacagggggtcctgatataactgactgacttggaactcactctacaggcctccaattaacaacagtccttctcattcagttttgtgactactaatattacagttgtgagccactatgcttggctaattatccacatttttacacatgcccaaacaggttcatctatatattaaattaaaacacagaacttcttcataatcatttaaaatgtatacatttcaacagagttgaatgtccacattgttgtttatgaatagaattttgaaaaattctactagttcaaccatggaatgctgaccatggggctggagggatggcacaggttaaggtcactgactgctcttccagagtttgagtctcagcattcacacgtgacttaaaacatctgtaactgcagctccacagagccttacaccctcttctggcttctcacacacatggtatacaaacatacatgcagacaaaacatccatacatatcaaatacaattttaaaaagaaatgtcaaatataatttgaaaatttaaatattacagtattcaaatatgaagatttacaaagaactatattgcatgaaggtagtaattagctaaatttaatctctttacctatactgtttttattagacatatttaacttttaagaaaagattcatcttgtgtgtatgggtgttttgtctgcagtgcctgtggaggccagacaagggtgttgaattcactggaaatggagttgtagatggttgtgagccaccatgtaaatgttgaaaactagacttcagccctctggatgaacaggcagccagtgctcttaaccactgagccactgctccagctccaagcataggtttaatgcttagcttctatatgcagactaacttagagtcttacactggaagaataggtttgacccaaagagtaagagagaaataacagattccagacttctgacagcaacctgattcgagagatccatccaggtgcagtttaggcagaactactgaacgtagtaagaactgaagaaaagctatgcagaagtctttattcacagtggcagacataagcaacaagtactcagtataagatctctcaattctggctttgtgccatttgtagacactaaaacatgggaagaatagagatctatttgaatttgtaactgcaagactttgcgccgttcttttgtcttttggatgtctttgttttctgttccgttcctcataccgccgtcagtgtgctagtgcttacagaatagacacatttgggtggccctgatttatctcctgtggggaaaggtaaggactgattgaactgcatgcagttgggctgtcgctcactagggggagtaaaagagcaagagacagaaagagaccgagagaagacttttggttaaattagtgagtgcgtgcaccaagaggaggaggggccggcttgcgtgtagcggctccaccctcactttgtcagcaggtagagagcgtgattgcagtcccaggggaagaagtcagagctggtacaccaattacaaaccacaggtttcctgctgtagggagctgatccagaattgtctttcttgaaaggaagcacttcaaccctgcctcctcctgaacttccaagtccgtccatgattcagggataccgtcttctccctctgggatattctgtgatttgggtagtgactgttctatttgctgcttcgtttctcatctcttccaagatattccgtacagaggcggagggagaagacttttgttagattttagagatgattttggctcatctttaagcatttccagagttcttgaggaggacagtagctctcgtcttggaataagtttttgcctgatctgcgtggattactttttcgggcttcggaatttctcagcacctacctgtagtgcgagcacttggtctgattgcagagtgagaaggtggaagccggagccgtactgggttaagcagctcaggtctttttttaaagcaggatttataaatgcacaattgaatttgtttcatccccgtgccgtggactccagtgggcccgacagcgcaacaggtttgcagatttcttttgaaattctttcgtgttttctccctccctctgtctcagcgaaagtaaagaatctatagaacaggtttgcgttcagacgcttggcttttcagcacttactctgaagactttataggatttttaaatgacttcaaaaggcagcatactttgtgggtgaagtgtatttatagttacttaagggtgcgcattttaaaaatctgatgtttataaagagtccaaagtttcctaggaacatagaaataacccaggtctcctcagcctgatttttttcagggcgctcaacttagagcctctctacccccctatcttttattctccgccccctcaaggaatttgaaaacttaggaatagtcctttgtttttctcctgaatctagaagattacagattgtaaagtctggatgtgtttccacagcattctgaggaaagtcaaagcgcttggcattctcagactggagaataaactctgggatccctaaacgagaaaggaaagtggaaacagaaatatgaattttagctgggaaaataattgcaaagctaaacttttcaagtatctcaaaagggaagttggaagagattttgatactcagattaattgtgtcgtatgtcaaagatatatgaatttgtgcctaattttacaggcacttttggtggaacacacacacacaaaataatatattgtagttctttaaaagtatataaattcagtaggcctagaactctggactatgctgaaacacaatttagcatggacattttaattaagagtatatgcttcagcatcattagacatccctccaggtggggcctgattagttcccactcttcccctattcaaaagaaaacctcctcatggactttagccatttatggttgacatttttttctggcttaaaaagggcagcatgtcttcgtgttctgagctgaagttcctccctcacctccgatgcgctgctttagccgtttactgaccttgttttcttcatcggcctcgggtttagtgcctcaggaatctgatacatatggaagaccagcagcaagtgatctgacataataccaatccatgtttgtatctaaagcacatttggaaattccaaagagaagaggtggcatttctgtattcgcagtgacgatgggagaaaaggacatacctgccccagaggtgggctgaaaaggccatcttctgctcccaatcaggaataccccctgtgcttgggaatctacgttagaaaaaggaaggaccagaatctgacttggctctctgaaacggagggctagcacttctccccattcgttttctgcattgaggacctgcctttgggatgagctggtagtagaagcggtatgcatggccgaagagcattgatgcagctggtagcatgagtggtggccaccagctgcagctggctgtcctctggccctggctgctgatggcaaccctgcacgcaggcttcggacacacaggacgggtgctggcggcggcagtggagtccgaaagatcagcagaacagaaagctgttatcagagtgatccccttgaaaatggaccccacaggaaaactgaacctcactttggaaggcgtgtttgctggtgttgcagaagtgactccagcagaagggaagctaatgcaggcaagtagaatgcggttctgttttaccttctgtctgcttgaaagatgccggtcttcttttagtttggcaaagcaaaaacccatgcaagggcttccattgcttagtgttgcatttattcacgttttgtgaagacattgctttattggtagtgtaaggcatattcttattttatatttgaatatatatatacatatgtatgtatatatatatattctgtattttagaaggcaatttgcttattttaacttatgttgcattatctcttggattatacataataaaacttttctttacaaatatatttggaacactattttgatagatgaaaatacaagtatttatttaattgacttgaggaacatagcttagatcctgttaaattgtaagtgttaattttaatgatcgaggcaccctgaaattctagactgcccccgaagcatatttgattactgtgtcacttttaaaattcggtcaagcttgaatgctatggctggcttcctaccacgtgtggctccctgttgctaatccccaaatggagaggactaggtcacaaaatggacccagcgtctgcaccaggccttgctccttctggtccagtttttaaatgtacagttcaaaactataaaagtttatttgacttttttttttttttgactcacagagtttttcctgacacaatttcttaggtttcaggctgtaacttattcacaatctaccttttcgtatatgttgaatttattaactcatgagggccatagtcttccttaaggccaattgctcgttcctgtggggaagacagaacttggtgagctgtggatttgttttgttttgtttttgtttgttttgttttgttttttaatgggcaatctactgtcttacttcgttaaaagatgttgcttgcttatttggtaaaataacacttcttgctgtagttattggaggtaggtttaaatatgatcagccttagcagccaaattcagattttcattttgtgatatatatggaatatgaattttagttcatggttatatgaattagaactttttgatatttatagaaagaaggtaagaacttgaaataaataaattaattaattctcaaaaatgaatattttaactaggcgttgtgccccatgcctttaatctcagcacccaggaggcagaggcagatggatctctttgagcctaaggccaccctggcctatacaacaactttcaggacacccaaggagacataaagagaccatatctccaaaaaaaaacaaagacacttttctatatggtttagtggttctgcatttcagttctttgctggtatttcgaaactgcgataaataaagaggataaagaatttagacagaaagttctgctggttggaaagacagactgcaaaattgccgtgagatttgatctatatgagaggctatttactgtctaagttggctctaggctggagttaggaggacttaaagctggaatagtaactcattggtaatggaggggtggcctcttgtatccctaatagcctgaagcctgaggtgcctgccttgtgaattttagcagagttttgccagtaagcaatctgtgcagtccgaggagtcacgctaagtaagccctgtgcttcactcggcccccatgaacgcttgttcaggaactcagggacctgccctgtggtccagcgtcctctttcagttcacattggctggcttctcttatggtaaaactcttccctaaaaacgcctgtattttcataaaggaagggacctgccaatcaatttttaatccacagcagctaactaaattttcttaatcactcttgaagacaacctttttaaataaaccttgtaaaatatatatctttcttcattatttgatccactttttcaaagagtgaagttggtttgtgtgtctcgaatccacgccgtttgctcttcatcagaccacactgaagtccgtttactcgtgagattgcctaacccagccttccacttgaagttctgcttctgtctctatgtctgcaagtttagctatcttggtagatagctgcattgttccataccacaaatgaataattccttgtatcctgtttatgaattaattcttattaagattagttgtctctaaagaatcagttgggttttataaaactgtagtactgtactgtacatgggaaagtttatataaaacagtggttgtaaaaagaataaccttatcactctgaacattagacatttctttacactgtcccaaattaattcaggattcatccactttcatgaaaaccaaattaattggatttcatttgtaccacacacttaattttccttagaagaagggggcccgactgtgacaatgtaaccatcctgtgacaatgttgccatcatcccctgacattgtagccattttgtgacaatgtgacatcccccttttgtttaataaggaagtagagcatgtaactgcctttcaaattaatttctttttctcaactttttctggtgattctaattgtcttttttcttttctttctttctttcttttcttttcttttttttttttttgattctagttttcatattcaagcattggaaagctgagcagtgaggaatttttgtctagattcttaatcctcactttctatgtttagatttctccttgttagcagtaatatctaggcttgtttctttgctctctctgtctgtctatctctgcctctctgtgtacaggttcgtgtttgtgttcctctgtgtgtgtgtgtgtgtgtgtgtgtgtgtgtgtgtgtgtgtgtgtgtgtggtgtgtgtgtgtttgctgtgcactggaagaaactgaagaggagctgtctttgctactatagccttctacttcccaagtcttcttttcctcagaatttcccatcttagccctgcacaattatatttctgctttgcccctaagttttttctatgagttactgtatcttcctaatcttgctacatgtttgccatcctctttgaaacggccaactctcaggttccccctccatttgccaagcctttctttcttccttgtctctagttccttctgccccgcccctcttgtcttccactctgtttgtacacttagaataacttaccactgctattctgatctgttgggtttttaaactaatcatcaaagaaaacagacaacccagaaaggacaggccaaagagactctggagacctcctaatacttggtggtgacttacaaagattattcttacatggtagtgattacaacttatatatatttttatttgaacatattcttcatttcctggttccaccactgctgatgaaacatatcctagaactgagcactgtctgatgcccagttttctgtcttgcttatatttaattagtgtttgtttctattattactatctagtgattttattggtgttgcatctatacacaattgtagtcattctctcttaagtattcgttagaaggactccaagttttctccaagcaaaagaacacaaggatcttagcacaagagaggtcaccaactccttggctatcacattcttcctgctcagctggttgtcctggattttcttagactccaggataaagttatgaccaagattagaatgcactacctggaggtggcagactacagtgggagcggggctagtttcacagtgtgaagctagctgcagtgatagggagaaagcacctcctagacaaaccctttgcctccaatccaccacacatcagcacacacattacgctctctgaattttcactttatttgtattgagcacctgaaacttttaactgaaggtcttggccagggttagacaatcttctgttgcaagctgtagacctaaagaattaactaaccccaagtggctgttccattggaacaaaatagcttttatctcggcaggtgtctatgacattgagggacttaaatatgatagccaccaaacagatactgcacattttacatgtattagctcattgaaatatcatgatagctttatgagcagcagtattctatatacatttatttctcacatgttacagagaaggaaacagaggacttaatgtctctaaggtaataaataactagtattagtgagcattggtacagctgcagcttggactgtagagccgtgcttctctagctctgaagtcctgtctatggcacggtggagaaagcgccagagcatcactcagaggctcatcctggacacacagtattctaccccctctaataatggctgaatttctattttttctcatattgagtttcattgcagaaatgagtaaatcagaatgtttatccaggatctctggtacagttttaaaatgtggtgactactaacccaggaactcaaagtatacattttaaaataacattcatttaattgacattgcttaagtgagttccttagatgcagatgtcagagtagattttatgatatttttgctttgctgccaacctttaaaagaactacagagtaaatattcaagatacagtcaactctcagttatttatgctaatgaagatacagaaaatataattaataattggctttggaatgtattcagaaatgcactatcagatactaagtccgctgaggctttctagatctgtttttttgttatgaatctagtatctgaaggaaaggagaagctgcagaatattttttaaaactttttatttgtgcatatgggtttcttgcctgcatgtgtgtgtacctcttgtatacctggaacctgaagagtccagaaaatggcattggatcccctgaaaccagaattatagacagttgtgaactgccatgtgggtactgggaattgaacccaggtcttctggaagagcagccagtgctcttaactgctgagacatctctccagcccaagctgctgcaagatattgttaacagtgcttttcaggtcaaaagggaatctcttgcagagtatgatggcacaggcctattattccagaactcaggaactaaaggcagtagaattatgaattagaagcaaacctggactccacagtggagtcagggccagtctgggccatttgttcctatttaacaaagaaacaaagcaaaataaaatcaacaaaaagatgtgtcctttgtaattatctatataaagtagatgtgcgtgcattctgaatttcatatagaaatgaaaaagtttaagttcaaacaaactcatagatatttttcactaataataaatgagttgtgtttcaactctttttttttttttttttttttttttttttttttttggtttttcgagacagggtttctctgtgtagccctggctgtcctggaactcactctgtagaccaggctggccttgaactcagaaatccgcctgtctctgcctcccaagtgctgggattaaagcatgtgccactactgcccagttcattttctttaacaatttacttactttaacagtttacttttcatgcaagattaaaagtatttctagagagcaagatggtgtagttcaggtctttaatcccagcacttgggaggcagaggcaggcggatttctgagttcgaggccagcctggtctacagagtgagttccaggacagccagggctatacagagaaaccttgtctacacacacacacacaaatacatacctatacatacatacatacatacacatatatacatacatatattcatacacagatacatgcatacatacacatatataaatacatatacatacacacatacatacatacatacatacatacatgatttcacttatttttaaagaagttctttacattttgttcccttgaaaagagtgttttggccctttgtgggctttgattttcttcctttcagttggtgaatacaacagagggaaacataaatgaacactgtattattattacagtattggcatccagaaatggtggcaaggtattatagagaagaatgtgagaatgggatccatttacatagtaattttctcccaagaagctaatgttgattcccaaactcttgtcacccagataagaagaggtaacattttaccaaaaatatactgagggctaggagccaagaacagtgttgcacagaggcagaaccactgtgttttataggacatggaagagacacctagaggctggagagaaggctcaaaggttaggagcacttactgaggaccctggttcagttcctagcacccatatggcagctcactgctgtctgcaaccctgattccagatctgacatcatctggcctctgcaggcatcaagtatacatgtgatgcacagacatacatgcaggggaaacacacatacacatgaagtagtagtcatttaaaaaccttttaaaaatagaagtaagaatctatttttatttgattgtttgattgagacagggtagccctgtgtagaccaggctggtctgaattcactatgtagacttgactggccataaaactcacagagatctgctagcccctgcctcttgggtgttgttattaaaggtgtgagagatctattttttaagatatctgaggatgcaggcttccatgggtcagttgcattattgtgaagagcttaaatattgttaatggccaagataggtcctacttggagatatatgttggtcagtgtgataaattcatcaaaaaaacaaaacaacaacaacaaaaactgttgatgaatcagcttcacaacttcatctcagaaaggcatttgcactgaccttctgccctgctcttactgtccttttgagaattgctggactaaaagcccaggtctgtccgtgtgagccttaatggcctgactctgctcccttcccttcctctcttctccccatcccttcagttagaccatgtgcatcctaccccaggggaggcttcttattagcccatcaggcagagccacctatacccaggcactttcttccccagtcccccgaatgccatccccctgccagccttgatgaggccttcctccaccaccgttcattcttagtaggcctccttgttctctccaggacccatattccctgccatgatttagttttcttttccaaatcattgtctctaatgacattttatttttctagttgcctgtctcctcttagtaaactgtgaatgctatgaaaacagattttttccccacttttgttgaaagccatatctctagaaatagtgccatattatattaggtagagccttggcaatcagtgtttgttagtgaacataagtaactccaagctgagagataataaactcttggagaaaatgggtttatttatctcatcatattttaattgttttgatatattaatggccaacaattcatggctagctctcatgaatatatttgatgtgttcctttattaacaatttacaatatttgtttcttaattaattgattgattctggagatggattccaaccatgctcactaggcaagtactctttccctaatctgcatttcgggccctacttagcacttctttgtgtgtttgtttgcttatgtggctatgagtggttttagctttgagacagggtcttactgtatagctctggtgagcctggagtttcctgtatataacaagctggccttgaacttgttgctatcatcctacctctacttcccaagtgctagtattaccaaacccagctcctggctcagcatttgttcatagatagttcaacctttgcttcttaggaaattctggttttctaaggagtattgggtactgagtttaagcccttgataacagagcattaacatatatccagccgggcatggtggcgcacgcctttgatcccagcacttgggaggcagaggccggcagatttctgagtttgaggccagcctggtctacagagtgagttccagtacagccagggctatacagagaaaccctgccttgaaaaaaaccaaacaaacaaacaaaacaaaacaaaaaacccaaacaaacaaacaaacaaaaaaacccaaaaccaaaaccatatatccaaaggacttcacattcttagttcttaaacttgtgattcctaatactggttttgaaatattctaaagcagtgttttttcctgcctctgtctgtctgtctgtctgtctgtctgtctgtctatctgtttctatgtgttgctagagattgaagccaagacttcatgcatggtaagcaagtgttcttctaattgagctatatatactcaccaccagacttggtattttaaaaaactaaacttaatagcttttttgtttttaaataactgataagctactgaacattaagtagctaatataagcattgtagttcaagggaaaatgtgtcccatgatttttagtatcttagaatttgtgttgaatttgcaaatttaggaacaccaaaatgatttaaaattgtaagcctaaaggcaatattatttctcaagatagcaagttagataatgtaaaacttctgacccctgagttaaaacactggcagttcttcacttgttcatttttgtatgtacagtacttgtgtagtgagagaaatgacataatgcaagtacacttttaggttgaattatcagacacttgtcaactcaataccactgtggacccaatagggccttccttgcacacactagacagactatcagttttgtgcaagcagatatctgggcagtctgctgttggtgcttgtaactacatgacagttgaggaatactgttgccaccattgtctgtagaatacattggctgaaactagaggccttgtgttttatgtctacaacttttgctgtttcctataatgtgcacgcagatgttcattctttgttgttgtttttccaaaaacattttctgcagtctggtcaattaaccactctaaaagaaactttttcaatggtccaggtttatgtgctcttatttatgtgttccacactctttctctcatattctcatggacacttcttctttacccttgtaaagagcttagaagccctatgttggaatcaaggtctactactatagggtttttggttgctacagtaaatggtttgggtgtgggagtcggggaggaggggcaggggtaagcatcagttatcgcacctggtaaatcatcaaggttcaaggtggaataaagcaactactccattcttttcatctcacagatgaagaattaaatccaagaaaattaatgtttgttagccagagaactggtatattttcctgtgatattttcagccaagtttactcattttaaacaatattttgtctttgctggaaataaaaaaaaacaaagagtctattaagaaaacaatgtagctggacacggtgacatatgtgattccagaatttagaaaactcagacaggagaaatgctgagagctcagggccagcctaggctacataacaagtttgtagcaagcctgagcaacatagtcagactctctgtcaaatatacccccctccaaattttttttaaagatttatttattttatgtatgtgagtacactgtagctgtcttcagacacaccagaagagggcatcagatcccattacagatggttgtgagccaccatgtggttgctgggaattgaacacaggaccttcagaagagcagtcagtgctcttgaccgctgagccatctctccagcacccctccccctttttttaataagatggcgtggaggctcatacctgtgatccagcactgaggaggctgggtcaggtgagccaggtaaacagtgagatcttgtctcaaaaacagcagcagcacaaaaaccaaaaacagggctggagggatggctcagcagataagtgcacttgctgctcttacagatcacctcgttcagtttctagcacccgcgtggcggctgtaactccagttccaagggaactggtgtcctcctttgacttctgtgggggcagggcacgcatagacaatatacactggcaaacacttataaacataaaaaaatttttttaaacgcaatgattgattgatttttttttttaaagatatagtactggggatatagctcagtggtacaggatttgtcttgtatgcaaatggccctgggtctgagcctaagtaccacaagggaaaaggcattctgtctgtctgttaatcatctatctatggtagattgatagtcttggactcaggaggctgaagcagaaggattgtaagttcaagacttgcttgggccatggaataagaccctgtctcaaaagaaagaaaacatgacagattgctttgagatgactttcacctttgatccctaatcagttagaaggcttgctttaaaaccaatcaagaaaaaaatactctgtcacaatttagcattaccttttgtagttcatgtcattttattctgccataaaaatcactgtaggcctagtcgtctataacctggatctgtcatctgaaagcaagatgctcttggaagtctagggtgagaaaactcatcacaagtagaagctatgctggcttccctggatgctaacaatggcggtccccatcctgtgcctgtatgctataagccttactagaggaaatcacagcatagctccttacctggtccaactaaggacacacgtcttaaacagcagaaaggatagcctgtggtgaatggcagaggaaagttacaggcataaaagctccagagctctagtttttattttctccagagttggtcaaaatgactgtagtcgtctgggcgtgtgactcaagtagtagggcactagcctagcatcaggaggccctgggttcagaccctagcaccacaagtaggtaaataaaagtgaaaacagaattaagcaaaatgaaaggaaatgattatggcaactcagccttgagttccatgtgattgaagcaaaacaaagtagtattaggttttagcccgagcaactttaagtagctgaaagacggagaacagcggcaccccccacccccaggttgatgagttacaatgtttcaggtcctgggtggctgtgcttctccgccactcctccatagatgtccaaataactaaacgggctgcctttcattcagagtgcaaccagactttctaaaatgggcaagacgtttctgttgatacattagctttaaatggaattctatatagtaggaactttgagtgaataatctcaaagttttaataatctcaaatctttaatgcatgaagaacattccatgaagtaaaaaaagagagagagagagagatttatcatagaaggtgaagtgtttagatacatctccatttaacaataataataacaataatgattcttaatattaacagttgtttgagaggtaatcttgtgtgccccaggcaggccttgaactcctcaagtagccaaaaatgatcttgcagtgttgatccttctgtctccatttcccaagtgtggggtttcgagatatacagtattataactgtgtgtatgtatgtgtgtgtggtgtgtgtgtgtgtgtgtgtgtgtgtgtgtgtgtaggttggatgttatgagctatagtctcagaactttcgaagtggaggtaaaaagtttcttcactgagtttcagggcaggctgtgtaatacagtgaggtcctgtctcaaacaaacaagatgcctaaaacgacagtgcaggagcctttaaactatttatcatcatcatcatcattgtcacatcatcatagaaataggcatgatatatgatagattttgagatttatacctataaatcccagtgcttgggagccagaggcaggaggatcaggagtttaaggccagtcttgagcagcctgtctcaaacaaacaaacaaataaacaaacagcccacctaaaacaaaacagagtagaagtaaatttaaggcactaaacacaataggtgtgtgagtgcttgtctgcatgtatgtttgtggtccctgtgcatccctggcgccacagagggcactggttccctggagctagaggtttagacagtgctgagatgccatgtgagagctaggaactaaacctatgttagtcctattctctaaaatctgttggttttagtataatatgagagatctatgaacattataacctgctataatgttaataaactgtaatgatatgcacagctttagattattattagattttcttattagactatttgggaccacttaggtgcttcctgtgtgtgtgtgtgtgtgtgtgtgtgtgtgtgtgtgtgtcttaaccactgagccatctttccagccacttaaagagacatatgtctcatgtatctgtctgtccatgcatccatccatccatccatccatccatttttgctttaagacaaggtccagactagccttgaacttgcaacaatcttcctgctgctcctacctcccaagtattgggattctaggtggcttcaccatgccaggagtatttaattctttcatctgaggtaaaatatatggtagatactgcaaaacagaaaacaaaaccaaaaaccaccccataccaaattaaattaaagtcacaggacaactttgtagcagaatgtgagagtgatggctaccgtcttctggtcctgttctgtccttacatttgttagcacggagagaggtaagaagtgagactgtctctgtgttttagattttacagttccttttgttaaacttgatgctagaaaccatcaaagctgtttcaagcccctgtgatggagctacgttgaattcaaaccaataagcaatgcctgggagactctaattaaatcttaggaaagatctggagggaccagagataacctagaaccagcgggttgggtgaagtctgaatctaggctttaaaaatcgtgtaagcttgaattagtatcgctaagctgaacaagtgtgcaagacctaaggtttcagagcagctggtaggtgttcatacgccgatttgtaagcattctaggaggacggaaatctgattagttactgtgccttattcctaaactgtgactatctttctgttgtctgtccctagaaaacttccgcctgaaaaaaagagagagagagagagaagggctgccatgaattgtcttaggtcccagagtagacacaaaagcaccttcttagagcccaggcagcggagggaggcagcttgtacaggcaggtctgtgctctcaaagactgggagtcggagtctttccccagggggtttccaactagtttgcacttcagaaaaatcttttctttctcctgctggtcacgccctgcaaagaattttcttctaaccagaagaaaaaaaaatgttttataatcaaagatccttgtccttagttgttggacatcaaaggaagtttggagaagattgggggattatttgagcacccagaatttattctgaatgcaaacttgcaacatagcaaattccccaaagcacgtactgagagctgaaggagctcatagaacgccgtctttatccatccttgcttagctcagttcggtacaaatgagttgaggtcctctgtctctgagcttggacttagcccaggaatgtttggggtttgagctgctgatttactggaaaaggccactcaccctatgtatctgctattttataaccttgtgtttggaaatatcggcaactatggagaaacttcaacaacaaaatcgtccgttttaaccttcattgttttaactcttgggagcttggtgtttctgggcagttgatgatatcacaagttttgggagccacattctctgcatttccctactgtctctgaggagtcgtgatgtcattttctcccacagaggaaaaccttggcaccctgagggcctgaactcaagtcttggcaggtaaatgaaggaggtacctgcttttagatttaaagtgaatgagtcaggtgcagagagacatagccatggtcagcgttgtcattgctgtcacatgtcattagtcatctaaggagaactgagaccgtacactacagaactgcttttctgggtgagaacaaggagtcacttaatatttcaatttttacatttttgacatctataggacattattttctgatttttctgctccctcgtaactgcccttctcttaatccaggagctctctaagcttctgaaaacctgtttatattatacagttttctctcatagaacagactaataacatcaaccaaaacaaaggactgaaatgatgggcgaagcagatctggtgaatcatgccccgggccaagttccgtgttaccttaatcttagctctgtggttgggaactgaagagtgtttgccttccatgaccgagtggtggttggagatcgaattccaggagcacccaaaaatgctcagtttccaataatggcagttaccagtgccccctgcaaggattctgtgagcgctctgagcgctttcttgtggtgtccttgtggtttaaaaaggcatcatgagttagaaaggtctgccctgaagacaaacctcagagaaacatcacttttctatctttgccactaaaaataatcttttatggttttattcttttctgaactggcatgctatatagttttgtgggtttttttttttttttttggaaagtctttttcatagactcatcaacagacttctctcaaaagtttttttttaatttttattttatttgtgtgtgtgtggtgcatgcattttgtgtcagtgtatgccacatgtgtgggggtcctgtggaaaatataaaagggagactatactctggaattgtagttacaggcagttgtgaaccacccaatgtgggtgctggcaacagaacttgggtcctctggaacagtagccagtcttaaccactgagctatctcaccagccttctcaaaagttttaaatgcactagtttgctctaggacagtaatgcagactcttagataaatgggatttaccagtttattctacttagcagtgaaaacttgcctattcaagatcagtctatagtctgacactgctgacaaagatggcgggagagtggcaggggtggaccacgttattaccttgatgggagaaattccaggagacaagaagacctcctactgagaacattaatattaacatgtggagggtgtaatggtgcacacctttaatcccagcacttgggaggcagaggcaggtggacctcagtgagtttaaggccagcctggtctacaaagcaagttctaggccagctagggctacttagagagagcttgtctcaaaacaacaacaacaataacaacaaaatcccaaacccaaataaacaaacaaccttgcctattcatgtattattagattatatagagttcttaaaactctatataatcttacctattcatgtattattagattatatagagttttaaaaactatattaagatcatattagtaaaatttactaataagagtctttctgtgagactatgccggggcctagcaaacacagaagtggatgctcacagtcagctaatggatggatcacagggctcccaatggaggagctagagaaagtacccaaggagctaaagggaacttcaaccctataggtggaacaacattatgaactaaccagtacccctgagctcttgactctagctgcatatgtatcaaaagatggcctagtcggccatcactggaaagagaggcccattggacacgcagactttgtgtgccccggtacaggggaacgccagggccaaagggggggagtgggtnnnnnnnnnnnnnnnnnnnnaagggggggagtgggtgggtaggggagtgggggtgggtgggtaagggggacttttggtatagcattggaaatgtaaatgagctaaacccctaataaaaaaaaaatgaaaaaaaaaaaaaaaaaaaaaaagagtctttctagtctaaataaagacatagaaaattaaactatgaggaaggtaacttatctgcagctgacttcatgttcacactcttatgtctcctgagctgtacacgtgaaccaaattaatattgttatataaaatgcttgtactttccaagcactatcattcctcaaggtgtggggcaagagatcacgttttgttttcatttcggttgttttctgaagggaagtttgagttggagactgtctggcatgtctaaacactcctgccgtaccacctgccctggcagggacaatggcatcaaaagtcaccgtctttacgactgcacctgcctcgtgactgctgccagatttttctcctggcactaaaccaccctgaaatggtaatagttcccgacacccaaacagtgagtgcatggcatgtcctcatgtccagaggaccaggaaagagctagctctccccctgacgacttgtgtaggctttggcgtggcatttggtgattgttccattgtttatcaagtgaaggaggtacaacttttatggctttctgatgttcacctggttttcaagacttccgtaaggatctaccaaccgtatcaaatcaagtgataacttgatatttgaaacttatctcttgcaagtctgcatctaaagagctcgaggaagaacaatctatccaaaatggaggagacacattccagagtaaggccaccacatggtcacttgggagtgagaagctgtggggtgctcttgctggttccccagcagtgctggttatctatctacctggccacaggtgaaggctcctaagatagccagttgtttgggaggtaacagaacaagctcatgaatatttttttcttctgaattattggagtgtttcttgggttccttcaaggcagaattacctcttttgcttctaatctttgttaatttttgtatataactggaaacatgctgacctaagaacacaatttctatcacccatcaattaattgaagataatatgccccccaaatggtatcgcttgcatagtacccccatctaatagtatcatgatgatctaaggcacaaagagtgctctgcaataaaggaggacagacatcctgcagtgaacagagctctgggggagagaggggggtgtgctttaacctcgtctctgatcctacgtagcttcatggcctcaaggaaaattgcttaacctctgtgagcttgtgttctcttgagtgaagtagggatgatgataataaatggcctgcccacctggagaggaataatatgggagctctatctttgaagattgcatgtgcaaagcattattattaatagcagttagacttgggctacttctcagtcactcgatagctgtcagaagaattaaaaagtatggggttatttatttagagatggttgacttatgtggtattatccctaaataaccgtctaggctattggtgttttaatgtggctgcaaagataaagctttagctttaaacattttcggatcaagggattgattaatgtcccagtagttccagtagtccaagcaggcagtggcttagagaatgactaactgtgagttctggggtggggacttaagttctgcgtccgtcttggttgtgccgcggtgaatcacttctctgctctggacctttgtacgtgtggccattctacattggtgagccatgagcatgtgtccacggtcaataagctggtccccggcacaaagcagaagtcgtctgcctttccacttggtaatcggaagggtcctgggactgcattaacacctccccttcacgcttcggccttttagagccatttattccattactttgaagcagctgcttagaatcctgtgcagcttggctgtaaggcatttgggatagtgatggggactgacttacccagttcattatgctgtactggtcccaacatgtcttgtgaggctcggcagataaaattctatctcctgcttggaaagtatctgtatagtccttgagcctcattcgagaagaatcagatcaaaatgaggacagaagcagagtcctagttacagaaaccatcaaatatttgaagccctgccacttttatttattttttttttcaggtgaagaacatccttttagccatccctgagactgacgggtcatctgcagggtggaaagtcagtgttttgtagttttatcaatttgaagcctgttccccaagtagatagataatgggataaaggtaattacaggtttcctggtcttttctacttacttgttctctgtcgtgattaaacacacacagcctatacctcagttacctttattaacctttcagcactagcacagcatcatctggcaccatcgcacacctcaatcaccaggacaaaacaagagaggaggaggagaaggaggaggtgggcggggaagggaacagtgggcaaacgttttccttattactggttttaagtcacatccttcctctctgaagacacttctgagagagaactgttttcttcccaaggcctaataaagattagtgagtgaggtttgcaaagcatttgaggcttctttgaaacaaaggctgggataaacactcagcctcgctgttatcacggcgaaggaaagcctagcatgcgatgctttgggtcaggtccagcgggctcgtttgatgtctctttctgacctttacctcttgatatctttatacatttattgaggctgttggacaaagtcttgcgatcctaagccatagggtgttaagaacgtaaggatgaatggctgccagcctctgcttcttattagttttgtttgctttgttttggggggcagggttttgctccacagcccaggctgcctggaaaacctaaccctcatgcctaggcctcccgagtgctgggattacagtaggtgccaccaggcttggcccacctccaggtccatgcatggaattttttaaaacattttcccccctgtctttagataccttgttgttccagtttgataatcctagtggcaaggttaatttaatctgttcatttgaggctttgtgtcccattgttagtaatctgtgaactgaggtttcataggaaatttttcattaaataaaataaatatgcatacaaaagagaagcagatactatgtgaactaggaggtctgtgtattgtactcaagtcctacagataaactaaaaggaagaagcagggcctaaaatcagaatcgcctgggcagcctctaagtctagcccattgtttcatgttagaatgcccatgatacgacccttgccgtgtcataagacatacagattacgttatgtataatataacttatttaagttagaaagtacacccatatattttagaaaggggttcaaaactacaaattgaattttaagtacttcctggtttgtttgggtttttttttttaaagatttatttatttgtttattttatgtatgtgagcacactgtagctgtacagatggttgtgagccttcatgtggttgttgagaattgtatttgatccctgcttgctccagttggccccgccctctcagtctctcgttcggcccaaagatttatttatcattataaataagtacagtgttgctgtcttcagacatcccagaagatggcatcagatctcattatgggtggttgtgagccaccatgtggttgatgggtttgaactcaggacctctggaagagcagtcaattctcttacctgctgagccatctcaccagcccacttcctggtttttaaacaggtaaataaatcaaaatgttatcattagtcagggacctgtgctaactcgaatgtcctactccctaactagcaagtgtccttgagaatcagggtcatcttttctgcttgcgtctccctgtgtgtctgtgtgtctgtctgtcggtgcctgtctctcttctgctgaggatagcatcaggaccagcgctctcctgctgcattatgtctgaattgtacccctcagccttttcttcccctctttcttcttttcttcttcttcatactctttttttttatgttgttcattgcttttaggtttgtggtgcatgcacacaaagaggcatgttattaatagtcctaattgtttgttttaaaattttaagtgattatcctacaataacatttgtctgtctacacacaaccatatttttcagttgagtttgtttgtttgatgggggtgggggtggggagaggttgttgttgttttgagaccaggcctcggtatgtagctttggctgacctggaattcaccatgtaggcccaaaccatctcaaactcttagaaattctcctgcctctgcctccctactgctggaattaaaggcttttgctaccgtgcccagcccaatttcattttttgaggcagagtcttgtgtatcccaggctaccctgtagcttattatgtagctgatcttgaactcctgtttctcctgtacctgcctcctgcgtgctggggtcaccggccacacgggcgtgagacagatgtgctcagtttccccaaagcttccagcaaataagtaccagtactggagccaaaagaactcaggttctacaggatcctgaagctgaggatggatgtggtgtggctgtgactgatgggaaaatgtctggaattgtcatcctactcaactttacactgaagcatctatgactctaccaggagaatgtgtatctgaaaacaataagaaaggttatcttgaacataaatacacatgtatttacatgtatttgtagagagaatgaagaatgccccactttggtgttttgagacagggcttaactcttagcccaggctggcctggaattgatgtagcccaggctgacccccaactgtttgggatcctccttccctcctcagctttccaaatgctgggattgtgctgggatgaccatgcccagcttagagaatgagtatgtgtgtgtgtgtgtgtgtgtgtgtgtgtgtgtgtgtgtgtgtgtagagagagagagagagagaggagagagagagagtgtgtgtgtgagttttgtttgagatagggttttgtttatcccagactggccttgaatttgttagtatgaccttgaacttctgatcctcttcctgcccctcccaagtgtcaggattaaaggcttgtatcaccatacctgcttttatgctgtgctggggaaatgaaactcagaacttcatgcatgctggacaaatactctaccagacaaatactctaccagagctgtacctccagccagaggatgaattctaaaagcttaattttccacccttttaggggaaactgcttcccttaaactctgtctggactggtctcttaagagagctgcatttggggatgctgctgtaaaaccggccatctgtccttggaaagtttgcctgctgagacagagattggtcacttgcaaatagatgagcctttggcccctctggttcctttgctcaactcccttcttctactcataattttagctaatttcaaaagtgaaggctaatttctctgcaaatgtctctccctaggctttgcttgttcatctctcctcagctgtgttgaattttaacctgcaccgccatcccttctctaacacagctttccggctttgtaagaatctgtgcttactgctaaatcaaccattctctctctctctctctctctctccctctctctctctctcacacgcacgcacgcacgcacgcacgcacgcacacagcacacacatcacttttgtatttatgctccttaggttgggattttgatggcctgtctgtccccttctgtgccgcacactgcaccaggccccctgtctggagttttagtaaatgcttttaaatgaagttgttgagtgagtcggtgtgatgctgctagcgctcacatggagatgttaatctgcaggctacggtaacgtgcaaccgcactgcatgctgggctgcatgtcttctgtgtcttcccattagaaagaggcctttccctctctccatcagatgaaggtttacatttcagaggaagttagacaaagaagaacagaaatggcagggcctgtctgtggttttccccatttcagtggcaaggctgttcctgggggacttcacagtgaaatgctgaggtatgacgtcatccccatccccgtgtagtttgctctgtagctgtaagcagcagttcccacaatcatctagaaaagggttagttagatgaacctttctctcccttttcagtggtagacccagcacacacctctctccctccctccctccctccctccctccctccctccctccccctctatttctttctttctttcttttctttttttagaagtgatgtcttgtttttatttttatttatttatttatttatttttatttttttggttttttgagacagggtttctctgtgtagccctggctgtcctggaactcactctgtagaccaggctggcctggaactcagaaatccacctgcctctgcctcccaagtactgggattaaaggtgtgcgccaccactgcccggctctttctttctttctttcttttgagtttaacactagatctttgacatgaggtgttacataatctttctttcagaagaacatctctcaaactatggggttttatagatttctgattttattgccataatagatttacttagcatggaattctgaccatctatagaagctcgagtgtatgcagtgataaactgtccttgacgctcgagtgtatgcagtgataaactgtccttgatgaagtgaggttgcttcagagctgttgctcaaatgcatctcagtgcagagctagatctggcatctggcacagcatgtgcaatttgtgtgtgtttcaaagtaggaaacttaccattaccccagactgcctcaactgaccatgctctctttctttagtctttggatagacagggactgctgtcacactttctggcttttgctaagccattaccttctattgtttccccagagtaactaaagatcctgattaatatttgctgggtttgcttgttactgatggcagaacgaggctgtggtggcaatctcgtgaagaaggaaattagtgtggcttatctatttctatatactgccaacctgtccaagcaaagccattctatggaaagctgataaggagctccgtttttctcctgctactcttgcctgtgcagcaccgtgccctactttggagaacctgggatagggtttcagcttgcgaggtacggtgtctggaatgtctgtaaaataggggagccactgtgcctccgtggattccccccagctctagaggagagaagggatgggaggatgaaagggcctatttttcccctagttgtcctgaagttcaaagacacagctggtgtctcagtggtgccaatgcatctggagcagcccagttagtggagacgtagctgtcgcctgtgcccttttggttgttagtctctgaaatcccttgccagtccctggtggatcgctggcccaagtcctgcctttctgcttggcctctttgaattcctgtgtactgatctgtcttactagtagggtctctaggccgtgggcagtaagtgcacaccataccgtgtgaggaagcttattgaagatcttgtgcctgcatccatcacaattacaatgctagcccattctggctcacgtgacttgtgtttctagtggattgtgtttccacatggttccacgtatggaaattttttgaaaatcaggtaatttctccttagaatgtgagagagctgaggtaagaagttttggagtgagtgataactaacatctcccatagcaaccttagagagttctgtcctccatgcaggctatcatttattcccctttcaaatgcattcagagaccaacaggtacttaataggtcataaaatcctctagcttcctcttggcaggctcagtgctctctggtttgagtgttcttcgctgtctgtgtacccagaaagctttttccaccgatgttggtgataggtctggtattcttgtcatagactagctggtttccgtgatctctgttgatcacgtgattcgtactcagggttctaactctcccagacgcgtgccatccaggctcctgggacgcatccccagaaagaggcatcttagttcttcctaattttattgccttttgttttgttttggaggcaaggtcttcctgtgccctggctccacctacctgcaccttgcaagggctgtgtttatgaatgggttccaccacatcaggcctgtttggcttttcaattgggaatcttactgcatagtccaggtgtgatattgtctgcgtagctcaggctggctatgaccttgcagtgctcaccccgaatcagccaccaaagcactaggattattgagcaggcaccaccaatgctaggctggactttttttttttaagttccctattctgttctggcatcgaggtgatttcttttccagcttgtacattgccctttctcttctctgtctggtgtttctatatgtagtcaattctttcaggtctcttgcttaggaactgtttgccacatcacatagtatggatttttgtttcatgtctaggatcttatttgtctaccctaccatcctctggctcccggctgcaaagactgttacctatacctaatccggagtctcctagacccagaacagaccttcaccctttcctctgtccaaagcagtcttcagtattcaatgtcctctgcacctgattcatggctgattttttactatttcgcttgggtccaggagaaagggaagagaggaaagggggggagttgaggggaagaaggagagagggagaaagagtgggagggagagagagagagagagagagagagagagagaggagagagagattctgaacactccttttgtgtcggcatctctgtgaggtgctttggaaagactccagccaggcatggaagggctctttgataatatctgacgggtgggtaagaatttcaggcacctggccaagatacacactgcctgtaatcgttaactcagtctgtaaacagttcaaacggcaccgagaggccgtcctttattacattagaagaagcctttcatctcccttgctcaggagccaggcatccaggattggcctcctcaatggctttgcagccgtggtattctgtgcacagcaccaagacccaggacatgcaggaacatataatggagccttctccaaatgactgcctttcaagcttcaggcattggagcagtaactatgggacttcctgttgccttgcacctggctgatcctgggaaggcaaagtgtggggagtggggccaggaacaatcagccgggaaggaggtcgaaactctcatttcccacccacactcgtgtctgcaaactctgggacctcctctcccctgcccccttcacatttcattctgcccctttggctccacactgatgcggagtttggtcctcagagtatttgatgtctccaattagctatacaattgcccaatatccccagaccctagtttagggtacaatgctatgctatggagcccccaccccgactggagccaaagataacaaacattcctgccctggaggtgccagctaactgagaccttaagacaatacgagatctagaggagagataagctgtccgagtttatagtaagtgccaagtaagctgtacagtggcttttatgggcactcacagtgagagagtagccatgcacccagggctgttggggaaaccccatggcattctgtgaaaagtaaaatatttttcaacatgttaaaaaaaaatatgtagcttcattcaagtctctctttcacttcctttctctactgaaagttgctgagctattgagtgactcgggcacttaactgaaatcattaagcctgtgagctgcgtgtttgttttttgaaaccacgtctcacatagtccagactgcgattgaccttgagcttctgaccctctgccctccaccttcccagcgcggggatcacaggagtgacccaccacacccagggtacgccgccgcgctggtgaacagatgcagggtttagttcttactaagcgagcactcttatcagctgagctgcgccagcggccccttaaccttacctttagagaatgggctagagtttggcagagtagtagagttccgagacctgttttcccactgggtattctggaccctaacaatgatccagaaaatctagtcacaacttaccaaagcaccttaattaccaaagacactctgacccggcctcatcttttcagtttagacagagtcttgctctgtaacctaggccagtctggaatatactatgtagctctaaattcaaggcaatcctcctgtcaatgtcccacatactggaaccattggtattagctaccatgcccgatgtagagaaatccttttctgatatctttgaaaatgttcatgtgtagagactaatgtcagcagaaagaattcatttgataaagccaagtagcagaatttagattgtgtcctaattgtgtttgtgtgtgtttgttgtttgagtgtctccagcctaggcctcagactttctgtgtagtcaaggatcattttgaacttgtgatcttcctgttccacatcccaaactctgggatgataggcatgacccaccttgtctgctttcttcactgctgggcaatcaagcccaggtcccttctgcacattaggtaagcgctctaccggcatgtccagatgcctaacctaggccataggtttcaatagatgtgtactaaaacctcacttgaatattgctgaagccgaggaccaaagatccagggtttgctccttctaccaaaagctcaagtgcaagcagctaaacgcttcctctgcaggacagtagattagcatttgccttgcttcttcccaactaaaggaaaacagagagccaggagacattcatccaggaaggcacaggctgctgtagacctgagcccctcatctgactcctatttcagttgtttactttgctcttagctcagatttctgggttgtcttatttattttgcatttgaggtttgtctgttttctcgccatctggatttttctgtgctgattctgaagatcgctttagggaactgggatataaaaaagacagagctgctgaaggtgttcttgttagtgcccagcccacagcctttggtgtattcagtaaactcgtgtgtgtgtgtgtgtgtgtgtgtgtgtgtgtgtgtgtgtgtgtgagagagagagagagagagagagagagagagaggtcggggaatgtacaacccagcatccatcagggattggcctctgagacaactaatattttccccattttatggaaaaagcagcaattccatctttaaagaaacccgtgcatctctttataagagcacaggcactaaacggatcaagtttgctcagcactgttacttgttcatggtggacgggagcgtggttatttgaaagcacatggtagggcctagttatgtagcacaattatagaatcccagatttcctacagtacctgtgtaaggaagctctgaaacttgctccctgactggctcagccatgcactggtcaattctgaggtcacctgcagcctcaatgcagtggggaggtgacagagggtggggaggtgacagagggatcctctaattttcttcacgactacagaacctgccttttgagacgtgaccaatcttgaattttggcttcccattccggttgattttcttctgtgtttagtggagaaaataccaggaattgttttctcctcttccagtcacggttgcacaggcttacagtgtatccacggacttttagaaggcttgcagtgtccagccctccctcaagggtttctggccaggcacgtctgatatagggcctgaaactttctgaaaatgcccaggtggggttggtgctgctggcctggagctgcacgtcgagggtcactgctctaggctacttcctaccttctttgtggcatcaacattttctgctgttatcacaaggcagcagccaaacaaagcttaagacagattggctttagtatttcctaagtgaccacttggttgtgacagatttttgtcttgcttgcggagataaaacacagccttagaggtcatgtccccgaggctaggtcagttacctacttaccaccagcagccattcaatgtcttattgatttgaaaacagcaggcagcttgtgggaacctgcattagggaaaaaatattagctagactacagaactggcaatgtggctccggaggacaaagctctggcccagtctctgtgtcatcttcagagggaaggcttacagttttccctgccttcaggagtttccactttcctgagctagtgaatcctgtagtctatgcattaggtggtattaaaaccaactggcgggctggcgagatggctcagtgggtaagaacactgactgctcttccgaaggtcctgggttcaaatctcagcaaccacgtggtggctcacaaccaccctcttctggtgctgtctgaagacagctagagtgtacttacagataataataaatacatctttggcttagattgagcaagaactgagtgagcagagtgaccggaatgagcagaagttctgtacagctacagtatcctcatataaatcaatcaatcaatcaatcaatcaatcaatcaatcaatcaatctttaaaaccaactgagtggctgggcgtggtgtcacataagctcagcacttgggagttcaaggtcagcttggtctacataggataacccaagttacttggtaggaccctgactcaaaacaaaacaaaaatctagttgggaccagtgagaaggtttattgaataaaggcacttgatgctaatattacaagcctgacacactgagtcctatcccagaacccacatgaaggtagagagggagagacagatgccaccaagttgttctgtgacctctacgtgagcaccatggctgtgagcaccatggctgtggcatgtgcacttctctctctctctctctctctctctctctctctctctcacacacacacacacacacacacacacaaacacacacacaataataatcacattcaattttttttaaataagaaaaaaggaaaaaccaagccggtttgagttgcccagtggcatcatagcaagcaaacaacacagccccatccctgccgactcactgtggagaagccagctccgatgaacccagaaagagccacaaactccttttctggaactttttccttctgaacattttcatatgttacacttagcatttaaaatgctccattctggtgctggagagatggctcagtgtttaagagcactggctccagaggtcctgagtttaattcccagcaaccacatggtggctcacaaccatctgtaatgggatctgatgccctcttctggtgtgtctgaagacagctacagtgtactcatatatacataaaataaataagtaaatatttttaaaaaataaaataaaatgttccatcctatgaccatgtctaaagacatgagcagtgtttttgcaagcttgtacctccaatttacccactcaaactctaactccttgttgctgctgagatagcatatcactgtgcagtgcggattggcctagaactcactatgtagcccaggttgcccagagtgacctccaacttccagtccccctgctttaccctcctgagtcccggccacacaagcatggatcaccgagcccgactcagactgccgttctccatcgccaactgcctaccaggtttaaatgttgtctctccttcagcctctccatgactgactgagacattccctgttgaaagctacccctttggttaatgaacatcttttgtcctgtttttaaaaaaatatggaacacttctcgaatttgtatgccatcctcagaggtcatgctaatccctgcatccttccaattttagtagttgaactactgaattgagccccccccccccgacccatttctcaggtttagaacacccagcttttccctctctttcatccctgcagtctagtctgtctgcagatgctctcagtacccctcccccagctttttcgattccccccttataattgctgctgcctgaggtcaagcccccacggagcctgattctgggagagctggggtttgctactcctcattttccttcattccattctcgtttttatcttgagagtagaattaagatgctcacggcactgaatgttttttggtttttttgtctttgtttttgtttttgaggggagaagagtgtttgtttgggaaagaattttgctcgatgtacccagggtcgccttgaacccattgtgttgcccagacttggtctccaactcatgatcactcggcctgcctcagactccagagtgctagcatggcaggtgcgagccacagaaccctacccaatactgattcaataataagtaccgcttgttcagaactttagggcgactctttttgctcgtatgggagaacaaatgcttgtctttttttttccctgcaattcttcccaaaccctccacacttagccaatctccccctttctctttattaaaaaaaaaaaaaaagaaaatctcaggaaatacacacacaaaaaaatccccactaaaaatggaaacaaaaatatacaagcaaaagacctataggacagaaaaatgcccaaataaagcaaaatgagaggaaaagtctacccccgccccaaataaccatctagtacattctgtgttggtctgtatggggcctgccctaaagtatggtcgatatacccatcaattagtttactctattggagaaaactaattttccccttataagtagttgtccactatagaatagatagctgcttcttcttcttcttcttcttcttcttcttcttcttcttcttcttcttcttcttcttcttcttttcttcttttggtttttcaagacagggtttctctatgtagccctggctgtcctggaactcaactctgtagaccaggctggcctcgaactcaggaatccacctgcctctgcctcccgagtgctgggattaaaggcatgtgccaacactgcctgggttatagatagcttcttaattgggggtgtgagcccatggctccttccccctctctgagctgggaccccatttggcttgaacctgtgcaggtccagtgcgtgctgccacagtctgtgagttcacatgtgtatgagtccatatgaacatcagccctgttgtgtctgcaagccactgtttccttggcatgagtcatgcatgatctctgttcctgagaatctttctgcctcctctccacttagatccttgagccctgaaggagggagggagggagggnnnnnnnnnnnnnnnnnnnnnnnnnnnnnnnnnnnnnnnnnnnnnnnnnnnnnnnnnnnnnnnnnnnnnnnnnnnnnnnnnnnnnnnnnnnnnnnnnnnnnnnnnnnnnnnnnnnnnnnnnnnnnnnnnnnnnnnnnnnnnnnnnnnnnnnnnnnnnnnnnnnnnnnnnnnnnnnnnnnnnnnnnnnnnnnnnnnnaggttgatttaatgaagacatccatttaggatggagcgctccaaaatctctcactttccacacattcagaccctggctcttcatattcaagttgccttcacagtgttgaccctaccccagctctccaaacatttttaaattatttatttttactattactactgtgtgtgtgagtgtagacatgcatgtaccatggcaagtgtgtggaggtcagaggacagccttggggagacttcttccacttgggcactctggggaccaggctcgggttatctggcctacatggcaaatagctttacctactgagccccctcagtggcctagctaagacgctctcagagctgcttttcttttcaaacgaagacttgtgagaaacagattaaaaggcactttcctctggcctagccctctgtttcttctcaagactaaagctaaggtgttccaaaaataaaaaataaaaaaataatccacttgaaagttgtcaatagaccagagccagttttttttttaaaatatggctatttttctcctatccaaacccttccctctttgagagctatttgaagaccctcacaatcctgcaaagcctattggctgtaccacagattgtagtgctagataatataccctttggcatcatcattggccttgtgtaagccatgtgtgttctggcctcaaggagactgagggcaacccagcacaatttaggaagaaagtagttgctcatcaaatacttgccaactttgtaatgggacacatttcagaaccattctgatgcgtccacagggaatgtctctatgcgtgtctgtccgtctctaccggctccatggtcacatcaagagattccctgcatcttaacaaggaacactgggtaccatttgatccttcctccttacagagggcttggagggaagcttagggactgttattgtgggaagaaaaacagctccagacacaggtctgataatgcccaggcttagcatcggctgagcgacagacagtggttagtgatttggctaggaggggggactcaacctttgaagtattccaggtgggtgttgactgagctaccagctatgctgctgttcccgaggtcagcctgcccgaggggagaagcgaggccaggtgactgggtgccgctcttgcaccctaagaatccatttacgagcttgaacacaggagtacccgcccggacagagaacaaacagtaagaaagaagagcagaggaaagcgcccctcggtgcagtcactgtgtcaacagaaatcacagataaggtggcttttatgaagcagggatgtagtgtgtggggagagcccatgcacctggggttggtgattcagaaacttggtgccagattatatggctctctgagagcgccttatgttccagccaccctatgatagctgatgtcatataattacccacttgttaactgggccaagaggaaagtattggaagacagccagaggaaggtagaagcactgtcagaacccatgaaacacatggctgctagaacctccttttctgcatgggtggagtcgctgtcagcctaatggagattgattcctaggacagacgacctgcgatttgtcctgcccatttctatgacaaatacggtctcacttaaatgtattcaagtgggggcgggggagacgcaggagagatggttcaacgcacttgttgctcctgtagcggacagggttcagttccccaaacccacacggtcgttcataaccatccgaactccagttcaaggggacctgatgccctcttctgacctccatgggcaccaggcacatacatagtatgcatacatatatgcaatcaagacactcatacacattgtcattctaaaaataatgtttcgtgtgttcaaatggagcttggcagccagctcagttgggaaagcgacttcccacacaagcataagaacccaagcgtggatcccagcacccagctggaaagctggacgcagctgcatacagctaggtcgtcagcactgggaggtgaggccagagttgagaggtaaattcttggagctcactgaccagtgatcaggttctagattcaggttcagggagagatgttatctcaaaaataaagtggtaagtaaccaaggaagattctcaacattgaccttcggccttgacatgcaaagtaaagtagaataaaataaaagtgaaggtatgcaaatagacttctgtggcttcgcccaataaccaacttattgcatcttaagtgggagcaaggtctggaccattcctgttggctgacgtagcactggattgagttccagactcacttagcttctctttcaattgtttgctattttaaaaagtgcttagtgggtaattcaagcaaacacactcttgggagaccaaaagctcaggcttttaatatcaataaagcattcatttattgatcattatgttaggacactgctgcgtgagatatgaagacaagcctcccctggagtgatactctcatgaaataaagcagaaaggaaaaaaagatagtatataatagtttaaaaggacacaagacatttggggcatttctgagattccccatgaaagaagcagtgcatacatgtgtatacacttgaaggcttagtggggcttgcataggtcatattccaacagagtgtgagaactgtcagaccatttgttttggacaagaggtacactcaggaaagaaacagggatgacaccaaggagacaaacagaagtcatactttgtagccatactgtgtgtggaaatagctagtgccttaaatatgggaccatttctacagtgagctttttggatactgttctcttttaaaatttattattattattaatttatttatttattgtgaaatgagccaattcaagccaaatcagattatattaaatgcaggtttattgggaagctgctctcaggagggttctctggccccgaggacaaagaccagagaagtcaccatgggaaaggagagagagagaagtggaaagagaaatcgagaaagagaactctcagagagagggagaggaggagagggagaagggaaagaaagagaggcccaaaatgtctggattatatagggaagaacagctgggggaaggacagccagcccctgggctggaaagttcagggttgggagcaggatatgccagctagggactgaaggatgcaggaagaacccggaggctccaggtctgctttgatgcctgaaatctgcacctccgtcccttgttccagggtctgaaaccaaacagttattgttactgttttattttattattgttgttatgataataataactattattattattattgttgtcgttcatgttgttattgttactattattattattattagcaggccaggaactcactctgtagaccagtctggccttgaactcacagagttccacctgcctctgcctcttcagtgctgggattaaaggcatgcgccaccatacctaaccgatgaactttatttttagttgtgtatgtgtacctgtacttgggtgcacacatgtgagtgtggatgcccttgagaccagaggcaccacatctccctggagctgtaattacaggcagtgtgagcctcccagcacagcactaggaacttaactcagattctctgcaaaagcaatacacacttcttaactgcttaggacatctctctgggcctactcccccccccctctttttttttgatagagattcagatagggaagatccatcacatcttagaagtgccagagttgaaatgcaaaaccaagtttactgcttccgggggctgtacagcaaacctcgagttgataggccaaggtctgaacttagttcagaagattgttcatatctggacagagcaacgatggagctagagtatttagtttaggaagattgttcgtacagtgaaacagagactgttagaaggttgagagactggctggagcctctgactctagggacagaaagggtagttctccaagactagtgattagatacaggaaggattcatatcggctctgggtgctcagtctgcgtctccagggaaagggtggagacactaacaaaggtaagtcagacaagaagggttattgacttagggtggcgtgctgggaggaggtgatgcttaaacctgagttcgggggtaccattaagacaacaaatgacgtctagtgggcctatggaaccacaggccagattgcccttagagacctgatgtagcaatcatctggaaacactagagtgtatgggaactcctgaagagagtgcctactagagatgagcgcgcatttcctcaggaagtgtgggtgtatttccatgagaggcaaaggaaaggaagaaagaaagaggaaaacataacaaagagagggtagtcagaagagcagcaccagcccagccacttgtcacagacagcgagaaggatccagacagagtccaggctcagagtcaccaagggacacatctctgcaattagtgttggtctctttctcaagaaacaatggatggacaccattatgttcagacactttttttccctctgttctcagctctgtttatggaggcaatgagtcagtcaagagggccgttttcctagtaaagatgcgtttagttaccatactcttaatttgcactcgtgagaaactctcaattttattgccaacaaattaaagtaaaaatgcacaggcttttatcacatcactggagagcagttgattggcctttgggtctctcccactcctccaagaaaactcttgtaaagttcttggctctttcactctgtgcttccctgtgtggtctaccaagcacccttagcttgaatctatgaagtcaatgggcaggatccagtcacaagctcagagctcactgtgttgtctcttcagtcttgagataaccttttcgaagtgggtggcgctaatgagaagagaataaaatagctaatgggggattataaagtactttgcaaatataaagacaacatcaaagctaaataataatcttaatttagggtaaagagttctattagcagagagaaacataaagaaggacaaagggtagtggcgctttgtacctgagtaactgtgcagatcaaaagtgccgtattgatcgccattgccctgtgaactctccaacctaagaatttggctcccctccctgactctcaaaggacctctacccactcagtatgcccatggcgtttctctgagtctcctgaccaatgtcaacaggaacttctgtttggggccagcttgataactgagtagagtcctcttccggttactggttaccagctcttggttatcttctcagtatctcttaactatctgtgcctggcaagaaaatagagaggcttgagcaattaggaaacaacagagagctcagagtccacaaaacaaacaagttaagggatgcttggaatatttgcacatacatgtgccttccgcatgaggtcacatatagacaccctccaggctgggtgggctgcaggcccttgggaagcagaaacagaggctggcagtgatgatcatgggcttcatgcgtatcaacttttttgagtataaaggaaagagaaagaaattaattcatctctcacaggtaagcaaaaaagactcccttgggtgaaaaaattcggaatagtgcagggactgaactgaagttcccagaacttctccgtgcagaccactgggcttggttgtcataaaattttagtagggattggagttcacccaagacgctcagccagctaaagctaaagtctgtccctgtgggaagcaagagcttctttggggcgatgttaaagggatgttttctaaactgatttaatagtatttaagtgacttctccctcaagatagctttcgggtcaaatctggagatgtctcttcagggccccaaatgacaagagagtgcttccaaagcggtggacagagaccaaattagtctaggcatgcgttccacattcctctaatctcaaagtggacctcttcctccgtgaatttgcatttcctgtgctattagcgtgtggctttaagaccttgtgtgcatgcgtacacagggcggtaagtaataggcttcagactgactcgtcggtgagcagagccatttctttgataggtgttggtgggggggcgctttttgcaatgttgcttggctccccacaccgatcctgagagaggactaggtcactaggaagaaagtcttcctggaaaaggtgagtctttttcacaggaatagaaggcatgctgggtaaaaggaaaggtgagaactctctctctctctttttatgagggccaaaactgtagagctgactttgagtttacagggagtccatagaccgcatacacgtgcttgttgtataacagccctcctggagttcaaggccagactccaatgtggagggttggagaggtttgcaggtttctgaagagaaagcaggaatctgaaaatagtcatttcctgatcaaatgagaaggcgctcaccaaattcatgtcatctgtttgtcctaacacctgcttgtgcttggcattgtgcaagcagtgacatgaggccttgcctctgactctgagggactcaggatgtactctgcaggaaggagaacatgactaatattttattgaacacctactatataaccaggacctctcatagaggaaatggatatggggaggggccgcagtggaacgctgattaatactaacagttacttaagaattttaaatagagggtggggaggtagctcagtggttaaagtgtacgtgctgtccttttagaggacccaagttcaatttccagcatccaccaaggtgttttgtaatagcctgcgactccagctgctccaggggatccaacatcttctgtcctccaagaattttgaatggattaggtggagggcctagggaaataaatggaatgtgctcaaatctaggaacgaggagctggccagggggtagagaaggaccttgttctgaggagttgaggacaaaaaccagtgtaagattatgggaggtgttggctcacaggacatagtggaggtgccatttgtccctgatcagtaaaggagatagggcaaggcccgggggaagtgaaagaaaagggactttagtatacaacaaactttcccatcatactttttttaaatttatttattttttgtttttttgagacagggtttctctgaatagccctggctgtcctggaactcacttgtagaccaggctggcctcgaactcagaaatccacctgcctctgcctcccaagtgctgggattaaaggcgtgcgccaccactgcccggccccatcatactttttaaatatatatatatatatatatatatatatatatatatatatatataatatatatatatatatatatatattttttttttaaagaaacttactttagaggctggagaggtggctcagtggttaagagcactgactatccttccagaggtcctgagttcagttcccaacaactacatggtggctcacaaccatctataatgagatccgatgccctcttctggtgtgtctgaagagagtgacaatgtaatcacataaaacaaataaatctagagagagagagacactttaatttgatttaattttatgcacacgggttagcatctctgcaccgcgggcgtgcaagggcctgtggcagctggtaagagtctgtctgcttctctgaaactacagttgattaattagccaccatatgggtgctggaactgaacctaggtcttttgtaagagcaacaagtgcaagtgcccttaaccctgtgacatctctccagctgcccaccatatactcctgtacacatgagataagactgtttttctgatcttattctccttagttcttagaattctaccatttaaaaaaaaagtcaagcaaacaaaaaatcctactgggctggagagatgcctcagtggttccgaagacctgagttgaatttccagcacctacaccaggcagctcacaaaccacctagctccatggggatttaacacctctggcctctgagaccacttgggcaggcccatgcgcataatagctatcttagggattgttaaatgaatgaaaacatcttgcgtatgttacgttttagttcctaggagctaaagagatgctgttagacatctctgaactactcagaagatggacactggctggttcaattgctatgatatccaggcaccacgcacagagagagacccagtgaaatgctgagccccaaccaaatggcatccacaccccacgctctcccaatgccatctcgcttttgtcgttattccatgtctggaaggttatactgcgggtgggaataagacatctactctccagtgttgtccctgcagctgccagcactctgtttgctgtgttctttgctggcaaatcattaaacagtccccccaaggcaggcctcttcccccagggccacctcctggacaaggaatcagagctgtggtcaaaggctgtcgggctggagcctttgggctgtctccaacacaagcctttcctggccggtgtctcttctgaacagaagcctcttcggcctgatgtcagcctcgcaatagctttggagggacactagcatcggagttggctggtggcttgaataatttgtgtgtatttcctcctgatgtaatttgtaagttcaaccaccctgtgttccatctattgtttctttagtgaagctcaggcccatcccgcaccgttcttccatcctgaatgtaaatgtgatccatgataccgcccaggagcagggagactgggagcaaccaagtttgaaccacagagtgttacccgtccccattcaacagatggcatctacacgatggcctgagaggacttagttgcaccggtccatttggagacagcacctgccccttctgagcttttcagctacaaaggaagctggctggagaagccagcagctggaacggagctggagactaggaggctggaagacactgaatgagcgtgaaattgaccagttaaagttaagccctttcacctgctagcacggaagctctgctcactggtgccaccggaagttcagatgagcctctggcacatttaaatagatacgctggtttccttggatttcattcatttcttctttttctttcttttgtttttgtttgtttgtttattgctggtttggtttggtttggtttgagacagaatttctctgtgtggtttttgggtgtcttggaattcccagagatctgcctgcttctgccttctggaattaaaggccccttcccccccacaccctgctcttttagtactttcataagtaactgtcttgggccttttaaacttcaaagtcttcttaaccattttgttttgttttgttttttgagacagggtttcactgtgtactccttggctgtcctagaactctcaacagtagtccaggttggccttgaactcacaagatccacctgcctctgcctcctgagtgctgggattaagggcgtgtgccaccactgcccagccaaagttttaaccttaatgatgacttggaagcaaacaccacctacttccatcagtttctatattcctaccacctagggcctgagtttggccagaatagaaagagtgaaagcagaaggcagaccatggcgaagctgtttggaacagtctgttgggttaagggcaatcagttagcttactgtgggaagagataagtaaggccctgcctcagaagggcctgggcaaagcttccagaagctttcttcatcttggaaatgaaaggattgagtattcaaccctaaaaccagtcacttgacttagaccttggcttccctgcaaagggcctcctgggatagggtggaatagacctcataggcctcagggttgctctccgtaccacagagtcccaggattgggtcagaactcagccatctgcagggcttcgtgggattcttggaggttgagtcttaagtacttcacctggtgaaagatgggtgtccaaatcacgtgactagggtgccttttaagaagtgtgtggccgggcgtggtggcgcacacctttaatcccagcactcgggaggcagaggcaggtggatttctgagtttgaggccagcctggtctacaaagtgagtgctaggacagccagggctatacagagaaaccctgtctcgaaaaaccaaataaataaataaataagaagaagaagtgtgtgtgcgcgcctgtgcatgtgtgtgttgggaaaaggccactctgtagcccagatggacctcaaacctaaccattctcttgcctcaggccccaagtccccagcatcctttaaggttttaacctttgtgagcttcaaatatagtattttttctcagccttcaagatacttgatgtaaccactgagtcttgataggcccttcttatttactcctacctgtaacttcctagtgcctcggtacctggaagtcgttcctaacagagaggatgttctgagaatcgtgatgggcacttttgtctttgtgccaacatggctacaagccggtcccttgaggctgatccttttcctcctccttcccctccaaaggtctcctgttctcaagctcactatgtacctgaggctggccttgaactcctgatcttcctgcctttgtctcctggagtgccaccacacccagcttgtacatagggcaatgactcttgttccgaggatactggttgttgttgttgttattgttgttgttgttgttgttgttgttttgaactaccacagattgccttgaactcgatgaagtcaaggatgactgaactggtgatcctcctgcctctgcctcccacagtcctggggttacaggcatgtgtcaccgtgattcgttttatatggtactggagatcacacctaaggctttgtgtgtgctaggcatgaactctaccaattgagctgcatcaccagccccttgtatgcaacttttgacaagactagaactcatggttattctcctgcctcagcctaccggttatagggattatatgtgtacttgtgtggcttctttctggaggcaaggggtctttctttctttctttctttctttctttctttctttctttctttctttctttctttcttttccttagcatacgagtagggagcttttttgaaatcttcctatatagtcctagctggcctgaaagtcactaagtagactgggctagtcttaaccttgtagcatcattcctcctgcctttgcctcccgagtgctgggattgcaggcatgcaccagcatgccctgctcagcatggtttcttggtgcgctcaagagacaaggtaaaaagaaaatgtagcaagctgccaccagcctaacatggcacagttttacagcaaactttctgtaagtccaaggtgttaaaataatgattaaaaaaaaaaccccagggtgtaggagatgtatgggccattagcagagtggtttatcatcagtgtctgtctgtgtgcccatgtggtgcaccttttacaactgtcaactccgtgaatttattcccatcagcattaccgggaatgccaggatgggctgctctcccgtgtaacttccatggcagactcattggaccgctgtcacacggcagtcagcaatgatgggaacatctttgtgtgggtgtgtgactcagtaatggcataagatctgcatatggagtggcggctgagagctccccctctgccctgaccctgccacgcggtctccccttacattcaatgcattcctgaagcaaccccaagcaaccagctcctgtttcttctgcttttgagtcttacacacacacacacacacacacacacacacacacacacacagagagagagagagagagactaggcacagtatggggtaggaaaaccccaccgaagctgttctcacatcaagaggtctgattacatcatggagctttgacatagagacagagacagatacattttcacatggaagaatggggtctttcctaggggatgagggagccggcggggggtgggtgggggggagcccagaagaaccattgtttcagtctgagcttctgtgacctctaatttcaggacacacctttcccatcccaaactaacaggggctattcaccggaaaagcatctctgcacagagtctgcccttgttgtggctagaagcaagccacactgtagtagtgccccctttaatctcagcacttgggaggcagaggcaggcggatttctgagttcgaggccagcctggtctacagagccagttccaggacagccagagctacacagacaagccctgtctcttaggggaggggtgctgtaagaagaagatattaaatcctatcaggaagaaggaagctgagcctgggaggccaagtgcagagagaggcccagaggcaacaaagcagacagatccaggctctggcttgctgagtggagaagcctagattctgaagttttcttgcccaggtgcctgtactgcagctctgtgaggggctatgtgctcacatgggactggggcatacacctctctgacttgttagtcctggaggcgtagtgatacagacagggtagagacgtagtctagaatgtaacctcctttaactagagttccattttcttctgtgaaaaaaagcaggtttgtctttgaggtagggtcttgtcatattgcccaccccatcctccaagcagttggaactgtagacctgtgccacagtaaactgaaagcaagttttgaagatctcagagaggcaggatccaggctactcattcagcaatttgtatcccctttgtaaactatatccagttcattgcttcctttgtttaaaattattttgttatttatggatgtgggtgttttgcccgtgtgtatgtatgtgcagtacatgtgtgcttggtacccattgaggccagaagatggggtcagattcccttgaactttagttacaggcagctgtgagtcactcaaacccaggacctttggaagagcagacagtgctcataaccactgagccatctctccagacccgttttcttttcattcttacaccaggcctgtgatatggaaaaccgcaaaccagactgcctatgagcagcctttccctcttcggtcttcccactttactagtctatttttgctcagctggtctgatccgccctctcactcactagcatctctgctccatagggagctttcctccccaccaacatgatcttctgtagctttaaagaagtacacagtgtccagacaggccatcccagcgcttgagaagtagaggcaggaggatcatccaaggctagcctcaattacataatgaatctgaggccagcccaggctatctgaaaccctgcctcaaaacaaaacacaataaataaaatataaaacaaagagaaactcttcttggcaaattccccagcatttcaacttcattgggaaactctgccttcccagagacgggttctcatgggaatgagaaacagttcccaaagtttccagatccaatcacggctaggatctagtctgcagcaggtgagcatcaacctctttaaagagagggccaggtgagcaaacccggagcctctgtgaagttgctgcagtgtgggagccaggagagccaaacccacaggctgggtctgctttccccagccaccaagcagcaggagccttggtttatgacggtggtgtgtcctgccgcccgagataaaagtcaggtagttctaagttcaagtaatggaggttgcactgctgaggatgattataaaacctgcaaagaggaagtagggagaagggcgcctttgatgtctggccaatgctcccgattacaaaggcaaaattgtagcggggcggtgaagttacctgtccaaggccttgggtgaaggtctgagtgtggaatcagagaactgaaagattattgcagcagaggtaggggggaggagagggccgggagacaagagagagagtgcataagggtttgcaaaagcccacgcccaagaaagaggaggagagagatgcccgaactaaaaccagcagtaaagtccggagctcagcggagccctggaatgccctcagtgggggccgtaatgaggtcacgtgggaagaaggcgggctggaaactggaagagctcgtttggtggggtttgctgggctgagaacaggagggaagtgaccgaggataatgagccgtcccagactgtacctggcagaatgctagctttgagaggcactgttgaccgccaagggaggaaggagtcataaagggctttgtctcttccaggaataagaagagattattattgcaaggacaataataaagccagctcccgtttaatgggcacttgctaggtgttggtctgtgctgagcactaactagtcattatctctagtcttcgggactctgaaacaaagcaggaaaccaggagctaggagctctgctgtacacctgtagtcctagataccccagaggctaaagcagaaaggccactcgagcccagaagttcatggcaatcctaagcaacatagccataccatggctcttagaacaaaaggattttaacaagagacatgcacacacgcgcgtgaacacacgcactagtttacatggctttgccaaggggttgtgtgtgcaaaggcagttcgaagcttgagtgatctgcatctggcaagtattcctcctgacttctccctcgtggtacctgtagcacaggtgcgttctaactcatggccttccttaggaacacaccagtcgctaatccttcatttcctccagtttctgggagccccgcccagccatgccctcaccctcactggatttaaaagctctcaccttctagtgtcgctgaaagaatgggcggctgcacactctcctatgtgtggttaaggagcccctgtcccctagatctgtggtctccccaggggccctccttttggctagaatgcctggaaggtgtcctcccagaaacaagcttcctagctaggaggtagtgaagagtcttggtgggaatgactggtttccatgtttcatccgagggtacttgcaaagctcccgttgtaactaagtcaaaccatgaagcacgtggcaagtgtgtttcttacactactgacgagactgtacaagaaatgacacattttctgttcaatctgactccaaggccctatctctcaaagtgagcagagatgttgttcaagagagcatcccttcacaaagtagcacaaaaacctgggggtttctgaaacctagactcgctaggcaaccctctggtacccacgcgcatcaccgcaaatgtcttatccagacgcacatgctctttgagattagaggaggaagatccagagctgtagctcagagaaaagcatttgtatcgcatgcacaaggtgctgggccccatctccagcactgaaggaaaagaaaggtttagatgtatttactgtctgcagatgtggctcagtcagtaaagtgctgacctagcagcatgaggcctgggttccaccccagccctgagtcaaccagatgttggggcacatgcctgtaacctcagtaacttagggaaaatcagaaatgcagtcaatcctgagctacttactgagtttgtaactaacctgggctacatgggaccttgtctcagagagaagggagaagtggaggaagagaaagaagaacaatctgaatggatacttctctgctgggaccagtctgtgcgtatctattgtttggtcattctgcaggggccagactcctcctggggcccaggcttcagcttcccactgctggtgcatctaggtcctgcccagccctttaaggttctggagatagcatcctccctccacactccactttcttctgcctccaggatgcctgctgcacttcctcaaagaggtcacttttcaccaaaaccaggaagagaggtcgttagccagcactggtctttggcaaatgctccggaggcaaggagatggagagaagagacaggaaaggaaatagagaaagagtaagaaagctcttgtcagccgggcgtggtggcgcacgcctttaatcccagcactcaggaggcagaggcaggcggatttctgagtttgaggccagcctagtctacagagtgagtttcaggacagccagggctatacagaaaaaccctgtctcgaaaaaccaaaaaaaaaaaaaaaaaaaaaaaaagaaagaaaagaaagctcttgtcacttcttggtcctccagttccagagtctcctctcagccacccctctcaccagccttcctcagagcagccattgccaggttctgaggcacacgcaattttccgtcagccatctggttatagaccttccacaactattcagcaaatcctgagtacctcatgtatggcaggcactgataggacagtgggaggctggatgggaggcggggaggtgtcctgggggctggggagaaaagacagcagacaaatgcactacagtggggttaagactagttagggaaatgcaggacagattggcaaatgccaaaagtgtgtttagggaagtgaagcaggttgttatttttggacatggtcgcaggaaggaggtgtataggaagagagcaaaccatgaggtatgcccagtccagacacagcctttgaaaaatgtgtccatgtgtctgtctgtgtgttctgtgcaggcacacacacatgatttgtatgtgtgggcccgtgtgccacacagtaccgcggaggtcagactttgtagaattatctcctacctttttgtgggttccagggtcgaggctcacccaagtgcctttatccaccaagccatgaccccccctctgctgccccccaccccccagcccaggccaggcagtgaagagaacagacttcatcccaagagcgtcgaggagcctagtgagagctcccatagtgacaagcatgctcaagttagtgctgaagccactcttgccactgcatgaagggatggatgggataaggcaaccctggttaagtttctagtaactcaggacagcagtagcagtggcaggtgtaactaaggagctgggcgaagttggaagaagccggagtatagaggtagtcagggaactgaattgtcgggtctcctgagcttcgcacctaatgatggacctggaacaaggactgatggttgctctatgcctggggctgcaggagagggttctccagggcagccacagtgagaaggatccggagaagcatttatatagaactgatcgaatctggagagtttctttctttctttctttctttctttctttctttctttctttctttctctcctttcttccttccttccttccttccttccttcctttctttctttctttcttcctttcctttcctttcctttcctttcctttcctttcctttcctttcctttcctttcctttattggtttttgagacagggtctcactacgtggctctggctgtcctggagttcacaaagatcctcctgcctctgcctcctgaatgctggaagccagcaattttttgatttcttatgttgtggtcataaaaagagaaactataagaatatgttctggcggggtgtgggggagggggtgtctcagcgggcccatgccaaggcatcccctccccctgagggaccagacacacacgggtatagtatagaatagtttatttaggacatggggaggggagttaagagggtagcagaggcagagagaggcaaagagaagaagagagtagagacggagaggccggctatggccaagtggagagagagggaagggaatgggagagagggggcgcaagggggcaagagagcaagaggctaagagaaggggtcaagcagccacttttatactgggccaagcctacctggctgctgccaggaaccgtgggggtggagtttagacagaatatcaacctcttacatgttgacatttgaaggaactgaggagactgggaggttagcccctaggtgggtgacatcatgcctctgacccctgagagagaacactgggaagtcagttatagactacacagtgatgcagtcaggcctgagccggctgggtttgaggtatctcacttaagatccttccctcagaaggatctagagagcatttggacatagggatctggcgctctagagaagatgaagtctgtgggttggttgggtcacgcacagcccacccactgggtaggcccggtgtggtgacacatggctttaatccagcactccagaaggcagaggcaggaggatctctgtgagtttgagtccagcctggtttataaagcaagcccagaacagccaaggctacacagagagaccctgcaccccaaaacccctgcaaaaaaaagtgtgtgtgcagatagacagcacctaggacaacatcctggggtcaccagcattctagggactttgcacttgggacttttgattggctgggcacgatggtgcacacttaccccaatacttgggaggcagagacaaggaggcttgctgcaagttgctggtctacatagtgagccctggtctcaatcaatcaaacaaacaaatggaaaagactccatataaactagtaaggcaaataatttggtcttaagttggggagaagatagcaagcttttaaagtcagatgtaaacatttacaaacaggtgctcacactgtagctcaggctggcctgaaactcattatgtagcccaagctggaccccattggttttccttctgtctcagccctcagtgctgtgattgcaggcctgcgagcctgggctcagcaacttcatttgtttcgccttttcccctttaatgtatttgctctgaactggaactaactggctttatatagaccaggctggccttgagctcacaaagatccgcctgcctctgcctcctgtgctggaccagctgcgtcctcaaaggggaccttacttagccaaattttggtgcatgcgttcctcatcttcaaagaagggacaacagctttctacttcatagtgatctgcaggtgctttgaacgatcaatgcaaacagatcaatgcaaaccattaccctcttcatggtcaccgttggcccagtaaatgggggctgaccctgcattcatagtgattccaatgacagcagagaatggagccaggtaagctaagttgtagtcctatatgaccttgacttcatgtgccccaggtggcagtgcctgtgtctctgtgagatagggcctgaagtcctgaaaagcaggggacacgtaaaatggccagctgcccctggttctcatacccttggttgccggttcagagtcagacaatctggtgacttcttctctaggtcctcctccccttccacctcgccaggggcatcccccaacagcgctgctctggacggcaattctgagttaaggctggggacagagttgtgggtaaatatttgtacctcctcccctttcctgatccgccctgtgctcagtgtgagggggtcttggtatcttagagcgcttagagcgctggcctatgaaggaagggcaagctagtcaaagcagtgcatttctggggctaatttctatgccctaagagtctctgttgtgtctgagtggccatgtcttcctctcctccacacagtttctctctgaagcatcaggggactcctcctgtgtgagcctgtggtccctgctgcattctttccagcctcatctcctgccatcttatcatgcctgtcccatcttccttgagtcccacctcaacctgcggcttcctttgctggaatgacctctccaccccacttcctctgttggtcttctggatggacacaattaatcagtcctcagcaaggctattgagtcacccttaatgacaaacgctctcttccttatatggaattattagtctctgtttcttgcatcctcccgcggtctcttggacacactagcatcacgtacacactaggcagtgtgtttacgtggcacggtgggagccttccatcttggtcgaatgaagagatgaagggaaggttggagatagcttagtcagttacagtgcttgtcacacaaagagaggactggaatttaacttccccagcactgtgtttaaaaaagctgggtaccagctaaagaaacaccactcggttcagaacgctggccactcttgcagagaacctgtgtttggtttccaacacccacatggcagctcacagctgtctataactccagcttaggggaaatgatgccctcttctggcctcctcaggtacccaagttgtgcatgttcaggcaagcactcatatatacaaaataggaatataaatcttgatagctcacgcctttaatcccagcacttgggaggcagaggcaggcaaatatgtgtctgaggccagcctaaccttaggtcagcatggtggtgtacacctgtaatcgaaatactgaggagacagggagccagacacaggcaagttcctggggcatgctggctagctggcttagcctggttgacaagctccaggctcaatgagagacccagtctcaaaaagtaaggtagagattaatagattgataattccaacatcagcctctgggtattgtacgcatgcacacaaaaatgagcatttacgcacacacacacacacacacacacacacacacacaaacgggtgcatgtgcatatgaaatgaatggatggatggttggatagggaagctaaagccagtgtattcactgaagagggaggtcagcctcatgccttccattttctggagacaagagcatataatctttttccaacactaaatgtccattaccaccagcccagtaatccttaagttctggaatcctggaacccctacccagagtttttattatcaaggctacgatgcaaagcaaggtagtccatattgattgacagcctcttccggcagcttgcttgatcccatgatgagcacacacatgcaaagtgaaagcagcagggacaagcatacagagttagaagacacaggacagaatctacagagcaagagctgttggggggaaccaaagaggcatcagtagcacccggcactgccttgggatcaagggcagaaggcgcagatgcagcagaaggcaggcgcagattcagaagcacccagcatcctcagagcctggcacctagaagcaggggagtgctctcagagcttagaagtttgggagcaagcagagggctcaggaatcagcaggcagacactgtggtcaggaaaggggcgtttggaaaggtctgccttaagggtcctatagctatttgacaacaggttcattgaggtccccacggtggtacctctccttcccaagcccccagcccctctacctccaggacctctgaagtgatttctatttaatatgaagcaatctagtagtaaggggtcaccccttttgagataggatagccccgaaactcactatgtaacccaggctggcctcattcttctagcaaaccttctgcctcctgaatttggagtcaagaccatcagccaccatgcccggctaatgtctgttgttttatagtaccaagagacatgccacctcagggccaggaagatggttcagcaagtaggggcagcctgagaacctgagtgcgcgtccccagattccaaggcagaaggagaaaaacagctcctcttgccatcaagtgcacaccacagcacatatgtgccttgcccctgcctgtcacatgcacacatgcacacacaatagtaatacatttttttttatttctttaagatttatttattatgtaagtacactgtagctgtcttcagacataccagaagagggcatcagatctcattacggatggttgtgagccaccatgtggttgctgggatttgaactcaggatcttcagaagaacagtctgtgctcttaaccactgagccatttctccagccatttaaaaaaaaaaaatttaaagaagccaacctaagttggatgtggtggcccactccttcaatcccagcactctggaagcagaggcaggaggatctttgtgagttcgaggccagcttggtctacaaagagagttccaggacagccaggactgttacacagagaaaccctgtcttggaaaaaaaaattaaaacaaacaaacaaagccgggcgtggtagcccacacctttaatcccagtactagggaggcaggggcaggtggatttctgagtttgaggacagcctggtctacagagtgagttccaggacagacaggactatacagagaaaccctgtctcagaaaagaacaacaacaacaacaagcccaaacaaacaaaaaaaccaaggccaacttggaacctgcctagaatactatagctgtgcttgattcttgtccatggctcacagctgcctgctagagtttgtctaacccagatgtctgtctgtctctctgcagtcccaccccctgtacctgtgcaacgccagtgatgacgacaaccttgagcctgggttcatcagcatcgtcaagctggagagccctcgacgagctcctcgcccctgcctgtcactggccagtaaggtagggcctcacgccacactcctctgctgcatccagcatgggccatgagcacccccagctctcgagttcccttgtctcaagaatgataagcccacagggcggtggtggcacacacctttaatcccagcacttgggaggcagagacaggatctctgagtttgatgccagcctggtctacagagagagttccagaacagctggagcaggactatacagagaagccctgtctgggaaaacacccccacacacacacacacacacaaaaattaagagagagagacaatggcaataaccttgaggctagagaggtggctgagctcagtggttaagaactctggctgtccttccagatctgaattcaattctcagcacccacatggtaactcacaaccatctctaactcagttccagggactctggtgccctcttctgaccttcatgagcaccaggaacacaggtggtccacagacaaacacacacattcaggcaaaacacccacacacataaaataatacaaatagttttaagaatgctaagcctgccaggcagtggtggcacatgcctttaatcccagcacttgggaggcagaggcaggtggatttctgagttcgaggccagcctggtctacagagtgagttccaggacagccagggctatacagagaaatcctgtctcaaaaaactaccaccaccaccaacaaaaaagaatgctaagcctgattccctcaagttcccccagcttataacccatccaggagaggtagaaatgcacgcttttgtccttagtcaacccaccagtcctagaactttctggagtttcatcccagcatgagctctgaccccacccctgccctctactccctcaccccactccatctcttagaaattcatgaggattttcccttcctcagtacaagaacaatcaggggacgtagggggtggggtatcactttgttccatgcctcggaaacatctgagccccctttcctatgaacagcaaagtggagcctggcatgatggcacttgcctttgagcccagcactcaagaggcagagccagggttactgagcgctggaggctgccttgggccggatagagagtaccaggtcagtcagtgctgggtaagaaagcccctacgcagacagggaaaatggaatactgagtggaaggaagctaccactctctataacagcctttacacgtttcctgtgaggtttgttacttcactgcaagctcccttgcacaagggctgtgtgtgtaaattagggctggggatccggcttgtgtggcagagcgcctgccgaggctgcaccaggccctgggtttgttctctaacattgcccaaagccaggcttggtgcttatataatcacagccctccaggatgaaggcaagacaattagaaattcagtcacctcagtcacacactgtgaggacagcctaggatatatgagattctgtctcaaaaccaaaacaagaactcaaagaagcaaacaaaaatacctcccactaaaatgtaagttaactgccacactttaaaaaactgaaaataggcagcggggcgtggtggtgcacacatctaatcccggcactcaggaggcagaggcaggcagatctgagtttgaggtcagactggtctacaaattgagttctaggaaagtcagggttacacagaaaatctctgtctcagaaaaaagaaaaaaaaaccctgaaaataatgatgcaggactttaatttcagcacttgggaggcagaggtgggcagatcactgagttccatgacagctagggtgacacagagaaaccttgtctcaaaaatcataaataaataaataaataaacgcttaaaataatttaaaatgttagaactcaggagactatagcagacagatcataagttttagaccagtctgggctacacagagaaatgtctccaaaacccaaactaagctaaccacacaagcagagcccctgagagcccgactgctcagcagcgctcactgcgccgcctcctgtctcacggatgcagttgctcggctttcctgagctctctgggttgctggcctgctacctgccacctgggatccttcactgaaaatgacagttacggttttctgtatagcttacccaggagaacatggaccagatcctttgtatttattttggattttgagaaagagtctcactctgtagcccaggctggcctctggctctcctccgtagttctgccaactggggacccccgtgtgcggtgcgagcgcctgagcccacggaaagcctttctcattcacagcaccataggccacgggccacagtcctttacagctgcagattttcttctgactggagcctccctacttatgggtatttagtctctcctgctttacaaaatctggagaaatgtttgttcaggaagcacgggctcagggcgtagcaagctgggagcggacagagaattcagagaggctcagagggagtttcccccgcatctctttaccttctacagaagggacatgtgcttattctagaaacttcacagaaagtgcgacacctaactctgactctcccacccagcgcacccgacttcctttgatgtttaaaacagagtctcatggtttaaaagtccctgtcctgcctctgcctctccgtgctggggttgcaggtgtacagcaccacacccagcttcctgccgttgttttaacacagtgtctggttaaaccaggagctacataagaccctgtccaaagaaaagtaaagataaaacatcagaaagcatgctagggatttttcttccccttcccttctccctcttgcacaggccccagctcgttctggcccaaaggtttgtggtgtgtgtgtgtgtgtgtgtgtgtgtgtgtgtgtgtgtttggttttttgttttttgggttttttttttctctctcattatgggtggttgttagccatcatgtggttgctggaatttgaactcatgccctccagaagagcagtcagtgtacttaaccactgagccatctcaccagccccatgttagagatttaaaagagcacctggctgctatccctggtaaccataggtcctgttcttccgtgaaggcaacccttacatagtgcattaaacttttggtggaagtggcaaaatagctatgagaacaatttaagagagcggggatttattttctgctcatgtcttcagagacttcagaccatagtagacggcttcagtacttctatgcccatactgaggtacccatggaaggagaacatggtggctagagaagctcatattagagtggcccaggaagccctgcacccgtgtatgcccagtctgtgggatggtactgcccacattaggacagggcttctcctttaattaagctctccagaaacatcttcacagacacatcccccagtaggtaccctttcctaattccctaagtgattctcagcccagttacactgccggtcagggtgagccatcacacctggcttctctctctctgctaagggaattgtcctttcccaagcatgccaatcaggtcccatcacctgacccagccaaatggagttttcctaggattcccagctcaaaagagctgtgcaaacgtctcaaaaatctcacaggccaaaccaaaatctaaaatacttacttttgttttggctttatagaattctcttaagttcagtgttttaatacaaattatataacacacacacacacacacacacacacacacacacacacacacacacacacacgctatggttcctaggaagtgtaagggaaagataaggcctttgataaagaaaaatattgaaaaatcacttacccagattggtttctgttctgttttatcttaatattaatgggaagtcgggtgtggtacatgttcataatcctagcactcaggaagtagaggcaggaggattagaagttcgaggtcattcttgactacatatcaaattaaagtctagcctaggatatctgagaccctctcaaaattaaatggggctggagagatgacttagtgattgagagcactgattgttcttctagaggtcctgagttcaattcccagcaactgcatggtgacccacaaccatctgcaatgtgatccaatcccctcctctggtgtgtcagcgacagcatactcatacacgtaaaataaaatgcttaaaaatgaataagtgaagggggagggaagagggagggagggggagagcaggccacatctctggcagaactggagctctagaacaggtgatgggggagtggagctgctaaggaagcagacaccaatccagnnnnnnnnnnnnnnnnnnnnnnnnnnnnnnnnnnnnnnnnnnnnnnnnnnnnnnnnnnnnnnnnnnnnnnnnnnnnnnnnnnctgctaaggaagcagacaccaatccaggtgccatggcaggagcgggcacaagcctcagcagccacccttcagtatgacatatactctggctcgcccatctgagctaggctttgatcccttatttgtgaaaggggagtagtaatgggatttatacatgaataaccatgaggatagttttaattaattaattttttatggacatcagtgttctgcctgcatgcacatctgtgtaccataggcgtgcatgcttggtgccttcagaggccagaggagggcatcagatcctctgcaaccgaagttatagatgattgtgagccaccatgtgggggtgccaggaattgaacctgggtcctctgaaatagctgccagtgttcttaaccactgagtcatctctcctgccctagttatggggatctagtgggacgacacagatgcagacgcattattcagtgccaatcattcagtaaatgatgacagtgaccattctgttgtctcatacagcaatcacccttcaacacccttcagtgctgctggttcgttttgtttcattttggtttgttcttttttggggactggggattcaatgtagagccttgctcactccaagtgtatgtcccaccactggacagacttctcttgtgtgctcttacagttcacaaaagctgtctgtttctatcttaccttctcgctcttctctggaaccctcaccataattctgtttgacttctccgttctcgtgactgctcctgccacggcacctggattggtgtctgcttccttacagctcccctccctcatcatggctggacaaatgggaggaatcagattcagagacacgcagctgggtcccaagatgacccccacccagtggttaagagaagggactctcacgctggacatggtagcacgcacctatgatcacagcatgcaggaatgctaagtcagtagtaggactgtggtttgaagctaacctgggctacatagtgagaccacaccttaagacaaaacagaccagaaagtaggtactgtagaggctgaagttctggatgctcacagctgtcgccatgtccacagacacagtgtcagtgtccacggatcctctgagtcttgggttcctggctgtcttagggaatcctaaggaataactgaactcacatacacaaaccatatataatagttgatataatagctaacagcatgcactaggcataagtataaatacgttatgtggactaattaatgtagtcgtcacagtagctctctgcagcagggtccgttattgtcccagtttacagggaggaaagtggaagcccggaggagttgccccaaagtttcaccgctaatagcgggagcagagttatggttggcattttggcactctgggaagggtagctctcagtaagaaacagacaccttctccttccctctgcccttcctcaagggcagcctggtgccactgggcctgttgaatctttgcagcctgacccagctctgtaaaggcagaaatccctcccgttagccttcctcccagcagatgtggggctttggccaaatgaactttcaacacgatctgctgctaaggctgtgattttcggagccgctgggagcaggtcgaagaggccatttccaccatcagagggggctgcttcgaatttgtctgttttgtgtgtgtgtgtgtgtgtgtgtgtgtgtgtgtgtgtgtgtgtgtgtgtgtgtgtgttaagcatttgtgtcgtcgaattgggaccaggtagtagaaggaagagcattctgaagtgagaactgttcctttcatttatgccccagagcagtggttctcaatgtgtggggcttgacccctttgaggggtcgaataactttttttcacaagggacacctaagaccatcctgagtagcagatccttacattatgattcataacagtagcaaatttacagttatgaagcagtaacaaaattattttatggttgggggggtcaccacaacatgaggggctgtgttaaagggtctcagcattaggaaggttgagaacccctgctcttaaatgtgttgtgagcattatcggtgttttgtgcatggggaggtcttaaccttctgaatgccttggtacctctggtgtagtaggcactgttatattatgactaagcagatgatgtacagaaacagccactgtggtctgtagaggaaaatttaactgctgtctagtggatcaagagacaggatttcggctccttctctgcacaccctgaattggctcctggtggagccttgcttgcttgctggcccaaggtccccagagaggtttctgcactgcctttccaagcctgggtttctggttgtaggaccttacccatcctttctgtctcccaggttctatacctcagacacttcgtagctcctattcttgggtgtgagtgggcaggggtacagagagtcccagctgaaccattactcatccctaaatcttgttttctgtccctagaacgctggactcaggaacccactaccagaaagtcctgtttattttctcctgttggcaaactctcctggttctttgatcacttttacaactttataattataggctgtaatgggctagggtgtttgaacttcatcagtgattgctttctacccctcctaccccaattcttcaaagaaataagaatatctccaaagaagggagtccccaagccaggccacactgggcctagaatcttaggtatgggaaacttgagaccctgagaatcttgttctgtgactgctagggtacctctcccattcctcagccatccctggactgacattaccaataggatcacccctaacaggggctcctctcccagtgctacttgaaagccctggttctccaggccctgaaggtttgtctggaggacctcagctggactggtctttctgggaggaagtggttgataggccagtggaagctgcagtttctcagcttcttccccagtccattgtagagtccaagaacttcctcagggcttggggtgggagtcaattagcctaggcaggccctgtagagggaccagcccaactccctggagcaagagagaggaaaagaaacttatcctaaccaaaataacacacacacacacacacacacacacacacacacacacacacacacactcaacctgcttaaatgtctcactgccctctccctgtcccctgcctgcaggcaactgaatctgaggggcccactagcccctgccactgcttggggactggggagcaagagaggggaggacaaagctgctcgcagtttccctggcaggagacctgccccaacaggctctccctgggaagacagcatagatcaaaagaactgggagtgtgagtgagtcccagccctggctcctcttcctgccactgtgacttgcagaagagttaactccttcactgcctgcagaaaggcctcagagattcagcagggtccctgggagggagatggcaccagaggtggcaagctttcagcctagtctgggacgtacttcacagcgcctgtacttgacagttggttgtggctgcttctctcttatctttctcctctcaccccctcacaggcccccaggttccctcctcttgctctgtcttcgactcttatcgctgcttctgctgctgctgcatggctggctagattgtgttgcctcagacaggcccttggagcccttggtgactgtacatgtgtacccatgcacaggcgtgtccttgcaagagcagccctttagtctctcttcaatctgcccaccctagggaaaggacaaagagatcaagcattggacaagtactctttaaggccctaaattggaaccaaagagcttggaatgctaggaggtggcagggggagagtacccctgggtgacacactgatggggagacctcctgcggtggtcagagccgttgtcccagtctctcagcactctgccttagtctcactcctgagagatagcattccatagctgcctctggctaggcagggttgggtcctctgctcttctctctcttcctccaactgctggtcactgcctacccttggttcacactgcttgagccctgagcaggggctgtgtcttaccctggagccagagccaccatttggcacccagtgaaccctgggtgaggggtccatttcaaaatgaaagaatgaatgctattctttgaaagcagtgggctggctcagccagggatcccaggctcccgactctgcacacatacacgtgagttccccaactccttgcacacagaattgtgagtggacagggtactcgtcctagggagagatgaatgtgtgagcacccgaggttgagagccagccgtggtcagggtgggacgagcctctgctctgtttccacaggcccgaatggctggtgagcgaggagccaacgcagtactctttgacatcaccgaggatcgatcagctgctgagcaggtgcctagggacacgagggtgttccaggagaggggtctggatggaggaaggttgggttcttgagctggtagcagaagtcaaacagccctgctggggctttgttctctgcagctgcagcagcccctggggctgactaagccagtggtgctgatctggggtagtgatgctgcgaagctgatggagtttgtgtacaagaatcggaaggcctatgtgtggattgagctgaaggagccccccgccggggtaagcgtctcaggcctcagccttgggtctgcagcccacttccactttatccaacagaccccctggaaaccctctagtccaacttcagcccctagccacatgtcttgtggcttcttggggagtttctcccactctctgagcctcatcgacaagataaacagattgggcctggtgggtcctgaagcagttttcagctctgtggtttaatggcacggaggagagaagcctgcctgcggggctcccagactctgaccaccccagtgctctccagcaagtagctcccacctcacaaagggattgtgtcctcctttgcctgcaaacacatagcttcccacataacacttctcatagctgtatctagagatcactctcctgcagccccaagcagagaggactgcctagttcactgagttccatctctctaacccttgggtgggagacccaggggctcacagctccccactctttagttgtctctttcctttccctcctgacttggtctggctctttctagagtatgacccttttcttctctgcttcccccacccacatctccaggcaaactatgacgtgtggatcctcctgaccgtggtgggtaccgtctttgtgatcatcctggcctcagtgctgcgcatcaggtgccgcccccaccatagcagaccggtgagcagtgtgggctgcctaatagaagtgggtatgggtataaacgtggagggagaaaggagaatgtgagacagacaggtgtctttatggccatgaaaccacctccttttaaataaacactctatgctctctgttgcttttagcagcctctcctcatattccttgtttatgtatccatccatccatcagtccacccacccattcatcatatatactgagtgatatatatatatatatatatatatattatcagtttcaggtgttggcaacagcaccatgagtaaaaacgaccaaaaaaaaaaaaaaaaaaatcaaaaccctccactcttatgaagctttcttccagcagggtaatggtgacacacacctttaatcccaggacttgggcggcagaggcaggtggatctctgagtttgaggccagcctggactacagagcaagtttcaagacagccagggctacacagagaaagcctgacttaccaaaacaaacaaacaaacacaaagcagctttcgtcctagtggcaggggtgggggaagcagacaatgaagcgaataagatgataatagttttggtggtagcttgtgctcgataccgaaaactgtgaaatagcaaagaggagcaggcatgctggagagacagggttagccttttctaagccagcacaggtgagtctgcatcaagaaaacgatgatatagcacagaccagccatgggtgagcaaggggcgagcaatggacaagcttgggagtcactgtctgtcactctggttcaagaggatccaacaccctttcatgcctctgtcctctgtggggcactaggcacaccccaggtgcatagacacacatgccgacaaaatacccacccacacagactagaatagttatacttttttaaacaattatttatctgttttatgtgagtgcattgtcactgtcttcagacacaccagaagaaggcattgaatcccattgcagatggttgtgagccaccacatggttgctggggattgaactcaggacctctggaagaacagtcagtgctcttaaccgccgagccatctctctagcctcacataataatatcatgtgtcatcaaaggaagaaaagcctaaagggatatagggagctggtgggacggaaggtcacagctgtgcaagagctcagaagggatgtgccctcaagggcattcggaactgaggcgtggctggggcccaggagcgaggaaagcagagctctcacttcagtgtgaactccatccctgtccccaggatcctcttcagcagcggacagcccgggccatcagccagctggccaccaggaggtaccaagccggctgtagacgagcccgagccgagtggccagactcggggagtagctgcagctcgacccccgtgtgtgccatctgtctagaagagttctcagaggggcaggtgagatgggcccggctggagatggggagggtacctggggcggggtggagaggtctaggtatgactacgtcacaactacatctgggtctatgtgtcctccaaggcagggatcagtctaagatctggccactttgctgggcttctaagaacaagctttcatatcgttgagagggagcctcatgtcgggctccagcagcggcactttaaacacattatctcacgttagccgcatggcagaggaggttggagaatagattgtgtgcttatccttactgacagcagaaactgctgagaaacttgagccaggcattgtggtgcatgcctctaatccagccttgggggtgataggaaaaagacctatgtaaaactgtctccaaaaaaaaaaaaaatagagtaaaaccccaaacttgcccagagtcaggcagcataacacaaatccaccagcaaccaaggcccacaccgccattactctctattcctttgcaagtaggtgactgcaggaaggcaaggccaagagggagctagggaggtccttgtaacctttggttggggcactcttgtctgcttcaggagctccgggtcatttcgtgcctccacgagtttcatcgaacgtgtgtggacccctggctataccagcatcggacttgccccctctgcatgttcaacatcgtaggtaggaggtgaactcaagggctctcctgtgtgcgtacagatggatgtaggacatagctgccccagtgggaaagggtttctcttgtgaggctgaggagaagcagctgctgccatgttggcttcagcagcgcactgttcaagagcaccagcaccttgtctgtcggggaaggttgtccatactgaaaccatctttgttttcataaagagtgtgttttcacagtggtgttgcttctaaatctaatttgtttgcaaatttgttattcaaatattctggcaataaaggaccctgttctagtaaaattggcatcgcaattttctaaaagatggaagtgaaatcaacatcttaaggaaagaaccttatgtaggggctggagagatggctcagcagttaagaacaccgactgctcttccagaggtcctgggttcaaatcccagcaaccacatggtggcttacaaccatctgtaatgagatctgataccctctctggtgtgtctgaagacagctatagtgtacttatatataattaataaataaatcttaaaaaaaaaaaaaaagaatcttgtgctagtccagccaagagaacactgtgaactcatggtggccccgtgtgagagagccctattggctggtgggtggagtaggcagattttagagtagattttctttgttccccaaactgagctcagaatctatagagggtcagatgggtagctacacctttctgagttcattctctgtatgaagtctttacttgtgaaactaaatgtccatgttctctattctttttcccagagggagattcattttcccaggccccggcagcctctccatcttaccaggaaccaggcagaagactccacctcattcgccagcatcctggccacgcccactatcatcttccttctgcctatctgttggggccttccaggacttcagtcgcccggaccccaagacctagaccctttctgccctcccaggagccaagcatgggctctcggcatcagcgccttcccaggacttcacatctccgggccccagaagaacagcagcacttggcggtatctccacacccctatgcacagggctgggggctgaatcgcctccgatgtacctctcagcatcctgcagcttgcccagtggccctacgacgggccaggcctcatgagagcagcgggtctggagaaagctactgtacagaacgcagcggttacttggcagatgggccagccagtgactccagctcagggccctgtcacggctcatccagtgactcggtggtcaactgcacggacgtcagcctgcagggcatccacggcagcagctccaccttccgaagctccctgagcagtgactttgaccccttggtatactgtagtcctgaaggggatctccaagggaaagggatacaacctagtgtgacctctcgaccccgctcgctggactcagtggtacccaggggagagacccaggtttccagccacatacactatcaccggcaccgccaccaccactacaaaaggcagttccagtggcatggcaggaagcctggcccagaaactgggatcccacagtccatgcctgctgcttctcacactcagctggagccatctctccctgaccagcagctcatcacacccaacccaacagcttcttcaatgcttcccaacccacaacggcccagggctcttacagagccagcccctggcctagcagaagcttccagccctagccccagtcccaaacctaaccccagcggtcttttgaacttgcagaaatccagcctcactgtcagacacccacacagaaaacggcggggtggtccctcagaacccctgccaacctctctgcccccggacttgactgtgcacactgcttgcccggttttcccccactacagtccccgtctggcatacccttggcccccagaggttcatccattgatgttcagacctccaggtccggataggaggctgctacatgaagtcccaggcccctgttactcaagttcacagccagtgtggttgtatctgaatccctgccagcctctgggaccatgcttacctggagagggacattccaagtggacttttgacagcccagagggcaggagatgtccttactcacattgccaggtgctgccagcccaacctggtgagtgttcagggaagcaggtgttctgggaagaggagactctgtctggatattggaaggcaggtgaaaacagccgaggggttggtgaattgaggagattataacttacctgaagcacagaagtcataggtggttctcagcttccccaggggcccttgggctttggtaaaggaaccattaaggtacctggcagtgttggcacatgcatttaattccagcactagggaggcagagaaaggcagatctatgagttcaaggccagtctagtctactgagtgagttccagaacagccagggcagcacagaaaaaccctgtctcaaaaacaaaacaacaacaataacaactagtgagagagagagagagagagagagagagctaagactcctcttccaagcattcttgttaataaggccagccacgatttcatgggaactctaaatcctcagctctaagccaaagctttgcacatttgtctacgtaaaccatccgtcctttccaagactcactaccccccagtccctcccacctttgagacacactgatggcacacctctttacagacagggcttgaaagcttctatcattcattcattcattcattcattcatttcctcctcctcctgattacatgctagctatatgccaggtcctaggcaggcttctgaggatgtagagcttgccacacaggagacccaggttcatggggagacaggcatgaaaacagtgtgtagaatcactatgtgcacggtcacggactgtgcttgatggttccctttggactctgtcaaactatgtccagtgctggcagaatcagaccaccttttgctctgaggtctgtgcctccctcttccttgatcctgacactcactgtctgctgtgcctctgccagctctgtcaacttctcagggtccgctgctgatggcccctacctatagggagtacagcccgaaggtcaaagcaggagcctccctctgacagagtcccaaagttgagaggcctgcacacctagtgttatgtcccatagagttgtgcagcacaggcccctctgtccctccacgccactgtcagggtcatcagcctttcagtagtctagagtcagatgctgtcttatgcccacaggcaggagaaacctaacctgctgtggccttcagtgctccagcaccgtctagctccatctagctccctgcccttcctctgccctctgctttgagttgggtgaacatgaattatggttcctgctgccctgaatgtcccactgacttccctgtccctacaaacccagtgctcaaccatttctgtacaactaacccgcacatcctcactgtcagaaagtctttcctcactgctgtgcaagatctgcgctcctccctcaatgtgtctctcaggaccctggttctctcccactgtcataatatccatgtgcacacatgccttctctgctagcctattctttttggatattctgtccagcaagtggtagcgagccaagttcacaatgaatgtctaataaatatttatcgggcgaatgcatgaatagtaagtactgatcacagtggtttgccgcgcgcgcgagtacttctctaggtttgtttttctctcccgtttcccagtggggcccctctcagttttcaacctaatcaccttcgcagacctatttcctgcatctccctctctgtggtcccttccctgccacagcctctacaggtgggagaagcaggagattcgctggaccctcggtgacctctcttctcccctctcttctcacacaggctcggaagaggagctggaggagctgtgcgagcaggctgtgtgacgtgagctggtcagatgaagcttcgatggcgagtgtgctccagatggctcagggttcgacctggccccggggtcccgctcctgggaggagcaggaccacagcaagcatctcctttcgccatgcttcctgggaccactggaaggagagtgctgatggcgagtgcaggcgggaggtgctatttcctgccccagctcccaagcttgtctgcagaacacacctacagtgcagaaagtcttgtgtccagccagccagccagccagccagtatccagtatgcatttgtggggtagactcctcaaggctgagtttttgacaggaagctataagtgaatatctagatgtaaaggtgctgctctttcctcaagccccgctgggtctccccctgctgggtctcctctgccccagcttcaagctcacacaagccagtgggttcactgaaggcgagatcacgtctcacctcctttcaaggcttcactgggggcaacttcagctatatcatttcctgtcttctacaaaagaagaaggagtttaggtgagccccagtcccaagagaggtctctctgtaccttctccctggctggtgctcagggaggagcggttcttccttcctgttcttacaccaatcttagcctgcaggcttggggagccaaggaatagaggtctgtcccagaggtggggactgttacagacctgcctgggatgaatcttttgattatcaaactccttgtcactcgggtaactccagttcctctgaggtagagaccaggaatggaggggaatcaatactccaagctttcctccctccaagtccaaggcaggcagaaaggaagtctactaaactgcacctgggaagagggggaatgggatgaaggcagaggaggcacaactacaggagtcctctctgagaggttcttggagcagagatggagaatggcgacatgtaacctcgtgggtctgcagggcccggaggcccaccttcccagtgtaagccatacaaaaccagcaacccaactgaaggtgtgcaagtgggagtggagcagaaagttggcccgggcagcttgtaccacgtgggtaagggctgatggtgcctcctgtggctttgtcccagcatcctgaccactgtcagcccctcaggcagtatccttgcctgcaatgtgaaggtgggggcaaaatggacatgggatcctccttgggaaccttctctcctcagagtcaatggggagactggcatccaggcacccacatgggtatttatatctgaaccagacagaaagatgcttgaatcaggcactatgttgaaaaaatgtatttatttgctaatatatttatccataaatatgatctggctttgtggttttgtttcattatgattttttcactcaggataacaattccatcttctctatttccttttgttggatttttgaggcccagcctgactcccagttcactgcacagctaagatataacctcagactggtcctctcccccctcccaattactgggatcataggcatttaccattattccctctggtttcggatgctattggtgatatcaaagctggtcagatagggtaggtttaaagccccagaaaggtcagagagagcagcgtgcctggtactcgtcatgattcagtcatttatctgtgctgggctgctggtgactctggtgcttcactgactgactttgtgaccttacaatattgtaagcaaatactgaaccttggaatgtgtgcatacacgtgcatgcactcacaggagtgtgagggcagcctaatcgatacagcaagtgccaggacagcccgagctacagaataaagactttcaaaacaaacaaacaaacaaacatacaaacaacaagggcctctcacttgaacttgcctggagtccctgggatctgcctatctctggcccccagtgctatggttagagtagcagaccatcaaatcccacttatatgtggtgggtcctgagccagctcctcagcaggatacctgccttttaccataaataaaatgatcctccttcagagatgatagaaggcttacatgagatagcacagtgaaaatgtattccaaactgaaaagagatttcccggtgctagaaagtatctaaaacccagtcactgaaccccatgtggatgcagtttgggataaagcctagaatcagtcttgctgtccctcagtttcaatgagaagggctggaaggacagaacagcgggattgcaactatttatatcccagcgctccaattcagataaacacaaatgaccaggcttttgcctacattccaagagcctttgctctgttcacaccgcaccagacctcgtatttctgtatggtttgctcaggatattatctcggtgccatttaaggagacaaggaggaattttgtgtcctacacagtaagcacattggcagctggggtggggttagagtatgagaagtgagatacctaatccacagatgttcccatggaattatgtctaaatgtgccgagagttttacaaagcgtaaattatgagccaggcgcgcaatcgagaggcttttaggaggaattaaatacgcgtttccctctatccaacacgcctcccctttccccgtcggcacggctcaagctagcattcctggggaccgcaaacgaaaccctatcacgctctcccagttacaagaaggggtggggcctcgtcgggtttttgtctctgcaggcgtccagaaaggcaagactcattgcctcgagccttaaaacaacctagcgcgaagcggcgggcttgtattctgagcattccggacactgagacgaggggcttgtgtcaaaaagtcaaatacccgggcgtggtggtgcgcgcccataatcccagaactccgaaagtgaaggcaggaagatcaggagttcaagatcaccgtcccgtactcagaggccaacttaggaattagcattgtctcaataaatgagcaaacaaaataaaacaagcagacaaaacaatctaggttttcctcgggagtctgaagagcactcaggccagagcattttgggctccatcaaaaggcccgcgtcgcgaggcgcagtcccgccagtcgccccgctccacgcttcctgcgcatgctccaacctcccccagctgccccgcccctacgggcgcatcagctcccagcgcgcgcgccgtcttccgctcgctctcgcgaaccaggtgacgggcgcgcgcgcggcccaggtgaccgggcggccccgcccagcgctcccgcgggaggaaccatcttctccacggggagggaggggcggggcctgcgatggccggcaccggaagcggaagctgcgtgcccgacgcgtctggcattctgggtaatggtctgtttacttcctgcggctggaggaacctgtgttgtcgtatcggtgaggatggccctggagacggtaccaaaggacctgcggcatctgcgggcttgtttgctgtgctcgttagtcaaggtgtccgttggggccttggttgtaggagcgatcggggaggcgaaacgggagaaagagggtgaaatggggccagacacaggaaaggaaggctctgagattcggggagtgggaagcccgaaagcctaagggagccgttgtttccgtccacggaacgcgagccgggtggctgtgcctactgggggctgcgttgcagttctcggcataactgagcacaagtttgtctccccgacagacgttcggtgaacttgctgtggtggactggaaagacactaggagccagagcagccgagagagtagcaggagagggtacctgaccccaaagaggctagaaaatatgtaagctgaattagggacgcgagcaaaaaggtatgagggtggagtttaggaacagtttggagaggagagggtgttgggttgtatagaaaacgaagaggttggctttgttgaaatattaaggcgttgttcatgctcatacttgctttttttttttctttccagactatagaccagttcgaatatgatgggtgtgacaattgcgatgcatacctacaaatgaagggcaacagagagatggtttatgactgcaccagctcttcatttgatgggtaagcccctttcacgcgcctttgtttacttctgcacccagaaagttaatatgggatagatttttgaggtcataagactagctggtctcagcagttctgagagctagtctatgtgtccagcccagtagctgtaaacttttgtagtgtaagaccccctttcggggacccccgctctagtctcaggagtgtgagagcacccaaagaaacacgaggacccatcttgctgtaattacatgaggacgtttaattacggagctccggaccgacatgtatcccacacaggagataacggatgccggccacgaggctcgaaagcttgggggttttatggggtaaggggcttaggggtgtggaattgagcatagcgacacactattggcttattcaaacattaacagaaagattacatgtacgtgcagggtgtcagagttctgtgagtagttgactcagttcagatagccctgttatgtcctcacattcccctttatcttatggtcaagatgttcccaggaatgttttaactatggggcatacccaggtttgtttttctcttttctcagccccaggcagcctctaggctcacaaacaaccagcaatttctgagtactttatatgacttacaggtcttgaaatttcatctttctttcagtagctactgagtacttgacatgtggctagttcaaattcgaatatgcttaagtgtcaaatacataccagcaaacaaagattcagggtgaggaaaaaggatgtcaaatgatctgaatttttaaaagattagttaaatattgaaacaatgttttagggttatttgattaaaataaatattgaagcagggaagtggtgtcgtacgcctttaatcccagcacttgggaggcagagacaggtggatttcaaaccaaaaaaaaaattaaaaaataaatattgaagttattttcatctttattgttttaagtagtggctaagaggactttttttttttttttacctcgagacagggtttctctgtgtagccctggctggcctggaactcactttgtagaccaggctggcctcaaacttagaaatccgcctgcctctgcctcccaagtgctgggattaaaggtgtgcgccaccaccaccctgcttaagagaacttttttaatgtgtgtacttcttctgtagtcctatttaacaatgcttcacaactcttgtctgctccattatcgctgagactatgtttatgttatgtcctaatgcctgacacgggatgtacgaggtgtagatctttaatgttggagaggtggaagtgtgatacagcagtagaacacgtgactaccacatacaaagaacacatgactaccatgtacaaaaagccctgggtttaattcctaatgctcctccaaaagtgttggctacatgaacgatctgttttggaaatgaaggggtatagtttcagtagcctactccctcttacagtatcttagtgaatatggtgacttgcacctatagtcccatcatctgagagagagacaccagagaattggaaattcagagggaacctcagatacatagtgagtttgaggccagcctgagctacctgagaccctgtctgtctcaaacaagaccagctaagctatctcagcagggtaaggcggctgatggcaggcctgctaaccctgacctcaatccctggatcccacaaggtggcaggagagaacacacacacacacatacacgcacacgcacacacacacacgcacacacacactcacacgcccactcaccccaagagagttaactacaaaaaatgggagaagagtggtctggtctttgctcaaggtagcagcattgctaagtttcttctggtcagcaggccagttaaagacctcatataagctgggcttacgcctagtgtttgttctgtgagagtgggtctggtgtcctttagaggagaataaaatattgggcaaagagatgttgatttggctccctttggctagtccattgttagtatatgagtttaccctttcacaagtatttgtcatgaactgttgctagtcaattgctgtcttacaatgtatttatcaatacactagttcgtaagtactcgaatgctaaattattcacaaagaaaatgaacagaaagtaagctaaatctaagagagagagagagagagatgctgatttggagcctttagctcctgtgtgtgcagatgcgtatttctgtatttccatccctttgtttcctcaagccgttcaaggctgacaatgaatgacgaagctggttgtgttgatgcagccttcagtcctagctctcaagctgagcaggggacacaagtgtcgggtagccttctgctgcatcatgagacgacgcccccatctaaaaattaaaatgtaagtggagtcgctctcatctgtaagggaacacctgtgctagctgcgttgaaagatgttaagagttacacagtaagatataagcaagggtcactttgaatccttaccagtttaacctgtttaaacatcttaaagacatgctttgtttttaaattatgtgtgtgtgtggctatgtgcacatgaatgccagtgtcctcagatccccttggagttcgagttacaggcagctgtgacctgtcctgtatgggtgctgggagctactggggtcctcttcaaggacagtatgtgttgttaaccaccgagctgcctcttcagtttccaaaggtttcgttctttttaaagtttgctatttttattatatatataacagggatttttaaaatgccatggcttcttacctctggccatcgtgaagaacacacttatgtagattaactacagagctttgggtgtctgttagtagaatcgctgtatcagaatgtgataactggtcatctgagaaacctaaaaggagtacttttattttccaacatttatttattattatatgtgagtacaccgtagctgactttagacacaccagaagaggcaccagatctcataatagatggttgtgagccaccatgtggttgctgggatttgaactcaggaccttcagaacagcagtcagtgctcttacctgctgaaccatctcaccagcccctaaaaggagtactttaaggttccaggttttttgttcttctgttgtttagttgggttttttttttaaattttaattcattaacttagtaggttggttattgggtttttttgtttgtttgtttttttgggctttttgagacaggatttctctgtctcctggtgacctcgaactcacagagatccacctgcctctgtctcccgagctttgggattataggtgtgtattattcctggttttgttgtttgttgcttttgaagagccatcctgctgagtgtggattatatctttataattgttaccataatagagcaaccctctttttaaaattattttggaaacagggttatttttaagttggccaaatagaccttggaaaccttctgctttgcctccagactaactggaattgtgggttacctgatcaggcctgactagaactgtagggtctcagaggaagttgagacgaggtagaaaggacatttcaaatattatcactgagaaggtcagttatgaagggtagagaaagtacgggggtgggggtgggctgtgtaactgcctgtccgggatcagtctgcagagccacttgctatcttacccttcttccactcctggacgccagcactgttgccaggaaaaaggaggcggccatggaggaggcagtcagtagtgtcggttcctagaaaactatttgattgattggatgattaacacatagcctcatagttcctcctagcacctgcctgctcacatagtggctttagcccttgagtagggtttctgctcctcagcctgtggaagcagagctctctgccaaaggattgatggactgggaagggacacttggcatctgctatgtccgtatctgtactaggtactttgcatgtagtatctcaacctgagtctcactggtgaaactgtgaaatgtctccaactggacgtgagactgcacagctcattaaaggaagggttatccaaatgtagttcgcttcctggaagaggattcattgttttgactcctttgcagcaggcgccagacccctagtgattgggctggttgtcgtcagtgctggacatccacaggtaaaaacttactggcccggcagtagtgtccgcacggctttaatcccagcacttgggaggcagaggcaggtggatttctgagtttgaggccagcttggtctacagagagagttctaggacagccagggctacacagagaaaccctgtctcgaaaaacaaaacaaaacaaaacaaaacctcttcttactggctgtccagggacataggcagaaaggctgtgtcactcccttcccggtgttagaagcttcccagcttccctgtggtgattttctcctcaggtgccttgctcgggctgttgctttggggagctgctgtggccccctccagcagggcaggcttgggctgacgctttgtcttcctctctagaatcattgcgatgatgagtccagaggacagctgggtctccaagtggcagcgagtcagtaagtatcttacacatgcacgtgaacgtgtgagagctcattctttctctctctctctctctctctctctctctcacacacacacacacacacacacacacacacactttcatgcatgcatcctacccctcttccatttttggcttaattctttcttgcttttcagtcttaactcaattcccattttaatctcctctcttcctcaggtaactttaagccaggtgtatatgctgtgtccgtcactggtcgcctgccccaaggtaatagttgtgacttcagcagtgagcatctgccaggcccagggcaagcctctgtctcccagtgccgaggatggggtggtgggcgtatttatccttgtgactgtctcatgggactgtttctttttctgtcataggaatcgtgcgggagctgaaaagtcgaggagtggcctacaaatccagagacacagcaataaagacctagctaggtgcaggccatagcatcttgttcttcacttctgtacttgttttcttgtggaactaaaccgtgggaccccaaagactccccgccctccatctccgaatcagcagactccacgaaagcagcacatcggccttaagtcatctcactttctctgcccactggtgaagtgggagtgtctgggcggattctcagaggctgtgtcaacagaggaagatgctgatttcccacctgtgttcagggttttgcctttgtctatgggcaggactttggttcaaataccaataaagcgagcctttggaacatacttaaagggtactgaggcctgtgccttgtgttccatttcctctcacagtgaggcctcacttgcctggtgggctctgaggcagctcagctgaggtcctttctctggcctgcctttaaggggtacagctgctatgctgtgcttgctgctgtatcgtgggaaggtctgctgtcctgaggcaaggaaactgtgctgactggaaatcagcgttctgtcctctagacctggtgcacactctcctttgaaggaacccggggctccttagtgccttcacccttgatgctcctacttctcctacttcctgtgtctcttttctatgctcttgctgtacctctgccagcttcagagttcacattccccttagtacccttagtggctgttgggtcttgatctgggtttttgtgtttccatggaaacacaaactcctcctaagaagggagccatccatgggtaatgccacattggccaagatgtgttgtttttataataacatatttaccatatatccttaagttgcagaaattgtatccccattttggtttctctttagttttcatctgtaaaataggagtgattattcctgtttaccctgtatgtttatttcagggttataaggcctggaaatgaagaataagaaaagtacatagcagcggggtggtggtggcgcatgcctttaatcccagcacttggaaggcagagacaggcagatttctgagtttgtgagttccaggacagccaagattatacagagaaaccttgtctcgaaaaaaccaaaggaaaaaaaaaaaaaagaaaaaaaagaaagaaaagaaaagtacatagctcccctaaaaggatcagatgtggcacatgcctgaaatccagcccccagaatctgaggttggggttagctcaagtcggctacaaagtgagaccccatctcaaaaagccaaatagtagtaaagagtactgtgtaaagagtactgtgtaaagtttgttgtctgactgtcctgctgttcttcggtatttacaccgtcttcaccattaggcgaaattggggactatggccagaaccttcttgggggagcaccaccttgctagcggaggtacctgcactaggctctgtctcagctgttgtcacctgctgaccctgtgagtgtagaaagcgagctggtgatgaccaggctacttatccagtcactggtccccactaggagtggtttcacctgcaccctcaagctttgagggaacagatcatcaccctcaattctaaactgagctgttgaaggagttctctagcccagccatctcaaagatgccatcgctagcgaattctccagtgagttccatttggaaggggccttggtggcttgtcagagtggaacttacctcctggagggaacgagaaagtttccccaagagggtctaggctgtggagccaacacctcagctttcactggctttttcagaagtcccctggaaagccccagttgctgttctgtgtacatgacccggatgtgactgtgtggtgagaatggaaacagttgtggggaggggaggcaagaagagcctgcacaaataaccacagtggggctgcttgagtcccatacctcttgggccccaactgtcaatctcacaggaagtgaaagacgtcgactgtcagccatggggagcatgggtcttgtcaaagtgtcctccacctgggagctgcttttccatgcctctcatcctgtggtactagaaccttctatattagctgctgcccagacaggcaagaaagtgctagcgtcctacccttggagctgaaagacgcttgagacaggagtttggttccggactctcagggtgggctgttctgtggcacaggggcctttcaaattccaggactgctgtctgcattctacctccttaagggtgcagtgcttgctaaagttagacctaccct

SEQ ID NO: 2920 - DNA, 4145 bp, Mus musculus
gggcagcatgtcttcgtgttctgagctgaagttcctccctcacctccgatgcgctgctttagccgtttactgaccttgttttcttcatcggcctcgggtttagtgcctcaggaatctgatacatatggaagaccagcagcaagtgatctgacataataccaatccatgtttgtatctaaagcacatttggaaattccaaagagaagaggtggcatttctgtattcgcagtgacgatgggagaaaaggacatacctgccccagaggtgggctgaaaaggccatcttctgctcccaatcaggaataccccctgtgcttgggaatctacgttagaaaaaggaaggaccagaatctgacttggctctctgaaacggagggctagcacttctccccattcgttttctgcattgaggacctgcctttgggatgagctggtagtagaagcggtatgcatggccgaagagcattgatgcagctggtagcatgagtggtggccaccagctgcagctggctgtcctctggccctggctgctgatggcaaccctgcacgcaggcttcggacacacaggacgggtgctggcggcggcagtggagtccgaaagatcagcagaacagaaagctgttatcagagtgatccccttgaaaatggaccccacaggaaaactgaacctcactttggaaggcgtgtttgctggtgttgcagaatcccaccccctgtacctgtgcaacgccagtgatgacgacaaccttgagcctgggttcatcagcatcgtcaagctggagagccctcgacgagctcctcgcccctgcctgtcactggccagtaaggcccgaatggctggtgagcgaggagccaacgcagtactctttgacatcaccgaggatcgatcagctgctgagcagctgcagcagcccctggggctgactaagccagtggtgctgatctggggtagtgatgctgcgaagctgatggagtttgtgtacaagaatcggaaggcctatgtgtggattgagctgaaggagccccccgccggggcaaactatgacgtgtggatcctcctgaccgtggtgggtaccgtctttgtgatcatcctggcctcagtgctgcgcatcaggtgccgcccccaccatagcagaccggatcctcttcagcagcggacagcccgggccatcagccagctggccaccaggaggtaccaagccggctgtagacgagcccgagccgagtggccagactcggggagtagctgcagctcgacccccgtgtgtgccatctgtctagaagagttctcagaggggcaggagctccgggtcatttcgtgcctccacgagtttcatcgaacgtgtgtggacccctggctataccagcatcggacttgccccctctgcatgttcaacatcgtagagggagattcattttcccaggccccggcagcctctccatcttaccaggaaccaggcagaagactccacctcattcgccagcatcctggccacgcccactatcatcttccttctgcctatctgttggggccttccaggacttcagtcgcccggaccccaagacctagaccctttctgccctcccaggagccaagcatgggctctcggcatcagcgccttcccaggacttcacatctccgggccccagaagaacagcagcacttggcggtatctccacacccctatgcacagggctgggggctgaatcgcctccgatgtacctctcagcatcctgcagcttgcccagtggccctacgacgggccaggcctcatgagagcagcgggtctggagaaagctactgtacagaacgcagcggttacttggcagatgggccagccagtgactccagctcagggccctgtcacggctcatccagtgactcggtggtcaactgcacggacgtcagcctgcagggcatccacggcagcagctccaccttccgaagctccctgagcagtgactttgaccccttggtatactgtagtcctgaaggggatctccaagggaaagggatacaacctagtgtgacctctcgaccccgctcgctggactcagtggtacccaggggagagacccaggtttccagccacatacactatcaccggcaccgccaccaccactacaaaaggcagttccagtggcatggcaggaagcctggcccagaaactgggatcccacagtccatgcctgctgcttctcacactcagctggagccatctctccctgaccagcagctcatcacacccaacccaacagcttcttcaatgcttcccaacccacaacggcccagggctcttacagagccagcccctggcctagcagaagcttccagccctagccccagtcccaaacctaaccccagcggtcttttgaacttgcagaaatccagcctcactgtcagacacccacacagaaaacggcggggtggtccctcagaacccctgccaacctctctgcccccggacttgactgtgcacactgcttgcccggttttcccccactacagtccccgtctggcatacccttggcccccagaggttcatccattgatgttcagacctccaggtccggataggaggctgctacatgaagtcccaggcccctgttactcaagttcacagccagtgtggttgtatctgaatccctgccagcctctgggaccatgcttacctggagagggacattccaagtggacttttgacagcccagagggcaggagatgtccttactcacattgccaggtgctgccagcccaacctggctcggaagaggagctggaggagctgtgcgagcaggctgtgtgacgtgagctggtcagatgaagcttcgatggcgagtgtgctccagatggctcagggttcgacctggccccggggtcccgctcctgggaggagcaggaccacagcaagcatctcctttcgccatgcttcctgggaccactggaaggagagtgctgatggcgagtgcaggcgggaggtgctatttcctgccccagctcccaagcttgtctgcagaacacacctacagtgcagaaagtcttgtgtccagccagccagccagccagccagtatccagtatgcatttgtggggtagactcctcaaggctgagtttttgacaggaagctataagtgaatatctagatgtaaaggtgctgctctttcctcaagccccgctgggtctccccctgctgggtctcctctgccccagcttcaagctcacacaagccagtgggttcactgaaggcgagatcacgtctcacctcctttcaaggcttcactgggggcaacttcagctatatcatttcctgtcttctacaaaagaagaaggagtttaggtgagccccagtcccaagagaggtctctctgtaccttctccctggctggtgctcagggaggagcggttcttccttcctgttcttacaccaatcttagcctgcaggcttggggagccaaggaatagaggtctgtcccagaggtggggactgttacagacctgcctgggatgaatcttttgattatcaaactccttgtcactcgggtaactccagttcctctgaggtagagaccaggaatggaggggaatcaatactccaagctttcctccctccaagtccaaggcaggcagaaaggaagtctactaaactgcacctgggaagagggggaatgggatgaaggcagaggaggcacaactacaggagtcctctctgagaggttcttggagcagagatggagaatggcgacatgtaacctcgtgggtctgcagggcccggaggcccaccttcccagtgtaagccatacaaaaccagcaacccaactgaaggtgtgcaagtgggagtggagcagaaagttggcccgggcagcttgtaccacgtgggtaagggctgatggtgcctcctgtggctttgtcccagcatcctgaccactgtcagcccctcaggcagtatccttgcctgcaatgtgaaggtgggggcaaaatggacatgggatcctccttgggaaccttctctcctcagagtcaatggggagactggcatccaggcacccacatgggtatttatatctgaaccagacagaaagatgcttgaatcaggcactatgttgaaaaaatgtatttatttgctaatatatttatccataaatatg

SEQ ID NO: 2921 - protein, 762 aa, Mus musculus
MSGGHQLQLAVLWPWLLMATLHAGFGHTGRVLAAAVESSAEQKAVIRVIPLKMDPTGKLNLTLEGVFAGVAESHPLYLCNASDDDNLEPGFISIVKLESPRRAPRPCLSLASKARMAGERGANAVLFDITEDRSAAEQLQQPLGLTKPVVLIWGSDAAKLMEFVYKNRKAYVWIELKEPPAGANYDVWILLTVVGTVFVIILASVLRIRCRPHHSRPDPLQQRTARAISQLATRRYQAGCRRARAEWPDSGSSCSSTPVCAICLEEFSEGQELRVISCLHEFHRTCVDPWLYQHRTCPLCMFNIVEGDSFSQAPADSYQEPGRRLHLIRQHPGHAHYHLPSAYLLGPSRTSVARTPRPRPFLPSQEPSMGSRHQRLPRTSHLRAPEEQQHLAVSPHPYAQGWQRLRCTSQHPAACPVRRARFSSGSGESYCTERSGYLADGPASDSSSGPCHGSSSDSVVNCTDVSLQGIHGSSSTFRSSLSSDFDPLVYCSPEGDLQGKGIQPSVTSRPRSLDSVVPRGETQVSSHIHYHRHRHHHYKRQFQWHGRKPGPETGIPQSMPAASHTQLEPSLPDQQLITPNPTASSMLPNPQRPRALTEPAPGLAEASSPSPSPKPNPSGLLNLQKSSLTVRHPHRKRRGGPSEPLPTSLPPDLTVHTACPVFPHYSPRLAYPWPPEVHPLMFRPPGPDRRLLHEVPGPCSSQPVWLYLNPCQPLGPCLPGEGHSKWTFDSPEGRRCPYSHCQVLPAQPGSEEELEELCEQAV

SEQ ID NO: 2922 - DNA, 82664 bp, Homo sapiens
aattaaattagaatgtctgagggtgggaggggccccaagcatcagtaatttttaaaaagtcccaggtgattccaatatgcagcaaggtttggaaaccattggctttactcattagccaaatggcttagaggctcttcctcctagttatctactaactactcaggattaattacatgaccttgacacaatgcatttagctacttgaaaaagagatgttatgtaaatgtattactgttatcattattatcattattacttaaacttcagagaagccattttatggtaaaatgtgcataacataaaagttaccattttaacctgtttttttttttttttttttttttttttgagatagaggtcttactatgttgcccaggctggagtgcagtggctattcacagatgcaatcataggacactgcagtctcaagtaattctcctgcttcagcctcccaggtagctaggactacaggtgtgcatcaccatacctggcacattgtaattttttttttttttttaaggtggagtttcactcttgtttcccaggctggagtgcaatgacgcaatctcggctcactgcaacctccgcctcccagatgcaagcgattttccgattctcctgcctcagcctcccgagtagctgggattacaggcatgtgccaccacgcccagctaattttgtatttttagtagagatggggtttcaccatgttggtcaggctggtctcgaactcctgaccttgggtgagctgcccgcctcagcctcccaaaatactgggattacaggcatgagccaccgcacccggcctcattgtaaccatttttaagtatacagttcagtggcatgaaatacattcacatttgtatttcatgtgaatacaaccatcactaccattcatctacaaaactcctttcatcttcccaaacggaaactccgtacctattaaacaacagcccttggcacctaccattctattttttgtctctgaatttgactattccagctacctcatataaatgggatcatatagtatttgtcttttgtctttttgtgattagtttatttcatttatcctaatgcctattgttgtagcatgtgccagaatttcctccattttgtttgtttgtttgtttgttttgagacagggttttgctctgtcacccacactggagtgcagtggtgccatcatagctcactgcagccttgaattcctgggctcaagcaatccttccgcctcagccttctgagtagctggggctacaggcatgtgccaccactcctggctttcttcctcctttttttttttttttttgagacggagtctcactctgtcgcccaggccggagtgcagtggctccatcttggctcactgcaacctccatctcccgggttcaaacaattctcctgcctcagcctccctggtggctgggactacaggcgcctgccaccatgcccaactaattttttgtatttttagtagagatggggtttcaccatattagccaggatggtcttgatctcctgaccttgtgatctgcctgcctcggcctcccaaactgctaggattacaggcatgagtcaccactcctggtcccgctttattcctttttaaggctaaataacattccgttatatgtgtataccacattttgtttatccattcatctgttgatggatactaggatttcttctcccttttgcctattgtgaataatactgctgattatactgctgtgatcatgggagtatgagaaactcattttaagtgataaactgataaactctccttccacaaaatacttatgtggataaattacttgttctatatggctaggttgtagttcaccagatgagtaagcacctacccctggtgactagtctgtcttttacaaaatatgacaaaaattaggtactatttcaaatgctttctagattttctaccaagtggtagtagaattccattttatttgaatcagctatcctgctcgggctgtggatcaatcctgtagaggctgtgttccaaaaatgtagcaacaaaagtctttgtatgttgagaatgaaataaagggtttgtgctgtatactttaactcacaaatgctaaagcaaagttgtaaacttcaaaaccaacctaaaaatgctccctgggccgggcgcagtggctcacgcctgtaatcctagcactttgggaggctgaggcgggcagatcacgaggtcaggagtttgagaccagtctggccaacatagtgaaaccccatctctactaaatatataaaaaattagccaggtatggtggtgtgcgcctgtaatcccagctacttgggaggctgaggcaggagaatcgcatgaacccgggaggcggagtttgctatgagctgagattgcactccagcgcgggtgacagtgtgagactctgtctcaaaaaaaaaaaaaaaaaaaaaagctccctggtcatgttgctctagaagttgtaagcacattagcttgaagctagaagccactttaagatccttttattgctgcctgtgttcctctatagacgttttagctcaacttctacacatggtcttagcttttttgtattacagaacctagtacctaatttgcatttttacttctttcattcttaatgaaccactgtgtgaggacatgctttcttttttatggacagttcagctaggtgtttttacaagaattcagctgtgttagtcaataagtgggaattttatagagtcaatcaactttggaaaaatggtgattacttattttaacattgttttttctgaaggcattgccttttcatgttcccacaacccacccacctactcttacagcatgaaggaaatgaatttttatttgtatgtgtatattcactttgatccctttgacacttttccttactttttcacttacaataaaaggcaattgaaggccaggcaccgtggctcacgcctgtcatcccagcactttgggaggccaaggtgtgtggatcacttgaggttaggagttcgagaccagcctggccaacatgctgaaaccccgtctccactaaaaatataaaaattagccgtgcgtggtggtgcatgcctgtaatcctagctacttgggaggctgaggcaggataatcagttgaacccaggaggcagaggttgcagcgagccgagattgtgccgccgtactccagcctggacgataagagcaaaactccgtctcaaaaaaaaaaaaaaaaaaggcaactgaggtgaaaagagtcttggctatactactgaaaaggagggacactaaaatttgttggtctctttgggttacaactgggctgcatcagtgtgctttagagttacaggaatatcccgaaattgagaatctgatgggactatacaattttagagccagttctacaggtgagacatagacaacttgttctgcttgtctgaaaacttgtctatagaactctacagagaggctaagagggagtaaactatcctttctttctagatcttcatctgctggtggacgtggcctgcaagcaggagcgctttccaaaggaggaagaattaaaagagtgaggaatggatgacaaatgtgacattgtgcactagctgtagctggaggcagactagccttgcacatgacaaactgttgggattttttcagttctgttaaggaaaaaaaagtattttttgtttcgttaattgagaattttgttaattgagaattgggaatttgtatgtactacagtggttcagttcagattatctgccttgacaaactactgaacatctagcagccacgttttttggctgcccagatcccttttaaatgaaaagttctgaccttctgttatagtcaaggagcatctaaaaactgctccatctatggtactaagaataatctgtgtgtgtgctgatttgttgtcttgccactcaaactgtagtcagcacaactttagtggggaattcagtctctctgattcaagtcacagtgtgatccttttagaggagattgtgtgagaaacaaaggcatgtgaggtcaccagcatcacaggtctaaatgcatcaggaattccagggaagaaactctggagaagagctaattttctaagtgattaaccaggaaattctcttacttcctaacccagcattctgttttaagagcaaggcatccggacttggaccatctatcacacttaacagcccctgattcttttatattaatggaagcattcttctattttcatatctttctttaattttaatgatacattatcataaatggtaaaaagattttattaatatatcacttatttaaatgtctttaaagaaagtatttaacttgtttaatataattgtatttataaatgctgatagatttaaaggttttaaagttttatatttttattattgcaggatagaaggataaaggatgcatgtgtagtatttttattttgaaaggaaaatgtacaatgtgtgaacaaaaacattaagagatttaatatactattttcttattttagatttttacattcaataagtataaattctcatctatataaggtattgtgtgcaaatttgggaaaaaactgattagcagccatttagtagaagctatgcctctgatttttaaagaatggtttcaatctggtttaagcttctgagagaattttggataatgggatagatggtaacatttttttcttatccctgttacaggattctagatttgtgcagtaggattgtgggactgtgttttaggagagaaggatgtcttggatgtccagtttctgtggttaatcccttacttgcttatccagtgacagcaagaaactttctgatttaaagtctttcaattgaccaaaactttcttattggattctgtttcagttctcctattaagcactgcagaaacgaaaggaaagcctaggaatatgaaactaattaaaaaggcacttggtgatatgacatagtactatgctagccgttgtggatgtaacagttcatttcttatactgcattgtgccttcccaatgatgtcaaaccctagaaatattacagagatctacttttctggaaaagggtgagctctgtattgatctgcagtgactctgtttagatattaaagtaggttctgaaaagcgacctgtgtggtccctctgattagactagttaatgtctatgtgatgggcatttatttatctttattagcaaggtttaaaagagcaaattatcaagacacctatatcttttggccagactatataatattttgtcagagtatgtgaagaggagacccaatttccaaatgaaggaactttgctttttctctgtcatgttgaagagctaatatactgtgtagattttcccctaaatatggctttcttagctttatagatgttgagataatatcttttgaggaacacatgtcaagcaggaaccttggcatagatttggtttcagttgttttaaggcttaattaatgaaatgccttaatcagctttccaaacatttttatatatgaatacagcagaccaaggagctggatctcctgctatccttacacgccttgtatctatcaactaaagctgtcattaatgacttgggcaaaatggcaagaggtataataaagtcttcctgtgaattagccagtagggtctgacacaactagtcaactaacaaggttcctgactagtacctcagtatttcagcaccttaagcactgataaatttcaatcagtcaacaataaagtgagtgttccaactagacttgttgtcttgcttgttcttactgtttggtgattaatagaaaattcaataattatgacagttaatagtataattcaaatgagatttactttatttttcaaataatctgaattttaaaagttttttttcatttgtacttgaatagcaatggaattttttaaatgccgttagggataaggacaattcttagacatgttttacagaaacctacatttttggaaaaggatgaatgatctttgataaatttaatcaatccagaggtgaaagtagatcctgaaggatgatctatctcatgtataagactagctagtagatgtcattgagacttaggcatttcattacaatagtgatggcatctttatgacatctctaggaaaatgtagtagtatatcaaccctagagggtaactccaaaactttgaagctgaagaataattgctcttgcaattctggtgatctaaaacagtgaactaagctacatagagctgtttggtttgatcttgagtttctccaagtctccaggttcatgatgcatatcatcatcatttccaaatctcagagtttcctcaagagagggcaaccacatttgtaactgtcttctttctgtcaattaagtgtgtgtattaattactagggctaggtcttttcattcctttgcacgttttaagcaggaatagatgaggcaaagcccatttgtaggttattttttagtttaactatgttaaattaaactatgttggtcaggctggtctcaaattcccgacctcgtgatccacccaccttggtcaaccaaagtgctgggattataggggtgagtcaccacgcctggcccaacaaaaattttttttaaatttgcagggtgttggccaggcgcagtggctcacgcctgtaatcccagcactttgggagaccgaggcgggtggatcacaaggtcaggagatggagaccatcctggctaacacggtgaaaccccgtctctactaaaaatacaaaaaattagctgggcgtggtggcgggcgcctgtaatcccagctactcgggaggctgaggcaggagaatggcatgaaccgggaggcggagcttgcagtgagccgagatagcgccactgcactccagcctgggcaacagagcgggactccgtctcaaaaaaaaaaaaaaaaaaatttgcagggtgtggtgggacgcacctgtgatcccagctactctggaggctgaggtgggaggccatgaaggtcaaggctgcagtgagccatgatggcacaactgtgctccagcgtgggtaacacaagaccctgtctcaaacaacaaaaataaacaaaaaatttattttcgaatttgtctttgatctaggttagttattagatctgaaattctgaaactactgtcataaaccttatctacaggggaaacaatgttgaaggtcaataggctactcatcctttttgctttcagaggcattatgtcatttaatctttacaacagacctatcgtaattattatcatcagcattttacagatgatcagagattcgtttttacatgaggtaagaaacacataaaatttactatcataaccatttttaagtgtacagttcactagatttaactatatccacattgttgttcatttgtataattttgaaagtttatggcagcggttcagaaataaaatgtctcaccacagtcaaatataatctggtaatttgaaacttcaaatgttataaatgtattagaaactgttgtattatttctaatggcagggtagtaataaggattatagttcatgaatgtggtaattagccagaaattcattttctttttgcctatgttcttctcattaatcatattttaccctttggcttgtatttatgacatggacttatttggagtcttacattgaaggcataggtctgatccatagtattatttcacctcccaaagattgaaaagaaaataacagttggattccagacatctgacatcaacctgatttgaaagttccatataggcacagtttagacagagctactgaatttaaattagtaagagctgaagaaaagctaagcataaaatggacagagcccttcccagggtagcagacataagcagcaataaatcagtaagtactaaaacacaggatcactttattctggctttctgccatttatagacactcaaacttggaatgagcagaaatccttttgaacttatatttgcaaaaccttgtgtccattcttttatcttccggattacctttatttttttctgtttatttcctcataccatcatctatgctctgttgggtgcagagtctgcttagatatctttgagtggccctgatttgcatgtggtagcttgcttacccagagaaaggtactcgggatcgaattggatgcagtttagctgtggctcagtagagggagtagaggagctgagggaggggggagagcgaaagaacgggtctggttaagtaagtgttgtgtgtgagcaccaggaggaggggggcagggtggggagtggttgcctctagcagctccaccctcactttgtcagcaggtagagagcgtgattgcagtcccaggggagggagtcagagctagaacaccaattacaaaccacaggcttcctgctctagggagttgatccagaattgtctttctgaaaggaagcactcggaatccttccgaactttccaagtccatccatgattcagagatactgccttctctctctctgggattttatgtgtttctgatagtgaattgttgatgtatttgctactttgcttcttttctctttcaagacttgatcattttatatgctgtttggagaaaaaaagaacttttgttagcaaggaggtttcagaaatgattttggattttctgtaagtgtttaatttagttctaggggacagcatctctcatcccggagtaaatttctgcctttgacctgcatggattattttttcaggctgcggaatttctcggcacctacctgtagtatggggcacttggtttggttgcagagtaagaaggtggaagaatgagctgtacttggttaagcagttgaaaccttttttgagcaggatctgtaaaagcataattgaatttgtttcacccccgtggattccagtgggcccgacagcgcaacaggtttgcagatttcttttgaaattcctttttcccccctccctctgcctcagcaaaagaaaagaatccatataacaggttcatgttcaattgcttggcttttcagcacttattctgaagactttataatatttttaaacttgaccttggaacacagagggctttgtgggtgaggtgtatttatatttacttaagggtgcacattttaaaaatcttattctgtgtttgtacaaagacgcaaattttcatagtgcctagaaatagcacagatctattctactcaagattatttgtattttttcagggtattctacctagagcctgtggttaatcgcctccctgctccccctaccttttattccctaccccctcagggaatttggatacatgtgaggaatagtcctttgtttttcttatgaacctagaaaattacagatcataaaatctggatattaaagtagtttccaaaagcatctcatgggaaatcaaagtgctcggcatttccgagctggagaataaaatcaagaatccttaagagagaaaagaaaatggagatggaaatatgaattttaactgggaaaaataattggaaagctaaccttttcaaatactctaattatgaaagttggaaaaggttgtgatgctcaggattatcctgtaatgtgtgaagatacataaattagcacctaatttataggcaaattttggtaaaacacaaaaaattatggtatgtctaagttcatgaaaagtatgtaaatgcagtgggcctagaaacctggccacactgaaatacagtttaatgtggaaacttttctaaatacatattgtagcatctttggacatcaacgtgtggcctgaaatttttattattgttccctcttctcctccattaaaaaaaaaatctccttgtggtatttagtcatttaccattaacacatattatggcttaaaaagggccatcccttccttttctgagctggagttcttcacgctcacctttgatgcatggccttagctgtttactttgccttgttttgttcatgaacattgggtttagtgcctggcaacttgatgcatatggaagagcaatgccaagtgatctgacataatacaaattcacgaagtgacattcaatcacaagcaaagttggaaattccaaagagaagtggtgagatctttactagtcacagtgaagatgggagaaaatgacatacctgcagcagatgtgggctgaaaatatcctcttctctgcccaatcaggaatgctacctgtttttgggaataaactttagagaaaggaagggccaaaactacgacttggctttctgaaacggaagcataaatgttcttttcctccatttgtctggatctgagaacctgcatttggtattagctagtggaagcagtatgtatggttgaagtgcattgctgcagctggtagcatgagtggtggccaccagctgcagctggctgccctctggccctggctgctgatggctaccctgcaggcaggctttggacgcacaggactggtactggcagcagcggtggagtctgaaagatcagcagaacagaaagctattatcagagtgatccccttgaaaatggaccccacaggaaaactgaatctcactttggaaggtgtgtttgctggtgttgctgaaataactccagcagaaggaaaattaatgcaggcaagtataactttattatatttcactttccatctgtttgaaatatgtctttcttcttttgtctcccaaatgaaataccatacacgggcttctactgcttagctttctatttcatagaaagagtagatactgccttattggcattctaaatttagcaaattattattttatactctggaggaaatacataaatcctatattttagaagattatctgcttattttaaactggtgttgcataactacttagatagacataataatacctttttttcaagtgatatattctgggcactaatttttgatagatgaaatatatgagcttatatttaattgatgcgaggattgtattttacatcctgtttaaattgaagtaagcactaagaaggttgattttaatggtcagcagcacctgaaattctggaatgcccttggagcatatttgattactgtgtcacttaaaattcagtcaagcttgaatgctatggctggccttacaccacgtgtggcaccctattgctaaccccaaaatggagaggactggattacaaaatggacacaaggtgtaaacctgcctcctgatcactttggccttgtccacacataattttatcattttcaggaatttaaatttaacatgttttttactgatccgccaagtttttcagacatagtttcttaggctttcaggctgtgaattttgcctgtaagtcattcatacatggcctattctttatgtggtgaatttatgaaatgactgggggcacagcatttcatagaccaattgctcattccccatagtaaagacagagcctagagggctatacctttttaatgggcattccattgtcttactccataaaatgatgttgcttattgattgaaatttatcatgtaaaagaacacttcttgctgtagctactggacacaggttaaaatattcttaagtgtgatccatcttagcatccaaactcaaattttaattttgtggtatgaacagactatgaacagaaccaatttattgtatgaattttaatttttgtctacttaaagaagataggaaaatttaacagattatagaacttattcccaaacatgtattctttaatatatggtttagtggttattcattatcacttcttaggcaatattttgaagctgggataaatgaagtgaaggagaattaggtgaaaatggaaggctttgctatttagaaaaataggaaagaagagtatatctggaaaaatggcataagatttttttgaataagataatttggattctaaaatggaattaggaatacttaaaagctgaactcataaatcatcttgaatactatggcaattggaaaggaaacttccttcctggccttgcctagttaataccctgaagcatgaattgtgtgctccattttaggaccgtaagtaattttgctagtcatattttgatatcactgaagtttttgagagccatacgtgccttattgataacctgtgatagcatgttcagtgggctaattatgtgttccataaaataatgtattcttttaagttttaatcttattatcataaagctctacataaagtttgtgttttcataaaggaaaaagtaaacaaacagcaccagttggcattctctttgccattcattattttatcaatctttatcatgtcttctattgttctatcgtttttctcactctggcaaatcttaccaatctattttgttttttaaactattaactttgatcctatcattatacattaagtattgcttttactttgtgaagagggaatttcatcataacttagcaaagactttcagcctttacagtggatagttttatgtcattggcaatttttagtcatctcctttctgtccacatatgcttcgtttaggtctttaaataagttttttcactagcttagtattcatttctggatactttccatattggtttcggtttattgtctgttaatcaatttttaatctacaacagttattaaagtttttcaacagcctcttgtgagaaacttttttaaaaaacaagcttctgaattatatatatggttttctttatccattctttgattaattctttcaaagaactctagtgtgttagggacacatggtttacacttctggaatccatgctgtttgttccttatcagattacactgcaactcaggtttactcaactgtggttagccaagccttccatttaactgaagttctgtttatatcttctagagatgtgctttgctgaactttagctttctcaatggagagctgtaccctggtgtcagaaatctaaaagtagtcttctcttcggttttgaggaattctggataattctgtgaatccttctacctatgaattgttgtagttacctgttaagattatttgtctccaaagattgcagtcaaatctttttaaacttgaggatgctatgtatgtaccaaaaaatgtacagttatgagaacagtgatttaaaaaaaaaaaaaccatgttgttatttctggaattctgagataatttctgaaaatcagacatttctttacattttgctcaattaattcagtgtatagacaatttcataaggaccaaactgactgaattttcatttgtattatgattttaattttttcttagacaaaaggagacccccccccttgacaatgtgcccccaatttgttgaatagtaaaatagaccatagaattgcctctaaaagaattttgtctcaactttatctgatggctgtatgtataagggcattaaaagtcaagttttgatgatttttgttctgattcttatctctcagtctttgtgcttaggtttctccttgccaatagtaatgattcattttacaaggtatgttcaaaattataaattgtaatattcttctaaaagcgctagaagaaagtcaaaatagaagaggaaatggtgttgcctttgcccttctatttctcaagtcctctcttttccatttcagaacatctcattttagtcctgtccaaattttattattttccccaagagttgcttctttatattactgtatcattccaactctttttgcaggtttgtcattgtctttaaagtatctaattcttaggtttcccctatatttgccaaaatatttgtctcttcctcttctctgatttccttccactcttttatttttcttttgttttccactgaatttgtatatttaggattaccttccactgctattctggattggtattttaatagccatcaaaaatctaggtcaaggaaacttttcagatctcctaattacctggcggtgactgataaaaaggactaaatgatagtgattacttcttactgtttttattcacattggaatatattctttctctcctggtttataccattgtagaaggaaaagtgttggagctgattcattgtctaatttccggttttctggtttggttacctcttatcaatgtttgtttcttttatttcaagcaatattattgccaccacttctaaaaatgattacagtcatattttatttctcaatcctgtttatcatttataaatattatttcaagggacaactcaaaattaatctttcttctcagagcaaaagagtaagaggatcttagtgtagcacaaagaggtcaccaattctctatcacactcttcctgctcagctggttatcctggattttcttagactccaggataaagttatgatcaagattaaaatgtattcccctgagtcttcagacctacaatgggagcagcagtagtttagcacttggccagtagcagtgagcacctcctggagaaattcccctttgcacaatgtctctgcttgcctcttaattttatctgttagtcaacacatagttatcccatctttgcatttttacattatttgtaggcaggacctgaaactttaagtttttggccaaagctagagagacagtcctatattgcaaactatagttgacaaagtgtctaaactgtgacttggggggcttgacttttagttctacacacagaagaatatgctgacactaaatattaatagttgtgtgatttgggacaaaatagtgtttacctttctaggcttcagattcccaggctgtgaagttgaggaattaaaatacaatattgccaaacttgtgctatttacatgcactttacatgtattagctcactgaattctcataataactttatgagagaagaaattcagtacctttattttttacattttacagataaggaaactgaggattaaaatgttaatatctgtcaaagtattaactattattatctagtaagtggtgttgctggaacttgaactgcagagcccatgcttttccagctctaaaattctgtatatgtaagaatgccacagatgaagagaatatcagtataggctttgtataaaaaatttatttccagagtagaaaggaatgaaagtgatgagtaccattatctgagattgatccagagtgcatcatatcctgctaccttctaataatctctgtatttcttctatttctctcattttgtgtttcatttgcaaagatactagtaaatcacaatgtctgtttactcagtatctcccttataatgtaacatatttcatcacctttctcttcattttaaaagtctaggttaagttatctaatataggaacctgaaataataaacactgacatagcatgcatttaactggcattgctcaagttagagttccttctatgaagaaattttgaaatagaaattttgtgattttgttttgatgccagcctttaaaagaagtacagagtagatattcaaagtatgatcaactctgttacttatgtaaatgaaggtgcagaaaatccaattaattaattactgactttggaatgtagtcaggagtacaccatcagacacagttcctctgtgcgcacaaacattcttaggtgcttgtctcctgtgatcccagctcagagccttcctgacatggcttttagagtcttctattctagacttggccttgttgttagaagcctggcacccagagaatagaaggaagctgcagaatatttttaatgataatttttcaagttaagaagatatctcttttataagttatcatcaaacagatttatatatatcacagttctgtacttcaacaaaaatttgtatccaacaaaaatttgtaagttcagcttcgtacatatctggttaataggaggtaatgaatgaaatatgtccctggctattgctcccatcaggctatttagtgttcatttggcagactctcggttggtggggggcggggctgggggggtaggtacttccttgggttttgtattatagtaaagtgtgtatgtatatatgtgtgtgtgttgtaattagcccaaaactagccataatttactttactttttttgtttctttgtattttgagatagggtcttgttctgtcttccaggatggagggcagtggcacagacacggctcactgcagcctcaacctcctagtctcaagcgatctgcccacttcagctcccccaagtagctgggaccacaagcacggggcaccatgcccagctaatatttcaattttttgtagagacagggttttgccctgctgtctgcagtattaaaggtattcccgggccaggtgtggtggctcatgcctgtaatcccagcaccgtgagaggctaaggtgggaggatcacttgagcccaggagttggagaccagtctgggcaacatagtgagaccgtctaagaaacaaggtattcctggagatcatggttttgctttttgtttttgttttattaaaaagtctttacattttgttcattggaaagagtttattggattttttaaatgtttttttcccttttatccctttcaaattgctaattacagtagattttttaaaatgttatagatgagtaatatcctgttaggaaccagaattggtagcaggatattgttagagaaggctgtgagaatgatattccattaactttatgtagaaattttcttccaagaagcttaaaatgatttgcaatacctggagccacgtaagaacaggtgatattaactccattttacagaaaaggaaatatattgggaaagagaaagaaagtaaatcatctaagaacaaagttgcacagagactgagccagtctggtttgcaggagataggagagtaatcaatttttaaggaatctgaagatgtggattcctcaggggtcagttctactgagtggaaatcctaaaggtcttttcctatttccctgaggactcatattctcctttcctgcttcatttttctttacagaattattgacgtggcatgctgtaatgtttcagttttgtagttgtctatctccccacagtggaatatgagttctgtgaaagcaaggatttttgtctcctttgttcaaagctgtatccctgagaatggcacctaagtatacttactccttgggcatggtgggtactcagtaaatatttattaatgaatataatgaatattgtggtattgagtaactctgatggctgggagatcactctagaataaaacatgcttatcacatttttaaagtatgttataaggtggattattttgagtgtgtgtggcttgatatagcaggctatgttcctttactcttctgacttaccaacagcctcgtgtgttgttatttcaaaatcataaatatggctgtaatcagtatgtttaaggtgctcctttacacaggatttttaaattttttctttagtttgatagcttaaaccttgctgtttaggatattttggttttccaagaatgatttattcaggtcctgattttaaacctttgattttaggatattagcgtgcatccaaaggaccttaccttcttagtacttaaatttgtgattacccgttctggtttttagataccctaaagcacagtttttaatcttgtttgtgtgtgccacaggcccctttgagaatgtgatcattgttattgaccataggcacaaaatacacacaaatacttaacatacacaattttgcataaaatctcagtgagttgactctctaagacatatctagagatctaaggactccagatgaaaagcaactatcctaacataatcccaattatttcaagaaattaaaccaaattctcaaaacaaatttaccttcagtttacttaatttgaaaagtacttgtatgtattacttaaagtcagacagacaacaatattgtgatgcagttataagaaagtggcctgaccttaggtgaaggaactccagaagtaaaaattgatgtctgacaaagatcttcttatgtgtagtaaatgaattctgctctccaaatatgaagtgaaactgcatcaattcaagaaatgcctacaatcccttcagcatggtggttccactgaaaggcccttaagaataacggatattttactcacatgttttgagattagtagaaccgtcgtggctttatgtgtctatttagttactacattcagaaaactgagggtataaaacaaactttaactttgttttcttcccgtgtctttagtttccagtctttaagctccattgctttccctagggcagtgttctttaggcccttaaatttctatttgctctaatggaaaactttatatattttttaaagccaagatttgttgttgcttgcttgttttgaataacagataagctactttacatactctttttatctgggttctaaacttacagttcatggataaattttattttgttctatactttttaatatattggaatctgtgtttaatttacaaatttggaaacaccagagtaaccaaaatgatttaaaaactaaggtttttttaaaattgtaagcacaaaggcctggtgcattattcctcaagataagaagttagactacaatatttagaaattcttgtctctaggctgggtgtggtggctcacgcctgtaatcccagcactttgtggggctagggcaggtggatcacttgaagtcaggagttggagaccagcctggccaacatggtgaaaccatgtctctaccaaaaaatttaaaaattagctgggtgtggtagtgcacacctgtagtcccagctactcaggaggctgaggcaggagaatcgcttgaatctgggaggcagaggttgtagtgagccaagattgtgccactgtatttctgcctgggtgacagaatgagaccctgtctcaaaaaaaaaaaaaaaaaaaaaaaaaaattctggtctctgaatctaaagcagaggcagcataactatcttcacgactcctgtttgttgttgttgctttaaatctagaataccctgtcatgatggaaattgactataatacaactgtaattttaaatagcacattaaattattatgtacctatcacttttgtgcgtgctagtatatcaaaaaggtattgttatacatatataaatatatgacatttgagaaacactgttggtattttacttctgtagaataattcagatgagactaaaggccttataagtctacttattttgctatttaaaaaaaaaaaaaaagtatagatttccattcgttttttcccccaaaccattttctacagtcttttgtattatctactttaaaacaacaaaaaacatcttttatatgatctaggctttgtgttccctcattttaatatcttctacctggaattatattgatgatctgactttaaaattcttgtggtcaagtttctttaacttctgaaggactgtattggctctatattggaattaagtcctattcagttttccattcttagagtaaaatacagttttgatggaggggagggaaaagtggcagaatattccatttgtgaaatataatcatcaaatttcaagctagaaaaaacaatcagtccagtcttctcattttatatatgaagaattgaactcagattagtgcttatcaaagaattccaatctgctgctatatcttactggccaatatttttagcatagtttatttatttattataaaccttttggggtcactgcagggaaattaaaaagcacatgtcagcagagatttccccctgaacattccattaagaagatatagactgccgcagggtctctttcctctttgatccctagtcaactacaggcatactttaaaataagtgaacagaccaaaaatacctcaccacagtttagcaatactttacgtggtgcatgtgtcatttattctgccacagaatcactgcacatcaggtggtctgtagtcctggatcttctcagagcaatatcacctctttataaagtctaggctaagaatcttaccaagactagaaggggcactggattctctagatgccttataatgtggttttcctatttgtaccaaattctgtgacagatactatagtaattcaaagagcaacacaacaccttagccttgtccaactgaggagaatcaacttaaacagcaggaggcattatgtattgaatgccagatgtaggtgtaggcataaatgcattagagtgctgatttatttattttctctttttctttctttctttctttctttctttctttctttctttctttctttctttctttctttctttctgtcattagagacagggtctctctctctgtcacctctctctgtcacccaggctggagtgcagtggcaccatcagagcttactataaccttgaactcctgggctcaagccatcctcccacttctgcctcccaaagctctgggattacaggcatgagctaccattcctggcctaaagtgctgattttcattttttcaagagtcattcaaatgactgtggtaattctgtctcagattccctatgattaaagaaaaaacaaatgaaaaaatattaaattttaacccaggcaacttcaagtagcttaaagttagagaaagaagtactacagtccgggtgcggtggctcacgcctgtaatcccagcactttgggaggccgaggcaggtggatcacgaggtcaggagatcgagaccatcctggctaacatggtgaaaccccgtctctactaaaaatacaaaaaattaactgggcatggcggcatgcacctgtagtcccagctactcgggaggctgaggcaggagaatggcgtgaacccgggaggtggagcttgcagtgagccgagatggtgccactgcactccagcctgggcgacagagcaagactctgtctcaaaaaaaaaaaaaaaaaaaaaaaaaaagaagtactacaacccagtcataccttctaaatttttactgttatcagttaattacaggttgttatattcctgtgtgtttaatactcatctttagcattttctttaggagtctagaatgactagataccatggcttttttttttcagattgtaaactgactttctaaaatgtaccaatcagtccctgttaaattttagttaaaacagtaaatttagctttaaacagaattcaacatattggaagttttgtttgaatttatctcaactagcttgattttaattcttcgcaaactgcattccataagggaagaaataaatactaagaccttttatgtagaaggtgaagagtatttgaatatcatatctatttagcaaaaattgtttctagtaccattttcttattattgactttagtcataaatgtgtgttattcctgttccctaaaatgtgttgattttagtatgatatgaggcatatagagaaccatttaagaagaatgtaccgatccactgtgacattaggttattttactctaaagttagtaaactctatgacatacattaaacatttaaaaattatcattggtgagtatttgggattactgagttgcccccttggggtatatgaaaagtccctaggcaccttatgatcattttaagtaaaagcaagtcacttaatctttcatctgttggtgtagagttgggggagaactaaataatctttaagatcctttccagctctaaacttttagagtttatgcttattctagaaatagatttcatatattaaagggacatgtatcttgcctatttagttctttttctttgtccttagttgttggacatcaaagacaaaatttgtttggtaggtgatagaaaaaaatctgactaaattaatgtcttacaataaataggtagcagaactaagcatgagactcagttgtactcccagtcttctggtcctgtactgtctttgcattccagttaacacactcaaaaaaggagcctttctctggagtttcatattttaaaatatctgtagtagattgaggacccttattgtaaatgcttcgtcaaggttgtcccaatgatcagagcacactgacttcaatcactaacctgcacctaagtgaatctaacctttggaaaaacctgaaagagccagagacaacctagaaccagtctggatgaaagtaaaaggagtaggatgcttctgatcctaagtactctgtgaagtgaattattagagataagctgaatacttatactaaaaataagatttcagagcagctggtgggtgttcacccatggggtgagggggatagagctctagtatgtaagcatctggaggcaactgggaagagtggaaatggggccatctgattagtaactatgccttgttattaaaccgtgactttctgcattgtgtattcccagagttggaaaacttccgctggcaaaaaaaaagagaagggccgccgtgctgttgctgagggccatacagtagacacaaaagcgccttcttagaggccttcagcagaggcaacttgtacaggcaggcctgttcctctcaaagactgggaatcagattctttccccagggggtttccaactagtttgcacttcagaaaaaccttttctttctcctgctgttcacgccctgcaaagaattttcttccaaccaaagaaattgttttataatcaaagatccttgtccttagttgttggacatcaaagaaagtttggaggagactgggggattatgtgagtgcctagaatttattttgaatgcaaacttgcaacattagcaagtcccccaaagaatatactcatctcagagctgggagagagcctaatataactaagtctctattcttccttggttggatgtgcctcagtaagatacaaatgagttgaattgccttatctggacttaattcatgtatgtttggttcttgaggtacacgcttactggaagaggtcccccaacccatcttcccttttaaaactggtgtttggaaacatcaaacactactaataaactcgaaacaacaacctacccccccaccccaaaaaaactccttttttaaaccaatgtttgactcttgggagtttggggtttctcccaggacagttgatatcaccaaatgttgggagccacattccctgcattcctctactgttgctgaggtgttgatgatgtcattttctcccacaaaggaaaacctcagcaccctgagggcctgaactcaggtcttggcaggtaaatcaaggaagaacttacttttggatttcaactgattgagtcaggcataaagagacacaaccaccatgttaagtattagtgtcacagcctcatctctgggacctgaatagacaatttatcatttgaagaaaattaagactataactttaagaaattatcttctgggtaagaacaatgattcattgaatattttggttcttacactttggggcatttatagggcattgttctcagagattttggctccctcttaaatatccttctctgaatccacaaattttccaagcctttccggaacctgtttgtagattatctagctttccttccttgagcagattaacaacaacataaacaagaattaggggaaaaaaatgatggatagggcaaatttaggcagaattatgccttgggcaaagtacattcttgttattttatcttggttctgtggttatgaactgaagagagcatttgctctagaagatttccaatctcttcctatcccttcatcacaaccacagagtagtggttagaaatagattccaggaacaccagaaatgttcagtatttccaatggtgacagctaacagtgccctcacagggatcctttgagcactcttcctctgagccttcttgtggtgtccttgtggtcaggagacacatcatcaatcacaaagacttgccctggagacaaacctggtaaaaataatcaattgtctatctttgccactagaaacaatccttttgtttttacttggttctgaacaaacatgctgtagttttttagagaaagaccgtctctttcatggaatcatcaactgaccattctcaaaaatttgagatgtgctagtttgtgttaggaaggtaaggtaggatctgggaagtaagtaggatttgccaaaggtttttattctactcagcagtgctaacttgtctgtgttactcctatgcaggtattagattataggtttttttttttttttatgctaggaatatatggataaaattcactgaaatgaaagtgtccctttagtttatacaggggaatagggaattgaatttataaggagagagcccagcctgcaactgacctttcattttcatagtcttatttctcctgagttgatgtaagcttaaaacaaatgaatgtattatataaaatgtcctactttttcaagcaatgtcaatcttcagggtatggaataggatttggcattttgtttccatttttattgttttgttttctaaagggaggtttgagttagagcctgtctggcaagattccatacttctaccataccacctgtcctggcagagacaatggaatcaaaagtcaagttctttatgactgcacctgcctcgtaagtgttgccagaagatctgattttctcttgtagctaaactctacacagaaacgagggcttggcacccaaacagtgggtgcatacccaaacacatggatgttccaatatcaggaggactagtaccactagttctccagatgacttgtaaaatagtctttggcatgacattcaacgattatttaatttatcaaatggaggagaagtaactttctggtttacctggttttcaagactttcatgaggatctattaataagcatgaatcatttggtaattattatttgaaaattacctgtccagtgctgcatctagtgagcatgaaggaaagtatgttctccccaaaatagatcaggaacatatctctgaagtcagaccaccatgcaaagttcctaaggtgagaaactaccatttctgcctgttgctttttccttttcccagaaatgtaggttaccctatggtcaccagttgaatgctctgtgattaggcagttgttttgtaggcagtctgacatcctagatgagaacttctttccttttgaatatcagagtgtttcttgggttccctcagggcagagttacttcattatcttctaacttatgtataactggatgccttctggcctaagaacataatttctatcaccaatcaaataattaagataatatgcccaccaaatggtgctctttgcacaggattcatatataatgatataatatgataataaggcataaaaggtattctaaaatgaggagcgacatcctacagtgaaaagtgctctcagtagacttgtattttaatctcagtgctgatccttcttagctttatgacgtaaagaaaaattgcttaacctctttgagcttgtggcttcctgagtaaaatgggaataatagtaataaatggcctaactacctgaaatgaaataatgtatgagtgttgcctttgaaaatggcaaatgttaggtattattattaatagtaattaaacttgagctattccttattcacctaattactatcagaaatattactaagtgtgaaggttattgatttagactccgttaacctatttgcgttcaatttggcatcagcttaacataactaagcaagactgtttgtatttttaatgtagccgaaaggacaaggctttagcttcaaaattttgtgggttaagggtgctgattaaatattaccataatgtagtacaggtagccttagtggtttaaagaatgactaatagtatatgagttctggggtgggaacttaatacctgttacttgtggtacggtgaatcacttatctgccctggacctttgtatgtgtgcctgttccgtactggtaaccccattagcttccttccatgatcaatgaggtgatcactgacacaaagcagctgttttctaagttttgacttatcagagtctgagggatcctagaaccacattatatatcactcttccatcttccctttttgaaaatttagagtatttttttaaattgctgctattggctgggtgcggtggctcacgcctgtaatcctagtactttgggaggctgaggcgggtggatcatgaagtcaggagttcaagaccagtctgaacagcatggtgaaacccagtctctactaaaaatacaaaaattagccaggcgtggtggtacgcaactgtaatcccagctacttgggaggctgaggcaggagaatcacttgaacctgggaggtggaggttgcagtgagctgagatggcaccactgcactccagcctgggtgacagagtgagactttgtctcaaaaaaaaaaaaaaaattgctgctactctgggacagttgctcagaatgctggcgcttcagcttctggtgtgtagcttgcagccatgtttctaaggaccagaagggaaggagttcaggattgtgaaggggactactttccccagttcattatactgtgctggtcccaacatgttttctgaaactcagcagatacgattctatagcctgcttggaaattatcccgcaagtctctaagactctcagttccctatctgagaagaattggatcaaagtaagaataagcagagtttttgtcatagcatctatcaaatatttgtctccctgaaaaaattttcaggtaaagaccatcctttgagccttctcagagaccaacagtctgcagtataaaaaaatctgtgttcagtgttttgtaactttaccaatttgaagtctcttcccaaaataagtaaataatgggataaaggtaattatgggtttcctcatcttttctacttacctgttccctgttatgattaaacacacatggcttataactcttttggaaacaaactgaattaccattattatcctttcaacacttgcatggtattataattcatttcaatcaccagtacaacacagtgggagttaggagaccagtggggcgtggggaggacctggagaagggcaaacattttcctttttattggttttgggaagcctccttcttctccgaaggcacttcttggggaaaactgttttcttcccaaagcctaataaagattagtaagagatgtctgcaaagatttagaagctctttgaaagaaagacaaggataaacattcactatcactgttattatcattaaaaaggaaagcccagcatgtgatgttttgggtcacttccagtggccttgtttgatgttcacggttccttttttgacctttacttcttgatatctttatacatttattgaggctattggacaaagtcttgagatactgagcaatacagtgctaagaatgaatgattgctagactccatttctatgggtggaatttctgaaaatgtgttttgtctttagataccctgttgttccagtttggcaatattggtggcaaggttaatttaatatctggtcacttgaatttttacttcctattctgtaccttaccccagaaccaaagttctataggatacttttcattaaataaataataaattaactggaattttttctctgctatgcttattaaccagagatatatcaaaaaagaagcagatgtaatggacctaaaaagcaaataagaacttcccagggagattgtaagtttagcccagtctcttatattatttcatgccaaaaatgaccataatgatatccttgtagtgtagacaccaagtaaaggctaactttcattcaacatgatgtatttaggcaggaaagtgcaccaatacattgaagaaaggatttcaacagtacagattgaatttttaaggacttcctggtcttcagaaaggtaaataaatcactgtcaacctaaaaggaagaagctgaggcaaaattaatataagtggagagcttatttgagccaagtttaaggattgcaaccccagagcctagattcaagttgccctgaatatacactctgattagcagcagttacaagtggatttttaaaagcaaaaaagagggatagggagtgggctgatacaaagttgtttgtcagaaattctcattggtttacagaaataacattgattagtaattggctatacatttttaagctacagggtatgggttatagtgtctggtgtggcattattagattaatttatagctatttgtggcaatagcaagcagtttcaagagatgaataacatagcctaaagcggggagtaggacttgactgcggtctcattttaatgtctctctgggcctgataattaaaaggacttgcattcttcatataaaagctattttcttttctcatcacaaacttttttttttttttttgagacggagtttcactgttgtcacccaggctggaatgcaatggtgcaatctcggctcactgtaacctctgcctcccagattcaagtgattctcctgcctcagcctcctgagtagttgggattacaggtgcctgccaccatgcccagctaatttttgtatttttttagtagagacagggtttcaccatgttggcctggctggtctggaactcctgacctcaggtggtcctcccgcctcagcctcccaaagtgctgggattacaggcatgagccaccatgcctggccaaaaacttttattattagcgacttgtgctaatcagaatattctgttccataattggtagttgtatttgagaattaggtagaattatctcttttcttttcatgtttttggtcttttcttttgagtttgtgggattgctgtgtttcataaaaaatggcacattcttcataatcctagttgatgaattgtttcacattttaaatgaatatcctgtaataaagtttgcttgtacacatacatttatttttccccctctaggttttcagtggttttcttttctttcaatctctaccctgatttctgtattcctacacacacggagttttttttttttttatttctaagcttagctgtcatcaaataaaggtaagctagaaaatcaaagccctgaatctttccatcagaaccaaaggaactcaacaagttctgaaggaaattgaagttgaagattgtgtatgtcataccaaccagtgacagagaattatttgaaattagcatcatatttgattttatacaaaagcaactactatggtagtgtgtgtgtgtatatataaaggataaaaaatgtttaggttagaatgattatgtctatatattgtatagatgtattccatacatatatacatattccatattgtatatattctatagagagaatattctaaatccttattttcaatcctttagaggaagctactaactctaagcaaacctcagaccagtctctaaaaatagctccctttggagaccctgaagccaaattaaatatctggcctttgaaattttgcctgttgagagcatggttacatgtaaaatggataaccttaggacagtacccgctctgttttttccccctcaagtcccctcttccactcattattttagttaattgtacttagtagaaaacagttaaatctgacctcctcacagactgacttctttccctctgtttcagccttgtctaaggcttatctgtttcagcatgtgggatctgagtttttttcctgttaaatggttgcgtgctcatctctcctcagttgtgttgactatcttgccccttaagaattttaatctacatggtggtccttctgttttttgtctcttattttcatttttgggtgatttgaaaatccatgcccactgtcaagtcaaacgtttcttctatcaacagttgttatcatttctgtatcctccatatcacgttggtcttttttaggttgggattttgatgagcaggcctgttccctcctatgtcatatgctatactgggttcactgtctacatttcaataaatgtgataaaataaccatcattttgttgaataagttggtgtattgctgctgttgttcctctggagacagttttctgcaggctacattaacaggcaatggaaatgcatgccaggctacatcctaacggttgtgtcttcccatcagaaaaagatccttttacccctccctgtcaaatgaaggcttagattttagagacaattccaaaatacagaaaatgaaagagaagaactgaaatcacagcatctgtgatttttctctatccttaatagtgaggcagcttcttagaggattttattgtaatatgttgataaaatgtttatagtcatccctttgcagtttgtttagaaagtagtttctaagcagcagttcctgcatcatctacagacttttagctagagaaaccacctttctttttgtcaagctgcaaaacaagtctactcttttttatttagtttaacacctgatctttatagtgagggactaagttacatgatctttcttccaaaagaatatttctcagatttttgtgttctatagctttctgattaaattgccataataatataattacttattagtcacagggaactgtgactatttatttctaggagttcaagtgtacacaataataaactgtccctcataaaggggtaaggggtaatttcatagctgttgctgtggtagtggatttggatgcatctgactatggaaccagatctctgatcagaaatagttgagttgtatatacatttaaagctagggaacttaacatcacattatattgccttgtattgacaatcatctttccattatctttggataagtaagacatgctatgacagactatttggctgtctcaaagtcattgccttatatttttttcccaaaggaatttcagatcctgtttaatatttgctagttttgctaggtactgaaggcagaaagaggttgtagtagtatcttgtgaggaaggaaatcagtgtttcttatccattttccatatactgtcaatctgtccaaacagacttattatacagcaaaccgataaggagctttgttttcctctcgatatacttgcctgcacagcaccatgtgccactttggagagctctgtggtggagtttcaactctctggataaggtggaatagctgaaccattgtgcctccatagattttcacaaccctgaaagtaacagcagttgggaggatgaaagagggctatttcccacccaccccaaaagtcctaaagttcaaagacacagctggtctttgtctggtgtttcaatggagccaatgcatctggagcagcccagttactggagaggtaactattgcaggtacacttcctgttgttattcttggaagtattcatctaggtggcccttgcccttccctgtgaatcatctcctcaagtccttctacccttttgttggcctgctttgaacttcttgtctgttaacctcttttacaaagtaagacctctaagcataggataggaagtgctccaggtgtactctcacccacgctgtgtgaggattgttcaactatctggtttctgcatatttcagaagtgcagtgatacctaagttcttactttacttgatttcttctgtttctctaataactttctaaattatttctcttcatttacataatactcaatgctttacttttcttcattattctatttgatatcaagtcatagataagccgaagacatgttctcttctttttttaaggctattttctataagagcatgcggccacattctaagagattctctgaaatttcttctaaaattcaccgtcaatggatagggtttccttttgtagttttacctttcaaacttaccactgactcacattctttctttcatttcattgcaaccaagatttctaattgtgttctaaaaatcaaactgaactcttgtctttcctcaagagagaagggtatccccagtagagaggagtctagggaatgttgggagtgcttctctgaaacaacccaaccacatccaattctgtttcttttggagacggagtttcgctctgttgcccaggctggagtgcagtggcgcaatctcagctcactgcaagctccgcctcccaggttcacgccattctcctgcctcagtctcccgagtagctgggactacaggtgcccgccaccacgcctggctaattttttttgtatttttagtagagacggggtttcaccatgttagccaggatggtctcgatctcctgacctcatgatccgcccgcctcagcctcccaaagtgctgggattacaggcgtgagccaccgcgcccggccctccagttgtgtttctattcagggcactgcccaagtaaaatgcacatgagttatgatctgttgtagaaagtattacaatgaatcgcaaacattaaattaatcaatttcttgacctacattgtaatcaaaatagtacagttgactattgaacaacacagggattggggcactgacttcctgcacgtcaaaaatctgcatataacatatgatacccccaaaacctagcctactgttgactagaatccttactaataacagtagactaacatattttgcatgttatgtgtatcatatactgtgttacaataatgtaagttagaaaaaagaaaatattactaagaaaatcataagagaattttttttttgagatggagttttgctctagatgcccaggctggggtgcagtggcaccatcttggctcagtgcaacctctgcctcctgtgttcaagtgattctcctgcctcagcgtcccaagtagctgggactacaggcatctgccaccatactggctaatttttgtatttttagtagagatggggtttcaccattttgattaggctggtctcgaactcctgacctcaggtgatccacccaccttggcctccaaaagtgctgggattacaggcataagtcaccgtgcctggcccaagaaaatgtatttactattcattaagtgaaagtggatcatcataaaggtcttcatcctccttgtcttcaccttactaggttaaggaggaagatgaggggttgttcttaccgtttcaggggtgtcagaggcagaagacaatccacgcagttcaaacctgtgttgtttaagggtcaactgtaatgtcaaatgtatctcctcctcaaggtagataacccaaagaagagtcttttaacaccagggcctatgccccactacacagggtgggtcaccagctgctccataatagcaacattaaccagcaagttaggacaagagaatgaaacaaccatatccaagtgaagcttcaaggaaacacaaggtaataatgattattatattcacatatggataaaagagcatgaatgacatccattgttgccaaagtttcttgtgagagcattttgtgctaagttatatgctgtcctctacattaggctgtgtatggagataaagaagccatataaccccctgtctagattttgaagacagatattcccctttgagagaatcgttgtagtgatagtagttttggaatgagtgtgtaactgtcttacatattgactttagatttatacgtcttagttgtagggactgccatttatttcccttccatatgtattccagaggtcaataggtacttaataaataagaagtaaaaatgactattttcctaagcttttccagcattatttgatgataagttcattttttggtcataaactagctggcttcccattatatctcatgattaatatgaagtatgtatttgtgcaaaaaacattttgatagttcctaaacagatgccatttagtctcttgggattcaccccaataaagaggtattttcttagctctccctactttatccactattatttttgaagtttcctactctatcctgctctgtcctgtccttaagatgatattcttttacaaattgtgtgcatatcccgtggggggaaaatatactttcctccctcctctgataactgccccataataattagtccattcttccagatccactgtcttaggggctgcttgctctattatgtggtgtagatttctgtttcatcttgagggtcgtttttctacccccatcctttagctaccagctgcaaagactcttacatacacctcctaaactgcttcaaaaggaatctggttctcctggccccagtactgaccttgaccctctccccagtcctgagtggtcctggaaactcagtgtccccagcacctaattcatgctgatcctctgactttcttgcttggcctctggagagacagagagcacattctgaacactcctccttttgtgtcggcatctctgtgaggtgctttggaaggactccagccaggcatggaagggctctttgataatatctgacgggtgggtaagaatttcgggcacctggccaagatacacattgcctgtaatcgttaactcagcctgtaaacagttcaaacgacactgagaggccgtcagttattacattagaagaagcctttcatctctcttgctcagaagccagggcgtccagcgttggcccccactgtggtgactggagccatggtactctgtgcacagccaccaaagcccaagacatgcagggacacacaatggaacctgctccaaatgactgactttcaaactttcagcattggagcaataactaaatcgttaatttccttttgttctgcacctggctgatgctggaaggaaaaaaatgtgttgggcggtgtggaatgggggtagtggtggagaggtgggatccctgaccaggaataaacaatggcaaaggaattatctggaattagaaatttaatttttcagctcaattttccagcacacactcatgtctgaaggctcatccctcaccctttttatttgtcccactgcttcacaatctttctaagtttggtcctcagtgtactccatatctccggttggcttcacaattactcagtattactaaaccctggtgcaaggcacaatgctgggccctggagagggcctgaaggagcataagataacaaacattcctgccctcaaggtgcttactaacggagcccttcagatactgtagatatgtactagagaactctaccttgagaatttataataagtgctaaataagatatacagtgagtttctatgggagtttacaatgagaaagaacagcagtgtggagaagagtgatcagggaaacttcattctgtgaaaaacaaaaagtttcagtcctttgtttaaaatttgcttttctttcatgtttctcatccattttcttttgcctttttcattaaattgctactttcgctaagcaatattgagtattctaggcacttagtaaacgggatcattaaacctcttttagaatttagctgaggagctagaatttgagtatgctggtatcaaaggatggtgcaggaaaaccaagtacaactgattgtaagcatcttaatttcagaagacccttttctgattactatttctaaagatgttcatatagttttaaggctactgttactgaaacagtgtagattaggccacaggttttaagtagcaggtgaaataaaatcctacactcactggtattcaaggtgagcatcgaagttgcaggttttactctttacaccagaatcccaagtgtaaagcagctagactcttttgctctagaaaacaatatcttaacatttgcctcactttcttcaactaaagaaaaatgatagggccacgtgacattcttctagaaaattttttttaaaaaaaggatctaccttatataacttgactggggcccttataacttattagttagaaagctctgatctcatgccttctgttttctttgttttgtattccattttgctcagctttcggggcaccatttcattccctttacatattctggatttggggtttgtctcgttcccaccttccacattttctttgctgattctgaatgtagctttggaggagcatggataaaataaaagagtgcagagcttgaggatgaggacatgctgccctgcaacccgtcatgtgctctgcttctgatttaccaactgcagagataagcagtgtatcctttctttcatctaagacgagtaatactttcttccatggaaaaagcagtagttcaatcttaaaaagaaattaggtcctttagaagaattgaagcactaaagcaaactaaatcaagttttgttaccattttgtccagcattgttgtttgttcaatggtacacaggacagtagttatttgaaagcatgtgttagatcatatttatgtagtagaattgtagaaatacagaatttataagatacaagaaagctttgaagcttctgcagatgtttcagatccactcaattcaatgccctggttaatactgaagtgatatgtaaatttaatattatggggaaataatggaagaagcccctgttcttctacctgaacatggagtctatcttttgggaaatgaccagttttgcatattggcctcccactctggtggttttcattctacatgtagtaaggaaactgcctagaattgttttggtccctgttgatcaacggttagcaaattttagcatatatcagaatcagtttcagaaggcttgtcactcaaactccaattcctatttcaaactacctttaagatttaaatgttcatctctcatttagtatatcaagactgacttaaattttccctactctagcttttttctaatttccccattttgttaatgcaacatcttttttccaattctccaagtttagaacttttaactcctccatttccttcatcctggtactccaatctgtcaagtactttcaacacttccttcataatttctgtaattaattccttctccttttaactattactaccagagttcaagctctgatcgtgcagtactagattactggaacagctctctaattgattttcctaccactagttttctcttcattgcactagtttactctgctattaaattgctctgcttacagtattgttttgataatgagatcccctgaagaatttaggatgattccttttttgcatatgagagcaagctctaactctcatcttggcatgcagtagcctttgtaatttgatcctacctcagctatccaagctatctttgcagatctattttttcagtcagacaagtcttcctgtaccctgaagacttgagagaaactgctcaagaaccttactttttctctcacctggctcctggtttcttctcaagtaagctcagaagtttgaaaaatccatttgacagatcccagtggactagatcctgtggctatttttttcctgtccaaattctgttgtctttaagggtgagcttaagatccatctccttgacaaatcctgtaggacctattggctttaccacacaatgtggcctttgatacaatgtcgttttgtaccaccatttactttgtgtatatgtcatctccccagtgagaatgtacctcctgggttggacctaacagttttgggaagaagataggtgctcatcaaatacttgccaagtaagaggccatatttcagacccattctgatgtacctgtgagggaaatctctgtgcatgcccatccagcattgtactcagtggtcacatgaagtgagtctctgtttcttgacaaggatcacttgggagccattgatatgccgtgtcacaaagggtttgggggaaactgtagcagctgtcattttagggagaaagatggctccagaaacaggtctgataatgtgcaggcaaggaatcaacttactgacagagagcaactctagtagttaggtatttggctaggaaaggggcttagcctctgaagtatttcaggtaggttttggcttagcaattacatatgctgctactttctgagttaagcctgcctaaaaacaaaagtatggcctgatgactgggtggttactcctataccctaagaactcatttataggcatctgcacagaggtacccacccgaacaaacattaagaagaagcaaaggaaagtgcctgaagcatagtcactgtgtcaacagaaatatcagataaggtggttttatggagggggtgtgtgtggtggggggaagagttgatgcacctgtggttggtgattaagaaacttggtgccacattatatggcaccatgaagccaccttatgtcccagccaccccatggtggctgatgtcatataattacccatttgctaactgggccaagaggaaatgtattggatgaaagccagagtaagatagttatatcttagctgagccatattcagaactattcggaactttttggatctgcttttgttttcagtgaagccattgtcattgtcaatctaatagtagttgacttttataggtgtcctgcactttgtttttttgttttttttttgaagatggagtctctctctgtcgcccaggctggagagcagtggcacagtcttggctcactgcaacctctgcctcccaggttcaagcgattctcctgattctcctgcctcagcctcttgagtacctgggattacaggcacctgccaccatgcccggctaatttttgtatttttagtagagatggggtttcaccatgttggccaggctggtctcgaacttctgacctcaagtgatctgcctgcctcggtcccccaaagtgctgggattacaggtgtgagccaccgcacccagccaggtgtcatgcactttggcgtacctatttctaagacaaatatgttctcatgtaaatgtattcaagtgtgttcccatggctcacacaagctgcccaattatgatatctcctcaagcaggaacagggtccagacaattccttttggctgaactaggactgaacttaatcccagactgactcagcttctctgttaacattgtttgaaattctgatatccctccagaggttgtttctaacgagtgcttagtgtgaagtacgaatcacaaagaaatggaccaaagtggacctgggagaccaaaagctcacgttttcaacattaatttagcacacatttattgactgccttttatgttagagcattgtgctatgcgggattataaagaaacccctgccctcaatttagtaagtgagagtataggccaggcatggtggctcacacctgtaatctcagcactttgggaggccaaggcaggaagatcacttgaggccagaagtttgagaccagtctgggcaacatagcaagaccccatctctgtttattaaaaaaaaaagaatataaagcaaaaggtgaaaattaccacacatagatacaaacgagatatttggggcatttcagatgaagaagaagagattcttcatggaagaggtagcatatgaacttgcccttgaaggatatataggattttaataagtcacagaacagaaataataggcattccaagagaatgtgagagaatagtgagtaatccaatttattttggacaagtagtatggtacattgaagaggtggggatgaaactgaaaaggtagaggagaagggaagaaacacatacttttgagtgattactatgtgcaggaactgctggtactttaaatatgttacttcattttatctccgcaatgatcttcttgcacggtgttgttgtttgttttgttttgtttttttacagagtctctctctgttgcccaggctggagtgcagtggcacaatctcagctcactgcaaccctccacttcttggggtcaagcgattctcctgcctcagcctcccaagtagctgggactaccagcgcgtaccaccaagcccggctaatttttgtatttttagtagagacagggtttcaccatattggccaggctggtctcgaactcctaaccttgtgatcctcccaccttggcctcccaaagtgctgggattacaggcatgagccaccacgcccggctgcatggtgttttttgttgttgttttttcgttttttgtttttttagggacaaggtcttgcacaggctggagtgcagtggcacagtcatagctcgctgtagcctcaacctcctgggctcaagcaatcctgcagcctcaacctcctgagtagctgggattacagacatgtgctagtgtgcccagctaatttttaaaaaatttttcatagagatggggtcttgctatgtttcccaggctggtcttgaacttgtgaactcaagtaattcacccattttggcctcccaaagttatgggattacaagcatgagccaccatgcccagcctccatttttaaaacgagacttagagagattaggttacccacagcttggaagagatagagttgaaatgcaaaaccgagttgaaatttaaaaccaacttatctgattccaaaaccagtacagagcaccgaggccttgatttgataggctatggagtttgaatttaattcagaagacagtggacagccactgatagtatttgaacagggcaatgataggatcagtgctgtgtctaggaagattgttcttgaaatgacagagagctttagaatggtgaaagactaaagactagttagaagtctgctgtaatggttccaactccagagacatagaaaagataggtctccaaagacaagtgatggcatagtctttgctcagccagagtctctaggaaaatggtggtgccgttaactgaaataggttaagttaagagaggttattggcttagggtggagtgcagggagaatatgatatttaggtttggtatatttaagtttgagatatcagtaggacttcaaataaataaagtctaacaagcattttgaagtatagaagatttgacttcagagaccaatttggaaatcataattaaagatactggagtgaataagaacctcagaagagaggtaatagagatcagagagtacatctttaggaaacatacatatttaaacaagaagaagaggaagaaaagtaagaggaagaggcaacaagtgaggacaatcagagaagtggaagaactagaatagtattatgtcatgagcaacacgtgaagagtcaagaagcgcgtatttattgggtcagaagtaatttagggctgtttgtcttgctgtagcatcagtccctttcttaggaaacaactgacaccattaagttcaaacacattcatttttctatttcaactctgttagggaggaaattcagcaatcaagaaaactgttttcctgttaaagatgtgtttggtagtcacatttttcatttaagctaatgagagctctcaattttactgccagcaaaagaaagcaacattttgaagtatttctctatgtcattggaggtttagttcccaagaaagctcttgttatgtccgtgcttctgcccttttactctgtgcttcttcctgtggtctgtcaagtctcccttcattagatttagtacctgaaactgatgcccagaagccaggtcacaagcccaatatgcattgcattgtctcttcaagccttagttacctaatttgtggaacgggtggtactaataaagggagagtaaaatagctaatgaaggattataaagcactttgctaatataaaatgcaacatcaaagctgaataataatcttaatttagggtgaagggttccattagcagagtaaaaataaaaaggacaaagggtagtgttgctttgtaccttgataacagtgtacaaatcaaaagtgctgctattgatcctcattgccctgtgaactctcaacccaggaatttggctcccctccctaactctctaagtacttcccttacccactcagtgtggtgatggcacctccctgaatctcctgacaaatgcgaacaggaactcctattcatcagagccaacttgataactgagaagattcctctctcatttatcagcctttgattatctttttgtgtctcttactatttgcgcttagcaagaaaaataaagaggtttgaacaattaagaagtaacaaagagctcatagttcacaaagagcaagtcaaaggatgtctggaatatttgaacatacaactgcctttggcatgaggtggcctacatacattctcaggggcaggataggctggagagctgatcaagctgccgggaagctgaagcaaaggcagggtggtggaatcaaatgtctcttcaactgaagactttaaaacttgggctttagctgggcgcagtagctcacacctgtaatcccagcactttgggaggtcaagtcgggtagatcacttgaggtcaggagttcgagaccagcctgaccaacatggggaaaccccatctctactaaaagtacaaaaattagccaggcatggtggcacatgcctgtaatcccagctactcaggaggctgaggctggagaatcgcttgaacgcgggaggcggaggttgcagtgagccgagatcacgccattgcactccagcctgggcaacagaaaaaagaaaaaaacaccaaaatgcaaaaaacaaaaaaacttgggcttcagctgggtgcagtggctcatgcttataatcctagccctttgggaggctgaggcaggaggattgcttgaggccaggatttagaaaccagcctgggcaacacagggagaccctgtctttaccaaaaatagaaattaaaaacattaaccaggcttggtggtgtgctcctgtagtcccagccacttgggggttgctgaggtatgatcctcccaggtttgggcctgggaggtcgaggcaccagtgagctatgattacaccaccacactctagcctgggtgacagagtgagactctgtctcaaaaacaaagaaaaacaaacaaaaaaacttgggcttcagatacatcctcttttcaaataataaaggacgggggaaaaatgtaattcatctctcatcccaccaaaggtaagaaaaacccactcagaaaaaatatggaatattatccagagtgaactgattctaagctttcccagaacttttctgtgcagatctctgggccaagtcctcataaaattttggtagggactgaagttcactgcagacagctgacactatggcctgaagccagtggggagcaagagtttctttctgtcaatactgcagggattttttttaattgtttgtaatagtctctaaatggcttctctcaaaaaataacttaacaaatctgggagagagactgaagggcccaaaatgacaagagagtacttcaaagccatacagcaagagcaagttagtccatcattccacattaccccagtgtttatgtgctgtgctctgtgcattcccatgccctgtgtgttgtctaacaaatggccttaagaccctgtgcattgagcacgtgtatacactgctgtagcctacaggcaggtgttactctcctgagaccgggactcgttcctttggggcagaaggctgttgctttcttccccattcagggttatgcataactcagcagtacactgatactgagaggagacaataaaagcataacgggatgggttattaaacaggaagcttctccagaaagaagtgagttttgttcagggttgtggaggagatctaggcatgatggtgaacaggaaagaagagaactctgccttgtgatgaggtcaagatactctaaagctgactttgaaactgaaacttacagggagtatacagaaagtttctgaagagaaagcagaaatctgaaaataatcatatcctgataaaatgacagagcaaccaccaaatatattttacctcacatctgtttattaaaacagatgattcaacatgcatttttcttaatatctactgtgtgcatggcatgatgttaagtgatgaataagacctagtccctgacctcaaggagctcagattctactttgcaggaaggaggaaagaactaatgttttattgcactaagaatcaggcattctgctggaggaaataggtaagagagtgggtcacaatgcagcattgacccacagtaagaggtaagtgtcatttaagaattttgtatagatggcttcaggggaatatatgagggaaagtatttagtttctggggactgagggctggtcaaaggattggagaagggcccaatttgaactggcatggggagtcaagggcaaaaagaggtagagagctataggattggagttctcacagtctttggatcacagggggataggagaggtgccattttttttctctatagaaccaaggaaatagggaaacgtccatgggaagagaaaggaaaaataatttggcagagaaccaagctattttcccatcatatgttttctgtaaaagacttcttaggagctaagacagtgtttttctgctttcattctctttaatgcctagaattctgccataaaaggctatttatatatcttactttttagttcctaggagcgcaagagatgctactattgggaatttctaaaatattcagaggatggaaataccagctggcaccaatgctgagatatacaggcaccatccatagagacccagtgaaattctgagccccaaatggcaatccctcccaggctctcccagagccatctcactttttcttttatcccctgcctggaaggctacactgtgggtgggaataaaaatccactctcctgttgcatctaggcagctgccagcagtctgtttgccttgttctttgctggcaaatcattaaacagtccccccaaagcaggcctcttccctagggccaccgcatggacaaagattcagagctgtggtcaaagggctgtcagcagtcaggctggagcccttgggctatctccaacacaagcccttcctggctgttgcctcttctgaacagaagccttcttggcctaatgtcaaccccccaatggcttctgaggagagactctgggcatctgagttggctggtggcttgaataattttgtccttttcctcctgatgttatttctgagtacaactacccctatgatcctttattgttttctttattgaaccccagacccatcctccataattttgccactttgcaatgtaaatacaatattgtgtgttactgcccaggatctggggactgggactagccgagcaagcttcatagcttcattccatccccacttgcattgtgccaatgcaaatctgagcatagaagatttcattgagccagcccatttggagacagtatctgccctcaaagggcttctaagccccagggcaagccagttgtggaagacagcagtatggagcagagtttgcaggacaccttgaaatccctacagcctctgagcaggagactaagcctgaaagacctggactatgtgtgaagtaaccatgttaatgaagctatttcgcactcttgcactgcaatcaccaaacttagcaatgctcaagtagctctgccggtagtccagatgggcctctggcgtatttaaataaatgatctggtttccttaagtttcatttctttggtgtttttcacagggactgtctggctttagtctttggccttttaagcattgaaatcttaaataattactcaaaaataaacacttatctgattctagtaggttttcagattcctgccatctctggtgtgagcttggctggaacaggaacagcaaaatcaaataataaagcaaactgtgtcaaggctgtttgcaagtagcacattgggttaggtgtgagagttcagttaactactttgttgtggcaagagttaagaccatgcctcagaagggccctagacaaagcctctatagaccttatcctgggcctgtgggaattagatattacccctagcaatacttgccatctgtgtcaagacctcggcctttctgcagaggacttctttggataagacctagctaaacaagggggctcagtggtactccttataagatggaggtcagtgagggtgacaaagatctttcctgggacagtggtcagaactcagctgacttcccagaactaattagtatgatttttggatggttgagccctgagttcctcacctggtggagaaaaggagtccagaacacatgactgggttatcttttaaggtcttgatcttcacaggcctcagaacttggtattctatttcatggccttgcttctaaagatccctgatgtaactaaaatgatatttgacgggctccctcttctttgcttctaacttcatgagtagctttctagtacctttgtagttagaggtcattctgactgagtcaggtcaaaccctgtttccatgtgagaatataatgatataaaagttctacttcttgggtggctgggatttttctcctgtctatgattagtgccaaatatactttcttctctgatatcactttatttcaaaagcagctcagataattagctcttcttctccttaccttcttccatttgcttacgagtgcactcctgacctgtgaatcaccatagaaagatgccaggcagagtgtggggtcaggagaaccccaccatgggggccgttttcatgtaaagaagcctagttgcatcatggagctccagcacagtctgaaatgaggataggtgaatttggaaattgaagaatggcgtctgtaatgtggggtgaaggagtaaggaaaatggcagtctggctgaatgaccattacttgggtctgagcttctgtgacctctaatttcaggacacacctttctcatcctaaagcaacagggacttttcactgggaaagtgtctctgagcagcgtctgggtctggctgcctttgttgtggctaggagaggagatgagataaaccgtagaggagaggaaggaagccgaggctgggaggcagagcacaaggagcagacagatcctgcttctgtcttgttaagaatgattcaagtttgaaaattctagaaatggggaccctgaagccttccactgtgatcccaggcattatattacagtactcacctaatgcttaccatgccacagaaaagcctccccagcgtgcatacccggaggcagtgtggggttgaatttaggggacctcaacctcctttaactgggtgttgactaggttgactaactttaactaggtgggcaatctgtaacttgagtcttgctttcttcagctgtaaaagacaaattttgaaggtccattatgggtgtgaaccaggctcagctgttagcaatttacatctcttctataaactacgtggcaactggattcaaatcaagttttattcattctttcaccaaacactaagggcctatgatatgcagagcccccgactggagtttcagtgagctcagtttttccctcagtttttgccaccctgcttcctattagattctggaacatcatttcagttctatcttgtcagctctttcgctcaccagcacccctgttcccccaaggaggtttcctgaatcaagtgagaaatcatggaggcctcttcatccatcccctgctagtgtgcactcccatcagatggcccgaggttatgcttctccctccccaccaacattatttacttttgtagcttaaaaaattatacgatgaagcaggaatacacttttctggtaaaataatttttaaaaaatagatagcatgcttgtaatcccagcactttgggaggcctaggcaggaggatcacttgagcccaggagttcaagaccagcttgggcaatatggtgaaaccttgtctctacaaaaaatacaaaaattagccaggctgctgaggcacacctatagtcccagcacctcaggaggctgaggcaggaggattgcttgagcccaggaggttgaggctgcagtgagctgagactgtaccactgcactccagcttgggtgacagagcaagaccctatctcaaaaataaatagagtaaaataaaataaaataaagagaaactcctctcgacaattccccagcctcccaacttgattcgtggaaactcagtcatctcagagagatagtgacaagtttatgtaaggttttgaaagaggtcttgaggttcccaaatctaagcctgaacaatcaccattaggatctaacctgtagatgtgagcattgactcccttcaatacaaggcaaggtgaccaagctgggcctcagtggtgggcctattctggtgccgggatccggaagaagcaacttcaggccaacctgtttttttcccacccccatatctgcaggagctttactttatgatgccggtgtgtcctcctacctaagataaaagttcaggtaatggaggttgtgcaggaaaggatgattgtaaaatctgaaaagaggaaatggggagaatgatgcctttgatgcctggccaatgttcttgattacaaaggcaaaattgtagcaagcagtaaagttacctgtccaaggcctggttgaaggtctgtacgtggaatcagagaactaagagacaattgcagcagaggtcggtggtgggggcaggagggggtgggtgggtgggtggggaggagagttcctgggaaacaggagacagtgaagaattgcttgcagaagcacacacccaaagaggaggagatgccatggataaggggagaccagcattaagttccaggcccagttgagccctgaaatgccctttgtgaggaggtaatgagatcacatggcttccttcatgggaaggaggcaggctgagaactggaagagcttgttcagtggggtttggagggctgagaacaggagggaagtgactgtggataatgagctgtcccagaatgcgccttgcagaacactggcattcagaagcactgttgattaccaaagaacgggggaggggttcagaaaaggccttgtcccttccaggaataagaagggactttattatagatgcagtaataaaaacagctgccattaagtgagcacttactaagtgtcaggctttttgctaggcactgatatccattatctcctgtctacacaaagcattcttgttcccattccaaagacgagcaatatgaggctcagaaagattaacatgcccaaggtcacacaggtaaatgatggggtcagaatctgaactctaggtctgtcttgggagggaggggaaaaaatcagaacaaataagttaaggaggacacagggagaatagactcaggaatatgaaatacaacacacaccaccgaaggacagttcacatgtctttacacagggggtataaaatatgtatgcaaagctgaattctgagtcagaatgacccaactcgtgcttgaaagcaagtgcctcttaatttgcccctcatggcagcctgtgagacagtggtgtcctaactcctggcctttgaggaagtcaaattcaccaagtttccatgagccctccacagccacacccttctcaaatcaggcaagctcatttctcttgaccctcccctggtgtcactgaggggacaggtggcccactgtagaaatcgtgtttgcatcttcatgattaggagaccttgcattccaaggagacagatgtatttgcatctgttttctcaagagcccgcttcctggctgaaaattccttggaggaagggcaaagacagcccctgtgttatacccagggaatgccaatgctgtctttcttgctaggtgctgaactgagtcctagttcaaatggctattatttgtttttaatttgagaatatttgaaaagctctcattgtaaaagagtcaagccatacaaaagtataatgagtatgattgtcataccacagatataattgtactagaaagatcatgttactttatttatttattttttttatcaaatctaacaccaaggtcctatcccattagctgcatagacatttgttttcaagggcacttctcctcatagagtagcacaaaagtcccagagttttatgaaaaccaagatatccaagggacccctctgatattcatccatgctggccaccacagatatgtttcttgtccaaacacaggcattcccttgaaatccacgcaggcacatcatctctcccaggggccagcctcctggggtctagtactcagtccttctccagggacccaccgcttctggggcacaggctgcagcttcccactactcagcatggctccaggcccctcacactggctccagacacctccttcctgccctcctggttctgagactttgacccctcccttcaccacaggcccttctgccttcaggacactcacacttcctcagtgagttcagtttttctgcaaaagccaggaagggagaactttaaacaacatttgcttttggcaaatgcccctaaggcaaggaaatagaaggtgaagccatcttcttggaagggaaggagggaaaagacatggaacaaaatataaataactgtcgttcttttttattcttctacaacagcaaaaaacaaaactcaaatctcatgtattatcttctgatcaaagtattcaaagcaaaacaccaaagtccctctctactaccccctctctaattcctctcccagagcaaccattataggatttgggtgtgctctgtcttgtcttcatagttaactatcgtcaattatctggttatagacttccaatatttaatcaacaaatattgattgagtgcccacaaagtaacaggcagtggggggcaggctagactcagtcatcatctggagaagagagggaagtaagccgacaattacaataccgtggggtaatgtatgattagggaaatgccggacagagcagcaagtgccaaaggtgttcagggaaatgaaacaagttattatttctggaacataggtcgcaaggtgggaagagatataggatgggaatgttaagccatgaggcagggcccagaccaggcagagccttttcagctatgtttaagagtacagactttatttcaggagctatgaggagccttgtaagagctgcaagtagaagagtaacgtgctcaagttagcattttagaccactttggctgcaatatagagaacgaatgggatgaagtgaccctagggagtaggttatttcggtaaatagggttggcagtgatggtggcctgtattacaatagcgatagtgagaatggaagaaagaataaaataagacaaatatttaggaggtagaattgttagaatttggcgattgattggatattggtggttagagtgggggtgaaggagatggaggctaggaggacagcatcttgcttgggtaatagatggatgatggttccaatcccagagacagcaaacactggaggagcagttttggggatagaatgagttcagtcttgagcatgctgagtttgaggtgttctacttaagattattaaggtagaaacgtccagggttagacataagggtctggagctcaagagaagaccaaactgtacatatgtaatcactgacctctgtgtgggcaccgtagccatgggattggctgctgtcacccagagaagtcatcaagagtgaaaagagggggccagacacggtggctcatgcctgtaatcccagcactgtaggaggccgaggcaggcagatcatgaggtcaggagttcaagaccaacctggccaacatagtgaaaccccatctctactaaaaatacaaaaattagccagacatggtggcgggcgcctgtagtcccagctacttgggaggctgaggcaggagaattgcttgaacccaggaggtggaggttgcagcaagccgagattgcaccactgcactccagcctgggtgacacagcgagactctgtctcaaaaaaaaaaaaaaaagaagagtgaaaagagaggagggtctaagaatcccgggggtcaccatcaacattttagggacttgtatttgggtccttatgctttagtaagataaattttcttagtaaatgagttcggggaaggtatcatgttttcaaaataaaatgtaaattgttcttaaatatttttttaaccttatcctactactactttccttttttttttctaatctctaccacttactagctgtgtaatcttgggcatgttatttaaccttttagtgcctcagtttcctcatctttaaaatgggaacaataacaatctctacctgatagtgttgttatgaggatgaaaagagttaatatgaaaaagtgcatagaacaatcactggcccacagtatttacccaataaatataaactgtactgtccccatcctgactatcattagcatggagatggatggagggttgctggatggagggttcatttggagctccatggctccgacaatggagtcaggcagagttgagttcaaatcttgtgtgaccttgatttctctcagcctcaagcttctcttctttaagtggctatgataggggtagtggggagatggagatggttaatgggttttaaaaaaaaagttaaaatgaatgaataaggcctagtatttgatagtacaatggggtgactatagtcaacaataattttattgtacatttaaaaataactaaaagagtataattgaattgtttgtaatacaagggattaatgcttgaggagatggatattccattctccatgatgtgattattacacattgcatgcctatatcaaaacatatcatgtatcccataaatatatacacctactatgtgcacataaaaattaaataattgtttttaaaaatggctataacacctaccttatggtgaaataatgtctaaaagctctggcacacaagaggcctttattgatgtttaatttccttccattccttcttccatagttgttaattcggaaccaggcaagtttggtggctcataccaggttttttttcccttccaccttgtcagaggtatcctacaatgcagcactgagctgtagatgctggttccctgttcaaacctggggaagagtgctgtttaaatatctgcagacacactgtaggaacttctccaaagtgactttcctctcccaggcgaccctctggtcagtgagcggcatcttggagtcatcaggagaaggctggaccgtgtggggagggtcgaggagcaagcagagcagaaccttctgtggctgcgatttgtccttcctcagggaaggcctccatcttctgctctggtggagcagctgccttcagattccccaccacaccagagtctcctccacagtcttcagagaaattggtctccagtgcaaatctgtggtctcagctctgtggcctgactcttgcagatccttccagccttatgtcctgccttccctttcgtgccagacctcactgcccacagtctacctcagcctcgtgctaggcctctgttccttggtgcagtggcttcctctgccaggaatgtggctccccaaccccgctccctttcattggtccctgaggtgaacacatacctagttagccttccaggtagctctccagtcacctcttgtgaaaactgctctgcttcccatatgtattgttagctgcccctctttgtgccctcccataggccccttgcattgtaacatcacgatgtgtttgcatgcttgtcttttgagctgctttaaggcaaggagcctctcttactcatcattagctcctcactgcattggacagagcctgacaccaagggggccttccgtgctggcagaacaaagaaatgaatggatgcatggacagatagagagactaatgcagcttgttgagacaggggctacagcttcactgatgtaagaacaactccaccctcatgccccagcctttttcttggggcaggggcacatgataacctttctcccacactaaaccttgctcactaccagactagtaggccttaaactctgggagcaagaatggaactccttcctatctcaacaccccctgcccagagattttgattcaaagcaaggtagtagatagttattgagaacctactatgttcaagggaccgcggtgacacagtgagaggaaatagcctgaaagagctttcagaaagtgtgcttttaaatccatcattgacattatcttcataaacatctttataaattcaagattctctgtggttcctctgatggttctttctggaagtccttcagacatcaacagtagtagagggggaagtgtgggcagctctctaataagaaatctctttcttgccaggatatgtggggtttctactatataggagtccctggaccataggattattcagggccaaataagtcatactttgttctcattgcactctgacattttgtttagggaaaattagattcaaatgggtgtacaaatcgctgtgaatgagaagagagagtaaggtggtctcacccctttgatgaggagagcctcagatttctgtcagcacgttctcctttagtcattgttcagcaccagctgggctcagaggcacagggtcttggacaggatctgcccttagagcagatgggctgggctggctccacctccacggcatcattcctgggaccagggtgagctgtcaaagcttatgtcttagccaagcctcattgcaagatagtctcacctctctgtcaacaccatgcttgatcccaggatgggtacagggcagaggcaaaaaaggggctagtgagagaagcaaggtagcaccgagtgagatgacccagcctcctgagaaatgggaatctacagggcaacagttgcctgggggcatcccgaggaggcaggaggcaccagcagcatccagcactgcccatgggcattctgaaagcactgatgcaggcacacatggatattctcttagcctggggcttggggagcaggtagaaggatcaggaggtagagaggctggggccaggagaggagccctctgcgtctggccagtttagagaagtaggattgttggagttgaaggttgttagagttgctttgcagcaagctcttcatttaggtcccctctgggacaccctctccctcctatctgcctccactacctgtgtccttggccccagcatcctgaagtgacaaacagtggtcactagcttactaagaggcaatccaatcataaggcctactcttttacagcaccaagagacctgcctggtacctccctagaaaaatggagaggtatatggctctcacagctcactcctgctgcctaaagcctccctaacccaagtctgtctctctctgcagtcccacccgctgtacctgtgcaatgccagtgatgacgacaatctggagcctggattcatcagcatcgtcaagctggagagtcctcgacgggccccccgcccctgcctgtcactggctagcaaggtagactcacacttcgccctacacacacccggagcttcacccagctctgggctgtgagaagaccctgtgctctcttgtccccatgtttcctaagagtgatgtacctgattcccttgggtttccctaacccatgactggtctgagagaagtggaaattcacacctctgttttttctcctccgactagcaccagcaggactttttgaccttcatcccagcatgctccccatcccacctccttcccatcacttgggagttcctgagtcccttcccctgctctgcaccagagcaaagaaggggtcaattgaagggatttccatcttttagaaacatacactgagcactgtgcaagaacagcagaaatagaaaccattgccccacccttaaaaagttcacacttttcccctgaggttgcaaactggtggcccataagctgggtttggcttgcagacatgttgtgtttaaccctcacagcgacttttcaatgtgtatattaattgccacatttaaaaattaaaaatgtttatataaaagctgagattttcactaggcgtggtggcgcacgcctataatcccagcactttgggaggccgaggtgggtggatcacgaggtcaggagatcgagaccatcctggctaacacagtgaaaccccgtctctactaaaaatacaaaaaattagccaggcgtggtggcacatgcctgtaatcccagctactcaggaggctgaggcaggagaatggtgtgaacccaggaggtggagcttgcagtgagccgagatcgtgccactgcactccagcctgggtgacagagcgggactttgtctcaaaaaaaaaaaaaaaaaaaaaaaaaaactcagattttcagcttctttagaagaaacctgcaaagcacattgctgcaggccatggtttgtaggagctgggctggggctgccccttttccacagctgtgggccttctcttttgctatgctccaccctgacctgctacctcacaggacctttagacctttgcctgtgactgctgctttaactaacaatagcagttactgttttctatgtgcttacaatgtgccatgtggacatgggacagattctttgtatgtatgatctcattcacttttcaggacaatcaggaaaggtaggcattattattcttcatttgatgtatgagacaagtgaagatcagaaaagtcaggtaacttgctggatgacacaattaggaaggggtggagctgaactttgaatccaaccctgtctgtttctcaaaactaggcttaatctatctgtggcctcccttctagctggaaaactgaacatacgtgtggagtgtagtcagattgtgtgtggcacacacgggtatgcccccaagggtggtgagagaggagagtgacactcccggcctttgtgttagcttgctgtctcaggcccagatcccttgtggatatcctcgttctcctgggcacaaggaaacagcctgggttcttacctcatcccatggcaggcagggatgtgggcaggattctgaatgtgggtgaagatattcacctggcctggccgtgctgacaaggaaggggactccagagatggtgggaagcagggggtcaggatgcacttggaggagctggggagtgtggcatctctgcaaggctgtgagccttcatggcagcagagttgttaggctgcagctgcctgccctacttctggatgtttcatttctctttccttacaaaatatgggcaaatgtcactcatttattcatttggtaaacaagttcccagtgcctgtactgcattacatagtgagtgtgtgtgtgtgtgcgtgtgtgtgtgtgtgtgtgtgtgtatgagagagagagatggggaagaaggattccgagaagctttgctgctattggtgggagctgggctggggctgccccctttccacagctgtgggccttctcttttgcctgttgcaccctggcctgctacctcacaggacctctagacctttgcctgtgactcctatgagtctttgagctacctgcaatatttcagaggttccacgggcttacctcaagtacttggttttgttttggttggaattctgttagttcaacatgttaatacaagttatctcatgagaaaataaattgtaagtaataaatatagttagtttggtagaacatctgtttttcttttttctttttttttttttttgagacagagtcttgctctgttgcccaggctggagtgcagtggctccatctcggctcactgcaacctctgcctcccaggttcaagtgattctcctgcctcagcctcctgagtagctgggatttcagttatgtgccaccatacccagctaattttttttttttttaacgagatggagtctcgctctgttgcccaggctggagtgcagtggcgtggtctcagctcactgcaacctccgcctccagggttcaagcaattctctacctcagcctcccaagtagctgggattacaggtgcccaccaccacgcctggctaatttttgtatttttagtagagacagggtttcaccatgttggccaggctggtctcaaactcctgacctccagagttctgcctgcctcggcctcccaaaatgctgggattacaggcatgagccactgcacccagccgaacatctgtttttcttaaaatgtgactcatgagaggtctaagggaaagatggggtcttaggggagggagagtttggaaaccactgacccctgcagctctgctctctgctttggcttttcctgttggtgtcaatggtgttgtcaccaatgacagagctggggctctcaagccagatagccctgggcttgcagcctgactcctccactgcccctcagtgtgacctggacttttttagctcacctctctaagccagcctctatttcctcatctgtaaaaggggaataataatgggacttgtaagtagttaggaggatttaatgagacagtacagatggaagtttttagccccatgccacgtacatggtaaccactcaataaatgattgcaattatcattactatcatcatcactggcatcatcattccgtgcttttgtagttaacaaggttgcggtatttttccttccatttgttatctcgcttattcttttctgaaaccctcaccataattcttctggaggcttccattcttgtcaccaccccactatcccctccaccctctgtccagtcacccagattggtttctgtttctttattagcagctccacagccatcctggtgataagccagagccttatcacctcatgcctgaactagtgcagtggccttttgcctgctagaaggagctagatctggagaaaagcagatgggtgcaagccctgcctctcttaccatggaggccactacctggtagtaaagaacaggcaatctgaaggctgaggtcctgggtgcaaattctgcctccactgcttctcagttggtgaccctgggcaaattattcagttcctctgagcctcagtttcccacctcaaaagtggggctgatgactatcttatagagttttgaggagtaaatgaaatcacatgtcggaaacacatagtattaataatagttgatataaggaccaggtgtggtggctcataccaggtgtggtaatcccagcactttcagaggctgaggcaggtggatcacgaggtcaggagtttaagaccagcctggccaacatggtgaaacctcatctctactaaaaatacaaaaattagccaggcgtggtggcacgcacctgtagtcccagctactgaggaggctgagacaggagaatcgcttgaacccaggaggcggcagttgcagtgagccgagatcacaccacacaccactgcactctagcctggtgacagagcgagactccgtctcaaaaaaaaaaaaaaaaaaaattagccgggccttgtggtgtatgcctgtaatcccagctactcaggaggctgaggcaggagaatctcttgaacccgggaggcggaaactgcagtgagctgagattgcgcccctgcactccagcctgggcaacagagtgagactctgtctcaaaaataataattataattataatagttgatataataataactaatgcttaagcaacaccccgtgccaggcactattataaatgctttgtgtggattcgtttatgtagtcctcataacaaccctatggactaggtcctgttattatcccagtttacagaaaaaaacaacagacacagagtagtgaagtgacttgacccaagtctcacagctaatagttggtatcagagccaggattcacccctaggcaatctgggcactggatctcaataaaggttatattccttctccttcctttcacccttaactttcaagcccagaggaatcccacctttgctactgaatctttcctgaccagcccaggcccagccagcccagtaggagcagaaatccctccctgggggcatgcctccagagggtagggtgtctgtgcatgctttcaacaccatcttctgctaagtccaggtttcagggacgcacctggtgcgtggaggggagaggctgaaggtccttcctgtccccacccctacctcaaagtaagcagcctcacttttatctgctttctatattgaacatttgtgccagattgtgtgtatgtgtgttggtggaggggatagtagaggggagagccttctggagtgaaaaaaggtctggaagcttctgtttctattcctttgtgctttagaatattatcagcgttatagcttcatgtatgtgccttgtctccacaactatattatgagctgttttggagggcctggccttctatggcttggtgccctgggcacggtaggtgcttcatttttgatgagcagaagatatacagggactcttgtctggagaagaaaatctaaggcccagagaaatgcagcagctgaccagtgagtcctgcaagtaagaggcagaattgcaactcactctcattgctctctctgtaatggctcctgttgctagaggctgtggcagccttgcctgctgcccctagggctggccaactctgaagcttccaaagagctctttggattctttctaaaactgccttcctgtcctgagggcctgcctatcctctctctgctttccaaattccagtacccaaataagtacttttttcctttttgcctccacttactttcttgggggcaggtggacaagaggcatagatagccctagattggactgctatctgtccccaaatcttgctttttattcctagaattctggacacagggactcactgtctgaaagtcctgtttgttttcccctgttggccagtgctctgggctctttgatcacttttacaactttgtaattatgggctgtaatgggctggagtgtttgaatgtcacagtaattgccttccactgttcctaccccaattcttcaaagagagaggggaggggaaataacaaaatctccaaagaagaaagtctttgcccttcctcatgctcttccaggccagggtgggtccagggtcttgttctaggggtgtgaaaactgaggcctgggagtcccaattctgtgactactggggtgacctctcctgtccttggccaaatccctggaataggagatcaccagtagggttccctaccagggattccttttcccctggtacttctcccttacccttgttaggagggttctgaagattggaaagtctctacctgcctggagtagcttagatgggaggaagtgagtagggaagatggaagccatgaacctctcaactccttcagcacttccattctggaattgactggtcctgtgaatttctagtcaattagcctggtaagcctgggccctaggctgggcctagctcctgggggaggaaggaaagttaccttcctgaccaaaacagggccccgcttgagtgtctcctctgcctgcaggcagtgggttctgagtggccccctgggccttgctgctgtctggggagtggagaacagagagctggagcaaggaaaggagctgctcccagcctgcctggcaggagacctgccctgacaggctctccctgggaagacaggcagagatcaaagtgctgagcctgtgagtaagtcccagcgctggctcttcttgctgccaccactacttgcaggagggttaactccttcaatgcctgtgggaagaccccagagactttgggggtgagggggggcggtgcccagggatgtaaaatcacagcctgatgccattagaagatgaacctttgccctagggaggaaggctggagggtggctgtgctaggccgggaggccccaggccaagcccaggagcagctcctcacagtgcctgttagttgtttgctgttgtgcctcccgcctcccccgacctttagctcttatctccctttccttactcccctccctacacacaccccctggattcctgctttttgttctctttctggcactgctatctgttctgcctggttggctagattctgcttcctcaagctgactcttggagcccttggtgaacatgcacgtgtgcatactcaccatatgggactagccccttgaatccctccccacttttgtctctaatgccaccctaagggaggggacgaaaggataaaccactggacaaggactcctctaagtccttgaattggagccagagaaagacttggcaaagtagagtgtggcaaggagagggagcccatgagatgagctgagacaggggctttgtgatggtggccttgcgtgagagtggcgtcccaggctcttagacctttgcctgagctggggagatgccctgcaggcaggactgggccctggaaagcccagctccctctgaaggagagctctacttctctgctgtccccttcttcctctctcttctccttctaaggggtgcaggtccctcctactcttcgtgctcatacctcttagtgaaggcaggctgattgtaccctgagggcaggagctgtgtcttatttgtctttcatcctagagccaggtccaccacctggcaccctgtaaaccccccttaagggtttgttccattacaaaaggaaaagctagatattatcccttgaaggcagtggggacctgagtgagctcaggaggcagaagaggagatcttagacccagtgaccccttgcataggtagatgtgagtgtgcaaagatgtgctgtgggcataatcctaggaagggatagatgtgtgaggggtgaggctagcctgtgggtgggctctgtccttccctgacctcagcccaacctctactgtgtgcctctgcaggctcggatggcgggtgagcgaggagccagtgctgtcctctttgacatcactgaggatcgagctgctgctgagcaggtacccagggacatttgcgtgttcaaggtgggggctggatggaggaagataaagctctcaggggagagggaagggcagggagaagtcacagcagccctgtgggcactttccccctgtagctgcagcagccgctggggctgacctggccagtggtgttgatctggggtaatgacgctgagaagctgatggagtttgtgtacaagaaccaaaaggcccatgtgaggattgagctgaaggagcccccggcctgggtaagcacactagacctccagaccttgccctgcacttagccctactttgtcctgtggcaactcccaccaaaagcccttagactcctggagctgagagagatcctggaaaccctctagtccaacttcatccatcagctgtgtgcctctgggcaagttttcccccgtctttgggcctcacctacagaatgaacagatcaggacagatgagttctaaagttctttacagctctgtggcttcatggcatggaatagcagagctagaatgaaaccctggtcccctgatccatgacccctgattggggcttctctactggccaagaacctcatccagcggctcactggcaagaaactcccaccttgcagaggggtccctttctcttttttccccaagcacatgggttttgagatagtacttctcccagtgacatctggaagatcctctctgagtgcccttgggcagggagggcccacctaatcccacttgcaggttcctctccatcccctcagatggaggactcaagggaacctccagttagctatgtgcctcccgggctcctgtgtttcctcccgaattgacccagctcatcccggaagtatgaccctttccctctctgctcactccccagccagattatgatgtgtggatcctaatgacagtggtgggcaccatctttgtgatcatcctggcttcggtgctgcgcatccggtgccgcccccgccacagcaggccggtgagcagtgtggggtctttggcggcggtgaacgtgtgcgtgtgtgtgggtgggtggttagggagaaggaaggagtacgtgaagaaggcacctttatacctatggaaccatttacatcaaaataccccagcgtctgtctttgttgatttccagcagcctctcctcatattactcatccattcaacaaatacaccaagctctattatgtgtcaggcactgttccaggtgctgagggtagtacagtgaacaagatgacaaaaaactcctaccctcaaagagcttttttattctagagggaaaaaacagacaataaacagactaaataagtaaaatctataatgttttagatggtgatatgtactacggagaaaaaatgataatgctgatagcaaagtggggagggagggaatgcaagggaacaaggttttttttttttgtttgtttgtttgtttgttttgagacagagtcttgctctgtcgcccagggtggaatgcagtggcgtgatctcggctcactgcaatctctgcctcctgggttcaagcaattctcctgcctcagtctcgcgagtagctgggagctactaatttttgtatttttagtaaaaattaacagggttaatttttaaaagcaagtccagagaaggccacattgagaagatggcattgcagcaaagaccctaaatgggagagggagtgatctgtgcaggtatctgaggagaaagggatctaggcagagagaacagtaaatgcaaaggccttaaggcagaaatgtgtctagtgtatctgaggaacagcatgaaggctgtggctggaacagagtgagacggcagagtagctggtgggggccccgttgtattggactgttgaggccatttgttttttactgtgggtgaaacaggagccactggagtgttgtgagagaaagggcatcacgatctgactgaagttttaatatgatcattcctgctgttgtaatgagaatagactacagggaggcaaagctggaaacagagaaaccatctaagaggctattgcaggaatccaggtgacagtaatggtagcttggattaggaaggcggcagttaaaatggtgagcaatagttaggctctgggtatattttgaaggcaaagccaacagatttagtaatggattgattgtgggatatgagaggactcaaggacggcaccaagatttttggcctgagcaattaagagaatggaattgccatttgctataatggggaagacggggaagacaggtatgtggttggagatgaacccatggttaataagatgaggcctataagtttgaaatgcttattagatatccaagttgaaatgtcaagcagcggttggataaaaagtttctctcatgggtcatcaaaggaagaaaagctaatggtataagcaggtgggtggactgggagagcttggcatgcttggcagagccacatatgagctccgaggagacgaactcctaaggatgttcaactggccatgtgatctacctgagtgactgggaacggagtccaagcttgggtccagagagggagggaaggggagcccatgccccaatctgagccccattcctcttcccaggatccgcttcagcagagaacagcctgggccatcagccagctggccaccaggaggtaccaggccagctgcaggcaggcccggggtgagtggccagactcagggagcagctgcagctcagcccctgtgtgtgccatctgtctggaggagttctctgaggggcaggtaaggcaggtcttgtggttcacctccatgaccagactggggagattgaagctgggggaggggtgggcaggcctaggggctggtatgggtaccctggctacatctgtttcccatgtgtcctgcatgaggcagagatcagggaccagcctgaagtttggtcacttttctgaccttccagtgaaagagcactattgtttgttgagagtgtaccacgtgccaggctgcagtggtgctttggatgcattatctcattttagacccatggcaatgaagggtggggttagattcatttttttatcttcattttacagcagaaaactgtctgttaagaaagttgcccaacgtcatgcagctaagtgcaaaatccaggtctatgtgatgccaaagctcataccattcctattctactgtgaggtcttttacaagtagataatagcaaggagaggcctaagggagttgggggatgtcctgattcctggcaattcctatggctacagaagcctttggtttggaccccctctttttctccaggagctacgggtcatttcctgcctccatgagttccatcgtaactgtgtggacccctggttacatcagcatcggacttgccccctctgcatgttcaacatcacaggtaggaggtgggccaaggactcccctctgtgtaggcagacaggtctagaatgtggcttccctttgggaaagggttgcagccttgaagctggggagaaagcagaactgccaccatagttgtatgggctgtacactgctccagagtgcctcactcgaggggaagcgtcattcaaaatgtaaatatctttatttatttattttttaattttaatttttattttttgagacggagtttcactctcattgcccaggctggagtgcaatggcgtgatctcggttcaccgcaacctcctcctcctgggttcaagcgattctcctgcctcagcctcccgagtagctgagattacaggcatgcgccaccatgcctggctaattttgtatttttagtagagacggggtttctccatgttggtcaggctggtctcaaactgctgacctcaggtgatctgcctaccttggcctcccaaagtgctgggattacaggcgtgagccaccgtgcctggcatgtagatatctttattattattattattattattattttttgagttggagtctcgctctgtcgcccaggctggagtgcagtggcgcgatcttggctcactgcaagctccgcctcccaggttcacgccattctcctgcctcagcctccggagtagctgggactataggcgcccgccaccatgcccagctaattttttttttttttggacttttagtagagacagggtttcaccatgttagccaggatggtctcgatctcctgaccttgtgacccgcccgccttgtcctcccaagtgctgggattacaggcatgagccaccgcgcccggccgtagataatctttattattgtaaaaattatttgtatttcatggcaagtttgttgattctaaatctgggtgatttatatgtttattattccaattttctggcaataaaatattctattctaacaaaatcagtatgttaacataattttctaaaagatgaaagtgaaataaatatcttgaggaaagagaacctttttctaaggtacccacaggtgccctatgggctaacagtggccctgggtgaaagagctccaaatggctgaggggaggtttagggattgacacgcatagtggccctcccagggcaggcaacctgactggagggaacaaaggagtcccagagcacaggcagcttaggcacgtccttgatcccccaaactctgagctcacaggctactcagggtcaaatagattagctacagccatgtctttctgaatgcattctctgtaggtttgtagagttaaacatctgtgctcttggttcttttttccagagggagattcattttcccagtccctgggaccctctcgatcttaccaagaaccaggtcgaagactccacctcattcgccagcatcccggccatgcccactaccacctccctgctgcctacctgttgggcccttcccggagtgcagtggctcggcccccacgacctggtcccttcctgccatcccaggagccaggcatgggccctcggcatcaccgcttccccagagctgcacatccccgggctccaggagagcagcagcgcctggcaggagcccagcacccctatgcacaaggctggggactgagccacctccaatccacctcacagcaccctgctgcttgcccagtgcccctacgccgggccaggccccctgacagcagtggatctggagaaagctattgcacagaacgcagtgggtacctggcagatgggccagccagtgactccagctcagggccctgtcatggctcttccagtgactctgtggtcaactgcacggacatcagcctacagggggtccatggcagcagttctactttctgcagctccctaagcagtgactttgaccccctagtgtactgcagccctaaaggggatccccagcgagtggacatgcagcctagtgtgacctctcggcctcgttccttggactcggtggtgcccacaggggaaacccaggtttccagccatgtccactaccaccgccaccggcaccaccactacaaaaagcggttccagtggcatggcaggaagcctggcccagaaaccggagtcccccagtccaggcctcctattcctcggacacagccccagccagagccaccttctcctgatcagcaagtcaccagatccaactcagcagccccttcggggcggctctctaacccacagtgccccagggccctccctgagccagcccctggcccagttgacgcctccagcatctgccccagtaccagcagtctgttcaacttgcaaaaatccagcctctctgcccgacacccacagaggaaaaggcgggggggtccctccgagcccacccctggctctcggccccaggatgcaactgtgcacccagcttgccagatttttccccattacacccccagtgtggcatatccttggtccccagaggcacaccccttgatctgtggacctccaggcctggacaagaggctgctaccagaaaccccaggcccctgttactcaaattcacagccagtgtggttgtgcctgactcctcgccagcccctggaaccacatccacctggggaggggccttctgaatggagttctgacaccgcagagggcaggccatgcccttatccgcactgccaggtgctgtcggcccagcctggtgagttttcagagggaagtgggtgtggtagggagaggagactacagctgaatatttcaggacaggtgaagtcagccaacaaagggttgatggaagctgagaaggatacagcagagatgacaaccaaaatacttaaccatcgggacagcgtatcatgctggctagagtgcaggaacaccccacctctgccaggtgctacccctttagttggcagatcacagggaggtcccagggaggtgctggtgtggctgaggcatcagaaaggcacttggaaggccgggtgtgatggctcatgcctgtaatcccagaactttgggaggcctaggtgggtggatcccttgaggccaggagttcaagaccaacctggccaacatggtgaaaccctatctctactaaaaatacaaaaattagccgggtatggtggcgggcacttataatcccagctactcaggaggctgaggcaggagaatcgcgtgaacctaagaggcggaagttgcagtgagccaagatggcgccactgcactccagcctgggtaacagggtgagactccatctcaaaaaaaaaaaaaaaaaaaaaaaaagaggcatttggaatggtccccggggtagtagctcaaacataagtgtttctaaattttaataactggtttagttctaccaatgctcacagctcagtattagttctaaatacaaagaaggctaagaagtgttcctcggggggagctatagtagaaataattacacataaccataatacgaggctatataagaagagctatgtgaacaacgagaaaaaagagagagagagaaaccacaggtggttcccagcagccctgtggagccttaggttttcttctcttcccctgtggtaaaagaacaaggaggacttcccttcaacacatcattattaataagactgaccttaatttcttggggattcagtgcatccctatatcataagcagtgatcacgtaaattctcaactttaacatggtgtttacttgcccacatatctctcttttccattcaggaccttccaccttctactcttccccatcttcccccattgtatggatgacacagttctttgtctacagccatcactagaacccttccaacccaggaggtgacacaaaggtcctgaaatattcttcagtgtaggaattcttcctgcaggacctaggagctgccctcatccaattcattcatttattcatttcctttctccttccttcctttttttccttctgactatatgcctgctttgtgctaggttccaggctaggctctgaagacatggaacttgccaatcaggacatccaggtccatggggagagagccatgtactgcaagctttggctatgtgtttgtgattccatttggaccctattgtgtgtgtactttgagtgctgccagtaccacaccactatctcccttttctctcaaactcagaactagtttcagtgcctctctttttcttgcctttcacatctaatcagtgccagattctgttaactgtatcttggctagctttatcatgttcttttcaagtccagtactgatggccctgccagtgtcttaggtataccctaaagatccatgcaggagcctcctagctcttcccttccctcttacagggcctcgaaggctgagtgctgcccatccagtatgtcccataaagttgtgcaccacagctccactgctcacctaccctccctattgctgccagcgtcatctgccttacactaaactgtccagaaatcttcaaatgttctgtttgtccacagagaggaaaaatccaacctgctttggcctcaaaggttcctgcaccagccagcccccatcttccttctcaaccttattttctattctcttccctcccttccccaggcccatgctttagccaaactgggtaaacaattcttgtagttcctgtagcccagaatattctcctgccttctctattcccataaatctaattcttacctattcctacagaatcagctcatttatccccacttccaggaagcttttcctgattgctgcacttggacctggtctctctccttccttaatgcatctctcgtgactcctgtcctgtcccactggcgtaatggccatttgttttcatactttctctccaaaaaggttaccaggtccctgcttattctttttggtcttctatttggcacgtggtagcagaccaaattcacaacgaatccttaatatttattgggtgaataaatgaatagtaagtattggtaacacactggttgctatatatatttctttagatttgtttttctctcccctgtgtcccaactggggcccccttagctttcaatctaaccaccctttccagacagtctctgcttctccctccctgtggtcccctctcagccacactctgctgcaggcgagagaagcaggtccctggcctgaccctcaatgacctctttcctccccgctctctaaatacaggctcagaggaggaactcgaggagctgtgtgaacaggctgtgtgagatgttcaggcctagctccaaccaagagtgtgctccagatgtgtttgggccctacctggcacagagtcctgctcctgggaaaggaaaggaccacagcaaacaccattctttttgccgtacttcctagaagcactggaagaggactggtgatggtggagggtgagagggtgccgtttcctgctccagctccagaccttgtctgcagaaaacatctgcagtgcagcaaatccatgtccagccaggcaaccagctgctgcctgtggcgtgtgtgggctggatcccttgaaggctgagtttttgagggcagaaagctagctatgggtagccaggtgttacaaaggtgctgctccttctccaacccctacttggtttccctcaccccaagcctcatgttcataccagccagtgggttcagcagaacgcatgacaccttatcacctccctccttgggtgagctctgaacaccagctttggcccctccacagtaaggctgctacatcaggggcaaccctggctctatcattttccttttttgccaaaaggaccagtagcataggtgagccctgagcactaaaaggaggggtccctgaagctttcccactatagtgtggagttctgtccctgaggtgggtacagcagccttggttcctctgggggttgagaataagaatagtggggagggaaaaactcctccttgaagatttcctgtctcagagtcccagagaggtagaaaggaggaatttctgctggactttatctgggcagaggaaggatggaatgaaggtagaaaaggcagaattacagctgagcggggacaacaaagagttcttctctgggaaaagttttgtcttagagcaaggatggaaaatggggacaacaaaggaaaagcaaagtgtgacccttgggtttggacagcccagaggcccagctccccagtataagccatacaggccagggacccacaggagagtggattagagcacaagtctggcctcactgagtggacaagagctgatgggcctcatcagggtgacattcaccccagggcagcctgaccactcttggcccctcaggcattatcccatttggaatgtgaatgtggtggcaaagtgggcagaggaccccacctgggaacctttttccctcagttagtggggagactagcacctaggtacccacatgggtatttatatctgaaccagacagacgcttgaatcaggcactatgttaagaaatatatttatttgctaatatatttatccacaaatgtggtctggtcttgtggttttgttctgtcgtgactgtcactcagggtaacaacgtcatctctttctacatcaagagaagtaaattatttatgttatcagaggctaggctccgattcatgaaaggatagggtagagtagagggcttggcaataagaactggtttgtaagcccctaaaagtgtggcttagtgagatcagggaaggagaaagcatgactggattcttactgtgcttcagtcattattattatactgttcacttcacacattatcatacttcagtgactcagaccttgggcaaatactctgtgcctcgctttttcagtccataaaatgggcctacttaatagttgttgcaggacttacatgagataatagagtgtagaaaatatgttccaaagtggaaagttttattcagtgatagaaaacatccaaacctgtcacagagcccatctgaacacagcatgggaccgccaacaagaagaaagcccgcccggaagcagctcaatcaggaggctgggctggaatgacagcgcagcggggcctgaaactatttatatcccaaagctcctctcagataaacacaaatgactgcgttctgcctgcactcgggctattgcgaggacagagagctggtgctccattggcgtgaagtctccagggccagaaggggcctttgtcgcttcctcacaaggcacaagttccccttctgcttccccgagaaaggtttggtaggggtggtggtttagtgcctatagaacaaggcatttcgcttcctagacggtgaaatgaaagggaaaaaaaggacacctaatctcctacaaatggtctttagtaaaggaaccgtgtctaagcgctaagaactgcgcaaagtataaattatcagccggaacgagcaaacagacggagttttaaaagataaatacgcatttttttccgccgtagctcccaggccagcattcctgtgggaagcaagtggaaaccctatagcgctctcgcagttaggaaggaggggtggggctgtccctggatttcttctcggtctctgcagagacaatccagagggagacagtggattcactgcccccaatgcttctaaaacggggagacaaaacaaaaaaaaacaaacttcgggttaccatcggggaacaggaccgacgcccagggccaccagcccagatcaaacagcccgcgtctcggcgctgcggctcagcccgacacactcccgcgcaagcgcagccgcccccccgccccgggggcccgctgactaccctacacagcctccgccgcgccctcggcgggctcaggtggctgcgacgcgctccggcccaggtggcggccggccgcccagcctccccgcctgccggcgggagaaaccatctcctctggcgggggtaggggcggagctggcgtccgcccacaccggaagaggaagtctaagcgccggaagtggtgggcattctgggtaacgagctatttacttcctgcgggtgcacaggctgtggtcgtctatctccctgttgttcttcccatcggcgaagatggccctggagacggtgccgaaggacctgcggcatctgcgggcctgtttgctgtgttcgctggtcaaggtgtcagtcggggacctggttgtagggcccatgggggaccaaggtcggggaaagagggcggaatggggctgtgggacagtaaagagaaaagttaagtctcagaactcagaggtggcagggggagtgagaagccgaaggaggccatcgtttacctcgtaggatcgcggacaggtcttgcagctgagggcaggggcggtcttacatgcctttgaatcctcagctcttagacgttcggtgaacttacgttggagccgaaagacactgggagtcagaggcgggtggggatccgctgctgagtgagtagtcggaaaggatgcctgaccctgagtagactagagaaaggaatagataaaacggaattgggaacgagagaggaaggagtgggagggtgggacttaggaatgaagctttgagagtagtaggtggggaaccttaggatacacagtcaacatagggaaacaagaaattgagcaggtcgaagtattgagaaagctactttttctcttggtcttgttcatgcttatctctccttttcctttatttttctttcactcccagactatagaccagtttgaatatgatggttgtgacaattgtgatgcatatctacaaatgaagggtaaccgagagatggtatatgactgcactagctcttcctttgatgggtaagccgcttcagtttccatcattcacttctgcattacccaacctgcacccagagaagtaaatgcagggcaagtgttaatcctagttgggcccagccattcgtttttgggggttattttgtgtgggtttttttttttttttttttttttgaatcagggttttgctctgtggctcaggctggagtgcagtggcatgatcatagctcactgcagcgtggaatgatcctctgacttcaacctcccagagtgctgggattataggtgtaagccactgtgtccagcctcaacagttattttgggacatactagtgctatgcatctaatacagtgaccactatccacgtgtagctactgagcacttgaaatgtgtctagtccaaattaagacatgcttttaagtataaaatataccccagatttcaaagacttaacatgagaagaaagaatgtaatcttaataatgtttgttaaatgcatgaaaattttttttgaaaatgaagggaagggaggtgtagtaatggtagatcattgcccaaaagctgttgctttttttttttttttttttttggacagacttttcgcccttgccactcatgctggagtgcaatggtgcagtctcggctcactgcaacctctgcctcctgggttcaagcaattctcctgcctcagcctcttgagtagctgggattacaggcacccaccaccactcccagctaatttttatatctttagtagagacggggtttcaccatgttggccaggctggtctcaaactcctgacctcaggtgatctgcccacctcggcctctcatagtgctgggattacaagtatgagtcaccatgcccggcccattttagccattttacttatttatttatttatttatttatttgagatggagtctcgctctgtcgcccaggctggagtgcagtggcgcaatctcggctcactgcaacctccgcctcccaggttcaagcagttctctgcctcagcctcctgagtagctgggattacaggcacctgccaccatacccagctaatttttgtatttttagtagagacggggtttcaccatgttggtcagactggtcttgaactgctgacctcgtgatccacccgcctcggcctcccaaagtgctgggattacaggagtgagccacagcgcccggctgcaatggcacgatctcagctcactgcaacctccgcctcctacctcagcctcctgagtagctgggattacaggcgcccaccaccacgcccagctaatttttgtactttttttagtagagacagggttttgccatgctggccaggctggtctcgaactcctgacctcaggtgatcctcccgtctcagcctcacaaagtgctgggattacaggcatgagccactgtgcccggtcgccatttctaaatacacaattcagtggcattagtgcatactcactgttgtgcaaccgtcaccaccatccatctccagaacttttttcatctgtacccattaaacactagctcctcgttctctcctccctcctgtccctgacaaccaccatgctttgtctctatgaatttggccaccttaggcacccttaggtacctatgggctcattcagtagcattttgtagcttctttcacttaacataatgtcttcaaggttcattcatattgtagtatgcaacagaatttccctcctcttttgagctgaataatattcccttgtatgtgtatagcatgttctgctgcccattcattcatcaatgatatcttgggttgtttctcccttttggctatttgtgaataatactgctgtgaacattggtatacaaatatgtgttcaagtccctgcttttcattattttcagtacagatgcacctcaacttccgaggagttacaacctaataagcccatcataagttgaaaatataagccaaaagtgcatttaacacacccaacctactgaatataataagttagcctacttcaaatgtgctcagaacgcttatgttactgtggctgaccagaagctgtggctcatggctgctgcgcagcatcatgacagaatattgtactgaattgctagcctggaaaagaacaaaatttaaaatttgaaaacgatttctattgaatgcatgtcacttttgcaaaatcataaatttgaaaaatcataagttgaactaaggtaagtcagggatcatctgtatatccacaagtgaaattgctagatcatatgatagttcagtgtttaattttttgaggaactgtcatactgtttagcaactgcaccattttccattcccaccaacagtgcccaaaggttctaatttctccccatcctcaccaacacttaattatttattaataatagccatcctgatgggtgtgactttggtgtcccatttcccccaatgaatggtgatgttgagcctcttaggtgcttatagccatttgtatatctttggagaaatgcctattcaaggcctttgctcatttttgacttcagtttggtttttttgttgttaggttgtaggaattatttgtataattctagtgcatattaggtcttaaagagtgggcaaattaaagatcggaagagggctagatgacctcaaccagaattggaagaggtagtactttcctcttaaggcaagaagtttgggatttttgaggaagttgaggtgagagagagagagaacattccaaataaagggagtgactagagcaaaggcttaggatgggaaaaaccaggatgtttttggagaacagtgggaattctgtttaggttaaatcataaggttgggctgtagggaccctaaggctaaaaagatagattgcaaaggacagagaagaatatacttgtggtcaggaggatggcctgcatacatgcctatctcccatcaggctgcagggctgggggctagtgttctgcttgtcacccctggaggtagggtcggttccacttaacagcgcatggctgagaatgtaggatttggatgggaagggaatcttctcaaataagaatccaagattgttactgagagaagaggggaggcatattgaggcagtcaacaaatgtcagtgcttacacccacacaataggcagtcagtaagcatttgattgaatgcgttgaatgacaaaaatgcttacccatcttgctcaagcagcatcttctagcccttgaatagccttaccattcctctggaatcacagctacctgggaaggactattaggataatgaggagagctaatgcttatttagcacctactctgtgctagtctttgtgctaggtgtttttcatgtattatctcaacctttgagtctcagcttactgatgaggttctgagaagggaaccccacatgtataggtcattagaggggtccccatatgtataggtcattaagaggaaaagtttagccaagttgaactcctttctagtaggaggatccgttgttttcactcaccctcctctttgcactaggccctagaccccttgtagttgtgttagttgtaactattggaccccttgtcctaaagccgtctcattttctagggaatgttaggctaaggatgtttgtgagctgagtgagataatcttttggggatggaaactgacctgtggctggccggccaaggacataagaatgaagaacttttgtcagtcctagctttgagtcagcctcatcccaacatcagaaggcagttttgccagctttccagtggagactcggtacttggctttttcctagattcctctctcagaattgagctcaggcccagggaggctcaggctgactctccatttcttttccctccctagaatcattgcgatgatgagtccagaggacagctgggtctccaagtggcagcgagtcagtaagtgttggcctgtctccttttggcttagttgtagtgttgttactgttcctcaggtccattagggagtctcaaatcagcaagatgagtgacctcagggtgggaaagatcgggttgtaggaaacacagggaagcagtgtcctgtgccttgtcatttaacacttgtagccaaaagagggaatagctcttctcttggagttgcatcacttctttagcttaagcttccatttgatcttgagtcttaactaacttcactgtaatcttgtatcttttttcttctctctcaggtaactttaagccaggtgtatatgcggtgtcagtcactggtcgcctgccccaaggtaataataatcataacagccaatgttcatttactgtaaagctctgtggaagtttttttatctgaattaatgccaattctcacattctatgaggttcagcattttacagatggggggaaccaggcacagagaggttaaatcacttgctggaggtcaccaggtagtaaatgaggagccaggattggaatccaggcattctggctccagaatttttgctgtttctgttttttattttttttagagacaaggtctcactatgttgcccaggctggactctaactcctgggctcatgtgctcctcccacctctgcctcctgagtagctgggactacaggtgcttggcttagaacctttgcttttgatgactacatgtatccctctttttcttctcattcttaccgaatacctgcctgggtcttcactagtaatgagtcaactaagcaggacctttttttttttttttttttttttgagacagagtctctgtcacccaggctgaagtatagtggcattatcagagctcactgcagccttgaactcatggattcaagggatcctcccgcctcagcctcccaaatagctggcactacaggtgcaagccactacacctggctaatttttaaaatttttttgtagagatggggccttgctctgtagcccaggctagtcttgaactcctgacctcaagtgatccaccttgacctcccaaagtgctgagattgcaggcatgagccaccgtgcctggccaagcagacgattgataagtagtctaggaactccagtttgcttatagtacccccctcaaggtggcagctgagtggcctatcttacccttctgaatcttacctcacagaactgtttcttttcctgcttcaggaatcgtgcgggagctgaaaagtcgaggagtggcctacaaatccagagacacagctataaagacctagcaagatgcaaggctgccagcatctttgctctccacctcctgcctctgcttatttcttgttctggaactaaatgaacagaacttcaaatacttcctaccctccaattcagactcagctgactgttgagagagcagcacatcattttatcattttatcttctttggactacaggtggggtgggagggatttgggttggtggattaacagatggaattgaggagagagtaggatgctgattttcctacccgtggcccaggtctgtgccttccccatgccaaggactctaggtcaaatgtcaataaatatgaacctcgagaaagttctgaaggccatgacacctgccttgcctccctcttccattctcttaggcacagtaatagcttatttgccctataagaaccttcccagagcagcagaggcccttctactccctcttgactgtctcagcctctgggattgcagcctttgtagtgtgcttccttgcttcctatcagagggtgctgatccagaggctcagtaaccccatcaacttggtggccctggtgtctcacacttgtatccttctgccctcgagacctggcacagcagtatcccttgaagaaatcctgaggctttgtagagtgctccttgaccatgtttaataattcttccctcccctgcttgtctattttcttctcttcacggctcttcctataccttaggccagtctcaagcactcactggagacccttgggccttgggcgaccattgagtcctagtctcccttgtttgtgcccctgtaggaggtaggtccttttctcctccggcctagtaggggaccttgggtaacatcccatttttcggccaaggtgagttgttttaggataaaaaaatttaccacaaattctcatttaaatttccacagaaatcctgttcgtatccccattttgatttccctaagttccttgttctccctctaaaaagagaatgattgcaccctgcctgtttacctcaggattgttgtgattgtagaaacgaagctatgtgaaaattatataagtattataaaggtgaaatacttttgctctcctttttgggccatttttcaatacatagaatatgtgcacaatcagccaaaatagtaggggaaatgctgagaaccacaactgcagggtgagctgtgctgtgctagggcagagctgcctgtgctagggctttgtgtctcagccacctggtgttgctcttgagttgattttgcttgttacctgtggcctggagagtgtgggaaggaggagagatgcgacctgactctgattagtttgtctactccccttccttgtcctcacataggcctatgggagggaaactgggactggccgggctgctcatgtccactatggtcttcaaaccaaaaccattttctctggtgccttcaagctctgagggaatggtcagataaccccaactccaaactgagtttctcaaggatttccccagcccagcaaacagaaagctccgtgggtggtgatttctgttcaatttcaacctgaaagcaaccctgccaggctagagcttacgtcctggatggaagaagtgcgtttcagcaagtgcccaggctgtgcagccaacacccaactttcactagcttctcaaaaagtcccttggaaagccccagctgctgtcctgggtgtctgacccggacgtggctgcttggtgagaatggaaacagttgtggggaggggaggcaagaggagcttgcacaaataaccacattcaggctgcctcagccctacactgaactgggccctaactgacagtctcacaggaagcaaaagacatagcataggcattgatgcttgtgggggaagggtggcctgttttccttcctggactctacagactgtgccaagtgggctctccccgggagctgctgctgaattagctttcttgctttctctggtacttgaacatgcaggtggtgccactcagcaacccagacaggcagaaaggtgctggagtcccatcctctactgggaacccaaagaaactaagacaaggacttggttcacagctccctgggagtgggcggtcctggtactgctgccctgctttccatggctatgagggcagccatgagagctatgtcctgccccattggcccattgtgtctgtcagagtttcagtcccgtcctggctgccgaagttctgagtgcatagcatcttaagatctctccttgtcttgctcagtagtttggcttctctcctgaagagcaagcctcctccctagctcaacaaggacagatgcaagtcagacagagactaggaatagtagccaggctgccttccccttgcctgcccttgcctcattccctgcttcctccctgccacatactgtggaattagggtctcccagaacactgaggagctcagtggcagtgcattgataatgcagcctccagctcaagaaaggactggtagctgatagagcaagggtcaggatggtctggtcttggaggggagcagtttcaccagggttgggaactgaggctttgctcttggtgtggcttctgccttgttactcctagtctgtctgcagcctgctacttgatcctcaggtcccctccctgacatctggtctctatgaaagaggcaggtaggtcatgtttaagaacagactaataataactttgtctggaagtctggttcatgtttagtatcagtaaagcctttcatgtaaatatttttacagttgacaaaggtgctgggtgctgtggctcatgcctctaatcccagcaccttggggaggtcaaagcgggcagatcactttgaacccaggagtgtaagaccaacctgggcaacatggcaaaagcccatctctacaaaaaattagctaggcatggtggtgtacacctgtagtcccagctacttgggaggctgaggtgggaggatcccttgagtctgggagtttgaggctgcagtgagccgtgatggcgccactgcactc

SEQ ID NO: 2923 - DNA, 3349 bp, Homo sapiens
atgagtggtggccaccagctgcagctggctgccctctggccctggctgctgatggctaccctgcaggcaggctttggacgcacaggactggtactggcagcagcggtggagtctgaaagatcagcagaacagaaagctattatcagagtgatccccttgaaaatggaccccacaggaaaactgaatctcactttggaaggtgtgtttgctggtgttgctgaaataactccagcagaaggaaaattaatgcaggcaatctgtctctctctgcagtcccacccgctgtacctgtgcaatgccagtgatgacgacaatctggagcctggattcatcagcatcgtcaagctggagagtcctcgacgggccccccgcccctgcctgtcactggctagcaaggctcggatggcgggtgagcgaggagccagtgctgtcctctttgacatcactgaggatcgagctgctgctgagcagctgcagcagccgctggggctgacctggccagtggtgttgatctggggtaatgacgctgagaagctgatggagtttgtgtacaagaaccaaaaggcccatgtgaggattgagctgaaggagcccccggcctggccagattatgatgtgtggatcctaatgacagtggtgggcaccatctttgtgatcatcctggcttcggtgctgcgcatccggtgccgcccccgccacagcaggccggatccgcttcagcagagaacagcctgggccatcagccagctggccaccaggaggtaccaggccagctgcaggcaggcccggggtgagtggccagactcagggagcagctgcagctcagcccctgtgtgtgccatctgtctggaggagttctctgaggggcaggagctacgggtcatttcctgcctccatgagttccatcgtaactgtgtggacccctggttacatcagcatcggacttgccccctctgcatgttcaacatcacagagggagattcattttcccagtccctgggaccctctcgatcttaccaagaaccaggtcgaagactccacctcattcgccagcatcccggccatgcccactaccacctccctgctgcctacctgttgggcccttcccggagtgcagtggctcggcccccacgacctggtcccttcctgccatcccaggagccaggcatgggccctcggcatcaccgcttccccagagctgcacatccccgggctccaggagagcagcagcgcctggcaggagcccagcacccctatgcacaaggctggggactgagccacctccaatccacctcacagcaccctgctgcttgcccagtgcccctacgccgggccaggccccctgacagcagtggatctggagaaagctattgcacagaacgcagtgggtacctggcagatgggccagccagtgactccagctcagggccctgtcatggctcttccagtgactctgtggtcaactgcacggacatcagcctacagggggtccatggcagcagttctactttctgcagctccctaagcagtgactttgaccccctagtgtactgcagccctaaaggggatccccagcgagtggacatgcagcctagtgtgacctctcggcctcgttccttggactcggtggtgcccacaggggaaacccaggtttccagccatgtccactaccaccgccaccggcaccaccactacaaaaagcggttccagtggcatggcaggaagcctggcccagaaaccggagtcccccagtccaggcctcctattcctcggacacagccccagccagagccaccttctcctgatcagcaagtcaccagatccaactcagcagccccttcggggcggctctctaacccacagtgccccagggccctccctgagccagcccctggcccagttgacgcctccagcatctgccccagtaccagcagtctgttcaacttgcaaaaatccagcctctctgcccgacacccacagaggaaaaggcgggggggtccctccgagcccacccctggctctcggccccaggatgcaactgtgcacccagcttgccagatttttccccattacacccccagtgtggcatatccttggtccccagaggcacaccccttgatctgtggacctccaggcctggacaagaggctgctaccagaaaccccaggcccctgttactcaaattcacagccagtgtggttgtgcctgactcctcgccagcccctggaaccacatccacctggggaggggccttctgaatggagttctgacaccgcagagggcaggccatgcccttatccgcactgccaggtgctgtcggcccagcctggctcagaggaggaactcgaggagctgtgtgaacaggctgtgtgagatgttcaggcctagctccaaccaagagtgtgctccagatgtgtttgggccctacctggcacagagtcctgctcctgggaaaggaaaggaccacagcaaacaccattctttttgccgtacttcctagaagcactggaagaggactggtgatggtggagggtgagagggtgccgtttcctgctccagctccagaccttgtctgcagaaaacatctgcagtgcagcaaatccatgtccagccaggcaaccagctgctgcctgtggcgtgtgtgggctggatcccttgaaggctgagtttttgagggcagaaagctagctatgggtagccaggtgttacaaaggtgctgctccttctccaacccctacttggtttccctcaccccaagcctcatgttcataccagccagtgggttcagcagaacgcatgacaccttatcacctccctccttgggtgagctctgaacaccagctttggcccctccacagtaaggctgctacatcaggggcaaccctggctctatcattttccttttttgccaaaaggaccagtagcataggtgagccctgagcactaaaaggaggggtccctgaagctttcccactatagtgtggagttctgtccctgaggtgggtacagcagccttggttcctctgggggttgagaataagaatagtggggagggaaaaactcctccttgaagatttcctgtctcagagtcccagagaggtagaaaggaggaatttctgctggactttatctgggcagaggaaggatggaatgaaggtagaaaaggcagaattacagctgagcggggacaacaaagagttcttctctgggaaaagttttgtcttagagcaaggatggaaaaggcccagctccccagtataagccatacaggccagggacccacaggagagtggattagagcacaagtctggcctcactgagtggacaagagctgatgggcctcatcagg

SEQ ID NO: 2924 - protein, 784 aa, Homo sapiens
MSGGHQLQLAALWPWLLMATLQAGFGRTGLVLAAAVESSAEQKAIIRVIPLKMDPTGKLNLTLEGVFAGVAEITPAEGKLMQAICLSLQSHPLYLCNASDDDNLEPGFISIVKLESPRRAPRPCLSLASKARMAGERGASAVLFDITEDRAAAEQLQQPLGLTWPVVLIWGNDAEKLMEFVYKNQKAHVRIELKEPPAWPDYDVWILMTVVGTIFVIILASVLRIRCRPRHSRPDPLQQRTAWAISQLATRRYQASCRQREWPDSGSSCSSAPVCAICLEEFSEGQELRVISCLHEFHRNCVDPWLHQHRTCPLCMFNITEGDSFSQSLGPSRSYQEPGRRLHLIRQHPGHAHYHLPAAYLLGPSRSAVARPPRPGPFLPSQEPGMGPRHHRFPRAAHPRAPGEQQRLAGAQHPYAQGWGLSHLQSTSQHPAACPVPLRRARPPDSSGSGESYCTERSGYLADGPASDSSSGPCHGSSSDSVVNCTDISLQGVHGSSSTFCSSLSSDFDPLVYCSPKGDPQRVDMQPSVTSRPRSLDSVVPTGETQVSSHVHYHRHRHHHYKKRFQWHGRKPGPETGVPQSRPPIPRTQPQPEPPSPDQQVTRSNSAAPSGRLSNPQCPRALPEPAPGPVDASSICPSTSSLFNLQKSSLSARHPQRKRRGGPSEPTPGSRPQDATVHPACQIFPHYTPSVAYPWSPEAHPLICGPPGLDKRLLPETPGPCNSQPVWLCLTPRQPLEPHPPGEGPSEWSSDTAEGRPCPYPHCQVLSAQPGSEEELEELCEQAV

SEQ ID NO: 2925 - DNA, 4381 bp, Homo sapiens
tgatctgacataatacaaattcacgaagtgacattcaatcacaagcaaagttggaaattccaaagagaagtggtgagatctttactagtcacagtgaagatgggagaaaatgacatacctgcagcagatgtgggctgaaaatatcctcttctctgcccaatcaggaatgctacctgtttttgggaataaactttagagaaaggaagggccaaaactacgacttggctttctgaaacggaagcataaatgttcttttcctccatttgtctggatctgagaacctgcatttggtattagctagtggaagcagtatgtatggttgaagtgcattgctgcagctggtagcatgagtggtggccaccagctgcagctggctgccctctggccctggctgctgatggctaccctgcaggcaggctttggacgcacaggactggtactggcagcagcggtggagtctgaaagatcagcagaacagaaagctattatcagagtgatccccttgaaaatggaccccacaggaaaactgaatctcactttggaaggtgtgtttgctggtgttgctgaaataactccagcagaaggaaaattaatgcagtcccacccgctgtacctgtgcaatgccagtgatgacgacaatctggagcctggattcatcagcatcgtcaagctggagagtcctcgacgggccccccgcccctgcctgtcactggctagcaaggctcggatggcgggtgagcgaggagccagtgctgtcctctttgacatcactgaggatcgagctgctgctgagcagctgcagcagccgctggggctgacctggccagtggtgttgatctggggtaatgacgctgagaagctgatggagtttgtgtacaagaaccaaaaggcccatgtgaggattgagctgaaggagcccccggcctggccagattatgatgtgtggatcctaatgacagtggtgggcaccatctttgtgatcatcctggcttcggtgctgcgcatccggtgccgcccccgccacagcaggccggatccgcttcagcagagaacagcctgggccatcagccagctggccaccaggaggtaccaggccagctgcaggcaggcccggggtgagtggccagactcagggagcagctgcagctcagcccctgtgtgtgccatctgtctggaggagttctctgaggggcaggagctacgggtcatttcctgcctccatgagttccatcgtaactgtgtggacccctggttacatcagcatcggacttgccccctctgcatgttcaacatcacagagggagattcattttcccagtccctgggaccctctcgatcttaccaagaaccaggtcgaagactccacctcattcgccagcatcccggccatgcccactaccacctccctgctgcctacctgttgggcccttcccggagtgcagtggctcggcccccacgacctggtcccttcctgccatcccaggagccaggcatgggccctcggcatcaccgcttccccagagctgcacatccccgggctccaggagagcagcagcgcctggcaggagcccagcacccctatgcacaaggctggggactgagccacctccaatccacctcacagcaccctgctgcttgcccagtgcccctacgccgggccaggccccctgacagcagtggatctggagaaagctattgcacagaacgcagtgggtacctggcagatgggccagccagtgactccagctcagggccctgtcatggctcttccagtgactctgtggtcaactgcacggacatcagcctacagggggtccatggcagcagttctactttctgcagctccctaagcagtgactttgaccccctagtgtactgcagccctaaaggggatccccagcgagtggacatgcagcctagtgtgacctctcggcctcgttccttggactcggtggtgcccacaggggaaacccaggtttccagccatgtccactaccaccgccaccggcaccaccactacaaaaagcggttccagtggcatggcaggaagcctggcccagaaaccggagtcccccagtccaggcctcctattcctcggacacagccccagccagagccaccttctcctgatcagcaagtcaccagatccaactcagcagccccttcggggcggctctctaacccacagtgccccagggccctccctgagccagcccctggcccagttgacgcctccagcatctgccccagtaccagcagtctgttcaacttgcaaaaatccagcctctctgcccgacacccacagaggaaaaggcgggggggtccctccgagcccacccctggctctcggccccaggatgcaactgtgcacccagcttgccagatttttccccattacacccccagtgtggcatatccttggtccccagaggcacaccccttgatctgtggacctccaggcctggacaagaggctgctaccagaaaccccaggcccctgttactcaaattcacagccagtgtggttgtgcctgactcctcgccagcccctggaaccacatccacctggggaggggccttctgaatggagttctgacaccgcagagggcaggccatgcccttatccgcactgccaggtgctgtcggcccagcctggctcagaggaggaactcgaggagctgtgtgaacaggctgtgtgagatgttcaggcctagctccaaccaagagtgtgctccagatgtgtttgggccctacctggcacagagtcctgctcctgggaaaggaaaggaccacagcaaacaccattctttttgccgtacttcctagaagcactggaagaggactggtgatggtggagggtgagagggtgccgtttcctgctccagctccagaccttgtctgcagaaaacatctgcagtgcagcaaatccatgtccagccaggcaaccagctgctgcctgtggcgtgtgtgggctggatcccttgaaggctgagtttttgagggcagaaagctagctatgggtagccaggtgttacaaaggtgctgctccttctccaacccctacttggtttccctcaccccaagcctcatgttcataccagccagtgggttcagcagaacgcatgacaccttatcacctccctccttgggtgagctctgaacaccagctttggcccctccacagtaaggctgctacatcaggggcaaccctggctctatcattttccttttttgccaaaaggaccagtagcataggtgagccctgagcactaaaaggaggggtccctgaagctttcccactatagtgtggagttctgtccctgaggtgggtacagcagccttggttcctctgggggttgagaataagaatagtggggagggaaaaactcctccttgaagatttcctgtctcagagtcccagagaggtagaaaggaggaatttctgctggactttatctgggcagaggaaggatggaatgaaggtagaaaaggcagaattacagctgagcggggacaacaaagagttcttctctgggaaaagttttgtcttagagcaaggatggaaaatggggacaacaaaggaaaagcaaagtgtgacccttgggtttggacagcccagaggcccagctccccagtataagccatacaggccagggacccacaggagagtggattagagcacaagtctggcctcactgagtggacaagagctgatgggcctcatcagggtgacattcaccccagggcagcctgaccactcttggcccctcaggcattatcccatttggaatgtgaatgtggtggcaaagtgggcagaggaccccacctgggaacctttttccctcagttagtggggagactagcacctaggtacccacatgggtatttatatctgaaccagacagacgcttgaatcaggcactatgttaagaaatatatttatttgctaatatatttatccacaaatgtggtctggtcttgtggttttgttctgtcgtgactgtcactcagggtaacaacgtcatctctttctacatcaagagaagtaaattatttatgttatcagaggctaggctccgattcatgaaaggatagggtagagtagagggcttggcaataagaactggtttgtaagcccctaaaagtgtggcttagtgagatcagggaaggagaaagcatgactggattcttactgtgcttcagtcattattattatactgttcacttcacacattatcatacttcagtgactcagaccttgggcaaatactctgtgcctcgctttttcagtccataaaatgggcctacttaatagttgttgcaggacttacatgagataatagagtgtagaaaatatgttccaaagtggaaagttttattca

SEQ ID NO: 2926 - protein, 777 aa, Homo sapiens
MSGGHQLQLAALWPWLLMATLQAGFGRTGLVLAAAVESSAEQKAIIRVIPLKMDPTGKLNLTLEGVFAGVAEITPAEGKLMQSHPLYLCNASDDDNLEPGFISIVKLESPRRAPRPCLSLASKARMAGERGASAVLFDITEDRAAAEQLQQPLGLTWPVVLIWGNDAEKLMEFVYKNQKAHVRIELKEPPAWPDYDVWILMTVVGTIFVIILASVLRIRCRPRHSRPDPLQQRTAWAISQLATRRYQASCRQREWPDSGSSCSSAPVCAICLEEFSEGQELRVISCLHEFHRNCVDPWLHQHRTCPLCMFNITEGDSFSQSLGPSRSYQEPGRRLHLIRQHPGHAHYHLPAAYLLGPSRSAVARPPRPGPFLPSQEPGMGPRHHRFPRAAHPRAPGEQQRLAGAQHPYAQGWGLSHLQSTSQHPAACPVPLRRARPPDSSGSGESYCTERSGYLADGPASDSSSGPCHGSSSDSVVNCTDISLQGVHGSSSTFCSSLSSDFDPLVYCSPKGDPQRVDMQPSVTSRPRSLDSVVPTGETQVSSHVHYHRHRHHHYKKRFQWHGRKPGPETGVPQSRPPIPRTQPQPEPPSPDQQVTRSNSAAPSGRLSNPQCPRALPEPAPGPVDASSICPSTSSLFNLQKSSLSARHPQRKRRGGPSEPTPGSRPQDATVHPACQIFPHYTPSVAYPWSPEAHPLICGPPGLDKRLLPETPGPCNSQPVWLCLTPRQPLEPHPPGEGPSEWSSDTAEGRPCPYPHCQVLSAQPGSEEELEELCEQAV

SEQ ID NO: 2927 - DNA, 115343 bp, Mus musculus
  misc_feature (1)...(115343): n = A, C, G or T/U
acagacttgaactgtgccgcgggcaagaggagcaagccctgcaagctaaatgtagaggttgctgaggggctggtccccaggacccaaatctccttgtggtcctcttgtcccaaaaggcttagtactaactcaggaagaggagggtctctctctcttctctcttctctctctctctctctctttcttacccttctctctcctttctctcctcccctcctttctctcctccacctccatagtcctgctctccagccctaaccaatctaactggcctccaactgtgagccattatacctgacttgtttgtctcatgaagagctacctgctgaatgagcactccctcagacactcactgctttggaactatgttgggcaacttaagtgaggctcttccacaaaagaagaagacatttgctgagtggtggtggcacacgcctttaatcccagctctcgggaggcaggggcaggtggatttctgagttcgagaccagcctggtctacagagtgagttccaggacagccagggctacacagagaaaccctgtcttaaaaaagcaaaacaaaactgaaaaagacattttttccatttctactagtgcttgaggaccaatgagctccaggaagcaagaatgggaggcgcctgcttcccttaaggaaggaaggaaggaaggaaggagctttcctccaggatgtcatagtctctgtggcacctgttccaagtctcagtcaaaactgttcatccacccaacctactgtcactctattttatctcctctttctctgtctctctgtttctgtctctttctccctccatccttctctccttccctccctccctccttccccatgttctcatgtacctcaggctggcctcaaattctctaactagccaaggatcatcttgtattctttctcagaacaaaataagaatggcaaaaggcagaacaggcttccgtcgttgaatatgaaaccagcgagccataaactatacagtctgactacccacgactttgccgaaaagcagcaactgatttaacctctctgtggccagcttccttgtctgtgagacagggaggatggtggtagctgctgcagggtagctgggcagtgagtcactatgtgatggccagttcagaagcactgtgtgcttgctattaatgtcatcagcagaagtgcagtgaggtgctgggctctgggctccggatgagtctgtatctttctctaggacctcagaagacttatttcatttctctgtatctcagttccctcatctgtaatgtctgacaagcttttccctgaagattaattaacatataccaaagtgcttaaaacagagccagacacactgtaaatgttcaagaaacatcaggactggaccatcaagatggcttaaagtttacttctgacttccacatacacactgtgaccacatccatgcaggtgttcaatcatactaacacacatgcatgcacacattagaatgatgaatgtaattttaaaagctttttcaaaaggaaaatgaaaggttattctccactattcctatttcccagttattgagatggtaactatctagcctctttgccatttatagattacaaaaacagagccagggctggaaagatggctcagtggttaagagtgctggctgaagccaggcagtggtggcacacacctttagtcccagcacttgggaggcagaggcaggcagatttctgagtttgaggccagcctggtctacaaaatgagttccaggacagccaggcctaccctgtcttgaaaaaacaaaaacaaaaacaaaacaaaacaaaacaaaacaaaacagaagagtgctggctgttctttcaaaggacctgggttcaagtcctagcacccatatggaagctcacaactgtctccaattctacggtggaaggcctgatgccttttctttatatagacatacatgaaggcaaaatgccaatgcatatgaaataaaaataaatcatttaaaaatatttgatgagagaatgaatgatagaacacgaggctaagccacccagtgaggaggcggtagagaagagactcacctgtatcttggcctgaccaacatttcatgtttatcatgctctgggaaactacggggagttcaggaggtacaaaccagtcagacccccccccccccgtcttaggggaccagcgagctcttctcttgagtctgtgaattgtttgtagcacatgcttgcctccaagtttgtgtagctacctggtacggggcctcattgccttagctcttgatgtcttcaggaaagtcagagtgaaaattcctgtcaattttaaattctttttttaaaagccctgggtgccccatccacacggactatacattcggtcctttgttccacgttctagaccattccccgttgtcacatcttcctaaggcttctctcggtgtgctttgatattcaccaaccatctgccttacagaccactttgctgctctcccttcccccagccccccctccgccgcacatgtcatccatccatatctaaccagagcgcacgcccactggcaatcagatgttccctaacctctctcctctctgccctttctcatgttatgcacagaatggagatactctcatgtccattcagtcatttctgtctctcaaggctcagttagtgcctctgaggtacacctccctttctacccccagagctaaccacttcctccctgtgccccctacagaatgcatgtcacatgtcatcaaatgacatacactttgtggtattagttaccagcttcttcatatctgccttccctgtagacttagtcgcaacaacagggaggaagtactacatattttccatctttgcaatctcagtggaggcacatgagagaaacacatcagtgattatgaactcaattaaggacattctatgttaaaggtaattctacaggaactagggatgtgcctcattcggtacggtacttgaagcatggatgaagcaccggattctgacctgacggtgaatacatataatcctacactgaggatgctgaatcaaaatggtcagaagttcaaggctggggctggaaagacggctcagtgattagcagcactgttctttcagaggacccaggttcaattcccagcatccacatggcagctcacaactgtctgtaactccaattccaggggatctgatataagctcacaaagacatgcatgcagacaaaataacgaatgtacattaaaaaataaataaatcgccgggagtggtgacgcacacctttaatcctagcactctggagagagggtcaggtggatttctgagttcgaggccagcctggtctacaaagtgagttccaggacagccagggctatacagagaaaccctgtctctaaaaacaaacaaacaaacaaacaaatcattaacctccccccccaaataaaagtatgttgaagccatgcctagtgatgcagacctgtaacctgggaaacggaggcaggaagactgttgtggctagtcttgtcttttatgtttataactaactagaagaaactgaatggcataatcttgcagtgaatcttttggagcatctttctcaaaacattagatcagaatgttctagacattaaacacactctggaaacagttttaatggttacatgggattcctcctgtatgcccagtcacccctaggctttactgagaaccagctggaccacttgtgtgcaggcaggtggaacccagggtggtcagatttgtcactactcaacacaaaagcacaaggttttgttgtcaggacaaactaggtatgtcttgaggctggagagatggtttaatggctaagagcacttctcttctagagaacttgaatttagttcctagcaccttcactgggtggcttttggtggctcacatccatctgtaacttcagctccaagggagctgacagccatgtctgctgtctaaagcaaagccattcccatgtagtatatactcacagaaacacaaaactaaaactaactagctaactaactaactaactaactaactatcaaaatcttaggaaaaaacaaaaaacccaaaaccttccagaactagttatgtcccatgcaccaagaagtgattcctggggctggtgaggtggctcagtgggtaagagcacccgactgctcttccaaaggtccggagttcaaatcccagcaaccacatggtggctcacaaccatccgtaacgagatctgacgccctcttctggtgtgtctgaagacagctacagtgtacttacatataataaataaataaatcttaaaaataaaaaaaaaaaaaaaaaaaagaagtgattcctgagccaggcatggtatcacatgcctttaatcccagcattcaggagacagaggcagtcaaactctgtgagttagagaccaattcaagctatgagagctgcctcaaaacaaacaaaacaaaacaaaaacaaaaacaaaacaccaaaaaacaaaaaaacagtcaagttagacgtggtagcatcaatactcagttggtgaacttctgaatttgagcccagcctggtttacagttaagttccaggacagccagggctacacagaaaaataaataaataatcaattaatcaatcaacaaacaatagagacagacagagagagagacagagagacacagagaaaggttggtcctggggctggagagatgactcactgatcaagagccaatatggcttttgctgaggaccagccagctcacagctgcccataactccagctccaggagatgcaatgcctgtggcctgcagaggcaccagcactcgcgtgcacactcccatccaggaacataattaaaaagagtaaaataaatctttttagaaagctggtccttaggcaaacagttactatgtgtgagaggcttggaaggccagtggtctgagagggagcagcaaccacttctctctgggaactctgcagaaacggactgtaccaccgccgggctttcccatttctaggcttgcctacctggataaagggacaacccgtgccttactggaggagatggtgaagctcttgggggtatttctcaggacttagaatagcatcttcccagttatccacttagttatcatcctctaaaaggaatagtttcgcccagcttgtttttagacactgcttctctgattcaaatcctcaagtgatgtcaccggtgatcagcatgtctcctttggtttctccatgaaatcagccaagctgtagaaggagatgggattacccaagctaccaagtggtcatatacatcctcctcacccccatccctaccctcctgtcctaccatagaccttgttaatgtctttggtggtgctaggaagaaggtctcatgttggcggggatgatacagtcactttcaaagccatgactgcttgctcttgtgcactgttagtcctaaaggtgaagaagcatcctgtcttccctggagcccagctgttgggcaacagctgtgcatcagcctcgtgcataataacatcacgcataatgataaatgccccagtggcctgagcttagcacggacagagtctagacagaggcacctatcacctcccctgttgcagtacgggagcagaaagcatccacagttggttctagcacaggtaggtggggtcgagtaggacaggaaggagaatagaagaaaggcaccctgggaagacctgacaagaggaaggttaatgtggacgctcagcttaccaggttcagcgatggtggttttggaccatgagatatctacaccggggtttctcttaggatgctccctgaggagacaaatgtacgcagagacgactgaagggaaagacccaccctcactgcagcccagatcaaagagaagtctgaggggagaggatgcatgttagcctttcttcctttctgagtaggtatcactgctgtggagctcagacaccggcatcacaggcctgtcaatatggcttcactctcaccagagatcttggtgcatgtcctcaggactacggtggcatcgcacttctgggtctgagcaactcctgggttctcggtttctccagcatacagaccaccatttctggattacctagttcctatcatgtgaatcagcctaataaatcccctttaacttttttgattatttttatcttacttttatttttttttatgttttcaagacagtgtctctctgggtagccctggcggtcctagaactcactctgtagaccagagtggcctcaactcagagatccacctgcctctgcctcccactgctgggtttaaaggtgtgaaccaccaccctctgccagtaaatcctcttctatgatatgttatgtaatatataataatacatatacatgttttgttggccctgtgcctccgcgctcaccttctcacactgtaggccacagccccagattgggttgcataactgaacgcgaaggttacacaattttcggaaatagtaaaaggtttctgaatgcagtgacccaaaattaatttgaaatcaaacactcaatgaacctgagccttttctggcagcattcacgcgtgtcgtatccacgcttcaacagaaactttgttctgaacatacaacacacacatttcacatcaacaatatcaccgcagaaaacaaaaaaacaaaaacaaaatccagctaatacacccagaatcacattggctggaattcaagaatatttattatacattaagagttgcattctgccgggcagtggtggcgcacgcctttaatcccagtactcgggaggcagaggcaggcagatttctgagttcgaggccagcctggtctacagagtgagttccaggacagccagggctgtacagagaaaccctgtctcgggaaaaaaaaaaaaaaaaaaaagagttgcattctttatatgcaaagtttcctgtttttttttttttttaaatagaatcaaagtagtttaattatagaaaacaaagagttttaatttgtcactcccaagaatggatcaaatcactgttatttgttagagtgtttgattttttaaaaaaattgctgttggaggttgctgacttgactttcatagacagtattaaatgaaactaggcatagtggcagcggcctttaatcccagcactcattgggcatatgtgggtggatccctgggagtttgagataggtctggtctacacagtgaatttcagaacagccagtgttatgtagttgagatcctgtctcaagaaatattaagtggatttttgcttgggattagaacaggttccagaaatttttgaaatggccctaaacataccttgccaacttgtactctgtgttaaacatcactggatgctcttccagaggacctgggtttgattctcagcatccacatgatggctcacaaccatctgtaactgttaagtgcctggccccaaagtcatgtagcaggttgaagaagtcctaaagtttggtgcccactgaaaactattaacctctgggaacacatcctaggacctagtttgttggaagagcaggaaggaattgggtgctagagaaggctactgaagaagcgtgggggttgttgggaaaaccttgtaggatgggcaatctgtggggtgggagaaatttcaaagaagccttaaaagcacctggggttgtatcagagccaagaagtggggtaagcaggaggttcatgggtttagacaaccaggttcctgccagggcctcccacagagtgtagctcctgggatgactggggaagaaggccagaccgcaggaaagaaaagctagaatgaggctggaacaagtaagagatatgcgtctccattttagaggaagtctacttcggatgagatgacattactagggcgatggcttgcgggcagggcaggatcaggacaggatttgtttaaaagggggcatcttgaagtgttggtaggcttgaagcagaaaggggacggtggaaagaaagaacggattggagttctctgaagcaggcaggaagtttggctagagagcaggacgggtctctcaccagctgtggagagcagagcacaggggctggagccaggcagcagctgtgggaagaagtaggggaaagggaaggaaggatggctacagctggagagcaacagaatacccaggaagagggagggcagggactgagctggttagcctctgtgccaagaggtggcgtttagatgagggaggaatggttttgagtttgttgttagcctccatgagatctccaagggacctgatgctggagacctgaggcaggcagcagataagaggggctgggttgcaagagaacctaacctgagcctctaggtgctcagagcagcagtaggggagagtgaagttgctctgggtatgagaagcaggggtggaggtgggggtgggggtgtagggaggcaggactgggaagctgcttccggaatcaaccccaaaggaggacattgcaaagctcacagacaggctacttcaagggtgacaatcacagcgactagctggctttgctaacgactttaatgaaaatacatttcataagcaacccagaggcacacacaaacaggaaaatctccagattggtagcccccaccccaaccccaagtcctgaaatgtcaaagtgactgggacagattagagaaagattctgccaataagcagaaaagtgacaggtgaagttaacactacagtataaagtgacaaactcgataccatcatctaggctttactggccgagaggataaatcctgagcgcttggtgacatctcagtcagcagccacatcggaggactccagagtcagaatctttcacgtggggtcctgatagtgtgagggttcccggaagccaggtgaaggggtatgggcagaggggccgaagggaacaagggattctcagaggtggggtttctcccagggtatcctcagattccacctcgctgaagaaattacccttgacatgcaaaggatggagactctggggccttggtttgtgattttcaccatcagatgtctcttgggtgagcatgcccagccttctcagcaaagattgtaagtcttcggaagaggagagggctgtgtgcagggctccacacacaaatgggcaggctcttccatcattccctctgttcccttttctcatctccaaattagtgcacaaaaccaaaccacttggaaaattagccagttgatcgaccgtttattaaaacgcttgtggaatcccttatcgaggctcagaagcctttgaagtaatggcgaatgctgggtggagataagatgttagtgggtggtaactttgattttcctaatcaacttcacgatttcctctggcctcaatattacattttatttcctgaactctaactccgcagagctgccactttcccacactcctgatgtccccaagcccagaggttcgtgcatcttctacagctctcactaggggctcctcgtgtatgtctgcaaactctcaggtcagccttgcatttaggtccccctctttcccaaatttcccacgtctcaggtctccttgctttaacaaccccttaaggtgcttcccaagtcggcagagcccaagcgcatcacaccgggccataaagggaagatcacaagtcctcaagaggagcggtctgtgcaggaatgcacagaggagactgtcccagtgtcctcagaggccccttgccccttatccctctccccttgccccgtatcctgcgcaaccgcattggcctcgggatccctattcctgcttccagtcctggggagagggtctgggggtgtcgcagcctgagccccgccgcgcgcgcagccccgctcctccccgcgcgccccacttgtggccccgccggcagcttcgcagggacagctgcatttctcgccgcccgccgctaggaagccggcctcgcctcgctttctccgcctcccggcgcccagccgcgccgccgcgccaccaagccgggctgccgctgccgccgcgggaccgcgcccctcccccgccgcccgaccccagcggccccgcgggagcggacgcgcgtgcggtgctcggtaagaccccgattcgctctcgccgcccctagcgcgagctcgcgggcgccgcgctccaccccggcccggtggccccaccttccccgggagcatcgccgaggcgcggccgcgagggccgggccgtcgcgagtttgagtcctcgcgcggtggccaaggctgcccgggagcccgcggcaggtccccggccgccctccctccgccgctgcccgcctcgttcctggtcctgggcacagggagcgtgcggaggatcccggggccgcgatccgaggggtggtcgccggccagccggcgccgcgaggaagggacgcgaggccttggggagcctgctcaacccgggtctctctgctccccggttccccgctttgtgtggacaccctcccggcttcgcccgggcttgggggcgcagcctgaatggcgatggcgaggcgggggcctgggttgggagctgaactccttttagggggaggggagaatcgtttcctgctcccgccgtggtcaccggtcggttcagccttttctggtcccacccggtcccctgggagctgcgtctctccgcgacccggctggagaaagttcagaatgcgctgtccccgcccctgctcccccgcccctcgaactctgagtgcctggggcgctgagctccagggggccggggcttgcctttattccttcagcgctcttgggtttctctctgaatggttggtggcttgccaccccagcgtgggcttgtccattttctttccttaataaaaagtttcagcttcaagaaattcatactgctattaaattcctggagagggtgttttaaggaagagagatttttagatttcctttatttgtttgtttatttacttattgtaagaatagagggtgggggtggataattgggaagatagtgatgagataccctagaggtgacgtcggatagaagaccatgtgccttggtcaccacctggtcctcagtagcctgaaacccaggaaatacaccttgcaacaccctgagccacctggcccaggagaaggggttctggagttgctctggccctcccagccctaaggttctttacagacctatggagttaactatgtatgctgtttgaaggcagtgtgtgatactaggagtctccttatcttatagatgtcatctcattatgaagtttggctcctgctggatcgaatgtgaagtgggacctccgtttaaatggagggatggtacctttctttatgtagcttggcttgggccaccagaggttcatccagaaggttggattggaaatcacccgtccacactctcttgctggatggagcaggagacaaggaaacatctgggtacagtcttgaaaagcagaggctctgggcagttagggtagctcagggttggtgagagatggagaaggccaagtctcagagttagaccaagggcctctttgggatctggtgaaagctataccctaaccacactgccccaacatgcgcaggtgctggagcattcctgtgcactgccagggggcgtagtatgtccccttggtgctagggttctaattaagacccctatattaagagttttccgtctaattcaggccttttggagcagattccaactttgtggctagttagtagataatcccagggggcccaaagtagaaatgctgtgaggttctttctcatgccactttgaacttgtggccatggagacctggaagctctggcccagctcccagctccctccagttagctagagggcaggggcaattgaggtggccattctcccaggactaagtttgctgtctgtttggtggggaggccctaggtaccgtgttagggccacagggctattgaatgaaggggaaacaaaaggacaagtgtgggtgagtataggagacgttttcaggagcccctgtttgtcttagggacacgaggggcctcgtggagagcattcgtaagtatggaagaagagtcttcttggggagccttggagcagattttcccaagaaaacagtctgggtaatttgcagttctttccatttcttgagacttcagaacacaaatggaggacagacaagccactgaggctcattgcctgtacagttccagagacggtggttctgctattcttacccataatgctctggatgctgggctgttggcatgctgtgcaggtgtctgcttgagatctggaggagcccaggatcttccatgtcagacttctctgcctcagtactcagaagtcttccttaggctcacgccacctctgatggaccagagcacttgaatgcccttttttttttttttttggtttttcaagacagggtttctctgtgtagccctggctgtcctggaactcactttgtagaccaggctggactcgaactcagaaatccacctgcctctgcctcccaagtgctaggattaaaggcatgtgccaccaccacccggcttttgaatgtccttttaatgaggccactaatattgtctttaaagccagtcacaaacagtaaatgcagaaaccaggcttggaagtagacctcccgtctcataaaacgcaacaatggcggtcttggcttgagtgtggtaagaagttctgactccagggatctaacctgcagcctgctgcaacccgtgccatccagcgcatggggggttctctttagccagtgagtgtgtgtgtggcttggtgtgcagaaccatccattgtttccttcagagttccctaaagtcaccctgctgttactaagcaacagagctgagaatttctcagagccttgggctcacctctgaccaggcaaggtgagcaggagcaggaggtgtctggggtttgctggctcctgccattatgacaagtaacagttaggtctgaggacccaaaatgatggtggtctagcggtccctgatatgggagttggaagatgtcttggtggcaagcaaggctcttgtggcagggtccaccttgccttgtggctgggatttgcctttctgctgaagctctctctggctgccacatattggtgggtagactcgagatgtgagttgccttggctgctctgctgtttgttgaatcctctctgcttcctaccacccatgtaataaagcagctaaagttctcatcttcaaaagaggtcacgaggccgggatgcagcccagttggtagagtgtcaatgtactttcctagcaggcacaaaacccaaggttcaatccccaacatcctctaaactgggtatggtggcataagcttgtcatccaagcctggggacgtggaggcggagggctcagaagttcaaggtcatccttggctacatagagagcttgaggcctgcctgggttatgttagaccctgcctcaaaaaaaaaaaaaaaaaaaaacaacctaaaaataaaactattcataaacatagctaggaggtggtggctcacacctttaatcccagcactcaggaagcagaggcaggtggatcttcaggttcaaggccagcctggtctacagagtgagtttcagggcagccagggctacacaaagaaaccctgttttgaaaaaccaaaccaaacctcaaacacccaaaccaaaccaaaccaaaccaaaccaaaccaaaccaaaccaaaccataaacctattcctaaacaatagatggagggaacacaactctcttcttaaagaaaacatggcattgcgttgctatcatggcgttgtcaaggatcttcaagttcttgcctggaaacggatgtctaacctgcacttcagaaagcaatcgagccatttttactcccatttctactaagagatcttcatggtttgggttggttttgtggtgctggatattggattcagaactctgtccgtgctaactaagcgcatgtctgccgccgaggtccactcctagcaccatggcttgcaggattcccagaacatgcttagacatcccccgtggggctctcggtctgactctgaagctttctgagtgcttccgcgtctcattcctagaaggtgtcggaggacgtctcgcgtttgccacagacagaacgagttcctttgatagttactgttatttctgcacgtgggctcgagagctccgaaacttggtgctgagaaaataatctttggttaaaactgtagcggctgggacagatgtggtgttagggggaggggatgataagtggaggtgtacggttgctgagacgtcagggtgagataggaatcgtgaaatgactcagtagggttgaatggcttttctttcaatgttagtgttggtcctgagggacaaggcacccagcgaagagtgacagggtaggcaagtgaagagtgatggagtgcctgataaagggctttgtatgaaggaagaatggggactgggatatggtatagtggctaaaggtctacacacacacacacacacacacacaagtaaaaacataatctcactccaccaaggagccaatccttcctgtggtcagatgtggtctaaaaagtttgtttgagacagtctctatagccctcagtggcctggaacttgctgtgtagattaggctggcctcaaactcagatatccacatgcttctgcttgatggtgtgtgtgtgtgtatgtgtgtgtgtgtgtctaggtttaaagaaaattgttaaagattcattcattgtatgtgtctgagtgttttagctgcttgtataccactgtgccccatgtggtgctgggaacagaaattaggtcctctacaagagcaacaattgttcttaactactgagccatcccttcagtgcatcctatgtgtccttaattcttgggatggaaagatggcttagtggttaggagtactagctttcttatgaaaccccttgaagtgacattcatttctcaggtgaggaaacagagacctaggaggcagcaagaggctacatagcatgcctgaggtcatgtatctcaacgtggcagagtttgggtatgtgggggtaaggccactgtgctgtgtactcaaggtctgccaatgcagtggttagtccttggaataggtgtggtagggtctacttaatgctaagttctgctaagagctgctggccaagtgagctagttaggcctgacctagggcacaaagctcaccaagacggccctgtcctcaagaggcctgcagtccaggagcaggataaacatgttagtctagcgtttcagtcaccctgggcaagagctgtgaggagatgaaactctggagccaggggtgtagctcctgggggcaactgctgatgtgaagccgggaaaacccatgcccagcccccattaaaaaaagaaaacaaggtgaaacacggaagaagggggcaatcgccagtcagaagagcttctggagcagacaagacttgggggaggggacttgtgcatggagtccaggtaagcggcagttgtcgtccaggcactggatctagtcccagcacgttcctgctctgagatgctagtacaaccctgtggcaggcctgtggcatgtgagacatactaggtggggttttgttcgttttttgtttttgatcctgtaaagtctttgccaggtgaggcaggaaccctgtagtgtggccaacttcctagatatatggatacattggggttgctgtttgtctttgtgggttttgttatttcctttttttttttttttggtttttatttatttattttattttatttatgagttcactgtcactgtcttcagaacacctaaagaaggcatcagatgccattacagatggttgtgagccaccatgtggttgatgggaattgaactcaggacctctcgaagcatagtcgtgttcttaaccgtgagctatccttttgaccttttgttgttatttttgagatagtgtctcattttagcccagactgacccaaaacttactatattggcctggactggccttgaagccatacactcttcctagctccatctcccaagtgttgggattataggtgtaagctactatgccaaaagtttgaatttgttttttgttttgttttgtttttttgttttttttttttgtttttttttttgagacatagtctcactttgtacatcaagctgacctggaactcactctgtagcctaggctgggcctcaaactccttttgcctctttcctgccctaaagtgttgagattatagacattagccaccatgcctggctgcttttagtgtttcttctttttaatgattaattttatttatgtctgcggatgttttgcctgcatgtgtgttggtccaccacattcatgcctgctgacttcagaggccaaaagaaggccttctggtccttgggactggagttacagatggttgttagccaccatgtgggcgctggaaagcaatctggaacagctgccagtgctcttagctttggggccatttttccaggctggtttttgtggtcttcaatagctaagcaacagtcacttctcatgatgccttcgtcgaacacactgaagagacacaagtcttaccagctttgatgctaggaacacaggctgttcactagacagagcaccagaggtgaatgaatttaaattgcaggggtagggtgtgtgtgtgtgtgtgtgtgtgtgtgtgtgtgtgtgtgtgtgtgaagaagatagagggaggatgttccagataagctgtaatgagcaagaaaagtgactcattggagcagaggggaaggcccctacccccacctccgaagggcttaggaaataggatcaagattcatttatctctgtggtttaagaagttcatctgcagacaggaagatgaagtggaggtccctagaggtccatgcccactcagtgatagagggatgaaagctggaatttttgaggtagaaggctgctcaaatctggcttaacctctccttgtgctatggcatcattgaagaaagctgtgtgacagagggcagtctgtccatgaatttagagtccagacataaatcctacctgctcagcaactgggactcatgccttgcctgggtcctcgagacaggcgtgttctctgggcgtgacctgctgccacataggatggagtccaagccttcggaaaagaggcaaggacacaggaagtaacgggacatttgtcagtaactggctgcaggatcatccgctctattcgaaagacaatgtcacttgaggcttctgggttattgacttcactgtttagtcagctccctgagctctgcacagggccaggggccctcggtaaaccctgtggaaggaatgagcaaacagtagctaatccaagttaattcgctgtgaccatttacttattgggcctatggtacaatcatttcatgattactcccactggcagaaaaggatcgtgataggatgaggggcaagggcaaggttaacagggcacatctgaagagccttcttccaaagaccattaagggcaggcatgttcatgtactatggctttttcctctttccccaacccctgcctcagacataaaaggtttcaacgcttatgacaatctcagcacatttaacaagatagttacagaagtctcagaagaaaacaggattgctctcaaaggggattcgattaagaataaatcagactgggcccagtggcacacgccttttatcccaacacttgggaggtggaggcagagaggcagagaggcagagaggcataggcagatggatttctgtgagtttgaggccagcctggtctacatagtgagttccaggacagtcagagctcagttaatcagggaggcatggtagagcatgtctgtaatccatgttgggccacatcaccacccatatacaactccaggggggctctgatgcctctgagttcgatgggcatttgtacttatgtgcacgcacacatgctcacgtgtgcgcgcgcgcacacacacacacacacacacaccaatttaagtaccttttttttttttttggtttttcaagacagggtttctctgtgtaaccctggctgtcctggaactcactttgtagaccaggttggcctcgaactcagaaatctgcctgcttctgcctccagagtgctgggattaaaggcatgcaccaccgtgcccagctttaagtacctttttaacagcagggctggagagatggctcagcagttaagagctttgccttttccaaagctagatttggagcttgctcaggcaaagacgcttttgtggttgagtaggggaaccgggcacaggaaatgatttcacttgctttgggtcggagattggtttcagttccaggctgtaccaggagctgagtgctgtgagtgtcagggagaggcccactgggagggaattcccctgttgtctatgtacagaagtgacaaggtgggtggacaggggcttcctgggttgagcaggaggaagaggtgaatctgagatgaagccagaaagcagcaatgagtgactggaagctgggctggcacaactggtgtgggggttaagcaggcctatgaagatatatgtgcaggtcagaagcccacgttataaggcaagaaagccacaggcttaggccgtagggaaatcttacccacaaatgacctgggtgaggtagcatccccacaagcaggcagagaaaacaagctaagcatggtaaaaggtcaattacaccttgtgctggcatccttaagacatccttacatctctacagagatggcccagcagctaagagcattctctattcttccagagaacccgattcccaactcctgtgtcagatggctcgcaagcacctgtaactgtagatccagggaaatctgattcactcttctagcctctgaggatacacatatggcatgctgtcacatacagccctgacacactcacacattctctctctctctctctctctctctctctctctctctctctcacacacacacacacacacacacacacacacagaggttttttttttcagattatttattttatgtttgattgtttgtttgatggatatgtgtgtaccacatattatcccctcaaactggagtcagttgtgagcagctgtgtaggagctgggaactaatcttaggtcttccgcaagaatgcaagtgctctttaactgctgagccatctctctggcccctacaaatgctttattaaaagataactttttaaagatttattttatttataagtatgtgttcccatacaaaggtgtgtgtgtctgtgcaccatatgtgtacaggggtccttggaggagaaaagagattgaatcccttgtgagccaccatgagtcgtctggaagagcagtctatgcttctaacctctgctccatctctctaagctttgaatttaaaaaggcgggggatggggggaggaccaccccttccatggcacatagtggcacatacatacctgtagtcctaactctcaggaggctaattagcctgaagcctatagtaaactcgtcatgaacaaatataactagcctctgctggggagcattttcttgcatttgactctctttataataagaggcaaactcgagtcgtgttgcagacttgcagacctttgcatgctgcggatcctttgagacctcaagctgtcaattttcccaagacaatttggggccagcctggtggtttcaccaagaccatcattaccctaggaagtcggaggttttcctcctgcctggttctgggtgaggcctacgtagatgtttttgtccatcttagtgagttataacaccctgcatttgagttttcatttcctttctcaagacagggtttctctgtagctctggctgtcctggaacttgttccgtacaccgggctggcctcaaactcagaggcctaccttcctctgcctcacgagtgctgtgattaaaggcatatgccaccatcccctcacatttaccgaagccatgaaaggagatctttccccttgttcaggagcagcactgggtttccttgaacagagcatcctcgcatgggtgaaagaaaagatggatccgtgatgtnnnnnnnnnnnnnnnnnnnnatagatcagaacattaaccacatggcatgtgaccatggtatgtgtgtgtgtgtatgtgtgcatacaattatatatacatataatatataactaatatatacacacatatatatgtatacatatatacatatatgtatatttgtgtatatatgtatacatgtatatatagatatatagatatatatacacacatacacacacatgcatacatactattatatatagacatacatctgtcggccctgtccctccctctccccccccccccacttgatgagtttaatcaggattgctagcatgagcttgtatgtgggatgtgtgtgtctgtgtgtgtataccagagcacaggcagcttcccagtggctataccactgaagaaaatgacccttgtccaaccaccattaacatgagccacctcagtctagaggcacacagaaagcttgttgcagagtacatacagaagccttctgttaagtgttgacagtggacctggaggacgtagctcgaaccctttgctagattgggtgagacctgggacacgagggtgtctttgtgttgagatcatttctttccgcacataccattggccgggccaggcgtggtggcacacgcctttaatcccagcacacgggaggcagaagcagacagatttctgagttcgaggccagcctggtctacaaagtgagttccaggatagccagggctatacagagaaaccctgcctcgaaaaccaaaccaaaccaaccaaccaaacaaacaaacaaacgaacatgggccggcatttagaagtttcaccagattctttgcctctgctgggaagtttggagatgtgagatgtgagtagatatcttcattgagttcacctcaggctgggagcatccatacgcagaagcagggtgggcggccctttgagcttcaggggaatgcccctgtagtttgcttgctctgaacccagggtgaagacagtgcagatgtttttagaaatatatgggtttggcagacgctcatttatgagagaccatgcctacacaaatgcctcccaagtgatttacgctgaccttttacagaattgctgacagcccgggaccctcccgagagagtctgagacattgtggaagttggtttgggccctagccttgaattgtcttcatcacttctggagggtggcatcctttccctgaggatgctctggagtggttttcctagaatatgaaaaagaacagaaattaattttgtttggcaagccacacatctcccttgggacatccactcctttctggggcctagagagtggaaagtggattgcgatgctgatgcgtgagactgctcagatttccctgccaggaagaaggagtgtgttaatgcatgggagttctgagtgtgcagattggagtgcacagtagagctgctgtcgagctctgctgtgtaagggcagtgccattctcagcgggtcacgtcaccttctaatcttgtgctttccccttcttccttcctgtgtctttctctttctttttcacttttactttcttctctctctctctctttctctctctctctttctccgtccctccctccctccnnnnnnnnnnnnnnnnnnnnccctccctcctccccccttctccggtcttcctttctttctttcaagatagggtcttgccagacatcatggaacatgattttagtcccagcacttggaaggtacaggcaagtggatctctgtgagtttgaggccaccccgatctagaaagtgagcaccccccacacccgggccagggatacatagtgagaccctgtctcaaaaataacaataaaaaaaacaaacaaaacaaaaccaaaatcaaacacaaaaccaaagaactcacagaggtctgtctgtttttgccttcagaatgctgggaataaaggggtgtgccaccacttctggaagaaaaggctgttctgtgtagtcctgtttatagacccggctggttgtgaacttgggatcttcctgtccctgtgccgtcacactgttgggatcgtaggcatgagccaccatacccaggcccacgtgaacgtgggcttgccctacccctcaaccttgttctcagccttcctcctacttttcatcctgagcctggatctcactaagtcaggaagaccagctttcaggtcactctgtagcccacaaagggcttgaacttggagatcttcctccctcggtctcatgagtagctgtatttcaggcctgtgccaccaggcttagctctgtattattattattattattattattattattattattattattattttccagagcagcaaatggctgtagaacatacctgtctaacagaagtagaattaacacttcctatgccacagaactgctgtgacggtccagtgaccagccacatttgttgtatgcttactggaaaccaggaagctttctatgcatgtaggatagagagactgtgtatgtgtgtgtgcgcgtgtgcgtgtgcgtgtgcgtgtgtgtgtgtgtgcaaacacgagcatgtgcacatgaaccttgccatggaggcgggaggccagaggataattagctaggagctgcttttctcctttccccttggtggccttttggtgtttgttccagggacccaactcacgtcttcaggcttgtgtggcaagcacttttaccagccgagctccagggggtcagattgttaccagtgaggaaacctgaggcccgaggttgaattaactaaagtcatctccctaggtagttggggaggtgggatttgaactcaaaaaacccctgctgggtcggtacacatctcaccagggtgctttgtcacgcagcagtgctgggactttccctagggttgagggaaggataaactgaacctggggcaggttaagtgtttggaccttatgaggagctgagtgtaggagaactggttttggagttctgaggacacagctgtctctaagtttgggatcgagctgaggagatcctgcagggacagagaagggctttatcaggtagctttttactcactgccgagagggcttgcacccctagaggtttaagatccacaagtctccctcccgccatggtcctgtatttggaagcctgtctttagacgggagttagcacagcttcggtgactgtagggatttagcaaacttcgagaaaccgtgggttcttgagacggggaaaggaagacggtcagcacatggcggtgatgagccacggaacagcttgcgtcctgtggatggagggctgagcaaaacagatgactcctcttttcttaagagttgatttaataacggaatgaatcatcctgttagtttctgtccttgaaaagaaagagttccggtgtgacatggcgtttgactgaagccagaagccggctgtctctgtcacctagatagacactagctaggccttggtgactcctggccaggatgcagtccctccagaggtgttggaagggcccttagcttcctactgttaccactcttagtggtaccatctcctggtggggttctgagaccctgggtcttagagagaaaatggatagagtgtcattaaaaagtaattgactagggctggaaaaatggctcctaataaggtcctgggtttgattcccagaacccacacacgaaacagccagaggtccaaaaacaaaataagagctggcgagctagctcatcagttaagaacacttgttactatcacaaaggacctgtctttaggacccagcatcttccacatgctgcctctcaactgcccataactccagttctcggggactcaaagccttctggcttctacagatgtcaggcacatatgtggtacacatatacgcaacaggcagaacacttatatacataaaattaaaaaaaataccatgagatgagaacaaaaaatagcctcgtgtgatggcacactcccataaccagaatttgggaagccgagacagacagggctctgtgagttccaggtcagcccatacatactaagatcctgtttcagaaacaaaagcaagtcaggcatggtggcatgcatttatattctcagacccggggaagaccctaaggcaagccagcctcttctgctgggtgagctctagtcagtgagagagctcatcttagtgggagtaaaaagtagccacacagtggtggcgcatgcctttaaacccagcacttggcaggcagaggcaggtggagctctgagttcaaggccagcctggtctacagagtgagttccaggacagccagggctatagagagaaaccctgtctcaaagataacagccacaacaacaacaacaaaatagacattccctgaggaacaaggcccagggtgccacatgtatgtacacacacacacatacacacaagtaaaggactcgtgagctcacagtgatagtaacaatagttatgttgaagatattggcataaaaattcattctaccaggaattctataatctttgtctgtaagcaaggcccaaggctcgatcctcagtactgggaaaaaaaaattctaaatgtctaaaactaggcaatggaaaaatgttttgactttctaagatatgaacgaccccccatcccctgccagtgaaggcagcagaccccttctgtgctagtgccagcttccccggactgcctgtggggacatgctgttctctctgactccagctgccagccttccacgtgtgtcctgcccagcctgtaatctggctgtgggagtctgaggaggacagcctgttccgagccactctctgtgacctctctgtggaatgctgacctgtgaccttaccccagactcagagctgagtgagacaccccaagggaatgagaaaggtgcccaggaggagacctgagggggccatgagaacgcccagatgtttaggaacattagcaaggtggttccatttgcagactccggctgctggccacacatttcccagagtgcttttctctctctctctctctctctgttccatttgcctctgcttccttcctgtccccagtcagcaacagtggctatgctgaagagcttccatctggaagaagacctgctctgttcagactttttacttatataattcaatttagttcttacgccaaccagtggccaggatatggatatgggaactgaagttagcaggcagtagtttgtccaagaaacacacctactttctggctggaattttgcttgcttgagtttttgctttgtttgtttgtttgtttgtttgtttattcatttcttttggttttgtttacgtgtttgttcactttgagacaaggtctctatggagccctggctgtcctagaacttgctgtgtagaccaggctggtctctacgttaactcacagagatccacctgcctctctatctcctgagtattgggattaaagttgtgaactactgggcccggctttgattttatttgaatttttgagactgggtctatgtggccaaggctgaccttaaactcactatgtgtctccaggatgaccttgaacttctggcagtgcccctttatcaagatcctttgcaattaagctttgtgccttgatgcctggcttgtgtatctatctaacaatagaacccagagcgttgagtgtaacatagaacacactactgagctacacccccggctcctcgatttacactcttattataataaatgtcaaacacacagagattgtcaacacaatgaattcccttgttctcaccaccaagccctggcatatacctttgggtccgctagaaaaaggtccccttcctccagggtcctcagcctcgtaagcagatggtgggctgaatttcagccctctctgtcccttgggctgggcactttgtgctgtgaacagtccatgtaactgtatatgacaaccctgcctaagagtccttcttctcaacttgcttttggcatgacaaaaagcacccacagccagacacctggcagagtgttgattgcgatagtcaatgctttgctaagtgggactcagggagaaaagctcggacgctggggactcccccacttcatagtaagccgggagacaattccagaggagactgcttatatacagaggaggagaggagggaggagacagatgaactgtgtcctgctgctccgatttcctgcagctccccccacctgatgtctccaggatgtacacacacacacacacacacacacacacacacacacacacacacacacacacggatgcttcccccttcccttctgtgcctgggggacaagggaggtgcttgtctgtagccatcacagtccagggctggcagaaggaagtaggtggagcccagggtgtgaaaacccagtgtgaactgtgcagctaccctcctggacgtccttactggaacatcctctgcctccgggtggctagcttgtctgagactctgcttagccaagggtcgggtgggagtgctacttttgcacctggagagctatttctttaagtcccaagcaggccctgtgggtgatcagacgtggggcttcttcagggtagctggtgtgtatgtgtgtatttgtaactgctgtgttcttggctatgcccagtgctgtatttagtattggtgtgcaaatacacattagacagatgtatattatacaattaatgttacaaagcatcccatggaacagagaaatgtgccagagggagggtccaggctgctgcttcatgcctctgactgcatctcagggataaccaaactctgatgtccagtggcttgacacagttgatgtgtggaattttgttgttgcttcttgaaacagtgtctgtctatgtaaccctgcctctctgggaacttgctatgtagaccaggctggcatctaactcagagacccaccttccttctgcctctcaagcgctgggattaaaggggtgtgtccgcaccaccacatctggctccccgtgcattttgctcatggggcatctaatgtgcctgaggtagtcttgacttgtgacaactccatctggaacctgggtggtggtggcaggagcagaagagggaggaagaaccatttacttagaaggcagaggcaggtggatatctgcaaattcaagctagcctggtctacatagagagtttcaggccagactggactacatagtgagactttgtcctctcctccccattaaaaaaaaaaaaacaaaaacattcactcgttgtatctgtatgtgtgtaagctcactatagcacttttatctgctaagttatctcagggccttgctttgtttttgagatagggtctcgctatggttctcagcctggcctggaattcactctacgcccaagactggtctggaactcttgaccctctggcttcactctctaaagtggctggggttagaggcatggaccaccacacctggcctgctacttctgttcacacgtcttaccagagcgggtcaggcagcatgggaagctggaaaggaagagggataaaggactatcttcagcgtcctaaggacagacttttatattcccgtgactggtgataggtctacggaagtgcctctggctgagttgcctgcccggccactgttttttacttggacagaaggagaacacctgctacgtaggcccagaaaggaggtgggagatagcattgaagagacggtcacatagcagggcttttaacaaccgcagaatgacatgttggcgttgacattcgtttacgaatgccacgtctggaacccttttcttatctgtgtagaggaacagtaagaccagtctgtcttggtttcagactcccctgagtacaagaacagaactattgaagtaatgggagaattgaggaactgagagcagggagcaatgctggcctccaaggtgccttggggtgaaaggtgcctcttcctggtatacctgcggatacccctgcttttgtgaatgtgaatctggcatcatagtctcttggttctcaaatacacccaccctctttctaataaccagaaagccaaacagtgcctggaccttgaatcaaatatgttcctgggggaagaatctaactgactcacgtgagtctgccttctgctggtccaatcagctgtgatttgtagacatggtcatatggcactccatatcactacaggattttcccttatcaatgggggtggaggcatcctcacagtagagacatgacctggggatgtactcagaagcatgccagacttaccaccttggaccaggtcgagtagggttggtcggatgatacctggcagaaagatgtgagaactctaagggaccacttcagtgtgagctggtatggtgggggtgggacttcactgagaaccttgggacacagcactacctgaacagggcacgggtaggtctgtaacgctacacgatagaactgaaaagtcttggtcaaggcttgggagctctttgtgggatggtcatggaacaggatgtgggggccagatggcagggttcagccaggctactgttggaggaggtaaggcaggtttataggctactgggatgataaccttgtaaaacagagagcaaatgtgtctctctcccctacataaacacagctgtttctgtggttgaaatggtgtgaccgggagaggatgttggtccggatttagcactctggacattgtccttactctaccccgacgggctgggtacctataaggaaatcgactcagccctgtggggcttgctttgctctgctcttgaaagactctctgtgtgagcatttttataccaagggggtgaaaactgaacagctaggtttgggcccttgttcttcacttactggtgatgtgacctgtgcagacttcctaatggccagtgtttcctcccctcctctcgggggtgtggtgaggatcacaggaaacgggtgctcagtgaatcactaatattattattagaaaccaaggccacagggctagagagggagcttggctaggagagtgcttccctaataggtacaaatctctaggtttgatcctcacaaccaaaaccccacaaacgtggggaagtagaggcaggagttcaagttcatacttcctcatctctatggagagttccagcatggcacgtaagacgtctgggagagagacagcaagacagaggagagagaggaaggggagggggagggagaggaaggaaaggaagacggagaccaattcccagattggacagatgtagtccctcagacgggcaggagctagagcaggggcaggggcagggataaagaaatggagagactgccacagaggcagcctgggcctctcagaggcttcgaacgaggatcttcctaagaacctggccctgtctggggtgtgagtgctggggtggacacgctgcctcagcccctggagccagctccagccacctgtcatcccaagcctgatccgttcccctgcccctccactggagcctccatgatggatcttagggatgactgcagaatgctggaaggttctaggctcttcctttccatcctgggtcaggtataggaggcctcctgttggacacgagagcatttccgtcttgaagctgcagagctcggagtttttttgtttattttgttgttttgtttggtttttggattttcgagatggggtttcactatgtaaccttagctgtcctggaactcactctattgatcaggctggcctcaaactcacagagccatctgcccctgccttctgagggctgggcttgaatatgtgtacaccactgcctggtttttgtttgtttgtttgtttgttttttgttttttagatgaagacgccttttggaccacagagcagtttaaaggcaaaagtatgctaggcctctgcttctgaggaattctattctcactctcaagagccccacggagcctccagggtccagccctgtcccctttcctccttgcctttgtcctctggtccctgcagtcagcagcagcaagctctgtggctgccaggtccagactgagcctcaggacagcccctccctttcctccctcagcagctggggcctggcctccacccacctctcttggatccaggccccagtgataatgaattacataaataagtcattcccattagcagcacagccaggctctggcccaggaggcagggcaggtcctgaggcagtatggctctggcgagctgctccccagcacggtggctccgagccctgagccctgacatttctgcttggtgtctcagggaggggcctccatcctctggtcccttccggtgttaggttttcagtctagaggttccccaattatcaccttccaacagccatagggcctcaggacaggtgtgtttgacagtagttgggaccctagaaggggttagagttggggcgtctggtggtttaagctgctcttctgggcctgcctaggcttggctggcaaaggtgctcagtggccatggcaacccttgtctgccggcagctccaggcaaacactggctttcaaagggggccttgttccctgtgggagccttttggtttgctgggcctttcagacctggggaggaaaaggaagacagagagaaggggggctggggggtgtcgctgcctgggagaagagcacactcctgcctctcctcaccccctttgccctggccccaagcgtatttcctggaggccactgttttcagacctgctgctggagaatgaaaggaagagtgaacagaagagtgtgcccagtctccaggcaacgggctgtctgtgccgtttaaaggagagaggaaagtcacacacactgggcaccttagtgtgggaagtcctgtgctgatggcgtcaagctagccatggccacctaagcagattctttgctgggtatcgaatatgtaacatgtataacactggagctgggaggtagccctgttgcctaacatatacaaagtttactacccagcttagcataaaattgggtatggtggcacgcatgtgttctatcagagctggggagggaaaggcaggaggctcacaatctcacggtcatcactggctacttagggagttagaagggaaagaaacttgggctgcaagggggttggagagaaaatgataggagaagagaagagagggaagagaagagaaagaggcgctaaagtattcatcaaatgtgaggcgaccacactggcagtctacactcctgtacgagtgtgccaatgccagtagattcaggagaaatgctgatcgtgggcttcgctgcctttgcaggggggctcagttccagaattctcccctttcacgttttattgttatattcctaatatataaaaaacaggaaagctggagccaaagagatggttcaattgttaagagcacagattgctcttctagaggacccaggcttccaatcccagcaactatatagcagctcacaactctctgtaactccaagatctgatactgtcacatagacatacgtggaggcaaaacaccagtgcacataaaataaaggtaaatagattaaaacaaaacaaaacaaaatcccaggaaagctgtcctgtctgccatttgttcccaagtcactgttagcctgaggatgcagcatcctgtctggtggactacaactcattgctggcaaccgtggtgcctaccttccaggtctggtgtgaatgtagtgattctgggacaagaaaacccatgggtaaagactctggccatttatacccacccaggaaagcatggtgggtctcactcaggactagacactgggaccaagatctggtggccaaattctattcctccacatctctgtcatctcctccctttgtgactcttccttgtcgtgtggattaattggccaaattggaggcctttaaaggccctctgccagctggggttggggtggaaggcactcatgaactttccaaacttttcttgataagcataaactaagaggcatcacctggagccttgtggggggagggggaagctgataccattctcataccaggagtgacttggtctgatggaggaaccagcagtcacactgggaactaggaagggacagaattttctgctgcttttgggattgttcctcagactgagcacctaagccatcagagagtggcttccctcagccgccctctgtccaccttgctgttcattaaaacatcaaattctgctgctgtagtcaggactcaggtgagatttttgtgtcttttttttttaatttatttgttgttgttttttgtttattcattttcaagacagagtttcactgggtagccctggctgttctggaacccacgctgtggaccaggctggccttgaactcatagagatctacctgcctctgcctcccaagagctgggatttgttctttcttttcttttcgtttttttaaagtgtgtgtgtgtgtgtgtgtgtgtgtgtgtgtgtgtgtgtacacacgaataagctgacatgtgaaagtcagaagacaactcttttggaagtcagttttctccttccaacatgtggtttctgaggcttgaactctggtcttctggcttggcagcaagtatctttacccagtcagccatcccgctggccactgttttgtgttctttgagacacagtggttttcctttgtagcctctgctggtatcaacttgcagcaactctcctgcctcagcctccccagggctgggattttaggcctggatgagaggcacacctaaggttaaggaccatccttccagtgcagagtcggggaggggcattgtgtaagatgatgcacagctcccggtctggaggtgccatgattccatttggtatctcagagggaagaggcatatagttccacgggagtccacctgagatcccaaggaagtttccagcctggtgctccctggacctggatctgtgtcttcttgagactagcggggaacttttaagtcctctctactgtgtttgccctgcgtatctgtaatttcatggattctcaggaaagctcccttcttcaccctttatgaatacagttgaaggagtcctatttaggcatggccgtcaccaaaggcatagtctcttccagctgatgtcccctaagtccgtgcctttgtgaagaattactgcccagagactcactgtttcctggccccaagtgaccttgtctcagtcaaagaccatgtgaccctcctatcatttagccctgcccccacacgccacaggtgttttgtaactgccttgacggcacctggcacttgctatggctccatgggtgttttttttttaaaagcattttattgttttatatgtgtgagcatttgcctgcatccttgcctgtgtactacttgtgtgcctggagaccagaagaggccagaagacctacctgcctgggctggaattacagatggttgtgaaccactgtatgggtgcctggaattgaacttggggcctctaaaagaacaggaccagtgaactgtgtttccaagagccccggtccctctcaatctatattttgaataagggagtgactcttttgaatgaatggggggccctttaactgtaaatcgaccgtttaatgaatccctttgttctgttgctatgttagctaggttgaatcctgagctcccacactctaggcaagggctgtgccaatcatgagcatctgtagcccactttttactttttattttgaggcaaactctaagctgtcccaggctggatttgaacttgtcatcctgctgcctcagcctcctgagtagcaggttcaactcctgtgccaaagactggattaggagagtctggtgctgactctaaggatggcctctactgtcaggagtctccaggggcgacagcagatgccaggagggccacctgggagggaggacgttctttttgcaactattcgattgcttgtggctctttctgcctgcaggagttactacagaagagtggtttctaccctcctgctttgaccacagcgtacccttttctctgaggcttccagctcttaattagatttcttaggtctcatagcagatgtgagatgtgaatatcattttcccccatcctttttaagtaaaaaaaaaatctgcctaaatgtttttgagcagttatcctcatgggcatggctgtctgagacttagctgctgtctggaacctgagaagtaggcatagcatctcccagggccttcccttgtaggtgtgcctcgaactgacacgcctctgaatgaattccactctctttgtcacctcaagcccttaaggcagaaaggctatggctcctgccataaggaaaaaaagggtctccaggcatcccaggctctgcctggagttaggggaggtgttttataagaattgcctgtgagccacacctagtgcggaaggaagccttctgccctctaggcgctagggtgagtgacagggctggtgcagatcatttatcacgtgccaggctaggggtggggtgggggcttgatacagggtcaggtagagggttttttttttttttttttttttgaggggaagagttatttcgagataaggtttctctgtgtggccctggctgtcctggaactcactctgtagaccaagccggcctggaactcacagagctctgcctgcctctgccctctgagtgctgggattaaaggtgtgcagttagagccttgatgcaggaagtcaggtttgcagagagcatccgtgacgtcgacttcccctggttagagatgggcacgggacacaccttggacaccggagtcatctgcccagcagagtctgagaaagtttgggaaactaagggactccgttctcatctgtgcattattttacacacacacacacacacacacacacacacactttggagaattctttagagcctggaagctctgattgtctccgtggaaggacaacttgtttcttcagtgagcatgaccagtctgtgcaagcctgacaacacccaaaactggtctgtaggctgtcgagagaggcaagtctgcggggcagatgcctggatgttgtggaatgccaactatctagaaagggtttaatcctccctacttcccttcactgtttgtagacttggggttgaatcctggcactctgtgtcctccggcagccctgcctgatcttcacttatattgtctttgaattggtgatagtcgtgccctgccttacaggcttggttgccatttaaaagggaaaagaaagaaagcacaccagattggctttgataaaatttgggtgtcaggtgtggactcctgacagtttggggggctgtgggtaacacattttgtcactgcgaaggtgaagcaaaggctgagagcagactgcagacaacttaggacatgtttgaagtgctgggaagaagcaataagctcatgtagaaaatctcccatcccaccagaccgccattaactctctccctctctgttaaccctttcccttctccacccacaatggtgtttcctggataccacctcccaagcagcagaccggcttctccatgcccagttaattgcttgtgactctcagactaccagtgtgccctccctttctggaaaaactcggactttcttcttggataattcttgatgtttgttctggagtgttccgcactgacatttgattcttaatttttaaatttttacatatttattattgtgtgtgtacacatacgacatgtgtgtgcatgcaggtgggtctgaggacaactttcaggattcccttctcctttcaccacaggatctgggaatcaaactcaggtagccaagcttgtgcagtgagagggtttgggtttttttgtttgtttgtttgtcttttctttctttctttctttctttctttctttctttctttctttctttctttctttctttctttctttctttctttctttctttctttctttctttctttctttctttctttctttctttctttctttctttctttctttctttctttctttcttttttcccgagacagggtttctctgtgtagccctggctgtcctggaactcactctgtagaccaggctggcctcaaactcaggggtctgcttgtctctgcttccccgaatgttgggattaaaggcatgtaccacatgcctggctgtggtgagtgtttctaaccattgagccatttcaccagcccaggtccttagttcttaatgatatttctggccccagaccactttgatcatttcagggccctctgtagtttgcttgctttgtttgattatacagtgctgggggttgaactcagagctttgtgcaagctttggaagcactttaccacacagctccatctccagtccctcttacggtaatctagagaaaacttcgattatctctggccatgttaaaaaaaaggtctgtgtacagatgaatatgttaatctgtgcatccactttcacaggggaccgggagacctggcagagacctccctagctcttcatagtgggctataagttccacaacctttgtgcccactctccagtatgcattgaggggctcttgggaggcagtaaggtgaagtcctcaggccaagtgctagggtctgtagacttcttcctctgctacttgctcccccccccccccgccccgcctccatattaacaaacaccttttcaggtcattatagcagacgcattcctagctgaatgtgacttgctggcatgttgaccttggtacagttacctataccatctaagctacagcttcccaccccctctccccattcgtaacactgaccttccttgtggctggagagtcacggctcatcaaccaacaacattggctgcttttccagaggacctagattggatccccagaacatatacaatggctcacactgtctgcacctcattccagagaatccagtgccctcttctgactttcgtgggaccaggcacacacacggtgcacagatacacatgcagacaaaatataaaatgaaataaaaaaaattaaaatgcttcaactgtaagacttaccatttagctacagaggaaacccactgtggtagcagggatctgttcaccctgtacagagctacaagtagatggaccatagtgaccagacatctaaggctctcctttggatgtgtggggagcagaatctttgccatatctctctgaaattgggagggggattaggtagctatgtcctctagacaccctgcttctgcctcaagtccactgctattgggttgtttgtttttttctctagatatggaagttcttacctctggaggtccctaagactggatgcccagcccagcgtggggagggacagggaatcctcagtataccccagagcagacattgcattccttaattgactctggttccttagctcccaggatttcaggcccctgcagttgggggtaggttgttaactgtggtcagggcagtggcaaggttgtggttgacttcaggggggatagtgcagaaaagcaggaagtaccttcaggtgcccctgctgcccaggcccctctgtcccttgtagctgagtcgtggaaacctaggctcgccctgcaccctctcagctgtgtgtgagattggccagagttaaagaattccaaacattgacccccccccactggacccttaattacattaaggcacaaagtggcagtgccagcagcgggtggattctggccggctgtcccaggaacaattgaaggtctgttctctcggcctgtctcttccagctgagcttcttttcatgtctgcctcattcccagggatgcagagactctggcttccttagtctccccatctcactggttttgtgtctgcctttcctcaccctgggagccccagcagggtagcctcttggcccatttcttcacaccctacagtagctctaaatctgctgtgtgcccagggctttggaaagtcaggtggttttgtatatggtcctgaaggggaagcaaaggcccccactttattggtttgtttacttgtttgggtttttttttttttttgagggggttgacacaggcattctcagtgtagccctggttgtcctggaacttgctctgtagaccaggctgtcctgaaactcagaaatcctcctgcctctgcctcccaagtgctaggattaaaggcttaagccaccaccgtcctgcagccctcattttttatgacaccccacaatccatagcaccttcacttggaaggcagaggcagaggcagaggcaggcagatttctgagtttgaggccagcctggtctacagagtgagttccagaacaaccatggctatacagagaaaccctgtcttctacattttccccctcagatctgtattgatgtggcagctgggatgggtgggggtggtcacagtgtttcacaggagtgatggagcttgggaaagggagggcagagacaggcaagtctcctttctaggccagtgtgtgaaagaggggttgggggtgggtgttaagacagggtcttactaggtaacacaggctgacacccagtgctttctcttgcctgcttccttgactttgggagtggcctttttagtccttgccagtatcttgtcaaaaatgtcctggaaagaggccatgttgtagaacaccctgatgacatcatgaagaatcttctagagaacttgcttttatcactttcttttttcatttggagaattgattaaaatataattacattactttcctacttctcttttcttttctccagcccttccaatgaccgttcccaacccctctcaaaataatggctcctttcctttggatattattgttacatgcacacacacataaatacaacctgctgggtctatttggtgtgtgcttgtgtgtatatgatttgaatgctgatcacttggtattagataactaatcagggggcccattcctgagagagactaattctccttctctcagaagtcatcagttgcttggagttctttgtctagggtggggaccctgtgacatttttccattctgagttagcatgtccattggtattgactttgttcagttcttgtttaggcagccatattgttgaggtataaagggtgtggcttggttgttggttctaagaaacacgatctcacagcagagttcctggtcctctggctctctggctcttacattcttcccaccatctcttctgtgatgttccacgagccttaggtccaggagtagtagtgtagatgtatctgttagtgttgggatcctcatggtgggttgatctctgtgttatgaccagttgtggttttcactacagagagaagtttctctggtcagaatgagagctacactctgtaggtataaggttgtagggttataggaattatactggtccaggaaagtagtggtagtaggttctcctctaagattcatgacctcattagcctggcgtagttgattaagtttctagtagcaggcatgagttccctcctgttgagcaggcttcagtccaattagatagctatgggtcactgtctgatgggagtgtctatttaggctgccgtgtggtcattattgtggtttataagctggatcaggctattgattgcctctctcccctggcagcatgcataacgccttctgatagtctgaaaactagaccataccacagagagagactttcaaggtagatccagcgtgactgactcttgtatctgaagcatgtggcgtcttcagcctaggaccttaccgtcaacctttgagaggcaaccaaaggccacagcaacagaaaccttcgctcctttgggagtcacgtggttcatcctgaccaacagcttgagttggagtttctcgtgcctggggttcttgttaaggagtgttttgctcttgtgggaagcactgtcagtccaggtagtataacttcaattatgctacgtatatgtgtacgtatcgtacacttataggtattatatatacctttaggtaaatataaaatatgattctttgaagctttatcaaacatccttagtgcatttgtccctcttcccttagcacagatggcaactttttttttttcaaatcagaatctcactgtgcaacccagcctgtccttgaactcatcccccgcctcctcctcttccccctccccccccctgcttttccggtgctgggattacaggtgtacactagttaacaagaacctctcttctccagttctctatttgacttcattcctccccaggattgagggaccaggacattgctttttttctcactctaggaactacctagaccagctagctaggtctttaagatctcgggaaagaaattctctagcctccccatgatccaaaggctcctaacctggcccccagaatagactcctgcccctgtgatgaagacatgcagctggaccagtcagatgaagctcaggcccctctgctccagattggcttcttactgtccctgaggcagtcacaggcatagtgtgcaggcacccaagaacatggggtccaggcctttttttgttggcaatatcaggtttctcttaggaggtccagcccccccatatttagacctcattggagacagctgctggagtttctggtcttttgactttgtgacttcctcatatttgcagatggctgagggacctgccattcttgctggcccagggtgtgtccccaggaggtctttaagccccatttggtgaaacttgtctcttttatgttcttgtgcagtggcaggccttcagcccctgtgtggggcaaagctacacggactacacggttggttggttggttggttggtggaggagtcttttgccaaactcctttagagcatttgaaaaggaatatcgggtctcctgttgttcctctgagaacagtgtctctggaaggtatccaacaagcctcagggcccccaagcctctgcaatgcccttcatgcccctcagccccctgctgtagacaactgcctggaggttggtagtatcccagcaggtcttagctgatttaagttagaatgaggtctgcttagctctgtatagttactaggctcattaaagaaaaacaaaaaccagaaaagactgcatccctggctcactcatatgttcatatgtagatattaaagccagattcgaagtgaaacgatatggctaaaatgtgtatctattcctttatttgtgtgtttggatgccacgggatgagcgctgacgccaggggacagcttggcagtagcagtgtgttctctccttccaacgcgtgggttcccggaatcagaatcaggccatcgcattggtggcaagcgcctttacccactgagccatcttgctggccctggaatagtttttaaaaacatcattctagtggctgtgaaagctttgatcccaagaccaaaccgctgttttatcattggcccctaactcatctttactttaagctgcagaatttcacagagtgaaagtcggggaccatttgttgggttctctgggtataatattaatgtaggatggggcctcttgccaaaggcccttcttgccaaggttctaggaagaggggcctgctaaggcacagggctgggataggagtttctggttttagccctcagctctgaagtgtctaaactgagacacacatttacccgtagaagtgtctcctggcttgtgcaggggtcagatgatggggtacaagttcaggttggctgtggggcccatcagcttatgggttcagcctcagtgtcagccatgagattggcacgttgcttaggaacaaggaacatggtgctttgactactttcttgaactcttgagtgtcttggatcttgcagcccaactcttcctccaaagactcttcagtagccaccctagggttacctggtgctactcattatccagagcagctgttctcaacatgtgggtcctgacccctttggggggggatgtcacatatcagatacctacattataattcataacagtagcaaaattacagttatgaggtagcagcaaaatacttttacggctggggattgccagcatgtgaggaactgtattaaagggtcgcagcattaggagagttgataaccaccattctagaggaagttggtttctagaaactacccggagtggggggagggggtgtcttcaacaatagatggatacctgccttatcttttagttaggctcaatggtgatgatgtttaatagtgattagaaaaagccccttcccgtctctgttgaagtctacacacttttcccttttcttctctactccactgaggcagtacattcagccactgagagatttaaaagctttgagtagcaatatacttggagtagggggaattgagcaggattggattccatcctgggcctgccctgtgcaagtcccttgccacttactactggagcctcaggttccccgtgtgttcatgaaaacagaggtatcagattggcaacattgatgtgaaaatcaaatgtaaacatttctgtcaagctgttcggcgtatgcagggcacccagcacttagtgacattcatggttcatagctcttctgtttgttgtttgtttatttgagacagggccttactatacatctctggctgtcctggagctctctatgtaaaccaggctggccttgaactcacagagatctatctgcctctgcctcctgagtgctgggagcaaaggcacaggcccctacgcccaggtcagagcaacctttcagctgtgtctttttaacagtcccaccccaggcaggactttcttgcttgggaggcatctggcttgctggagctatgattcctccagctttttgtggctgggatatcctgccaaggcaggccatggtctccaccccacccccactcaaccaagtgaaagtaaccagggccggttccctctccccctgttcccttgctctcttgagaaaggcaactctttatgaacacagggtagactcgctactcattcgctggtgtctttgtgaccacagttgtggccaaaaagccaacaggaagccagaggaagagtcatctggggacaagcttcggttctcgatctttgagcctcagtctgaggtcatgtccttggctgcttctaggaggcattccgtttcctgtctggctggggagagctgcaaagttgcagcggagacaaatgcgataagctttctagccatctgcccatggcctggagttttggggaccactcttctgagaccgtggagcagctgtgttagcaccacctgggccgtaactggaattgctgaatcttgggtttcacacccaacaggcagagtcacaacctacattctaggaagactcccaggaggtcccggtagatattaaaatgctgagaggctgaagtggaccacagttcttagccatggatgcataccagactctcccagattgctttttaaaatgtactggtttcctaagacccatactcatcccctgaaaaaggagaagatatggacattggtattaaagagaaaaaaaaatcagatgtgtacgtataatccctgcactgggacaggatggtcagggcaagaccagggttagtgaggtagcgtaatgggtaaagggacctgccatcaagcttgataacccgactttaacctgagggatccacatggtgggaggagagaaccaacttctgcaaactgtcctctgactttcacatacggccatagcatgcacacctacatgatcactacatgcatgcaaaataactaaatagtgtgatgttttacaagcaggagtgggggaaggaagtgtgtggtgtgtgtgtgtgtgtgtgtgtgtgtgtagtaggtagtaaaatagtccttagatgattctattgcgtacctgggccagggacggatgtcaacctctctctgcctttggaagacaagagagtggcactgctgcctttgttaagctcctactgtatacacaaaaaaagatctgtattcttgtctgtcatttctatttcaaacctgcaaaggtgctagggttcttcctatcgttatttgagacaatggagcaccaccccgcccccccaagaaggaaacgacaccaacctgagctcctcaaggacaaatgggaaacaaggcattagccacagggagctgaatctcaggcagcaagtctgctgctcctagtagctagggaatgatgtcagagatgtggccaaacctcaaaacagagccgtggagggcctgagagtcttcagacaggcaaggcgtgaagcacaaaggaaatggaccaaatgcctgaaactagccctttcctgtaacattttgaaccatgttcttgtctgatatgtttgtttggtttggtttttcgagacagggtttcaccgtgtagccctggctgtcctggaactcactctgtagaccaggctggcctcgaactcagagatcctcctccctctgcctcctgagtgctgggattaaaggcgagcgccaccactgcctattctggtttctaaggattgaaaatctgcctggtgctcccacggaatctgattcctggttaccctcgtctgtcctccaggtacagccatgaggtatctgtccatagagaatggaagttgtgagggtaaatctgtctctggttttatccccccaccctttcacctctcttctgtaaaacacttggctcctgtcctataccttgtatgtagttcaaaggcgaccatctatgcagctcaccacattcttgatctctgcactctcactgtggagcagaaaggggcatagacaattggagcacatttgcttcctttctcatgaccttggtggggccagaaactaccaactttatctatctatctatctatttatttatttatttattcattcattcattcattcattcattttagtgtgtaaatcataaatatagccaatttgcagtggtctaaacgtctaccttattttgccttttatgtatagggatcttttacagtatgcatggctatgttccatgtgcataactggtgttctagaaggccagaaaaggacgtcaggtccctgggactgagttgcagattgttttgagctgccctgtgggtgctgggaattgaacctggttcctctggaggaggaaccagtactcttaactgctgagccatttctccagctcatacactccctcctgaatacatgaaaaaatatattttaaaacacatttttgccgggcactggtggcacatgcctttaatcccagcacttgggaggcaaaggcaggtggatttctgagttcaaggccagcctggtctacagagtgagttccaggacagccagggctacacagagaaaccctgtctcgaaaaaaccaaaaacaaacagacagacaccaaccaaccaaacaaaatcgtgttttctgctcggtgtggtggcacatgcctttaattctagtactccggaggcagaggcaggcagatctctatgcatttaaggccagcttggtctccattataagcttggtcgagttacaggacagccagggctacatagagagcccctgtctcaaaaacaacaacagcagcagcaacaacaacaaaaccacgtttctgttggtcatggtggggcatgactataatcccaaaactcgggaagccagtgaaagtggggagattgagaattcaagcccaccagtgctacaaagtgagaccctatctcaaaaaacaattaatcaataaacaaacacacaatgtgccttcatgtttaatcctctcttcaagacacaactgtgtaattttcatttaaaatgccaaatatttgtgccaggtgtggtggcacacacttttaatcccagcacttgggaagcagaggtagatggatggctctgaattcaaggccaaggccagctttgtctacatagtgaattctagggcagcccaggttacatcatgagaccttgttccaaaaaaaaaaaaaaaaaaaaaaaggcaagcataagcccctgacccttccccttccccatccaatccctctcctcagaggaaacctctgcagacagccaatgatctcttcttaatctccttttgcatttcaaatgtgtcactgatggatcttttaaagttataattcctagccacctcccccccccccattttattgccagctgtgtgtgttggtgcttagagaaaaagcaaacattctaatgttacttcagcaagataaagccaggttggttaaccagctggattcgattcgcagtttacagcagcgagtctccagctccctatcgagtttgttaaagtccagtaggtttggattcagtcctggggttctgccttgctatagagttggtgcacatgttgctggctgaggactgcggtgtgagcagggaaggtcttggcagcttggaccgtgggctcagcagacccacaaggcccttagctgccagctgagtgggctgagcaagaacacaagctttttgtgcctctgaattggaaatgagaatgatacctgcagctgggtgcggtggcacatgcctttatcccagcgctatcgaggcagaggctaacctggtctacagagtgagctccaggatagccaggactacacagagagaaaccttatcttgaaaaaccaaaaacaacaacaaaagagacacctgccttgtgagccactgtgaaaacaaaataaaccaaggcttatgaagcccttagcccagggcctggttcaataaatattagttattaatattgtctagagacacgtagcacaaagtggtccaagcaaaacgaaaatgcttgctggttggctcctatttgggctccttgtgatgacacatacctcattattcctttaaggtcgttgctatcaccatctttagaaagttgactgttccttgtagggcattgtattcatgctcttatggggaaactgaggcccagaaatgttgagtaatagccacagtcacatcctaagaaccctcaaaacaaacatatacccaggtctggtgtttgccttctgcataacagcagctgccttctccagacagctgtgcgcacacccagtgggtctgttacagggagctttctgcctctgcatggctttgggcaaggtcagtagatgccaaactgttatccatcccagacctgtcaaacgaattgtgaaaactcatgggtcccccacaaattgaaaaatgtatcgtaactttaaacagacttcttctaggccatgggcttgagtcaggtgtatttttgtcaaatccctagagcggcagactcagcccaggaagtgttgggaagtgtatgcagtcattccaggttgtcagactggatgtcatggtgagaccagccaggcaaagtttaactccatttacattgttacagttttgtatatgaatgtaccagagcatgtgggccaaaggttaaccttggatggcattcttttttttttaaagatttatttatttattttatgtatatgagtacactgtagctgtacagatggttgtaagccatcatgtggttgctgggaattgaactcaggaactctgctcgctccggcccaaagatttatttattattgtatgtaagcacactgtagctgtcttcagacacaccagaagagggagcatcagatctcattacggatggttgtgagccaccatgtgattgctgggatttgaacgcagggcctttggaagagcagtcagtgctcttaactgctgagccatctctccagcccttggatgtcattcttacatgctgtcttttttttccctccttttaatttaagacaggatctttcactgtgaagtgggacactttctgattaggctaggctgcctggctattggtctcagggatccgctgatcttctctgcactgggattgtaaacacacctctctctctttctctccatgtctctctgtgtgtgtgagagagagacagaaacagacagacagacacagagagaggggggcgcctggcaagaggcaacgccaatcttcaagctcagctctgcccagctactgagcctgtggacaatgccctgcctcacacctgcccagtcagcctcattcaagagtccaagggtgagggcaggcaaagaacagatactgaagtggaggcagagcaaggactcaggggacagactctgtagccctaccccaaggcacctgtctgcggtgctttccttgggaaaggtggctgtgctgtggccacattccttcctagtctgagcttagtttgcccactctgtagcaaggacacatccttataagataaggagatgaacatgtgacacacatccaaggtgtcaaccagcagtgaagnnnnnnnnnnnnnnnnnnnntgttttgaggcttcttaggatgtgagtgtggctattactcaacatttctgggcctcagtttccccataagagcatgaatacaatgccctacaaggaacagtcaactttctaaagatggtgatacccacgcccttaaaggaataatgaggtatgttgtcatcacaaggagcccaaataggagccaaccagcaagcattttcgttttgcttggaccactttgtgctacgtgtctctagccaatattaataactaatatttattgaaccaggccatgggctcacccctcccaacagggagagggagagggagagattgattcagggaattgaacctgggtcatcgtgattacaaggcaagcactttactggctgagccatttcgaaagcccctcaatgtctttattcaatgaattttgttagccaaacgtccttgggtcagaatccttgcttcccaagtctacctaaaaaacaggtggttagataagacacaaagaaaatacagccagccaccttctctgggtcctaaggaccttctatctccctgggactccaccacaggacagccttccttctgtgcttgtctctttagacaggggatggggtagagcatctccaggacagaagcttcaagctcagatagtgtacagcaggaaagacaacaggtaaacatggataccctggaagccacgcatatatgcatccgagcatccttgggaggccaggttcccccatgattcctcaaacattcccagggggaaggatcattcaactccaatcccagagatgccacctaagtgtttgccctgcaaggactgctctgtgaaggtttgctgagggagctgggatttattcttcttcctcgctgcctggttgacaccttggatgtgtgtcacatgttcatctccttaccttataaggatgtgtccttgctacagagtgggcaaactaagctcagactaggaaggaatgtggccacagcacagccacctttcccaaggaaagcaccgcagacaggtgccttggggtagggctacagagtctgtcccctgagtccttgctctgcctccacttcagtatctgttctttgcctgccctcacccttggactcttgaatgaggctgactgggcaggtgtgaggcagggcattgtccacaggctcagtagctgggcagagctgagcttgaagattggtgttgcctcttgccaggcgcgtgacacactcctctcctccctctgcctgctcccctgttaggaaaccgagaggataatggttccctcgtggggtggtgaagaagatgagggagtctaatagttccttagtgcctggcccacacaggatgctcagggaatattttggttgctatccttggtttccgttcccccgtaggaattatagacaggaaaagacctcgctctgtaacatcctggggagactctccaaggactttgccttcttcccgacatgaccgcagcatgtgagaagtgggtgcttagcgtgtgtcacctgataaacatctagagcaagccaaagggcttgggagggctgggaagagggcacagctggtacagagcttgtcacgcaagtgtgaggacctgagttcagattcccccaacagccacataaacagcagggcccagtgtgcaccctgtaatcccagtgctggatgggtagagtcaagaacatccctggaggttgctgctctccaggttcagtgagagactctgtctcaaaaagtaaggtggagagtggcctggggcctctacatacataccacagtgggggtgggggtgggggagaaagggagggaaagagggagggagggagtcagggagagaaacaacaagctaaggactcccataactacattaaagcccctgccatctgctgatcacacacctggcatctttccttcaacccccccagtttttcagggcatctcaggcttcttgtccgtgttcatggagagatgacgcctgttcaccactttccctcttcatctaaggataacagcttgaagagtgagcgtccacacagccttcaggatcctcagacacctgctgctgggtctcttactttttgtcccctcgtttctgcaatgtcctctggtactatgtgggcctctgccggcagatgttttataatgccctccttttgcctataccccgtggatattttggtgtcttctcttataaacttgctactggaagttactccctcagtctctccctgttcctcagaagttggtcatgaggcagagagaaagcgtctgcctcccaacctttctgcctcgtcgtttccaggaattcctttgtcgagcaaagaatctctttgtgaggagaagaatctatcacttgggatttctgttcaggtttctcgcaggagtcagggccgggcaggcagtttgtttgccccggggcccagtgaggtccaactgaaagggctccccatgtgctcccagatctgccgatcacctttcatccttccgttgtcttcctgtcgggcactggcccgccaacatcgatcacgctggcccggaaggtggtgacgggtttgcgtttcttgctccctgttttgttcctttgcttagtcaatcgagtctccatggaaacaggtgcagcctttgtgttgcttttgctttgggtgaatcaatgctcccccgccccctctcctctttgggatcaaagggggaggtgaattcatcacagcaactgtggtggcctggggagccaggcagggattagtcctctagtcaagcatccccacaaccacagcgtggctgctgccgggtccacagtctccctttcgcctcctgagaccatcgggatgccgcgactcataaatgccctcgtcccagcccccaggttctctattctcaggggcagctgctggccacctggggcgggatcctgagtagagatcagcttgctcagcttctttggtgtgaccttggaggcaaggcctttgacctttctagacctttgaggctaagagattggagaagcttagaatgggggagaaagtcaggcttttggtagcaggactgcatttgccctaaagaaaaccacatctgggtatgcagtttttgtcttctgtcctagggccaatagtaaatttacgtttggttcaaaccagtgacattcaaaaaacggcagcccatctccaaggagcaacttgataaaaatctatcccccacccccccatccctcccccactcccgatccacagcacctccccttccctctgctggtccagggtcttccctgctggtgacaacctgtcagaggccttctgttccaggccaaagctcaatgcttttggatactcagggtctgctttgtgtcctgaggatcctccagtgtttcaggcaggaagggaggggctcctgaggagagctgtgagctttctgcttgagcggctggcttgcctgtcctctctgtgtgggtgtgctgcacaccactcactatccaacaggtgcactagtaggctctgcttttagtaggaaatcaggtgcaaatttcagtgcagccctggtggtgattaaatcagcaaaccctgccttatttattgaaaaaaaaaaagacttccttctaatatctaacctctcggaccatctgcttgttaagattagcaaaagatgcacgtgacctcgggttttacattgttcaaaagcctcccttgagactggaggtggggccacgttgcctgaagagacctctaaatggggtctgtggtaaagattaagttatccgttgcgtgcgccacttgaagctgccgctttcccaggtctaccctgagggtaaacgaccctctaacatctcctctggagtctaacctaaatctctttttattgtgttagaaagagagatgatagagcgagtatccctccaggctttcctcaaagaccagggaaatctctcctcagccttggccaaacacaccaggagtcctcggtctcctcctccagtgtctgcgtttcctgttggataaacaaggagaacagtagctgcctcatcgggctgttgtggaaatcaaataaagactgtgagatgcaccttgccaagagcctggcatatggtccattttcaattacgccagcagagtctgaggagattttatttcctgccttttatgtctcagagaccttctgctttttctcctcctcctcctcttccttctcttcctcctcctcctcctcctcctcttcttttcttcttttcagcctctcctagatgaagctccttgggctaagggacatcttcagacacccagaataggccaagaggggcctcacccctctgctgctctcctctaggctggtatctctcagctagcatagcctggaatatcccctaggcctccttgatttacctggggccttcagggtggggatgagtatacagaggacattctggctacctttctggttggcatctgtgtgccagggagacctgcggtgttgaggagtccatcccaagtcccttggaggttttgtttgtttgtttactttgtggacattgctatttttttgtttgttttgagattggggctcggtctgtagcccaggctagaccataagtcgccatgtagcctgggttggttttgagctggccaggatgttccttccttagctgttgttgatgatgttttatatttccaagattgattgatttatgatggtgcatatgagtgttttgttgcatgtatgtctggtacaagtcagaagagtaccgtgcatctcctggaactggagttacagacagttgtgaggtaccacgtggatgccgggaatcaaacctgatttctctgagagaacaagtgctcttaaccactgagccacctcttcagctttgtttgtttatttattttggttttggagacaggctttctccgtgtagccctggctgccctggaacttgctcagtagaccaggctggcctcagacttctgttttgttttgagacagaatcccacgtaagcctcaaacttgtgtttgtctgatctatttattttctgtgtatgtgtgtgtgcctgagaacatgtgtgtgcaccatatgtgtgcctggtgcccacagaggtcaggataggcactgtaccccctggagctggagttacccatggttaggaggagtcaccgtgtgcatgctgggagccaaactccggtcctcaccaggtgcagtgtgtgctcttcactacactctgcaaccctacctgtgctaagggccaggatcccagcatgcaccaccatgcctggcctttgtattttaatctctctctctctctctctctcttttttctaccaaagggaaaagcggtcgatccactttttggcgttactatttttttttccttagtaataaatattagcagagagtgaaactcaatcacaaagattgatagttgtccaaggtctaggagaagccaacctgtcttccagaatatggtgtctttggccttcttaaactctcacttggcagaaggcctaaggttctgaagcccagatgtgtgaaggagtggggccctgtctactcttggatgtctgcagcccttttggttgggaagtcagagttttctcttctctttttagtgagacccaagcctgtgtcgtccccagccattgttcctgtttgccttgcccgcttgcctggacatctgttctgataatgtttgctcataaatcctgtcccctagtgccaggaggcttagctgaggaacaatggagtccatggcctgcagccgagccctcactatggttacgtgacggtatgactgcaactgtatgtgtttgctgatgggtacccacacctgcgtctcaggccaggcagtggtgtgtgtgtgtgtgtgtgtgtgtgtgtgtgtgagtctcaggggctgcgggtggctacacttgggagaattcttcagagtgttttctatagacttctgccgtaactcatgttctgtaatgcttggtctctgtgaaaaaaaaagagatttttttttcctaatgcatttcaaatgctatttacatattagtttatttaccacctttctttggataggtatttttgtggtggtgttggggatcaaatccaggagggcttcatgaactgcaggctcagggaggggtggggcagggaccctacctagaggaagcttcttcttcaacaggcaaattgtaaggacaaaaagagatcggggagaagcagcaaattaaagtggacttaaaaataagcaatggagttggtcggacgtggtgcacccagcacatggtaatcccagcactaacacagcagagacaggaggactgtgtgttcaagaccagcctttaactatatatggagtgaaaagctagcctgggctaaaggtgaccctgtgtcaagcaagcttgtaagcagacaaacaaataggcaaggcaaccagttctctccctacaccttccccacaggaaaggaatacactaacggacagagtaaagtcctctgccctgggaagcacccttgacagacaatggcagggatggcagcagccaaggtgcggtgcacacagagggttccggcgcagccgcaattccacttttcttctctctttctaaagatttatttaatttatttttgctttgtttgtaagggtactttgctggcatggtgtctgtgtaccacacgcatgcagtgcccaaagaagccaaaagaagacattggatcccctaggattggagttacagataggtagttgtgagccacttgtgtgggtgctgggaatcaaacgagggtcctctggaagagcagccagtgctcttggccactgagctgtttcttcagctcccacagttgtgtttgatgtgggtagttacaaggtgtttgctgcatgataattcattacgcttatatggttttttttgttgttgttgttgtttttcagttttcggtatctatttaattttttcaagggtgaggggctggcaggttggctcacaggctggcaaaaactcagaaggcgttgccaccaagcctgaccacatgagtttgattcccccaaaccacatagtgggagaaaaccgactaaaacgaattgttctctgacatccacatgcgttccgtggcacatgtacattgcttttaaagctgggggcagggatgtagctcagagcttgcctaacctgcacaaagccttgggtttgaaccccagcatcacgtaaaccgactgtcttacttagtacagacctctgatttgagcacttggaaagtggaggcagggggatcaaaaatctcagtggcattgtgagttcctgagatctcacgggctacttgagatcctgcctcgatttccaacctccagaaaaaagggaaatgaaaaagaagcctactcgggatgcatgaacaggcagactcgcagggtctctatcttcccttgttccaatatttagtatagtgtctcttcagcctcagcccgaaatctagtccagcatgaaatatgcagatttattcgtcagctggattgacttccagggctaagctgagaccagctggggagaaaaggtgctgtccgaggactgtgcattgactcaaatggagaagttctcaaggaggctggttaaatgagggtggtaatggctggggtgtagaccactgaaaggtgatgatgaggaggagaggggggaggagggggaggagaaggaggaggaggatagaagtgtacatgtgtgctttgcatggatggaagaggctcagtcactccctcccatttccttcagtctccctctcccttcctcttctctggtcaaaatataggacaacatacagttttaaacatagagtttaacagagagttgttaaaaacctctttatcttcatttacttctgatcataggttccttggtgtgtgtgtgtgtgtgtgtgtgtgtgtgtgtgtgtgtgtgtgtgtgtgtgagatctttcttaagcacatgccccacagtcatcctcctgccccaacttttcactttctcttttcttcccattgcactggaaaaggcagagccatgcccagatgctcccaggagagggacagtgggggactcttgatggtcctaagacatgacccccacacccgcctacctgcctacctaaggctagctgagtctcacacttcctccgggcttctgcttccctctgcctaggtggaaggttccctaggaggcagccaaagttttgatctgaggaggcaggggtcaccagcggtggaaagacacagatgacatcttttggagatgactagctatagtcccctgtctgctctcataattgggatggatcacttgcaggtagagtaaatcgaggctttgtccaggagctggaccttcctctgggttctagagcaaggctgcctgatggcctgacatatgtgctgttcatcatgatagccgttatccacaggaatgtcagtgcagtgtgaggaccagagttcttagacaataaatgctgcgaggtaggaatcccagagcttgggaggcagagacatggaatccccagagtgcgtgtgctgcctgggtagatgctgaaccagcaagctgtgggtgccattgagagaacttactgtaatatgtaaagtggagagtgtacacagaagcacgtgacatcaaccgtgggcctccccaggcatgtgcacacatgtgagcttacacacacacacacacacacacacacacacacacacacacacacacgaaagcgagcatggcaggaagtggtttgtgcactgaggaagtgcagatatgatcttatttagtttaaatttaaataaaaatgtcttattgccacacatgactagtgactacctttttgtgaaggaaagttctagaagtgggtttcttagaaggccatagggtcatgccagaaatctttcaaacctgtttgccctccccttatgcactcttgcacatgcatgtatacacacggggggcttgtgcacacgctcgagattacgcacacacaagaaccaatgctacctggcaacaggatgctctagatgccatgtcattgtataaaagttcactgttgaaatcttatctcgagtgaagcagagctaccattgaccacaagtgcccccacctccaccggacttcttcttgtccttgtgtgacagagataagcaagcaggaaaccatgctccagcaagtctgccttgggcaatcccaggcctcagagcatgacatcccattcaggcaagcccaggctcccttacacatcccctctaggaaaggggaaccagcatccatttatgatcggtgacgggtgtacgtgtgtgcagcccagccatgagagtgcacagccccactggctgtttgctgccatttcttattgaggatccaaagttctggccttaagtaagagagattttgatcttttgcaagacactaccatgttttatagacgtgtgcacggggtacagatgagcccgcttttgatggttctaccttggactttccaagttcatgatggaatgaatgtgtacccgtgcagcatgtctgtgtcttactttcagtgtggcattcaacacgttacatgagcttgtcaacgctcagtataaagcaggctttgtgtcagatttctgtgcccagctgtagactagcataagtattcagagctcattcaaggcgtgtagcgctatggtatctggaaggtaggtgtatggaatgcgtttatgactgatgatatttccagtccacagtgggtttctcaggatgcggctccagcagcaaggagcatctgtatttaccagatgggtcttttctcttagtatccacccccactttcccacacctagagcctggaagcattctgccatccttgtcctctgagtgagtggtttgtgcctaccacagcagcctctagcttgatgcccctggttctctcaggccaggctgttggccctttacttccgacaccagattctccctccgtccaaggctcccagatacatgcctccttttcttgcacacaaacttgaaatctcccaggatatcacatcccatcaatttcaaatgtccaggaagtaaccctgcatgcacttctgtctcccctcagcccagtggcatgtacgactctgcaggccatgggaagagtcctcatcaacaggagtgccattgtatcccagcctactctgtgcagatggcgacagagctcctctgtgctagccaggatttcctgtgtgctgattgctgtctgaatgtcccaagtagtgctcccttgtgtgcctgcttcccagtcctctaaaacctacacctcattctacccaaggatacaggatgcacttctctctctgtgtgtgtgtgtgtttgtgtgtgtgcgtgcaaaatatatataatataactgtcatcatttaaccttaaaaattaaattatattgactcagtgtgtgtgtgtccccaaaagtgtgtggagatcagaggacaacttacgagtcagttctctccttctgttatgtggatcctaagatcaaatttgaatagacagacttggctattccccaagaatatgtagtcccctcgaaaagtcactctgagcccttggttggttggttggttggttggttggttggttggttggttggggctgagttatgtctcatgtagcctaggctggcctccaacctgccatgcagctgaggatgacctagaacctctggccctcctgcatacgtcctgtgcactgagatgacaggtgtgtatcattacagatggtttgaacagtgctgggaataaacccagggcttcatgcgtgtggcacactgagttacacccccagctctgtaaccattttctaaggcccagctctatggcatttagtgcattccctctgttgtgcaatcatcaccgctgtccatttatagaaccttatcattatccagagagctgtgcacagtagataactgcccagtccccgagacccggaaaacctctgatcttgcctgttttgggtgtctcatgggagacaaaccatatactgtgtgtccttcaggtctggcttatttaatttaacatattttcaaggttcattcatattatagcatatatcagaatctctctctagttgagtaatgttccattgttgttggtgtgtgtgtgtgtgtgtgtgtgtgtgtgtgtgtgtgtatgtgtgtgtgtgtgctaccctttgcttattcatttgatggacacttgagttatttcagcctgtaggctattacgggcagtgcttctatctatactgtggtaatgacctgtttgtaccccagtttcaactcttttgtaagggtacctaatgagcagaatgaccggaccacatgagaattctgttttccactttttgaggctctagcaatcattttggcacgctgaacctctttatattcctactgatactgcatttaatattttaaaatctttttaaactatagaagtaacaggaggagcctggtgtgatggggcacatctgtgatccctgctctcacgcagtggaaggaggagggaggatcagttcaaggatcagttgaggttaccttggctgcatggcaagtttgaagccagcctgagctacctgaggatctgtgttaaaaataaaacatcatggcacatgccttcaatcccagcactcaatcgaggaagaggcaggtgatctctttgagtctgaggctaggtctacaaagagagttccaggacagccagggctgttatacaaagaaaccctgtctcaaaacagcaaacaaaaattaatgaataaactaaaaataaatcaaggtggcggccttgtaccccatcacccgttgcttttgttagttgctgccactgagagataagacgtgggtgatttctctgttggcacatgttctccagattgcagtctatgtggagaatgcagggtcggttgagccttgcactggaagccaggatcccagagccaccttcccacagtctcagcttttcctaaatcaccccccacccccacccccattgctctaataagcagaactgtgagctccgtcttgctggagggccacccacctggcctgaggaggttgacagacaggtcaggccaccttcccctctgggaataccaggtttcacttcagcaaggaactcagccagagtttgtgtgtgtgtgtgtgtgggggggagcaggctgagtgtgggggtgcatacacgttcgagtgtacacaaacacaagtccacaccaggctctagcagtattggagggaagggtattcactgagagcttagaggggccccaaggcacttagtcccttcccatgctcagaaagacctatttaggtctggcacaaagccacccgggaagacaaggcccagcttttgccagtacctttctcggcagagccctgggcaactgctgggagagaggacacagaggcctggaaaatccataaacggagtcgtcggcccctgtgtcttggctccttgactgtttattgcttcctgccccggaaagccctttacaaacacagccgctttgaggggggctggaggggtgagtgggacctggtgggtggcctactcgcgctgggcgtccagagtgcccaaggaacagcatctctaaacaagcctactgactgttgtctgtctttggctgccaccctgtagattccggggagcagggtaggagggtaggggtggatgaaaggagggggtgctctctaagagagctgagaccctcagagaaaggcagcgtagcgccccagagagctttttattttgtcattgacagaaacagggccctcacttctaatttctttcaggacttcagggttaagctctgatgaggtgtaggcagaaatagaatgaagacttcacctcctggggaccttgcaaggtggagtggggagtgggggaatgggtggccattccctagggcctgtgaccagcctgaggatttcatgtaatccaggctggcctcgagcttgctatgtagcatgattggaagcatgcaccaccatgccccacatgaaacctgtcttcttattgtttacattgctgttataagaacagaggtcggctggtgagatggctcagcggttaagagcgccgactgctcttccaaaggtcgtgagttcaaatcgcagcaactacatnnnnnnnnnnnnnnnnnnnnnnnnnnnnnnnnnnnnnnnnnnnnnnnnnnnnnnnnnnnnnnnnnnnnnnnnnnnnnnnnnnnnnnnnnnnnnnnnnnnnnnnnnnnnnnnnnnnnnnnnnnnnnnnnnnnnnnnnnnnnnnnnnnnnnnnnnnnnnnnnnnnnnnnnnnnnnnnnnnnnnnnnnnnnnnnnnnnnnnnnnnnnnnnnnnnnnnnnnnnnnnnnnnnnnnnnnnnnnnnnnnnnnnnnnnnnnnnnnnnnnnnnnnnnnnnnnnnnnnnnnnnnnnnnnnnnnnnnnnnnnnnnnnnnnnnnnnnnnnnnnnnnnnnnnnnnnnnnnnnnnnnnnnnnnnnnnnnnnnnnnnnnnnnnnnnnnnnnnnnnnnnnnnnnnnnnnnnnnnnnnnnnnnnnnnnnnnnnnnnnnnnnnnnnnnnnnnnnnnnnnnnnnnnnnnnnnnnnnnnnnnnnnnnnnnnnnnnnnnnnnnnnnnnnnnnnnnnnnnnnnnnnnnnnnnnnnnnnnnnnnnnnnnnnnnnnnnnnnnnnnnnnnnnnnnnnnnnnnnnnnnnnnnnnnnnnnnnnnnnnnnnnnnnnnnnnnnnnnnnnnnnnnnnnnnnnnnnnnnnnnnnnnnnnnnnnnnnnnnnnnnnnnnnnnnnnnnnnnnnnnnnnnnnnnnnnnnnnnnnnnnnnnnnnnnnnnnnnnnnnnnnnnnnnnnnnnnnnnnnnnnnnnnnnnnnnnnnnnnnnnnnnnnnnnnnnnnnnnnnnnnnnnnnnnnnnnnnnnnnnnnnnnnnnnnnnnnnnnnnnnnnnnnnnnnnnnnnnnnnnnnnnnnnnnnnnnnnnnnnnnnnnnnnnnnnnnnnnnnnnnnnnnnnnnnnnnnnnnnnnnnnnnnnnnnnnnnnnnnnnnnnnnnnnnnnnnnnnnnnnnnnnnnnnnnnnnnnnnnnnnnnnnnnnnnnnnnnnnnnnnnnnnnnnnnnnnnnnnnnnnnnnnnnnnnnnnnnnnnnnnnnnnnnnnnnnnnnnnnnnnnnnnnnnnnnnnnnnnnnnnnnnnnnnnnnnnnnnnnnnnnnnnnnnnnnnnnnnnnnnnnnnnnnnnnnnnnnnnnnnnnnnnnnnnnnnnnnnnnnnnnnnnnnnnnnnnnnnnnnnnnnnnnnnnnnnnnnnnnnnnnnnnnnnnnnnnnnnnnnnnnnnnacccgcccccccctgtgcccccccctccgcgccccccccccgtggaagtctggctctggagaacagctgcagccctagcaagatgcctcagttgcagtcccagggccactgatgcctaagaggacttttgtggatgtttttctctcatctgagaacgggacagggtgggatgtgacacctgccttctttaggaatgctggtacccaggcaagcagcctcctctcagatagatggctgaggggatatcttccatctctcagatgctggctccttccagaatcttcctcataatgctggcttgacctccctgacttaaaaccctgcttttctaccctctactgaagcctctctgacttaaaaagttttggagttagcctggtctgtacacacttgtgctatcccgacccctgctttgtgtgtaccgggacccatggcttgcttattcttttcttactttgtcagtgctgggaaccaaagccagaacttggtacagtgtacacgctagacaagccttctacacacagctgctgcactccctgcccttggcttttctgatgggatttcacaagatagctcaagctggccttagactcctgctcctcgtggctctctctgctgctccagtgctgtgggtagtggtgtaggccaccatgccaggcctgcctgtgttttaaaggtggcctgtctctgccaacttctacaggggatctgttttggttgtgcaactctgaacatgccacaccctcctagctcctttctgaaagtaaaatagtatacagtccttgctcaagaacaaaaggccctcggctcaggcctgcgtgttaatgattttcaagtgtggctacttcctcttgcctggcctgacttgcattggcagctggtggaatgtgcctgcattcgtaatatgtgaggagattccaaacccgagcagggaggccctgcttctgatactagagcttgggacagcaatggcagaagagcttgctaatgagctgggaccctttttctcacccacccctacccccaccccgttccctgctttcctgctgcagctacacactcaatgttgtccagtctagcttctgctccaggaggactgcaggggacactgttgccaggtcacgccttgtgcccagccctcctctgccagtatcccatctgcctgagacagagatacagagtttgttgttttaagtaggggtgtgagattcagggcagaaacctgacctggttgctccctggctgtgcgaccttagagaattaccttgtacctcagtttccctacatgcaaataacagttcccaattttcagggttcctgtgaagagttcctgtgactagcctcgagcctggctgatgcaaaggctcctggactttctttctagttttacaaactattaagtggttcgtacatgcagcgcagtcacggcgggcagtcagcatggtcagaatggaagtgatttactttagagtccgtaaatgacaagatcagcagatcttagtatagtccccagatgtttctcactgtggagcttgggtttccatttcacctcctagttcctatttgttcgtccctttagacaaattcttaaagatttatttactttttttttaacaaaattatgtcttcgtatctgtctgcatatgggtatgtgcacgggattgcaggtgcctgaagcatctggatttgcagttgcgggctgttgtaaaccatctgatgtaggtgctgagaactgaactcaggtcctctgtgagagcagcatctgctctttacccccaagccttccttccttgcagcccctgtctgctttcgttattttgtttgtacaggctcaccacagatgaaagtggtatgaagctgaattccgtcccatggtgcactgtgctctctgatggagaagctacaacacccaggaagctcggcatgtttgttatgtccggttgaatggagaggcagggctattgcttatatctgaatcaaggaggcagagtttatggcataccactgggtcaaggaggcaggtttagctaatcttggtaaaagccgtctctacaggggtgcagtcttcaggccatatgtaggcagcacggggagaaagctatggcagacacttttggcatgcactattaacattcccacttgggccagaggacagctttgccctctgagcctccggaggctggaagactttgctagtttcccatcagtctgaggctttggtcctagacatggctgattcttgtcaacagcaccctcttataatttcccacactagagcatcctttcttccttacccagctctggtgatccctacagctactctgttaagaactcatagatttgaaaagtggtcatcatcgagcactgtttgatcactagctgaatgtagtgttatctctttctcttgtgtgtgtgtgtgtgtgtgtgtgcacatggaagctaagggtcaatgtgaagtgtcatttggttttattttgtttttcattggactggaactcactaagtgtgctgagctagccagtgagccccagggatttacctagtcaggtactaggattataatcaaatgctacacattttttatgaggcagggtctctaatgtagctctggctgtctatgtagaactcacagagatctacctgtctctgcctccccagtgctgggattaaaggtgtaggtcattatgcctggctacaaaaactgggttctggggatcaaagtcacccctcatgcttggagggccaccactttaccagctcagctgccatcgcagcccctatattgtgggtgtttccctgctgttgtttctttgtgtgagacagggcctcaccatgtagcccatggctggcctaggactctccacttagatgaggctagccttgaactcatggaggtttgcctccgcctcctgagtactgggattaaaggcatggaccatcatatcctattttaatggtgactgtgaagcgattcaaagaccgaggaatgtcttaaggcttctagaatgttctaacagccgctggctgctcctcatgctgtctccctcatgtctggataaccttgcaacccatttgtatcctctgcaccttggctttgtcctgtgctaggaggaaactcatgtccacacaccccaggctgcggcttcccaggagagacagagcctgtgcaagttggggcttgtgagcgagtgatttggcagcgcttttgtttgatgactgttgacttagcccaggtgtgcagacccagtgtttacagaaccctggttggctctgggctggagctggaatggagaaaatagatgttccagggaggagggagagggtgtggataatccaaaagccatttgtttagggcttggagccagagagaggctgtttctgcagattttcctaaatcaaccagacaggaactctttgtaatgagccttcaatgtatgttgacctaataatcctcaatacttactccatacacatgtgagccatctggggcctcagagatgcacggggatggaagggctctcagagtgcacagggtcttccctgaccattttcacaggaggtctaaaaggtgaatagacttgcccaaggctccttggctacttagtgacagagctaaaactggaattcaggtctctaaactgcatcaccctttaagacgacagtcccatgtgaccatggatcggaatggctaggagttgtgaaaatgcaggttccctggacacacactcccagaggttgctatttaatagcagcggagaatgtgtccttagcaaagccccagggacatctgatgacagtgagtgccacactctctgcagatgctaccagaatgtagaaagcatttgcttcccaggctgtaggaaggcgcggatgcattcctcgaggccggagagaggggcagagccaagctctagttatttagctggttttgagacaaggtcttgtgtaggcctggctgaccttgaagtgctatatgtagctaaggataattttgaactttaaatcctcctgcctccgtttccgtactattggtgggataggtaatgtatcaccatgcctgtgttatgaagtattgcggcttaagcttgcggctttggagttccatgcatactaggtaagcattcgatggactgagccatagcatcagccccttgcctggctttaaagcagaatgcaggtgaccagtgttaggagactccgaagtctcttttctgccctgtgaggcaaggctggttagagttggccaagctctggacaacttgtagcatgcacctgactcagtgttcacatctataaaatggctagagtgaggtgcacggtgcatgatctttttggagacattgtcctgaggatcctgtggcagggtgtttaaggaaggtctgccaaaagacatccactgacaggttctgggtgatgagtaattgctgggcgtgggtgagggcggcttctgcttcatactgatgaatttctactgaccgatccagtagagagacaggggttctggttctgtgatgaaagtgtccaggtccttctgactctgagggactgagatgcagtgaccttctgcaaaggtgtcacgtgggctatcacagtggtgtctttccctggtcctgacccccaccctcacctgtgcatcctaggggttttcagtggtttgcccaaacagaaactgttgctcttcattttctggaagtagaagagatccaggctcctgggaagccaaggaggctggttgagagactccagggatgcctgccccttctctgactacccgttttgagagccagaactacaagcccagctggccctaggcccttgcctaccatcctgccagaggctgggcttgcaggctgtctgtaagcagagccttggctggcaggccactgcctgcttctgccagttctaccctgtcaggtcagcctgaccccaccaatgctataaacacgatagtcacaagatagcagctgggggaaggggttcctgggggattctggggcctcaggtggccctgccatcagtctgctgaagcgaaagccatgcagagagagcatcaggaagtaggtgggctagtggtacccgtgggtatatgtgtgtataatttcaagccagccttagagctgggtgaggagagaagcagaccaaaacccctgggttgagagagaagggatttggaaaagacgccgaaaagggtgtctgtctgggacggttggcctagaataagcatgtggcagggcttaagtgcattgctgagtgtggcaaggagcaagagcctgttagcacacatgggcctgtgagctgtatgttggagggagccggagtgtgttcagggagagagccctggctcgggatgctaaggatctgcttcctgtctctcagttaccgctctctgacctttggccagttgtaccttctagaagtgatcacatgaggttgctactctgtttgtgaccacagggacttcagagtatgtgtgtgatggggatgactgagaacatctgacggggagggatgctgggtgctcccaattgtagaacaggagctctacaacgacaaagctatggagggaggagtgtcagagggatcggggtcggggggaccaaggcaagcagggagcagccagtggctggggaagtagctggctctaaacaatcccatcagccatctgtgctgggtggaatttctgacagtgtcctggctggtgtgtgtgtgtgtgtgtgtgtgtccctctctgctgcagctgctgcccgctcctttgaagtccagccaccctgttcctcaccctagcctgtcattcctgagctgcctaagcagtgtccctgagcatgtagactgtctcctagagcctgaagacccttccctagagggcaagctccccaggagccagcctcctgtcttaatggcagaaaggctaggccacccaggatgggataataatattcgagttactttcaccttacaaacttctctggagtccaggtctggccagaaggactgtgggtctagttccttgagggctgcaggaccacccatgctggggcttctatgcttcatgtagttcctctgcaaggctggattgggcctgagatcacaaattgtccctgactctgcccctgctgtgtagttttggagtatgcagggcttatgtcagccctacacctaaccagtccaccacgagtgcccctcagaaggcccacctaagaggtgtaggtctccttgttttgcagacgtgtggagagatacgagtcacctagacaccggcagaggcaggatctgggacacccacattctttggtctcctattccagctcaacacaggcaccaccaaccacatcaggccctcaagcccaggtcctgtctccacaatgctgaggacagggacatcccactgtccactgggccttcattttccccttgttgtcctctactaggaatgagcaggtccctaaccaaggttggggcagaggggaaatgcatgctgggagctcaagctgttccagaaaagagtgtacccaagcagccccaggtgacagggctggtggggactctaaagctgccttgttttgttttgttttgttttgttttgagacagtatttctctgtgtagccctggctgtcctggaacgcactctgtagaccaggctggccttgaactcagagatctgcctgcctctgcctcccaggtgctgggattaaaggtgtgtaccaccatgtctggctatgcccatgccattctgctctgggctggctttcttcttgagactttttctatccttgatgtcttctgttgctgttgttttatttccagagatggagcatatagcagaggtgggtagagcgctcgttttacctcatgcaggaaggtcagtcatccccggcccagcataaaatgggtgtggcagcacatgcctatgatcccagtatttaggaggcgaaggcagggggatgagacccttaagaccatccttagtttatgtagcaggctggagacagcaaaacatttacttcggtgtccgactgttgattcagattctgattccgttgctatgtgagcctatgtgagtcagttagccactctgagcttcagtttccacatctataaaatgggtagagtgatggtttcattatagttacttgatgagatgattcacaacaggcattgagcaagtgcctgtccatagtgagtactcataggcacttttatcataattatcaaagaagcagctcaaggggccagaattgtggctcacttacatagcacacgcttatcaggcccgaggtcctgggttcaattccagcaacaaaataaataattgatggccattgtggataacatacatactcaaaatgaacggagaaaatcactggttctgctagtcttttgatgttcttagggctctttacatattttcaaataaataaatgaacatggacaaacattttgaaaggacacaaaaatcttaagagccctctgaccctctccatacacatgtgcagacattcaccatcctcaaccccttccacggcacactacagtgtcacaactaaactcacaggcggtctcattgctcctctaagtctcaagcaaaaagagacacgaggggctggagagatagctcagttggttaagagcactggctgctcttccagaggtcccgagttcaaatctcagtaaccacgtggtggctcacaactatctataacgggatctgacatccttttcgggcatgcaggtgtacatgcagacgaccatcatttcaccgacctcctactggaggaaatttctaatagttctgattttctgctgtcccatgaccacaaggctcagctttctgtccatgttaggcttgggtcagtataggaacactccatagaagtgggattcctgaatcagtgtgtgggagcacagggcgcatccgtgtgtcaagtagagatatgggtcgggacctttccatccttaggctctcttctgccgttctgagccgagcatcccccacctgctgttacttggtccagattttccaggcatgctcacatgctcagctgtagagagctgactgtcaagagagcccctgctgctatccagactccagagctcatctgtagaccttgcaggcccctctattcaaactcttgggcccaggccaacatgagctcactcctggagcgggaccagcttcctggccctgcacctgagctgctggtgaccttttctccaggtctgggtctggacagcttcacttggtcccaggcacgtacatgttcctgccagtccctggggtggagtgggaagcagcccctctccgcccaatgaggtctcatctcctcagcccaaagttgaactgttggctgagttggctgcgtttgttgatagagagagaagctgttgtggaaatattccctaacccgcccaggttttggtaaacagtctgttactcaggcaacttgacagctttggtgggaaggggaataggagcttggtaagaaaactgggttttgtgagctttctgttcttctagatataactttaccgccagccctttcttcccttgctccctggacttgaacactatttcataactggaagacccctctccggccctcctcagctcccttagggttagtttgtgccctgggattcagtgctgccaccagtctggcgatctttgccgtgtgctccttctctgtccgttctgtggtctgtgccagggaacagagtggctctccagcctgacggatgctgtgttgaatctggaatcagacagcttgggttcagatttcagcttggccacttagccatgtgaccttgagcaagtgtttcactctctgtagctcacttttccgtctgtaccattggagagggtgggggagcatttactgcataggactgcagaaagcataaagaacattgatacacgtgaggccctttgccacggtgcctggtgaggagagaggctcaggcggtgggcatcagtcatcgtggctacgatgccgttatcatttgttggagacaggggtctcactatgtagccctggctggcctgcaactcactatgtaggtcaggctggccttgaactcacagaggtctgcctgattcaacctcaggtgctgggattgcagggtgtgaactatgacacctggccttaaaaataatagtatctgttattacattgaatttatttgtactgtatgtatgtgtgcttaagctcactcaagcacacatatgaaggtcagaggacaacctgcagaaatgagttcacttctaccatgtggatcctggaggtgggactcaggatgttagaggtggtggcaggtgcctatacccactgagctacctcactggccttatttatttatttatgagacaagattttactatatagaccagggtggccttgaactcacaaagatcctcctgcctttgtacctttgtgcaaggaataaaggcacgcacccaccccccacacatactttagttttctgttttgatcctgggttctcccagtgtcagcccatttagcattcatcctgtgcttacaggtatgagccaccacccatgagcttaacacaggagctggttgtgttatgaatgtctgcagagcttcatcgaagttggaagagggactggactcctcagggcgccttttatggctgctaagtgtcagggcagggatgaaggatggtgtcctaagggctggctgaggatctagggccagatctgcccgtgggggagggatcttaacttcctttggagtcctttgccctggtgcctcaccctcagacacatgtggctacagactcagtcacttgtgttgatgcagaaggaagagtcaggcaaggttctcctcacgaagcagagcagatccacttagatagaaggaggggttacagaggcgttgtgccatgcgctagtcctgggtatggcctaacctctcaccctgctagctctccggcctggaaaccatgtcttctcctagcagagagtttgggcgtcttttttttttcttctttaaatttatttttctttatgtgtatgtgtgtgcacctctgtgtataccatgtttatgcaggtgctcacagagaccagacgaagattttggatcccttgaactggagtttcaagtggttgtgagccagctaatggatgctggggactgaactctggtcctctgcaagagcagcaaactcacttaactgcctagccatctctacaggacacaccccgccccctttactccccactcccccgcccctttctccttatcccctccagcactttcaaaaaaaatcctcgtgaaaaagagatgactaacagaggtaagggaccaacccaggtcacacaacagggcgtggcaacagtgtttttccctcgggtttccctcctcccgccatgtccaacctggcctcttgctctggttgctgcgccagggttagagaatgggcacaggtgtagctgcactgcagttctgggggctctgggaatgaggcaggctttgttgtcgtccgagcagctgtgaccgttggggctgagtatccattaagccgtttccgagccctgggcgggagcaggaggctcggcatttaaaggtcacccggcttttgaagctacagcgacattaatagcttgtgaagaaaacaagcctgtgcaggggccggaggacaaggcggctctgtcagcgctgcccctcctccccagggtgcttggccacacacatgccggcgcgggcgcgggcgcgcgcgcgcgcacgcacgcacgcgcacacacacacgcacacacacacgcacacacactcacacacacacacacacacacacacacacacacacacacacacacacacacacacacacacacacacacacacacacacacacacacacacacacacacacacacacacacccggtagcttctacctcttgctcatccacctctccctcctcccttttcgagcttcttcagttctgatgccttagaactcggcagactgccctgcacccacccccacggtgtccgaggtgacaattgtatgaggaggcggctgccgagcccagcagcttctctgttcacaccgcgtcacccacttaaggtttccctgggacttagccacatgacctcattctgacccctctggccctggtatcatggagtcttgctgaagcagtcagcctgggccccccttctcttcccagatgggtagggtacagatgtcacccttcaggtctgatagcttgtctcgaggctctgccgcagcactggctgcccaggattcccagtccgggtaggcactggaggataaaatgccttgggtggattaattccatctcctgaggagagagcacagaaagtggtgtcttgactgcaaccccaacccccacccccacccctttctgagatgcctgtgctatccagtggctcttctgtcctcccgtcagtcccaagggtgggggatggggcacaacaaggttctgggagggcagctgcggttagccctttcccaggagccgctgtggcctgggccctgggacaccacctagtggcctggtctgttggtgtcactgggctatgcatggttcttaggcaagaaatgagtcccttaagactattgcaggtggaccagatgttccaaacgctcctcatccactgacagagaggaagtctggggtaggtggagatgagagagggagagggagagggacatgnnnnnnnnnnnnnnnnnnnnnnnnnnnnnnnnnnnnnnnnnnnnnnnnnnnnnnnnnnnnnnnnnnnnnnnnnnnnnnnnnnnnnnnnnnnnnnnnnnnnnnnnnnnnnagggagagggagagagagggagagagggggagagggagagggagagggagagagtaagtgctggcccacagcttcatacctccttctggggtctcaagttctaggttgaccctgttctagcttggggaaaaatacagtcaaattggcagtgggagaggcactgtctcctgacccctggggctgattgtgtagccgtcagaattgtgtgcagggagagaaggccctgatgacagtcagagagagcttgtgggatccaagcggctgctgggctttggacacccatagttggttactgtgttaccccaccggttgcttctctgctcgtccacttagttagcacaggctgactgtactgggtgctttgtggacactgggagctccacactggatgtggcaaatctgccctaaaaaatgctgatctagtgtagaagatggtcactggcaagtgcactgtatatgatgtttgggacagaggatgacaaagcagggcaaaggtcaaggaatgccggaagacagactgagctgatagagcagtctccctgacaatgtggcagggaccagaaggaggagagacaaggtgctgagagagcctaaggtcccgaaggagagtgtaggtttgctggtcaagtgatctgcacagagtgctcagggtggctggatgaacggcagccacgtcagtatgtgtctacgtgtgtctgcatgtgtctctgcgggtgtacctgtgggcatacacctgtacttcttttgcttgtgtcccactcgggctttgaatttgctatgtaactgcggatggccttgaagcaagtgttcctcctgcctccgtttcctgattgttgggatcacacatgtgcattaccacacctggcttatgcagtgtgctggactcaacccagagcctcctgtgtgacacacaggcaccctactgactgagctgcgtgcttaggctccatacagacacatttgaaggcaggaacacaaaggatcttgtagaccatggtgaagttctgggatgtggtctaaggactaacagccagggactttggaggtaaggaaagacatgtggccacaacatgcagtccacaaggagacagggaggtggcagaggacaagaagccaccagatcctgagggacagtctaaaagacaaggaaggggattgttgtgggttgaatggagggcgtaagggatacgttctttttgttttgttttgagacagggtttctctgtgtagccctggctgtcctggaactcactctgtagaccaggctggcctcgaactcagaaatcctcctgcctctgcctcccaagtgctgggattaaaggcgtgcaccaccacgcctggctaagggatacgttcttttttttttttttttttaatttatttacttattatatgtgtgtacactgtagctgtcctcagacactccagaagagggtgtcagatctcgttacggatggttgtgagccaccatgtggttgctgggatttgaactctggaccttcggaagagcagtcgggtgctcttacccactgagccatctcaccagcccagggatacgttcttaaagatggtctccaggctttgacctcagcgggcagatatggtgcttagacaggagacacaggcagggttggatcaacctattctgtcagagctactggtgggcatctgggcagagagcatagtaggttgcatagttgtggcgtagagggagtgtctggaggaaaggcgctagcatgcagctggcagaagatattaaaaccacaggatttcctcagcgggtatagcatgaggtaccaaggcctcagaacagcccaccacagcctgtcccagcagggacttcctccatcctaggaacccagataagttccatcgcagcatttctctctcacacacactgagaggaagatgaggtgctgagccctgaaatcactttcccaatccatgtgagcctgggctcacatacaggcccagccctctgatcctcaggctatcttatccctggtgcagacctggccatcagcttcacgaacaggccttcctaaggcaggaggctggctgttttgaccttggacaaggctggctgagccacactggggcagcctgcccacctccctgggccaggctccaagtgactcaggccttgccgcttctcactctccagttggaagttggaagttggaagctggaagcgggcggctctgggcctggctctcatggcccccgggggaggacaggtatgaagtttctgcttccaggtccggaggtcacccacacccactcgctcagggagaggtctaacgggcccagcaggtttgattcacttcctccagcccagctcatcagggattaccttcctgtttcttgcccacaggagcagtgggttcaaagagacgacctgctctctccaaggtcacgtagccaggtctggggcagtgccagcagaccttcccccccccccccccgttctgtctgggtcatgtttcctttgatggaatgtcctaaacccaggcacacgtggctgcatttctcgggctccttggctctcagccctgcaagccttacttggcatgttagctctctcgggaggtagggataccaattccggtttttctacgtacccactaactgtgcggttttggacaagtcactcgacttcactgaacgattcctaccactcattacaaagtggagacgggctggagaattataatgaagatgaggggtgcttcggtggtgacaggggaaagtgtcccgtgcaagttcataagcccaggtcatctgcgcgcctcctttctttcatgctttttaaaccgtttttgttttgttttgtttttgtagcagggtttgttacaaaaggcagtgtgacttggtgattttttttttttttctaatgttcctcagccctggcctcaggccggctttaagtttagcaaggaatagaaaggacaatgcgagcccctacctggtgctagttacagcagtccgggtgtctctgaggcgtgcctgttcaccagatcccgtttccccggcttcctgtttctgaactactttctccaaacccacagagctgccttggtggaaagagctaggcttttccattgcccatgccatgtccttgagctcctttctgcctctccaactgtgctcatgtgggaacacagttgcagggccaggttcgggtagtcacaggaaccagggtgtgtcctgctgcagaggcctcagggcctggcttgtgccgggagatccacgtatccatccacgtatccatcagtgatctggaggaagccctgggttgatagccaggggctgggaaagagcccctgtggcctccctctttcccttccacggggcagtgcagccgcacactcctacccaagcctgcaggcagtctgccacaggctgagggccagtttgtttcctctacatggaaacagtgtaagcccctaagagcagggccctggggtaaacagtcagttccaggatgccttgccagggtgtctcaacactcagagacccagaaccccagggacctgtgagagggggttcatggaataaatgtgagcccactatttttcttctttctcttcatggagttgcccttggcagagagacaagcctggtctctaatctttctgtctgaattacactcggggcagggagatggtagtgtattctcaagggccttaatcagagcctctgaacccatgtgtaatatcatcagggcttggcttctggggcctggtggcccagaggttagagacttgagtgtaggccttcactcttgacagaagcactgaattgcctcagacctcctacggtaggggtgggcaggaggggagaggaggccatatgtatttggcaactttcttggactcattctcacaacccaatccctagactgatcatccgcggccacccttgtgacatgactctggcctcccttggccgtgacttgctcctctgggcaggcaggaaatagagggagtgggatggtaattcctgattcacttagttgacaagcatgtcacgcgatgaggtgggtctctgttgtgatgtgggacgatgcctacaatgtgccattaagtagataaacgtagtggtacagtagtagaagttatggtttaattatatagcaaaacaaacttatgtgcatggtagcatgtgtaaggatgccatacctacacatggtgtgggcacatgatctcattaaggagttctctcagggcaggaagggacttcagtgcccactagctattcagaacctgtatgcttgtaatttcccactttcaaatacaacccatcaggtgggcacagtggtatatggctataattccagcacttggatagtgaaggcaggaagaccatgagttcaagatcatccttagctacatagtgagttcaaggatagcctggactacatgacaccctgtctaaaaaaacaaaaacaaaaacaaaaaacagacaaaacgccttcaagatggtcaggaggtaaaggcacttcacttaccaataagactggtgacttattgatctccagggcccacccacatggtagaaggagagaactaacccccaggagttggtcctctgaccacatgtgtgtcacgccctccctcccacaaacacacaaaataaatgtaatttttaaaaagtttttttgttttgtttggtttggtttttttcgagacagggtttctctgtgtagccctggctgtcctggaactcactctgtagaccaggctggcctcaaactcagaaatctgcctgcctctgcctcccaagtgctgggattaaaggcgtgtgtcaccactgcccaacttaaaaaagtgttttaaagttccaatcaattcacctctctggaaataggcaggcacccagaataggatgacttaaaaatattatgtcttccaggtggcagtggtggcacatgcctttagttccagcacttggaaggtagagctaggtggtggatctctgtaagttcaaggccagcctggtctacagagagattaccaggatagcaagggttacatagagaaaaaagcaacaaacataagaatgttcatgtccttttgaggaaaggggggaagtaaggtgttaagacctcagtgttgtaggtacatgaagccacttcctgagtatgacctctcacctggaggtttgtatggatgcattgatgggtcttcccatcctgggtggagtgcctccccactaccacatcgtccctgcttccctctgacccaatcttttctgtcatggcagtcagtgcatggctactctgagtgtgacaaggatttgctcccgggacagtttctccatccgtggttaaagccatggctcccatcctagaaaacagagactaggcctacatttggttcatcaagcttaagaatacctttagaggagctgcatgtgacagtaccgtggtaaggaggcagaggcagaggaagcctgaccttggggacagtagaggctacagagtgatggggacagtggggggctacagagtgagaccctggcactgttctacaagttgctgaaccaattcaatcttgggataagatggagaaagtcagattttttttttattgctttgcagtgtgtgtgtgtgtgtgtgtgtgtgtgtgtgtgtgtgtgtgtgtgtgcaagtcaggggacaatttgtaggagtcagttgtctccctacaccatgaggatgccagggattaaactctcgccattgggctttgtggcaagcacctttacccactgagctatctcactggctccaggttttggttctttgagacaagctctctcgtctaagctgaccaaaaacctcaaggatgacctggaatttctcatcctctggtgtctgcctcaggaggtgggagtgctgggcttacactcctgcctcacctagtcaggttttattctgtggtgggagttcaattaaggacttcatgcatgtgaggcaaacacatcacccagtgaactgcagccccagccccggatggagtgctttcagacattcttgtctcctttgtctacactaccagtgacatcaccttggttaccatttctatgccaggctctgagagggccgggtggtgttctgttgtagatttcagtccctaatcacacttgtcttagagtcctgtctgtgcacatccttgtgatagccttggggacgggctaggttaactgtgacagggaactgggtctgagatggagcatgaacaagacttagaagtacagtattcctcacgacaggtttgggaagctcagtatggtggtgcatgcctgtaatcccagcccttggaaggctcatgcaggactgtagaacgctgaggcaccgggattaagagtttaagacaagctatgcaatggaggtgcacctttgatcctagcactcaagaggcagaggcaagtgaatctctgtgagttggaggccagcctggtctacagagggagttcaaggacagcctcagctatactttgagtttgaagtcaatatgagctcgatgagaccctatctcaaaacaacaacaaaaaagaaaacaaaataaagaaatagggaaagattatatatgtatacatgtgtatgtaagcatatatacatacacacacatatatatatttacatattaacatgcttatcatgcacaaagttcccggttctatctccagcatccaaactagggaaaacagagagaagctaggttgcggttaccctcatttcctaacagctgaccaccaaagagttcaggttcgtttgcttcagctcctgactctgtccctcatttcaggtgacaccgtcagtccgttgcagccccctgtgccaggatgactcgaggatgcggatgatctggagtccatctaaagcctggctgaggtccgcatgccgccaccaccctggtccctgtcccctagcccgggccgtgcattccctccaggaggaagcactgaagtgagtcttccgagcctgcggagcaagcaagtggcccacgacggagggaccccgggccagcggcttcttggtttgttggaaacattctcccgcagcggctctgcaagatgaccagcttgtttcgcaggagcagcagcggcagcggcggtggcggggccactggggctcgcggggccgggacaggggctggagatggcagcactgcccctcaggagctcaacaacagccggccggcccgccaggtgcgccgcctcgagttcaaccaggccatggacgacttcaagactatgtttcctaacatggactacgacatcattgagtgcgtgctgcgtgccaacagcggagcggtggatgccaccatagaccagctgttacagatgaacctggaggcgggtggtggcagcgcctatgaggacagctcggactcagaggacagcatcccaccggaggtagaggcggggctgggaaaattcacctccaatagaggtccagcctcttttagcggctctggttgctcccagccacagcaacagccacagccacagaaggcggggtgggtggtgggtgggaggtatgggggttgggggtggggaggtaggggggtcaaataacaagcatctccccttaggaaacctaagatcagtcagtgaccaatattatggatagcaatcatgcactcattcaacaaatacccagcaaacaagcacctactcaattgtatgctagggatagcacaaggccctggataaagtcctaagaactaaggtgcttgtttaatataagccccactccaaaatcctgacccctagttccaagcctagcatttccagtgtgtattttccaagaaagaccttttggtttttcaagacagtgtttcactgtgtagccctggctgtcctggaacttgctctgtagaccaggctggcctcaaactcagagagatctgcctatcggttgcctcctgagtgctgaggttaaagttgtgtaccactgctgtgggttgccctgggtttatattgtaatgttaattctgtttcttcaagggaggctgcccggatgaagaatggatcaagtattcagggaatttcttgtgattcttctcccccattctaactggtcaattaaaggctagagcctgtggttggacaatggaagggaaaggtggaggtcttagagagtagaggaagggtagggaacaatggagaaataggaggaggaaggtagatggagcagaaccacatggcctggagaagccacaagtaacaagggatctcgtagctggggaatagattagtgtagtggtagatctgcccactctaggcatatagtttataaatataataagtaggttgtgtgttttttacatgggcttattgcagtcctgagggttaaacccaggggttcatacatgccctgcaatccctatgcccacacccccagcccaggatttccctgtgtggagggtggggagcggggtggagaggagcagggggcagggaacatagagacttacatttactctgtagctcaggcagaccttgaactttccatcctcctgcctcaacccctcgggtagctggaatgacaagcatgctctaccaggcccacctgaactccactctccccaaagtccagcctgtgctgggcacctctaatgcttcagaaatacatcttttcgtgtttctcaaacttgaccagagcagtcagtcacctgtgtttacatgggaactctgggctagatttgactgcagaaacccagactccttggtcctcctgcctccccctccctcccttagtgagtgctaggattctttctccatggagaagctgtgtgggcaaggatgacttgagccagtgtggtggtattttctctccaagcacatagtggtacaagggggatgtttgcaatgagtagatgatactagtgtttgtgtgtgtatatgtgtgtaaaccagagaccagtttagggtgttgttcctcaggatccagttaccttggttttgtggggcagagctggctagctagtagttagggtgctgcagggattttctactgtctccacctcccctggactggcatgactagtgggggccaccagctttttatacaggtaccatgtattgaacccaagaccttgtgtggcaaacaccaactgagccatcttctcatcagccctgttgacaatgtctttgcgcctcagctttttgtcccctttccctctgttaaacacccctttgacctgcctggattagtcaatggaaagaacagtgaaaaatccagacgcttctccttgaagggaggcgcgagttcacgtgcatgtgtgcacgtgtaggtgcattctttcagtgtgagctgggacgttccctgcatgctttgactctctatggccttgttggtccttggattctggcaagcggggcgtttcctgctttgcccacagctcctatggcatcaccgacctctgcaagggttcctcagcccccggggcagccatcctgtgctgcgcttctgttcccaagccatctgttgtccacgttgagccccttctgggccatccttggctctctcccaacccccacctttggaggcctgcctgggaccatcagcaggcagctcctgagccactgcaaagtgctgcggaaaatttctgaggagcagtagtaagaatgacaataactactgactggagaaagcctcgtctctcgaggctgatggatggtgggctggctcaaggggtatccttgtcacagagaaacggctcctgtcagataaatggcccagagcctgcttccctcccagcctccggaacacctggctggcactcatcacccagtgagttgggctaggggaccacagaacttttagagccagaaaagctccttgtggctagaaatgggggggggggcacaaaggcgctggggtttcatttctgggactacagattttccttactggcctgctcaccacctgcctcttccccactatcaagcattgctctctagagggctgtgtttgctgctccaggaagctgcactgtagtgtattcacacagggcccgcatgcctacctgggctccttgagtctgggggcacaccacagatcagaagaaattcatggagcgctctgctcctctccctctcaccacaccaggcctggaccctgtccctcagagccaatggctgtcagaaataggggtgtgtgggctggaagaggcagcagccagtcttctgggtaccctaggatcttgctgagcacctcctgtgctaggcaacggggtgtcaccaggagcccattcctcacaccatctccccacccccacatccttttccttcctggtggaatgtggggtgagcagtgcagtggcctggccagccaggcggcctcattcttcttctgcagaagcatctgtttaaatactttctgtctcacaggaaagaacgcgcattccagggcgggagcctccttgggtcaggctggcgtgcagagcattgcagtgtgctcactgccagggagtctctgccagccttcttgttctgggcgcagctgggttaggagtcagctgtatcaatggaacctggcccagaagaagcagagacatagctttaggggtgtcttctccaaacccagggttcaagcagggttggggacttagggtctgagtcagtcagggtctctgagcccttcccaggttctttggtctctgagaaagtggggactgagctgtgggggaggggtnnnnnnnnnnnnnnnnnnnnctttgcgtgaccccttcatgccttcaaaaccagtaccacctgggtgacccgtacatattaccaagtcccgctgcagcaggagtacaaccttggccatctctggaacacagcctctttgtgctttcagaaaacacttcccagaagatgtcacctcattgatgctggtctcttcttaatcaccgctaatttcttagctctagctaaccagcatcaatagtcccagtaatgcaaagtttttgctttggtagttctggtatcttgttaatcacagctgattcttcagccccagctaaccagaactacagaatcttcacaatcaaaacagcaatggccctaaaaagagtttttaattttccctctgaaatttcacaaaccagagctccatcttctgcagtgttctcaacattaccttccaagctcctacacgacatccgacagagctcttaacaacggttgaatcttcaagcccaaagttctaaagtccttccacagccctccccaaaacatggtcagattgtcacaggaataccccactcctggtaccaatttgtcttagtcagggtttctattcctgcacaaacatcatgaccaagaagcaagttggggaggaaggggtttattcggcttacatttccatactgctgttgatcaccaaaggatgcaggactggaactcaagcaggtcaaaaagcaggagctgatgcagaggccatggagggatgttctttactggcttgcttcacctggcttgctcagcctgctctctttttttttttttttttttgacattacatattcatgtttttattttctttttcttttttcttttttttctttttttttttttggcaaaatagaataatacactgtgcccacacctctcaagtcttagtgaacatttcagaagtgagagtttaaaactttaaatggatgactacacagcaggacacagaattatactgttgcacacttgaactcacagctcacactaaacaaaagggatttggaatgcatctagagctgaaagggaacattaaaatgcaaacccacattcgttaaagcatgaaataaaacattattttatgtgatgagacagatacttccaacagcttatttaagatttaaatactgggattctaaaactctaggacatcagcctgctctcttataaaacccaagactaccagcccagagatggccccacccacaaggggcatttcccccttgatcactaattgagaaaatgccttacagttggatctcatagaggcatttcctcaactgaagctcctttctctgtgataactccagctgtgtcaagttgacacaaaactagccagtacaccaacccttgcagtctctctcttccaccctgtgtttgttttgctgcgctcaagcattgcttggatagatgctgctgccataaacgatcctttgggtcagtgcattgtcctgtttgctaagtataattgaggggtcatggtagccatgtgttagtgttaatacctaaggccagcatcgccaaggagtagctcctagcagcaatgcacaaaactcctaggacacgtcctcggccatcatccttctgtttcatcccaatgccactgaggttcaaggatgagttattcatatccgaatcaatcactgttactacgtctctctttattgtctctgacttagatcctggaaaggactctggagcccgatagctctgaggaagagcccccgcctgtgtactcaccaccagcgtaccacatgcacgtgttcgacaggccttacctgatggctcctccgaccccacctccccggtgagcgtccatttttgtctcagagcgcagtggggagaaacagagacaggagtcggggttgtataaaccacagtgggaaattggccgcccccaccagacattattctactaactgcacacttggactgtggcaagagacattttcacgggacacctgggagaactttcaaaacttcaaccctgtgggactggggaaatgtctctcaggaggcagggagcttgttgcacaagcaagagggcctgggcttgaattcctagccctctgcatgtaaaagctgagcacagcaggccacatctgtcacaccaatagctggagttgcagagccgggcagctccctgcagctcagtgaccagctgagttagccagtcagtaagttccaggttcagtgtaaaaggatcctaaaaataaagaggaaggctagagaagatggctgtctctaaagtgcccgcagagcaaacacaagttagctatagcagcatatgcctatgggatatagttaattaaatatggcacagcctccgggtccttggaatgtgtaatcaagggagaggacgggtaggaagatgagctcatgaaatattgtactgacccttcctttccccagcccatggacacatcagtaattaatcattgtgctgtctcctgcggaggcaagatgaacctcagcatccctcccaccccagcacccccaggtagctgtcagtcagtccccagtgggatgactgtttgtcacccctcagctagtgatgttgagaggattttaaagccatgtnnnnnnnnnnnnnnnnnnnncgtagctggggaatagattagtgtagtggtagatctgccccactctaggcatacagtttataaatataataagtaggttgtgtgttttttacatgggcttattgcagtcctgagggttaaacccaggggttcatacatgccctgcaatccctatgcccacacccccagcccagtatttccctatgtggagggtggggagcggggtggagaggagcagggggcagggaacatagagacttacatttactctgtagctcaggcagaccttgaactttccatcctcctgcctcaaccccttgagtagctggaatgacaagcatgctctaccgggcccacctgaactccactctccccaaagtccagcctgtgctgggcacctctaatgcttcagaaatacatcttttcgtgtttctcaaacttgaccagagcagtcagtcacctgtgtttacatgggaactctgggctagatttgactgcagaaacccagactccttggtcctcctgcctccccctccctcccttagtgagtgctaggattctttctccatggagaagctgtgtgggcaaggatgacttgagccagcgtggtggtattttctccccaagcacatagtggtacaagggggatgtttgcaatgagtagatgaaaaatagtgtttgtgtgtgtatatgtgtgtaaaccagagaccagtttagggtgttgttcctcaggatccagttaccttggttttgtggggcagagtctcttgctagtgaggcaaagctggctagctagtagttagggtgctgcagggattttctactgtctccacctcccctggactggcatgactagtgggggccaccagctttttatacaggtaccatgtattgaacccaagaccttgtgtggcaaacaccaactgagccatcttctcatcagccctgttgacaatgtctttgcgcctcagctttttgtcccctttccctctgttaaacacccctttgacctgcctggattagtcaatggaaagaacagtgaaaaatccagacgcttctccttgaagggaggcgcgagttcacgtgcatgtgtgcacgtgtaggtgcattctttcagtgtgagctgggacgttccctgcatgctttgactctctatggccttgttggtccttggattctggcaagcggggcgtttcctgctttgcccacagctcctatggcatcaccgacctctgcaagggttcctcagcccccggggcagccatcctgtgctgcgcttctgttcccaagccatctgttgtccacgttgagccccttctgggccatccttggctctctcccaacccccacctttggaggcctgcctgggaccatcagcaggcagnnnnnnnnnnnnnnnnnnnngaaggtgtaggaggtgtggcctagctggaggaagtagtcacaggctttaagagcataaagccccaaaccacttccagtttgttcaacctgcttccttgttgacctcaaagacgtgagctctcagcttcctactcctgttgccttgtctgctactgatgctgcgccttcctgctgtggaggactctgatcgttctaagagccataagcccaaataaactcttccttctatatgttgccttggtgttttctcagaacagagaagtaacggatgcattcctgggctcatatgtatcccggactgacaaagaacttgctatataacccgtctgcctctgcctcccacgtcccaaggccccccatattttatagggaaacatttcagagggtaataaaccgtggtatgcttctcgtaaggattccgataactttaataattgccagcacatagctgatcgtattctccttccacgcctatgggtcgggtgggggtggggggggcggcagattcatatccactggatcacaggaacttggcctcaccctatctgtccttaacctttccctgccctgctttctcagtgaagagaaaagggtccggagggacagtaggcagctgggctgctcaccctgagcatctatcttacttaggtgtgcaggctgcccgaggggagggcgtgactgcaaagccctcctcgttgaagattccgacctaaagccagtgggtgtttttgccctattaaccagtcatcggcctcacagggcctgttctctgattctcagcagacaggacaggaggatcagaagtggtctgtcctgcggtcctttgagctgtgacaccatcttagtcagaactgctctgacttcctacaccagcccttcagcaagcttgggcctgttccctcatggcaggcaggagggtcattagagggtcacctgtggttttagcccctccctctctcctatagccacctcccagtgggttgcatttttgctccagctgcagatggattggagagatgctggagtagtcaaggggttagctaactgggggcgcgcggggggggggctctatgcagctttcaagaggttgttttcctatctgtgtttggctgggcctttggtgatacaactgttgtgggggggtgggtgggcactaatagacttgggtgagatcacttctttggccagtcattggtgttctctcttcttcacatcttcccaagagaagtaatgagacaggttcaaggccagccaggacaacttagtgagacactatttcagaacaaaagtaaaaagaactaggctgtacctccctggtagagttcttgcctcatgtgcttgaggctctgcattcaattccagatatcacaaaacaaataaaacacactcgggccttaatgtgctcatctataaaatgggcctttaacttgccaggctagggttaagagaagagatatggtagtgcaccgaaggagggtatggatgacatcatcagagaagagtacagaggacacagggtctcaagtgtgcagtccactgaggttgcatagcatgtacataccatgtgataggcacccagacccataaacctcttccacaggccccagagtccccagcacttcctcccattctcgccaaccctcgcagtctctctcttccaccctgtgtttgttttgctgtgctcaagcattgcttggatagatgctgctgccatgaacgatcctttgggtcagtgcattgtcttgtttgctaagtataattgaggggtcatggtagccatgtgttagtgttaatacctaaggctagcattgccaaggtgtagctcctagcagcaatgcacaaaactttttaggacacgtcctcggccatcatccttccgtttcatcccaatgccactgaggttcaaggatgagttattcatatccgaatcaatcactgttactacgtctctctttattgtctctgacttagatcctggaaaggactctggagcccgatagctctgaggaagagcccccgcctgtgtactcaccaccagcgtaccacatgcacgtgttcgacaggccttacctgatggctcctccgaccccacctccccggtgagcgtccatttttgtctcagagcgcagtggggagaaacagagacaggagtcggggttgtataaaccacagtgggaaattggccgcccccaccagacattattctactaactgcacacttggactgtggcaagagacattttcacgggacacctgggagaactttcaaaacttcaaccctgtgggactggggaaatgtctctcaggaggcagggagcttgttgcacaagcaagagggcctgggcttgaattcctagccctctgcatgtaaaagctgagcacagcaggccacatctgtcacaccaatagctggagttgcagagccgggcagctccctgcagctcagtgaccagctgagttagccagtcagtaagttccaggttcagtgtaaaaggatcctaaaaataaagaggaaggctagagaagatggctgtctctaaagtgcccgcagagcaaacacaagttagctatagcagcatatgcctatgggatatagttaattaaatatggcacagcctccgggtccttggaatgtgtaatcaagggagaggacgggtaggaagatgagctcatgaaatattgtactgacccttcctttccccagcccatggacacatcagtaattaatcattgtgctgtctcctgcggaggcaagatgaacctcagcatccctcccaccccagcacccccaggtagctgtcagtcagtccccagtgggatgactgtcacccctcagctagtgatgttgagaggattttaaagccatgtgaagatgtgtctttttctgggttagtttgatgacgggagacgggagagtgggcagcaaggacccgggagacttgtctcagctttgagactcttgttctttggaagcttaaaaagaagctagtgccagtggggtccgttgtacgtgaagagcttgctttctgggctctgggtttggcagagcctaggtgtggttgctttgtccaggagctgctgtttgttagaatgacagacaaggtgagaggagatgatgggggggtgctatagtgatcccccaattctagacatcttacgagccctagaacagtgacagtggggagcctggagagccagtaagaacagctgctgtgtgccagagacggccatggtcctttactcgatgacttaaggacttcagtggtaagcagtgcagtcgcccatctcacagctgacaaagctgagccccagagggttactgctgtccccagtggccaaggctggggtgtgaacccaggttatcgggctgggttttcatcgctatgtcctctcctccctgctgagaagtcacactgtatgtagcttagggagctgagagtttggaaagttagagggtggggtagaggtcctccatggagttcacaggaggtacaggagatgcaggctggggagtgagagttagaaccttcgtgagactgccagagaggtcacgcctggagcagcttacggagatgagagctaaatgattttcttttgattcctcctaccctgcttccagacaggatttctttgtacagccttgcctgtcctagagctagctttgtagaccaggctggcccagaactcaaaagatccatctgcctctgcctcctgagtgctggaattaaagccaccaccgcctggcttgacttctgtgtcgttgcttgtctcaatcctctatttcatttatgttgctgtggcaaaacacccaaaggcaaggactggattgagagaaggcttatttggctcatggtgtgagagggattttagttcactgtggcaggaaaaggtgtggcagaacagggccatgggccttttacatcacctgcatcaggaagcagagagagctggtttagagccagaggcaggtgcaaccttccaggcctgcccctagtggcctagatcccacctgtaaagagtagcttctcaaagcagtgccactaactgcagacaaggagttcaaccatacaagcctgtggggacattgcagaccaaactataacgtttatcccaaagtacttaaatagtttctattacagtgtgtgtgtgtgtgtgtgtgtgtgtgtgtgtgtgtgtgtgtgtgttgcttgtcctctgggctcttctactgtagatcagaatttcaggaaccacaaacatgggggcccagaagctgctgtccaagcgagggtctgccatccacacctccttactttagtgagactgaggacaggactctgttctaaacagagggagtggtgtacacacaggagaagcagggaggggggccatctcgaggagctgttcatcagtgagcagagaggaacatgggtcggtcatgggggctccgtggagcttccaaagaacacacacaccttaccctgcaactacaggagactccgtgggactataccacggcagggcactggtagactggtattctaaaaatctttggccgctgaaggttaggtttgagagaagctagtggtctggtccctttctgtcaccatgtccctgggatgagcctggtaacaggacagtttcagagctcagatactgtcccgcaggatccaaagacgcaggcccatctgctagggtcctttgcttaggttttgcctgaatgatgcagctacatcatttagtgacctgtgacagggtcccgcccacgtgggctgcacgtccagactccactaaacccccccccccctttctggaaaggcgcatgtctgagatccttcccagccaggtaggtggtccaacatcctgtggttacacatgacgtcatcatccacctcagcctgaaattcgagtctaggggttccagggactcagtacctgaagatcctcttggcctcggtctccttctcctcccccactgctgctgggttcttctctccatctgcctgagtcccagcagcccaggaggcccctccacaggccgcctgctgtttttgtgtggaaattgttttacctcagcagctcatttctcccattcctttccaaccataatggagttgccgggctgcctgccctgggctggccccctccctcagtcaggcagctgaggatgacttcaccccagggttcggaggaggatgactgatggactttccaggacccgtgcccagcagcccgggagactctggaagaaaaggaattctccccatgtcaaccctcatcccgtgggcatcccagaaatacaatagctagaagggtcttagtcagagtttggactctccctgggcagtctgggtggattccagatataactgagttggggtgtttaccttgccccaaacgaagcctagacaagccttcttccattatggctggaagtggtgtctgtgggactgacagatgggccttgggagggaaccagagcttgggacagggacataagtggcagagcaatgtggaggagaccgagccctgggctcccctgcaggcgcctctctggatatccatgtgtgtctctggcttcgagctgagctccccctagcacttagcagctggttatccgtctgctgctgcccccgccctcccctcagccctcccctcgtacccaccgggccaccagcccaaaatagaaaaaggaaaggaagttatttccacaagttagcggcagacggaaaagctcccctccagtgagggggtggagggattcctggagctggaggccaaatcaaagccaggccgagcccagcatggcccccaccacctccccgccgcctgctttctccatgtgtcatttccctgattcagcaggacacgtgtcctgcggttgccacgcagcaggctgctggggagtcctggagctcctggcccagctccaggcttccttcgggcctgggcttgggatagagcctggggtcagggcagccaggcccttggtcctctcctgtcctggctgcttagcacagacacaccttgtctgggaagagaggccccatagaaccccttgggaacaagaccctaactctgggctccatctgttcaagctgcagctcatggggatgtgtgtgtgtgagtgtgtgtgtgagtatgtgtgtgtgtgagtgtatgtgtgtgagtgtgtgtgtgagtatgtgtgtatgtgtgtgtctgtgagtgtatgtgtgcgtgagtgtgtatgtgtgtgtatgtgtatgtatatgtgtgtgtctgtgagtgtatgtgtgtgtgagtgtgtatgtgtgagtatgtgagtgtgtgagagtgtgtgtgtgtgtgagtatgtgtgtatgtatatgtgtgagtgtgtgtatgtatatgtgtgagtgtgtgtgtgtgtgtgaaagtgtgtgtgagtgtcttagtacctgggcaggagagcagcaagatctagaatttataacaaagtaccaggggctcctcaatgttccctcccctttgctggctgtagttgagccagaatgtgaactcagacctgcttattgtccaggaatctcagggagctcccgcctcaacaaacgaggacagaacgggctgtcggcaggctacttgtctgctgttgggggtgtgtggggtgtgatcgctattatttaacagtccagcactgtgccagctagggacatagcacagaaatgtctgaccccacccccaccccccaccccccagtctgtaggggacattcagaaagtccgtatgtaagtctgcaatgttgactggctgccttccttcttggtctgctgtttccctcgttcagcagaatgcatgcctgcacctttgttcagaaagcggtgtaggcactggatactctgagcaagatctccatctgcccaagggcctgggatgggccaacagagctatggctaagcctgactatgccctgctctccttacctctcatcccccaggattgatgtcccaggctccggacaacctgcaagccagagacgctacagaaactggaacccacccctgctgggcagcctcccggatgacttcctccgaatccttccccagcagatggacagcattcaggtaagaggctgccctcgaacctccaccctacctgcctgcctgtccagcatctctcctgggctacatctgtcatggtctgtaccagccagttttacttcctggttttcaagctcaggctgggctgcttctgtggattagaatttgtaaggaaagaaaggcaaacctacagcctcgcttcccgtctggcctggctcttttgctgcaaccatcacctcaggctggagggagggaaatggggtagctaatggtgggattgctgctttcctttccataggctcttctttcagaagatgcccctgatattggggcatgcagctggcgtagagggacatgtgagactgggagtccatgcacaggtggctgagctgtttacaaattgattttcaggatgatttaggttccaaaagaaggaatgaggtgaccctaggttgggaggaaaagtccttttgatgttcttcctgcttctgctgcatgggcagttctgagctatccagtgaattctggctagtgactgggtcccgttgggaggaggggactacatgatgagacaggaggattttgggaaagcacacctgcgcatacagctgtacatggatttaagtaggtgatgtgtatgctcactcttcctcagggtcaccccgggggctccaagcctatgagtggagagggaggcccacctccggcaccagggcccatggcctgtgaccaagacagccgctggaaacagtacctggaagatgagagaattgccctcttcctgcagaatgaggaattcatgaaggagctgcagcgaaaccgggacttcctcctcgccctggagagaggtgggcaccaagcctcaccacacagaagagagtgacaagggcaggagcctcgggcctccctcaggaggcgtcctgctggatgtgggcatgccaggcactttctaacctgcttgaacttgggcctccctgggtcatgcaggagctctgggtttcagtgcaggctggggacacctgagaacccagaggaagagggtgtgctcactgggccatttcccctgccctgcatatctgtttgagctcagcattaattagtctaggcttgagagacagggaaagaaatgctgcctttcctacgaacctctagctacaagtcaaggataccatgtcttgagccctgtggacaaggtgactggctttatgggtgacagaatgggagggtcctgaatgaaggttagagcaggatatttgcatgatcaatggatgggtcaccctgctccccaacctggctgcttttccttttgaggtaaagtttggagacagggctgaggaggtgggcttgtcacagagggaaggagggagaggggagggaagggagggagtctgaaggtgttggggaagaaggaagcaaattgtactgctggcttgctgggctggaggaagcaggcctacaggcaggaaaaaaaaatggtgtgactagagccaggcagtggtggtggtggtggtggtgcacacctttaaacccagcactcaggaggtagaggcaggtggatctcttgagttcgaggccagcctggactacagatagagtttcaggacagccagggctacatagagaaaccctatgtcaaaaagcagaacaaaacaaaacaaaacaaaaagagggggggcttggcttggctgaacatgtagctgatacctgcaagcccagcataaggacacnnnnnnnnnnnnnnnnnnnnnnnnnnnnnnnnnnnnnnnnnnnnnnnnnnnnnnnnnnnnnnnnnnnnnnnnnnnnnnnnnnnnnnnnnnnnnnnnnnnnnnnnnnnnnnnnnnnnnnnnnnnnnnnnnnnnnnnnnnnnnnnnnnnnnnnnnnnnnnnnnnnnnnnnnnnnnnnnnnnnnnnnnnnnnnnnnnnnnnnnnnnnnnnnnnnnnnnnnnnnnnnnnnnnnnnnnnnnnnnnnnnnnnnnnnnnnnnnnnnnnnnnnnnnnnnnnnnnnnnnnnnnnnnnnnnnnnnnnnnnnnnnnnnnnnnnnnnnnnnnnnnnnnnnnnnnnnnnnnnnnnnnnnnnnnnnnnnnnnnnnnnnnnnnnnnnnnnnnnnnnnnnnnnnnnnnnnnnnnnnnnnnnnnnnnnnnnnnnnnnnnnnnnnnnnnnnnnnnnnnnnnnnnnnnnnnnnnnnnnnnnnnnnnnnnnnnnnnnnnnnnnnnnnnnnnnnnnnnnnnnnnnnnnnnnnnnnnnnnnnnnnnnnnnnnnnnnnnnnnnnnnnnnnnnnnnnnnnnnnnnnnnnnnnnnnnnnnnnnnnnnngaggaggaggaggaggaggaggagcagtggctgctcttccagagatcctgagttcaattcccatcaaccatatgttggctcacaccatctataatggaattagatggcttcttctgtcatgcaggcatacatgcagatagagtactcataagtataaacaaatatcttaaaattcattaaaaaacaaaacagagggctagagaagcagggttttatagtccctcctatgaccgcctctccaactcatttcagactacatgtgacttcccttcagtgccagcagcactggggctgacaggccagagtgaggactgtattagtaagatgtatagactatagcagagctgagattgggagtgtgaacagagaccctgtattcatccttggctcctggactctgaatcttgggtgagttcctgctatcaccccatatccatatttaaaagggcccagccgtgtgtttttcaggagcagaccctccgtcccacagctgagctgggaaggcaagaacagaagggtaaggtgcccccgctaatcccagctcagagaaagaaaatcccatagaactgattcctaagcaagcagccaggagcttaggcctcaccagatgttcagctgggagttttcttgtccttgattccaaattaacaagggacactggagctgatgaactggatcagagtgactgaaagggaagttagcagacaaggtgactcgggatgagccaagttacaggacggtgagctgcagcccaaggatcctgagagacccacgcaggtggctcactgcgttctgactcttggctgagccctgctcttgttcccgttcagcatctgggaggcgttcttggctctctgtcctttctgcttcaattcacgagagttaggatgcacagagggtcatgatgtgctggcaaatggttaaccttctgctctgggtgcaggagaaggctgatatgcaggctggggggatttccgagacatagatctccctaccagctcacttcaaaccaccatcatggctttgaggacatgggactgctagagaggctggaacccaaggccagccagtttcccatacgtgcagcagatcttaaggctgcccttgtttgctccgaagaggaaaatgtaccttgcaagaaagaagtactcttgcaacttgccttaaactcctatagcagggaagaagccgggacttgttctgtaataagagaacagacagaaacagggatggagggtatcctctgacctccttccctagagccttggccaggtgctcactctatctcttagtgggacctcggagacccaatgggcctggtccctcagcaggtgtctcctccttccaggaaccagtgaaaccaaccccactgtgtcagaagatgccttattcagggacaagttgaaacacatgggaaaatgtgagtcttgccccttttcccctccttgtcccagctctcttgaggcaggccctgtggcctcatgagagggagagagcccccccttccccccccccccggaagatttttaatgctattgactcttgctgaactccgggtgacattttaatcacaggctagctccctcagccttcctgccttactttattctgcagctgagtctggagacaaattaagtttaaatcctcttgagccatctgtctgttggaaaataatgtgtgtcggtgttcacattctctgtggcgtgaggacttggccgagactggagtcactggctaagtctgctttctgtgggaatggcagacattttgggataggggaacctcgccccactgcccgctttttttttttttttttttttctttttgtcatcctcccgtctccagtctcatagacccataaccagcggggatgaggctggagcctttcaaggttttatttcagggaaaatttccgatgactcatggaaatcctaggaccaactgtggaggtggctggggaggggcgggaaggccgtggcagccggcagcgggaaagaaagccaggagccgtggttgtgtggttgtccgcctctagggaaggaatacccggatcttggtctggaggcaggctgctgtgtacttgacgagtgctggcctgtgctgcccccggaggccgacctgggatggcgcacttgctccctaggtggcactggtgtctgctgttcctgtcactttcctcttcccagtccccacccaagggacctggtgtgccactctgcctggctgcccccaaacctggagggaagccatctctggctctctggagcattaagggctcacgagtctttctgccccagctacgcgcaggaagctgtttgaactcgcccgagccttctctgagaagaccaaaatgaggaagtcaaagaagaaacatttaccgaagcttcagtcgtatccttctgcttggccctggggtggggtggggagcactgacaacagtgatggagatcctggctgaaccttcctcgggagtgggatgcggctctgcggccgcccctccttgatttgtggaccaggaaaccccgtcatcagctcctgtgttcctttccctggggacactgtccttccagtgccttctttacttttggccttgagtcatctgcattttgggagaaagacatcgtcttcctattgaaatcaccgagtcttcccctaattttactagaactggttcataggtccctgcagctgtgtctccagaggcctgcttttttttttttttttttttttttccacttttggctttttgaatgaaaaaaagtttccctgtcttcacaccaaagttctcatccgtgcttatccacagggccccggatattgaaaactgagtagttgaaggagaaaggggggaaatgtcactctccctgtccctagtgatggggacagagtgaaggggtcgggcctggctagctggtccattgatcccaggagagggtcctggaagggacaccgttaggcagtttgggaacgggagggatagtagaagcctctgaggttggtgggttatcaggacagagcacaggcagattgaacaagctgtctcagtacccatccatctctagaatagttttcctgaacagtccggcaggctgggggctgctgcatccacagccaacctcctggatgacgtggagggccatgcttacggtgaggcaggtcaggggacgttgaagtctaagttgcttgggatgggtgacccttcaagaggaggtcctgagggtctaatattcagcaagggagcactcagtctgggggacatgtcaggggttggcagacaggtggcccacagaaatgtggtcccttgtcatgaggtgcacacactgacacctgcttcccatcatccctgaagaggaacccagggtgccaggcactattcccagagaatggtccctagggaatgagggatagactggcagacctcatacacagacaaccataaattagaaaggctcagtctagcatgcagcagtggtgcacacctttaatcccagcacttgggaggcaaaggcaggcagatctctgtgatttcaaggccagcctggtctacagaacgagttccaggacagccagggctacatagaaaaaccttgtcttgtaaaaccagaagaaggggactggagagatggctcagcagttaagagcactggctgtttttccctagggcttgtgttcaattctcaacaactacatgatggctcacaaccatctgtaatgaggtctgattccctcttctggcatttgggcacacatgtgaacagaacactcatatccattaaataaataactaaataaagataaatactatatcttttttatataaaaaaaaggaaaaccagaagaaaaagtaaaaaaaggaaagaaagaaagagagagagaagggaaatgaaagaaaaagaaagaactttttacccagccccttccaaaggtcataaggggtcaaaagacctctctaggccaatcatggatgaaccctcagcattaggctcttaaagggttaggagataccagatacaaagaccagagggccctgaggtcttctggatagtctatcactcctatcctgcttgatagattagaaaaaccagggcccagacaagggtgagacttggccaaggccacagtgctcagtggtagagtcaggccagcgcccaggttgcctctgcctcttttactgtacccacatactgctgcttgcggtgtcaagatccaagcaaagggtcagaggtcaagcagctcccctgcccagcctggggatgggcccacatgaggttctgcagagtggaaaatgaggcctttccctttgcctttcagaggaagacttccggggtaggcggcaggaggtgctaaggtggaagaggccctaagagaaggacagtaagaggtaaggcttgggaccacagtttctaggggcagctagggcaaaggcctattacccatcatgggtacttcaaggatccagaggtgctgggctggaacatcaagtatcagtggccttttcttgctttcttgtggcagggcacatggtttccccctgtaaaccagcatctatctcaatatctatatctatatctatatctatatctatatcatctaactctactacctttgcactggttatataaatgaggctggctttgaacttcagaccctcctgtctccacttcccaagcactgggattacagacttgctgtctcactcctggcttttgtacttttaagagtttggttatttattcatttatttatctgacaaacaataatcacgcctgccttcaacagatgccctgaccagaaaaccaaaccggcttttgaccttgaatagtttgcagccccactgacaagacatttccaggacacacagtgactattaagaggataacgtaagaaacactgtggttgtcgttcagaactgtgtccagtgttctgctgacgctggatggtcagggacctgctaaaggtcgggagatggtcccctggaatggctgcttctgtctggagcctcagggttgggctgtctctcctccaggctcctctctaaactcatgggggggggggtgtaccagggaatgccagtatctcctgcaggactaggcatgcgtgcgcctctccaggtgcctctggagcctcagggttgggctgtctctcctccaggctcctctctaaactcatggggggggggtgtaccagggaatgccagtatctcctgcaggactaggcatgcgtgcgcctctccaggtgcctcatcccccagtgagaagctgttctcccatccacctgctttgcctgcccagctgctctcctgctccccacgctcagcatcttttcggctttcttgagctgtggtgcagcagttttggccctgtttccacctacagaggaacagatgttcttcctatagtagttgtggagatgacataatccaggcaacagagggcatggtcagcaaaagcaggcaccgccttctcccatcttgtcccccttccacattcttctctcctttcagctctcttccatgctttccccggattccctcacacacagagctgcaccccagcaagggcaactagggaactatccccacctgtgccccttctgccatcccactggtccccagggaaaaggcggtcctcccaaagccaactcatcttggatcatgctcatcacttttgagcttccagcttgtttcccctcccagctccgcactgtgaaaaccagattgcccggtgtctgttgcaaccctacaggctccagaaagggactgaatcaaggtggtctgtcacctgctagctccagggcctgctgtgcattctgatgctcccttccacagtcgaggcctggtttgcctatcacctcagcatccctggcttttcttctgactcctgggagctggtcttcatcaatgcctattcattgctctgcctctacctctcttcagttttctcccttccctctctcaaaggacccgcctcccctcttccacaagagctgctcttccagatctgttgagtccctgctgcatcctctggtctctacagtgtgtctgtccatcctgtcaactcactgcaaactagtctctcctccctgttttcttcctcctagctttttccttcagtcttgacagactaccactcatgtctccattgccctacctgttaattcttttaccaacccgccccctgctttttgatatttttcaagacagtgtttctttgtgtggctctggctgtcctggagctagctctgtagatcaggctggccttgaactcacagagatcagcctgctttggcttccggagtgctggcattagaggtgtgtgccaccaccaccctggccaccaaacaccacctctgtgcttttttttccctgtgtcttctgaacaaaagtcctatgaactcagtctggtgcctgaggcccactgaattctagtctgggatgacttttctgccccttcaaatcctcggatttagtgtagctccttgaagctactaacaggactcaggggtggggcagtctcccacctgtgaggcctccccagcaaaagcttcctttccacttccatctcctcccactccacgtctagctgctaaggtccctgcagttgagcagtgggtatgatccaaggcagagttccagaatgatctagaacctccggcaagaggaggaggagcctcatattctccggtggcggggaaagccggtgacggaggagctcctttgatgaaaaaacgtctcattctctctactccccaggtgccagcagcttcaccttgccagagatgctctgactgggtgggggcaaccagagagcagcaccagtgccctccagctgcagcccagacagacggtgctcgcacaccaaggctcaggcttcttcagccacacagcccagcccagccactgccgctttccacagacaggacttagaactttcagagctgcttatgattggaggaggggcctggagccttcgagacagcagccagccagccacaaaccccatttgtagtctggctcctctataggggatgagcagaaatgcaggaaacccccccccctttccagaaagaaagaaagaaagaaagagaggaagaagaaggatcccaaggttccagttaggaactgacaagatgacccatgtggagattctttgggcctgaagagagttcggtttctttcctatctctcctgacctgccacagtgggtccgatctataccctcccccaagccgctgcggccttccccccccctcccccccaaggtctcctgcacctcagccttgtcggggactgctgactcttggctccaaccctgcacggaactctggacacttcggtcttgtcgggtccagtttatagggctgcttctattaagggctggctgtcacctccagcagcctccatttgacccagccgggatggggagagtgaccccggagctgtcggattctgtttaggcagggtctttagttaggctgaacacagaaacaggttctaaatttacatcacagtggagtaccccaggggctggaccggtcctgctgttttttgtaagaggggaaggtgctggagtttaagagttggggtgaccccaaatgaaaaggtgcagactgacgtgcaagttgccgaagttgccagcctcggcagagcggcaagcacctagaacgagaacttgccgggtgcctcaggtggagagaccagaggcgatttaaggaacctgcaccaaccactgccacgggacggaggccgcacccgtgtcccactcgcccacgacctgggaacgcgctgaccatttagagagatctgggaagtctggacaggtgcgggggtcctggttgagaatgggatccgatgcgtgggtggtgggggctgctaaggactggcagaaaatgggagcctggtgggcatgggaccgcaaacgcctcaactcctgcgggtcagtcgagcttccccgggctcggaagagaggtgtacgcagagagtgaccaagtggggaagcgtgcgcagccagtccgggtgggggtggggaccacgttggctccgagccaggcccgtgaaccctggagagaaagacagctccccacctccaggagccccgggaggctaaactgagctccagacgtgtctgggccctccctgctccaaggccgggcgccctcggggaagccctaggtttgtgtgtgtgtcactttgttattctttccctccagtgtgtggtttttttgtttttttccttggagctgtttcataggaattccggtaataaagacttggtgttctcttggtgctctgatgtggccagcggcgtgggctggaccctccctccttttgtttccgcaggtgagaggatttggtttttggagtcttgccgaatccttgggtcacctgcctcgcttttcccatcctctcccccatctggttgcctccccgccccccaaaacacacacctccgctaaccttcactcaaggttgtttttaagacccagagaactcagtcgccctgcacaccaccataggtggtgacacctgctgtctgtgtgacctgctggctttgtctagcaagcctccttcctctttgccgctcaaaaaaccaaaccaaaccaaaacaaaaagccacttgctgattggcgagaaaacagggttaagaaacccagcccgttgtgaaagcgtcaataccgtgcttccccgcattaaacaccaaagcagggattaatggtgacttgggggtgtcaccattaggtgtgcatcacagaagtgtgcaccttgcacttcaaaaggaacgcaacggcttagcttcctcagtcccccaactcagctggactctttcacctttacgtgggcagggacaggatgctggcgactgaagaaggaaacgggcaattctcaaggttaaatgtcttcctcatgtggagacttgtgacttttaacagcacacgtttcttgttctgggctcagagtcatctcgacaaggctctttccctcaaggaaaggatttcaagctaggatataaacaactgttcctgtcgccctgccctcggggtcctaccttaaccctaacagatacagttaggctggtatggtggcattcctaagtcaggtggcatgctatacatgcaaactaagattctcttcctaccttaggccagttattcatcagtgtccgagagctgtgctgtactgaaaggaagctgtagagctacctgtgtgcttgtagaaatgcttgccttctaggttctggagatctgatgctcacttctgacgacacacacacacacacacacacacacacacacgataatttttaaataaaaatgtttttaaaagaaatgtcccgccaggcgtggtggcgcacgcctttaatcccagcacttgggaggcagaggcaggcagatttctgagttcgaggccagcctggtctacaaagtgagtttcaggacagccagggctagacagagaaaccctgtcttgaaaaaccaaataaaataaaataaaaataaaaatctatcaaagttacaacaggaaggcattgtaacaagctccgaagataactctaatctatactcaagtctgaaaacaagttctgggccaggaagatgatgtcataggaaaagcactggcatcagccagctgagcttgatcccagatctcactgtggaaggagagaaccacctgaaatcctctgacctccgagtacatgcattggcatgtgcacacgagcatacacacaattgtaataaacagaaactcaaaaagacagctcccggccgggcagtgatggcgcacgcctttaatcccagcacttggaaggcagaggcagatggatttctgagttcgaggccagcctggtctacagagtgagttccaggacagctaggcctacacagagaaaccctgtctcggaaacaaacaaacaaacaaacaaactaaaagacagctcccctgggtctggagagatggctcagcagttaagagcactggcttcttccagaggtcctgagttcaatttccagcaaccacatggtggctcacaaccatctgtaaagggatccgatgccctcttctggtgtgtctgaagacagcaacagctatagtgtacttacatacataaaataaaaataaatctttaaaaagaaaaaagaaaaagacagctcccaaagcaccaaaattatgttttaattcaagtgtcttatgaacattgtagccaaaaacgtccataggtctgagatttgcactttagaatgcatgtatcctctacatcatattgtacttggtttgcaatttagcctgagaatttgattgtaaaatctcaggtgattctaatttacaggaaagttcttagagccatgtgccatttttcctattagtataagaaagtctgaaggtgattgtaactacaccatagaatgagcggtctggggagagacattaccaggttaaagagtgtgaagaccagaccaagaagtggagacagcctgttcctgaccacagccatcagcccttggacatcatgtcatctgcacatgttaagctcctggtgatcacctgtgtgctcctgagtgtcataaggtgacactcaaagatttctgtaaaaattctgtctggattccgagcctgccagtgcccttggcccttcacacatccctgggcaatggcctcaacttgcaagaaaatcatgggagctgataagcagtgtgtacagaagaactggtgtggttacattgagtctcaacttctgtcccctcgttgtcttgaagcactgctcaggagtgggccataatggtcagagaatttgtcctgaagaacaaggggcaggtagggtgtgaggtgcaatgatgatagcagttattggggttcactgtctgctggccactctcctgggggtgccttatgtgttttattgtacccaacccagcaatgagaatacaaaatcattgttactcccattttttacgcaccaggaaatggaggtgcagggaggtccagagatgaagttgtgcctcttatgtgatctccatccttagtaagtatccctggatttgaacccaagcaggagaatttcagagttgatacctcagtgctaagctacctgctggcagacaagaggaggacaggtgacaagatccaggatccccacctggataccatgtgtgacgaacagaaagggtcttcctgcccaaaaccacttcccagaatatctgtgacccagcaaagtgtccggaactcccccactagcattttttttatctgggtttccaaacaatctcttaagcatatccagcaagctgcaagcctgctattgagagagaagcacacagactccttctgcccattatcacagcatagattcatttgttggattagtgatctgggccagctaggagaatgctggaaatttctggcgagtgtgtgtgtgtgtgtgtgtgtgtgtgtgtgtgtgtgtgtgtgtgtgtgtgtaagaaaagggtctgtggaatcctactgccaccaggtggtcattttgcagaagtggatgtcactgaccacagaaaagtggaactttttttttttgcaagaggccaagagttcatctttggcttcaagccatacagacagaagtttgttcatatagccatatttggtggaaattgcgaaacaaagatgtttttaaatgtcaaatgtcactgaagttatgtaagcttcaggatccataaggcaagccctaccctacctgggggcaggggcacagtcaacctatggttgtcaattctagatttgttgttgtttcagagaggatctcactgtgtatgcccggctgttctggaagttgctttgtagaccaggctggccccagactcagagatctgtctgctcctgcctccaaggtgctgggattaaagagtgtgccagccctcgggatcattaattaaatggggaacatcatgttaagaggattcttccagggaccagagtgagcagttgtgaagctagcttgaactctacagaagcctgccatgctgtgaccttgtcattcaaagggtggcctggatgcaaaactcccaacgctagaaccaagaaagtccattccaacttacactgtaagcttgagaaagctgattaccctacttgcagactagcagactggctgccaacccagaagcttgttagaaatgcagttcaagggctggagagatggctcagaggttgggagcactgactgctgtttgtctagaggtcttgaattcaattctcagcaaccacatggtggctcacagccatctgtaacagagtccaatgcagtcttccagtgtgtctggggacagttatggtgttactcgtgtacattaaataaataactatttaaagaaagaagagaagagaagagaagagaagagaagagaagagaagagaagagaagagaagagaagagaagagcagttcaagcccccagtccaggccaacctaaacagaatctgccttctcaaattccctaggagcttcccccagatttacaggcccagaaatacctgccaagaaagccgtcaaaatgtgtctaattagcataaactccaatggaatgtggctcaggctcagccactcctctttccttggtgatggagaggagacaaagtcacatagacctccagggcagttatgggcacaaagtgtcgctctctcctttgtctgtgctggagtcttcctcggggcaatcgccggtgagtggagggtgactgtgaatgtcttgtgaattgttagctgtgatttcactctgctcctaagggtggagtcctcagaaatcatcattagttatgttcactgcacaaatgctttgcagcgttaacgcattgactcttcacgacaaggctcttccaactcctgcccctgagagagggtctcactatatagtccagatggttctgaacttgagatcctcctgcctccacctcccaagtgctgagattccaaacaggcacaaacactcatagaaaacaggctttctgttaggtgctatggttatctccattttacagaaaccaaagcggaagccccagaggactataaaaagtatttattcattgctgaggcagtgggcagccacaggtaaaagtgaaggacacactcaatgcatggtggggtaggaaaatgcctccacatagactgtgttttggcaaggcctcaaagggctcaggtggccatgcaagatgtgtgcaggcaggcaggcaggcataagtggcctgtggtcactacaccctcatttgtcctgacttggctttatttatccatgctgttcactagaaaactcactaagaaccagtggtaagccctgccccaaaagaggcccagggagatagactcagacaagtaaacagacagaattgagagggaaagactatgttggagcactaacagcatgtggctgggtatggtggggactgcagacatgggcaccctagagggcatgcttacctagaaaggaaaccagggaccccacagcctggagaagagcaaggggaccacaccttccattccctgccttgtgccctcctcaccttagtagaggtgtgtgtgtgtgtgtgtgtgtgtgtgtgtgtgtgttttaagacagggtctctttctgcagtccaagctggcttggaacacattatgtagtccaggttgtgcaaccctataattcttatactgtgtatgaatatacactatttctttcctcccatttaaagcaattgctagagccaaggagatggctcagcaggtaagggcacttgatgccaagctggggcacgtgaattcaaccttggcctctacacagagaaagcagagaaccaacacccatgggttgtcttctggagggtacccctttcataattttctattatttaaatgaagcaatcgcctgattaccatgaaccaagctctccagcacacaaggctaggagttctcatgattttaacaagaggctggcatttccagtgttctctttgtctgacaaattcccatgcactccttaagcaggggtgctatttacacagacattggcagaatatatggaagccacgtgggggtgggtatgtagactggatgccaagagcacaggtcaatgagctgaacctggtctgagagatagctgtgcagagtggctcagggtaagctatgtgaccttccgttctcagagtgtgcagggatggagtaggggatgggtcaacgctcacctccacactccttccttccactccctgcctgtgcctccaacttcagaatcaactagaatctagctgggagcagagagcgaggggctggtgggtgcaaaccacacacagaaatttggtctccaagttcctttgtcactggggatggccttcagtttctgagtctctcagttctgcctctggagacctggggtgactgtcccacgtcatcatgtcctgttctatttgatgctgtactttgtggggactacacaagcactctaccaacagaactgcacttctagatgcagcccatctcgataaaccaccaccaccacaattggcacagtggcacacgcctttaatgccagcactggggaggcagatgcaggtagatctctgtagttccaggccagccaggctacttagtgaggcatctataaacaaagagcagcagcaacaacagcaaaaacaagcaaggggtggaagagatggttcattagaacacctagtcaggtgagagcttgtgtttaagtgctaagtggaaagaatggatcacttttcaaggggggaaaaaaaaacctaacaatttcaggtcttgtacaggtttgcaattcaggctactttggaggctaagctagaaggatcacaagtgcaaggccagcctgagaaacttagtgagatcttgtctaagtaaaacatgagaagaggagtaggggcaggggtaggtaggacttagcagaagagtacttgcaagtaaggtgctaagctcacccccatcttccataaggccacctgtgagatgccatcagctgcactcccagatgacctcacaacagtgacactataaccaccatgggacagttgctggccagcacttactgtgtaccttagcctagtctacaagacagagagcctccgctctgctctttctggtctcagctacccaacaacttcatcttgggttatgagtgaacacatcttgggtgtgaacttctgatcagccaggtccccacatccctgagtccttctctctgcccaccaatattcttttctttctgttacaggaaggattaaacatggcaagggaaatttcaaaaactccaagataatttagagacccctgccaaacacacacttgtgatttcttctgaattggaaagtttcgtctttgactttcctccatgaacttggaataagcctttccaatgctttcccatcataggccgtgctaggcaggccttggagggagaagggaagtgtgattctaggcaaggccagcagatagttctgacatggacagaattagaaagttgatgagggctgggaaggttatatttagctaggagcatgtttactccccagagctgactaccctagatctcaggaactaggaccttgagccttcatagctgacctagaggtcagagtctcttttctttcttcctttttagattacatatatatggttctggtttataggtagtggacttgaagacatgcatgcgtgcgtgtgtgtgtgtgtgtgtgtgtgtgtactttcccgacagggtttctttgtgtatttctggctattgggaacttgtctgtaaaccaagctggcctcaaactcaggatccacctgcctctgcctcccaagtgctgggattacaggtgtgcaccaccaccacctggatgaattattttatttttactcccccacctccgtgtgtagtacaagtgctactggtgcccagcaactccagaggcatcagatgtccctggagttggagtgacaggctcttgtcatgctaggaactgaactaagttttctgaaagagcaatatatgctcgtaactgctttgccacctctccagactctgctcctgattcttgaggtagcagagatgcccacctctcaggccaggcctgggatcattgcatctcttgcttggaaggaaggttttgttaaagcctttcatctctctagtcttctgttttaggctagttaaggtagcactgtgggatacaggaaagtgcccgggttagagctgggttcaatcagtttgcatatcagacagaggtacttaagttcctttggctttgccttctcatctgtaatgaggatgataatagctaccctgtgggtgggcagagttatctgtgagataacacaagtggcaactgctctgaaaactttctctgcctccctttctggggcctcccttagagtgggaggattttgacatgacttcatgctctttcctaaggacaaagaaagataatgggttccttggagacctcaagtgtgattcaaaacatccattagggcatagagtttacatatgaatacaaactctctacaaggcaatctctgagactaggagagagagagagagagagagagagagagagagagagagagagaaagctctgacttcacccttgtatttttgtcctgtggataactgaagttcacagtcccagattttatcctcctacaaactttggcacttgtggacattttcccttttccctcctttttttttcttttttaaagatttatttattattatatctgagtagttgtcttgagacacaccagaagagggcataagatcttattacagatggttgtgagccaccatctggttgctgggatttgaactcaggaccttcagaagagcagtcagtgctcttaaccactcagccatcactccagcccctcccccccccccccccccgcccttacagatttcgttcccatacaactatttctgcaatgtttcatttaaccccaagccatgggcattaatgtaggtaggtaaatacagatggtcctagctcgttaattttatcaggtgcataggctttcatagaatgcacaaaccctaactttccagccactagtttattttgagatagggtctttctctacacagcct

SEQ ID NO: 2928 - DNA, 1837 bp, Mus musculus
cccagcggccccgcgggagcggacgcgcgtgcggtgctcggtgacaccgtcagtccgttgcagccccctgtgccaggatgactcgaggatgcggatgatctggagtccatctaaagcctggctgaggtccgcatgccgccaccaccctggtccctgtcccctagcccgggccgtgcattccctccaggaggaagcactgaagtgagtcttccgagcctgcggagcaagcaagtggcccacgacggagggaccccgggccagcggcttcttggtttgttggaaacattctcccgcagcggctctgcaagatgaccagcttgtttcgcaggagcagcagcggcagcggcggtggcggggccactggggctcgcggggccgggacaggggctggagatggcagcactgcccctcaggagctcaacaacagccggccggcccgccaggtgcgccgcctcgagttcaaccaggccatggacgacttcaagactatgtttcctaacatggactacgacatcattgagtgcgtgctgcgtgccaacagcggagcggtggatgccaccatagaccagctgttacagatgaacctggaggcgggtggtggcagcgcctatgaggacagctcggactcagaggacagcatcccaccggagatcctggaaaggactctggagcccgatagctctgaggaagagcccccgcctgtgtactcaccaccagcgtaccacatgcacgtgttcgacaggccttacctgatggctcctccgaccccacctccccggactctggagcccgatagctctgaggaagagcccccgcctgtgtactcaccaccagcgtaccacatgcacgtgttcgacaggccttacctgatggctcctccgaccccacctccccggattgatgtcccaggctccggacaacctgcaagccagagacgctacagaaactggaacccacccctgctgggcagcctcccggatgacttcctccgaatccttccccagcagatggacagcattcagggtcaccccgggggctccaagcctatgagtggagagggaggcccacctccggcaccagggcccatggcctgtgaccaagacagccgctggaaacagtacctggaagatgagagaattgccctcttcctgcagaatgaggaattcatgaaggagctgcagcgaaaccgggacttcctcctcgccctggagagaggaaccagtgaaaccaaccccactgtgtcagaagatgccttattcagggacaagttgaaacacatgggaaaatctacgcgcaggaagctgtttgaactcgcccgagccttctctgagaagaccaaaatgaggaagtcaaagaagaaacatttaccgaagcttcagtcgtatccttctgcttggccctggggtgggaatagttttcctgaacagtccggcaggctgggggctgctgcatccacagccaacctcctggatgacgtggagggccatgcttacggtgaggcaggtgccagcagcttcaccttgccagagatgctctgactgggtgggggcaaccagagagcagcaccagtgccctccagctgcagcccagacagacggtgctcgcacaccaaggctcaggcttcttcagccacacagcccagcccagccactgccgctttccacagacaggacttagaactttcagagctgcttatgattggaggaggggcctggagccttcgagacagcagccagccagccacaaaccccatttgtagtctggctcctctataggggatgagcagaaatgcaggaaacccccccccctttccagaaagaaagaaagaaagaaagag

SEQ ID NO: 2929 - protein, 405 aa, Mus musculus
MTSLFRRSSSGSGGGGATGRAGTGAGDGSTAPQELNNSRPARQVRRLEFNQAMDDFKTMFPNMDYDIIECVLRANSGAVDATIDQLLQMNLEAGGGSAYEDSSDSEDSIPPEIRTLEPDSSEEEPPPVYSPPAYHMHVFDRPYLMAPPTPPPRTLEPDSSEEEPPPVYSPPAYHMHVFDRPYLMAPPTPPPRIDVPGSGQPASQRRYRNWNPPLLGSLPDDFLRILPQQMDSIQGHPGGSKPMSGEGGPPPAPGPMACDQDSRWKQYLEDERIALFLQNEEFMKELQRNRDFLLALERGTSETNPTVSEDALFRDKLKHMGKSTRRKLFELARAFSEKTKMRKSKKKHLPKLQSYPSAWPWGGNSFPEQSGRLGAAASTANLLDDVEGHAYGEAGASSFTLPEML

SEQ ID NO: 2930 - DNA, 113447 bp, Homo sapiens
tcttgctccgtcaccaggctggagtgcagtggcgtgatctcggctgactgcaacctccgcctcccgggttcaagcgattctcctgcttcagcctcccgagtagctgggactacaggcgcccgccaccacacccagctaatttttgcatttttagtaggacggggtttcaccatgttggtagggatggtctcgatctcttgacctcgtgatctgcctgcctcggcctcccaaagtgctgggattacaggcgtgagccaccgcgcctggcgaggccatggttttatccggcgagaccttttgctgggttaggctttcacccactttcgccggcagtcctttctaccatttacacttgtatttcatatttctttgtctttaatcatgctgttccatatactaggaaagccttcttctcattcacctacttttaaaatgtggctaaatttcctgctcactaggactcctgcagaaaaagccgattgcagagcttgggcagggaaaacacaaagtgagcctggaacattcaatatatatttggaaacaattacaaacttacaaaaagttgcaaaagtgaaaatagtccaagaaatatctgtaaaccctttacccaaattcacctattattaacattttatcccttgcttaatcaccatatggggctctatccaatttgtttttttttctgaaccattctagggtttcatacatcatagctcttacccctaaatatttctgtgtgtatttcctaaaaatagagatatgctgttacaccacagcacagttattaactttatacacttacatttatataatacttatatttaatctaccatccttatccttattccagttgttagttaggtgatgtagttatgttctttttttttttttttttttttgggctcgctctgtcacccaggctggattgcagtggcacgacctcagctcactgcaacctccgcctcctgggttcaagctattctcttgcctcagcctcccgagtagctgggattacaggtgtgtgccaccacgcccagctaatttttgtatttttagtagagacggggtttcactgtgagccaggatcgtctcgatctcttgacctcatgattcgcccgcctcggcctcccaaagtgctgggattacaggcgtgagccactgaccctggccctaattatgtcttttacagcattttctccattccagtaaaagatctagtctagggtcaggttattccatctccttcattccccatattcactacatccagagaaggcatctgtacagcttccccttataatctcatcatcccaataatcaaagagttcattcttctctagctgcaagcctggcacaggcctgacctcctctttccttcgtaagaagaaaaggggcactaccacctacccagtaggatgaggaagagaagttcaaatccttctagactgctcagtcttgagttgtcatgtctctctagcctccataaatctggaacatgtacataactggcattaaaaaaaatacagaccccgccttattttttttttaatggaacattctccattttgtatttgtctggcttttcctcatgattaagatgaagttctggccaggcatggtggctcacgcctataatcccagcactttgggaggccgaggtgggccgatcaaaaggtcaagagatcgagactatcctggccaacatggtgaaaccccgtctctactaaaactacacaaattagctgggtgtggtggcatgtgcctgtagtcccagctactcaggaggctgaggcaggggaatcacttgaacctaggaggcagatgttgcagtaagctgagatcgtgccactgtactccagcctggcgacagagtgagaatgtctcaaaaaaaaaaaaaaaaaaaaaaaaaaaaaggagagagagagatgaagttctacattttcagcgggaatactgcataggccacgtgtcctcaggatatcacacccggagacgcacaatgtccctctgtccttcatacatgatgttaactttgatcactgggcaaggtgttacccattttctctatcacataattactttcccctgcccttgcaactaataagtagtctgtggggagacatttgaagaccatctatatatcctactcttcaacaaaatttcatcttagatttagcattcattgatgatctaattaaatctttaccaagatggttgaaatgtctctttgcacaagaaagtaaggaagtgctcaaagaagatgaggatgcagccgcagaattccaggagttggcacatggccaagtccgaaacaatctaagccaaaatagatgataataacaaattatacacaatcgaaggaagatagtaatccatgaattcataaagaaatgggtgactacctcctccggctcccttaaatctcagttcagccttcttgtgcctcagtgggagatgtgcccctctatgctaccatctcctgctgtgcttctcaacctgccacgataatgtgacactttcctgactgtagaatggagccgaactgagccctgggctttaccttccctaccctaaagggagcaggctctatagactggagtgtgaggcctgaggctgagggtctggctcctaggaactcagtcctgccatagcttcagggtccacttgccccagaggctcagccctgcttccaggaggaggtttctcttttctctttttaagaagcaagctactctgaagacatcagtcagccctctatagggtcctccacccactactatgctgtgcaacccgagtgaggctcttcctccaaagagtaaaacatttttgacatttcagctagtgcccagaagcctgttcaggggtcaatgatttagtgccagcttcctctctcctccttccctgaccatttgctggcccagcagaggttccctccctccaagaagggaggatccttccccaggacaccagggccatgcggctcctccacctgcagcacctgctccccaagtcccacacaggaatattcatcctgctccaccccacaacctcctctagggagcttcatttctgggaagaaccagatctgagaatctaggccaaattgatctcaggtatcccttcttggaattgcaagaacgacaataagaaaaacaggcatcattcattgagtattagagtgatgaggaacaagtcaaggcgatgctggtgcacacctgtagtcccagctacttgggaggctgaggcggggggatcacttgagcccaggaatttgaggccagcctgggcaacaggaggcagaggttgcagtgagccaagattgtgccactgcactgcagcctgggtgacagagtgagactccatctaaaaaaaaaaaaaaaaaaagaaatagcttaagttaagaataatcatggaggaaagtcatttatgtttaactttcctccttccaattataatgattttgaaggctaaatatagacatatatacataatcgataataaagcaatgtatgtataatgtaggaaattcagaaaatccagaaaaatactaataacaaaataaaagttatctttaaaccctcatctaatgatgctaacattttgatatattttcttcaagttttttcttttatgtttatatttttatttttacaaaaaaatattttatttttaccatataagaataaatggggtcattgcattttgttttgtagcattcctttcccccaacattgtatcatgaacattttttacattcactaactgttcctttcttttttctttcttcttttttggagacagagtctcgctctgtcacccaggctggagtgcagtggcgcgatctcggctcactgaaacctctgcctcctggattcaagcagttctcctgcctcagcctcccaagtagctaggactacaggtgtgcatcaccacgcctagctaatttttgtgtttttagtagagacagggtttcaccatgttggctggtcttgaactactgacctcgtgcctcccaaagtgctgggattacaggcgtgagccaccgcacccggcctcactattctttaagaacaattttaattattacaggggattccatttatctaggtcaaatctccaccccacggccttgtagaggacaagctggcagcctctgtacaagggggcaagatccctggagcctcacaaactgttaccaatcaaggggaagatagtggtttttataaaggcaaacagggcatgtctcactcacttgttacaattcaggcctttggcaaatatttactcaatctcgcggggtgcagacactgagatagatggaaaacaccccttacctcccgggagttcatgaagagacaaactataatggcacgcactctctctctatacaggctggtgggatggacacagggactgcaagggagcaatcccttatgcaagggaagaagggctcacagacatgatgttcgtgctggcaccctggggaaggggtgaaagtccccgggaatcctttcagatagccatcaaatcggcaagcccacaggcatccatccagctattatctcacaagggagttgtttgcttatttatttatttatttatttatttatttatttatttatttattgtgactgcttccacggttcacctgtgtgttctttcaaatccccaagtgatgttaccagttccttaaaagtttcctaggctgggctgggtgcagtggctcatgcctgtaatcccagcactttgggaggctgaggcgaaaggatggcttgagcccaggagctcgagaccggcctgggcaagatggcaaaacctcacctttacaaaaaagtttttttctttaaatagctgggtgcggtggtacaagcttgtagccccagctactcaggaaactgagacatgagaatctcttgagcccaggagttcgaggtggcaagtttcctctgagttccttgattaaattggtcagaggagaaagggtcaggattatccaaattatttggaagtttacaccacttgcttttctacctccagccttcttaagctgtctttggtagtcctaggaggaggagtgggtctcacggtggcagggacaatgtggttggtcgcagagccgcaactgtctgctctccttatcaaccattcatgccctggcatttgccctgggctgggggaccttcagaagggaaatgtcctgttttccccacggtccgatcagagctcaccatttccaagcctgagcccagtggctctccatcagcctcattctcacagtagataatgccatatgctccagcgatctgagcttcatacagccacagacttagcaaaaggcttccatcaccttcacattcagtctgtggaaacagcaagtgttcttggctggttttgtttgtttgtttgagattgagtctcgctctgtcacccaggctggagtcaagcacgatcttggctcactgcaacctccacctcccaggttcaagcaattttcctgcctcagcctcccaggtagctgggaccacaggcgcctgccaccacgcctggctaatttttgtatttttagtagaaatagggttttaccatgttggccaggctggtctcgaactcctggcctcaagtgattcacccgcctcggcctcccaaagtgctgggactacagatgtgagccatggtgactgccctgttcttggctggttctagcccgggagtgggtgggtggcatgaggacagaaaatgggaagagctggaatggaagttaagggcagcctgggaagggcctctctcaggagtttaaatttcattctccaagcaatgggaagtcatccaccttgttcagcagtgcagagacatcaccggtttgtacattagaaaagtaactgctggcactgaaaaggatggattgaaaggcagggccctggcagcagggcctgagccagggcagaggagagggggcaggttccagagaaactcagaagcagaaagccctgagtttactgagggggttgaatgtacgaggggaggaaggcagcatgtaacatctgcagcttgagcgaatgggaggtgctgcttatccaggacagagaattcttgcaaaggatgtggagatgatgggctccaggctccccgcactgaaggtgcagtggctgtgggacagcttgtccaatggcagtaacacatgccagtcaggggcttgagagagggagtggggtgctcggacaggtcatcagcacactccactaggtgcagagggggtaatgttattaataaaacttggctgggcacggtggtccacgcctgtaatcccagcactttgggaggctgaggtgggcagatcacctgaggttgggagtttgagaccagcctgaccaacatggagaaaccccgtctctacgaaaaatacaaaattagctgggcgtggtggtgcatgcctgtaatcccagctactcgggaggctgaggcaggagaatcgcttgaatctgggaggtggaggttgcagtgagccaagatcatgccattgcactccagcctgggcaacaagagcgaaactacgtctcaaaaacaaaacaaaacaaaacaaacagacaacaaccaaaaaaaaaaaaaaaaaaaatagccgggtgcggtggctcatgcctgtaattccagcactttggtaggccatggcgggcggaggtcgggagtttgagaccagcctggccaacatggtaaaacctcatttctactaaaaataaaaaaattagctgggcatggtggcgtgcacctgtagttctagctactcgggaggctgagttggaagaatcgcttgaacctgggaggcagaggttgccgtgagccgagatcgcgccactgtactccaagctgtacaacaagagcgagactctgtcttaaaaaaaaaaaaaatatatatatatatatatatatatatgcagtctgcaagtggagccatgaggggttggtacctgccccactctattccccctgtgagaacatctggaaagaggggttggttagaaagttagaggactcagccttggagaaacccctggggcaggcagagctgaagaaatgagggaatggatagaaagacgcagaggctaggaagccatgagggtgggaatggtttcaaggaggcgttagcaacatccagggctccaatggagtgaaggaatgggatagggaggaggcccatgggttgaaacaatgaggagcctaaggttgcctcccttggaaaggcatcttcccctagaaagatgccggtgcctccctgtaaaaatcaccttcccctaggatgaaggggaagaaagtcagattgtaggaagttgaggattgaatagggcttgaagaagcagagagtgggtctggttgcttcttaggggaggcctactgatgaatgcagaagagagaaacagggcaatgacttgagggcagggcagggttggggccaggttcccttagaagggggtatcctgaagtgtttgtagttttgaagcagaggggaggagaaagaagaactaacagagtttcctgaagcacataggaggttgggctggaaagcaaaagggacatctctggaagagcagagacaatagggcctgaaccaggcagaagtggaggagtgaggcggtgagagaaggagaaatgaacaggatctgataaccagtggagggccagggaagctgcacaggagacagaggcttccagcctctgagccagaggtggattcaggagagtaggaggaggtggcttaggtagggaagcggtctcagtcgcctttagcctccttgagttttaggtgtctgggagactcacaggtggccctctgtaggcggctggtgtgaggggctggagccctgggggctcagaggcagtggtgggagtgggtggaggtgtctgggggtggggaagttgtgagaggcagggaaggggtctgagaaaaagcttccagaaggacagacccaaaaggaggagtatgttagcaaagcccaagaaaagtgtgcttcaaggaagagtgtccattagagcaactggttttattaatgactataataataatgtatttaaaaattttactagccgggcgtggtggcacccacctgtaaccccagctactcaggaggcgtaggcaggagaattgcttgaacctgggaggcggaggttgcagtgagttgagatcgtgccactgcactccagcctgggtgacagagcgaaactccgtctcaaaaaaaaaaaaattatgagcaatccataggcgagtgcaaatggaaatctccaggtttgcagatgcatttttctgctcctgaaatgccaaggtgacaggaatgaactgcagagggatcttgcaagtaagcaggaaagtgacaaatgaactgcactatgggtaagtgtaaggtaatacacttgataacataatctagactatattggccaggcggacaaatcctgagctctcagttacaacctgggaaaggagccaggagtcagtatagaggcatgggtctgtcccttcggattaagaatctttaacctggggcctgaagaccatcttctgggatttcaagcaccctgcctcccccggaaattgaatgcaccagggagtgaagtgtggggagagaggagcaggagagaggagatcctcagaggggtttggaaacccagtcctggagttccgttcaacatgctaacctaacgttgggcctccccgaggagggtgtggttctgaggtttctccccctcccagtttcccaccttgctgaagaaacttgcccttgacatgcaaatgatggaaacacattggtgtctggggcactttggtttgtggtttttaccatcagctgtctctgaggctgagcgtgtcgatctgtctcagcaaggctagcaaattgcaagcgctcagaggaggggagaggggggctattcctggggttctgggcccagatgggcaaatgggtctgtaaggcagacttttccaggaggagggtgcagaccctttgcaagttgtttggggacagagcttagtttgcatctggccttcttcaccctcctcagatcccctaggtagcagggtgcttggtggtcaccacctgacctaggctacctactcccaaattggagtctgaaatgaaagcacgtgggaaaagtatagcaaaggtcagtttcccatttattaaacaagttcttccgtggaaaatcttcccagggctcagcagcccttgaagtgatcagggatgctggggaggttgggggaggagaaaatgggagatggcaggtggtatctgtcggtgtggacgagtgatagctttgatttgctcccccttcccaccatctcctgtgtcctcagcatttgatttggtttcctttccggggccctaattccagggaggtgcccctcctccacacctgtgtcccaagccccagctgtgcgtcctcaccctgggttcctggcactgacctggaacctgtcgggcagccctgctcttagctccccgcggagtctcggaggtctcaggtctcctccgcccaccctctccgcagctgggaggggcaggatgccccgcaccccgctctgcgcgggaggtcgaggcaccccgctcacgccctcctgcccgcaagctagggagtcactgcggccggggagggaggtacacggagggcatttttccagccttcactgggtgctcccctctccacccccggcaaccatgtaggtttccggacccccaggtccgcttccctcctctctggaaaggggtcggccatagggaaagggcccgggggcgccgcagccgggcccccgccccgccccgcccgcagccccgctcctccccgcgcggccccacttgtggccctgccggcagccgcgcagggacagctgcatttctcgccgcccgccgctaggaagccggcctcgcctcactttctccgcctccccgcgccccagccgcgccgccgccgccgagcctggccccgccgccaccgctgcggattgcagcccctcccccgcccggcccgcggcccggcccctgcggcccgcgcggagcggacgcgcgtggcgctgcccggtaagacccccgcgctcccgcggctcccgcccggccccgggcgcggtcctcgccggcgccccgcgcgcaatcccggccgcggccccggcccagcggccccaccttctcgggacccgttgcccaggcgccgccgggagggccgggccgtcgcgagtttgattcccggggctgtcggcgcggctccccgggagctccgcgtgcggcaggtccccgcccgcccttccttcccgagcccccacctcatcccgggccccgggcgcggggggcgtgcgggcatctggggggccgggagcggggcgcgcgattagaccggggggcgcgggccagcgccgcagggaagggagacgaggcctcccggagccggcttcgcccgagtcccctctcccgccgctcccccttttgtgtgggcgcccctccccgcagtgcccgggcctgggggcgcaggctgggcggcgacggcaggcgggggcgcctgctgggagccgagcgcctttcagggggaggggagcttcgcttcctgccccccgccgatgtcacaggtcggctcagccttttttggtccctcccggtcccctgggagctgtatctcccgtcagctcggccagggaaagttgggaatgcgctgtccccgcccctgctcgcccgccccgccggctcctgtgccccaggctctgagctccaaggggggctggtgtcagcgtttattcattcctccctcttccttttctcggtcgcgtggtcgccttacacccagcactgccctgcccatttcttttccccttaaaaaaagttttagctctaagaaacgtacactgaaattaaattcctgagacggaatgtgttttaaggggagggagggtttagattttcctttttttggtggagtagtggagtagaagatgaggggactccctgggagtttagaaacaagatgccctggaggcgatagaggatacaagaagaccatccaccgtgctccccacctgatccgcagtcagcgtcttgtagcgagaggaatgagccttccctgggtgatcccgcagcacctgagccacctggcccaggagaaaggactcagggagatgtactgggcctttcaccccttttctttatagccagctgtgcctgaaggaggtgagggaccccaggaattctctcacggaggaagtcatctcaccatgtggttgggcccctgctggatcaagtgtgaagctgggtcctctctgttgttgggggtcagtgccactggtacctcagtttgaatatggtgccatctctgggatggagaggtgctgctgggagaaacctggctcgggtctccaggaagctggagcgtgtgcagcagggctgggtgtgaaacccgctgtccactttctgcagctggaagggccaggacaagggaaacaggatactgctaccgacctgggcacatccttgaatagaagagagaccctggacagcgaggatggcccagggatgttgatatgactagggctgtatccccagctcctgggccaggccaactagggccagaggttggagtcatgggcccctttgagaatctggtgaaagctctaactcctctccttccaaaatgcatgtgtgtagggagacacctgtattcaacaccagacggttaatatacccccttggaaccaggacctccattgagacctctgccctagagttactggtctgacctgggccatcagaacagttgtcacctttttggctggtcagtgaataatcccagggttcaaagagcagactgcttctaaggtcttttctcatgacctccctatgcaactttgggcttgtggccatggagacctggagtgtctggacagatcccagctccctacagctagctagaggatgggggcagatgaggtggcccttttccaggggctcattttgctgtctgtgtggtgggaaggccctgggcactggactaggcccactggtctattgaattagaggtaaataaagggatttgggtggaggtggatattctggtgtttcagctgggtgtgagatccaggcctttaagagctccagcttgttcttggggaaatggggttgaggtgctttagtagagagtgttaagtgtgaaagacgactcttaaggaggtcttggggcagaattgtccaaggctatgatctgggtgttgtcggttccttagctccctttggactcttgaaggcaagtgggggccagagggctgctgtcactatccccagtgcagccccaggccagaggaggcctggcctgcctttcctttcttggctcactgggtcctgggctgctgcataggtgtttgtggcatctacacttgctagggatctggaagagctttaggacgatctgccatttgtgacttctctaccttgggactgagaagacttccttaggctcaagtcccccacagagagctgtaggggatttttctttgtttaactagagagcacagtgtttggcatatggcagcactcacactggtattcttcctttagagcttcctacatttgctctggtaataagcagcagaggcaggagtattctagagccttggggcacaggaagctgggtgtctgacaggggtcacctctgactatccaaggtgagctggaggaggtggtgcttctgtgttgctggctcttgcacttacaggaagcaagagctataaagggcattggaggccggatgcggtggctcatgcctgtaatcccaccactctgggaggccgaggggggtggatcacctgaggtcaggagtttaagactagtctggccaacatggtgaaaccccgtctctactaaaaatacaaaaatttgctgggtgtggtggcgtgtgcctgtaatcccagctactcaggagactgaggcaggagaattgcttgaacctgggaggtggaggttgcagtgagccgaagttgtgccattgcactccaacctggatgacaagagcaaaactttgtctccaaaaaaaaaacataaataaataaataaaataaaataaaataaaataaaatgaagggcattggagaccctaaagcgctgtggtccagtggtccttgacttgggaattgaaagtgtcttggtggcatgcaaagtccttgttgcagtgactgaggattcaccttccccagtggccatgacttctcagtcatgctgtggccctggctaccatgggttggtgagttcaggatgctagctgtgttggctcactcagtgtttctctgatccccttggcttccaggctcccagaacctctgatgtgtcagcgcattatcacagactcttgatgatgcagctaaatgtcttatctttaaagcaggtcataaatgataaatgtgataacagtccttgtaaatataaactcccttcttataaatgtgaccatttcatttgcattgtggcagcaccaagggtctttgaggaattcttggtaagataaaaatgtttaggctgggcgtggtggctcctgcctgtaatcccagcactttgggaggctgaggcgggtggatcacctgaggtcaggagttcgagaccagcctggccaacatggtgaaacctgtctctactaaaaatacaaaaaattagccgggcatggtggtgcgtacttgtaaccccagctacttgggaggctgaggcaggagaatcatttgaactcgggaggcggaggttgcagtgagctgagattgcaccactggactctagcctggacaacagagtgagactctgtctcaaaaaaaaaaaagttccaactccactggcttaacttccacccccaggaagcaactgagttattttgtgcacattttcatcatagcttagttgtttagagtgtaagatctgaagttaggcatctccaggtagaatcccagctctccatcttactctaagactttgtaagtgccagagtttcctatatttagaaagagttaaaagagatctcatgtgtatgccagacaaagaggaagtgttcattacatcgaagctattattattattgccatttctgcacagcggtacacaaattctgaggctcattattaaggaaaatctttggtaaaaactgtagaggctgagggtggattttggaagagtgggagggggtggggtgaggctcttgaatgatgagcagagaggaccgcacagtggaggcgggggtggggagactgaaatgtcatgggtgacagctaagcatatttgggggcagaatgactcagcatctgtagccctgctgtggaaccaactctttttccttttctttggagaatttgccctgtaagctgggggaggggtgaggaggcataaccagtgagaagggttgaatggcataaagttaatactaacattggtccagaggaacagggcagagttccctggaggaagggaacctagtcaggagatcggggcaggcccaataggcagtcaagagtgcaagctcacagggtgcagtggctcacgcctgtaatcccagcactttgggaggccgaggcgggcggatcacctgaggtcaggagttcgagaccagcctggccaacgtggtgaaaccctgtctctactaaaaatacaaaaattagccgggcatggtggtgggcgcctgtaatctcagctacccaggaggctgaggcaggagaatagcttgaacccaggaggcggaggtttcagtgagccgagatcacagcgttacactccagcctgggcgacagagcgagactctgtctcaaaaaaaaaaaaataaataaataaaaaaataaaaaagaggctggacacggtggctcatatctgtaatcctagcactttagcaggctgaggcaggcagattgcctgagctcaggagttgaagaccaacctgggcaacatggtgaaacccccgtctctactaaagtacaaaaaaattatccaggtttggcggcaggcgcctgtagtcccagctacttgggaagctgaggcaggagaatcgcttgaacccaggaggcagaagttgcagtgagccgagatcgcgccactacactccagcctgggtgacagagtgagactctgtctcaaaaacgaaaagagtggaagctgtgggggccaagggtttctgtgaaggaataggcttgggaaataatcattgcagcactcacagaggggtcggaccctttccaagtacttcacatggattagctcgttgaatcttcacaggacctatgagatattataccaatttttcaggtgaagaaatagagacataagagacatcaagagtttaaataacttgcccaagatcacatggctagaaagtggcagagccaggatttgaattcaggaagtctggctgcaggcccacacccttagagaaactgtcagggctgggtgtggtagttcatgcctgtaatcctagcactttgagagactgaggttggcagatcacttgagctcaagagttctaaaccagcctgggcaacatggtgaaacctcatctctacaaaaattagctaggcgtggtggcatgtatctgtagtcccagctactcaggaggcgtaggtgggaggatcgcttgagcctgggaggccgaggttgcagtgagctgaaattgcaccactgcactccagcctgggtgtcagagcaagaccctacctcaaaaaaaaaaaaaaaaaaaaaaaaaagtatgtcagagacacccctactgagctcgggggtggtcgtggtgggggagggtggagctgggggggttgtgggatttgtgtcctgcttgaagggctgccagtgcaatgtccaggcatcgttggaacatgcctggagggttcagcttaacagagtctgctgagaaccactggccaagtgccagatactctgctggggcccatcctggagcacaaaggtcatcaagccatggcccctgccttcaagatgcctcctgtctagtaagggagacaaacatgttagcctggaatttcagtttctgtggcaagtgctgcgataagacaaagcactgaggaagggggcactttgccagccagaagaggagttggggcagggaaggcttcctggaggaggggccgcttgagctgagtgaggacaagataaagtggctgctgcctcctgggcttttgatctggcatgggagcacattgttctcccccttggtgaactctgagtagagctaagtagcggtgtgggtttcagagaagggtcaggttttctggattctgtagcacccttgccagggtgaggcaggaactgggcagtgtggtcagctttcctgatgcctttgtggtttttaacagctgagaaacactgccacctcttgtaatgcctgcagtgaacatggtgaagaagacataaaagtcccttaagagtcattgctcagaacacagtgattcactcttgtctctctgcacttagaaccagaggcaaatgaatttaaactacagagggaggattcaagtaaggtatgaggaagacattccagataggatgtgagatgtaagaaaagtgactcataggcacagaggggaatggcctcccctgaaggtcttcagaaatgggaacaagtttcatttgtctttgtggtttaagaggtttcatctggagacaggaagatgaagtagaggcccctagaggtccatgtcagctcggtgatcggaggataaaaggagctggaatttttgagctagaagattacttaaatttggcctaacccctcctttgactgttggagtgattgaagaatgcccgataacactgagcagctcatccattaatgagtgagccaaggcacaaacagagtctgcccaacagctctgggccaggtgaccctggcccgcaatgttcctggtcagcatcacccgggggtgctcactgggagggacctacagctctcggggatggagtccaagccgtgtgaggagagctcaggaaacctggaagtagtggagcatttgtcttggtattggaatacagaaagcatcagcccccatacacacagtgtttctgagaatggcactctcagttggagctagtgggttatctcctagatgcacctagaagagttttaggcatatatatgaggccctcagtaaactttgttggatgaatgagtaaataacagataatccaagacttaatttctctttgaccatacccttgttaggccagtgcacttaacccttcttattctgttttgcttaagctgacagtaggctttttttcataatactgcctagccacaaagaaagctgcccacaagtatgctgggggcaagggtaagaagagaaaacacagtttaggatccttctcaacatttatacttctttgaaggatcatcaaggcctgacattatgttcagtcataatggcttttgctttttttcttttgtattgttccaagcacaaaagtgtttttattttttattatttatttatttatgagacagggtcttgctctttcacccaggctggagtgcagtgtggtgtgatctcagctcactgcaacctctgcctcccagtttcaaatgattcttgtgtctcagcctcccgagaagctgggattacagacatacgccatcacaaacagctaatttttttgtgtttttagtaaagatggagtttcaccatgttggcctggctggtctcgaactcctgagctcaagagatccactcgccttagcctcccaaagtactgggattacaggtgtgagccaccgtgcctggctcgagcacaaaagtaaaacgcttcgtttttcaaatttacgaaaaacatgtagtataacagtctcagccacattacagcaagatggttacagggatctcagaagagaacaaagcttgctcttggaagataatctgattaagagtgaaccaaatatgaacggatgctggacaatgagtttaaaaataataccgggtggtgaactttagctcacggggtgaactgaaatagacttgtgcaaataagagagaagtagcagcagcaaacatgacggcaagaacttttgcttcctcctctaatcccatgattccctattcattaagaaagtatttgatgttaggagggcactgcaaagctttttttttttttttttctcctggtgaccagcaagctggatttggagctctgttaaggggaagcctctctgtggtcatgtagggtgatcaggctcctgaaatgatttcactttgctctggtctgagattagtttcggtttcaggctgtacccacagctgggagagagctagtgagctccagggagggtcagctgggggagtttcaccattggctgtgtcagccaatggcaaggtgtgtgaacagggaactcctgtgttgagcagagagaggaagaagatgcgtccgagatggagttggggaaggcagcacttgcgtgtttgtgtgtccagagaccgggctggtgatgatgagcaggagggagcgtatgaagatatcagatgtgcaaaggacaaaacccccacccaattacaggaccactgagcctcgagctagggaagtcttaaaacagattgcctggaccgggtggattttccctgagcaggtgtacacctgaaaggaaagcaagtgtgagcatgccacagagtcaacatacatcttgtactggcattcttaagatcagcctctacggtgcagcattttcttgcatatgagtttcctttaaaaaaaaaaaagtcaaattaaagtttgagaactgatagttgcgaacttgcagacctttgcatgttggtggatcctttgagaacttcaagctgtcatttttcctgagacggcttgaggccagtctggttggttcacaggacatcattaccctagaaaagcagcagttttcctcccctgactggttctgggtgaggcatacacagatgtttccttccctcagcagtactagagcatcattacattttatttctcaaagttataaattcattttattttgaaaagagagaatcactgaattttacagctggaaaggattctgaagactgcttgcttggttggctcctggaggaatctgaggttgtgggtcgttaagtgctttgaaaagaccaatggtatgtaattaagaatactgaatcagaatgcctgtgcttcatcccagcctctgctagttgctgctgtgttcttggggcaagttactcaatctctctgagtcttagtttcctgatccatacagtgggagtaataatattaccaaatggttttttggtgttttttttttattttttatttttgaggtggagtcttgctctgtcacccacagcctccacccgcccgggttcaagtaattctcctgtctcagcctcctgagtagctgggattacaggcgccctccattaccccatgcccagctaatttttgtatttttagtagagacagtgtttcaccatgttggccaggctggtcttgaactcctgacctcaactgatccgcccacctcagcctcccaaagtgctgggattataggtatgagccaccacgcccggccaaaatattacataatgattgttaattactaccaaatacttattaagcccctagcacaatgttttgcatattgtaagtcctcattaaatgttagctgctgctgttattgttattattttcattttgtgaaatcacacagctacttagtggtaaagccagggctacaatgttaaattctttttattccaattcttttcagcatggccataaggagatttcaccacattctggaaatatgggaaaacctttacaaaaatgtttatgcggatgtctttgcatgaatgttcataatacagctagaagaaatgggcttaacctatttattagatatagttagactttgggcatgggggcatatgtctaccaaagaatttgtttccacaaatattatttactagtgtttaaaggtttcctgaatgctagattggttgcctctgctggaagattggggtgtttttagatgttttcattgaagagttcttctcaagttggaaacatccatttcaatgagttgtggtggcaaagcaggcttttgtgcgtaatggaaatatttctgtagcctggctgctatttatcaagggtgaagacagtgcagatgttttgaaaaaaatatataggcttggcagaagtccatgtgtcttaggccatgcctacacaaatccattcccaaatgatccgtactgacctttagcaaatcgatgacagcctcggagcctcccaagggagccgtttttgtctgaaacattgttgaggccagtgtgacccctggccttgcatggtccttgacacctctgatggggcgacaccctctccctaaggcagctttggtgtgttttcgtggaatatgaagacgaatggaaatgaattttgtttggtgaatcttgaaagattcctggagatactgtcgctctgtagagattgaaatctgttcttgatgctgatccgtgggacttctcaaatctccatgcctgaaggagacagtgtgttaaagtgtgaaatgtgtgagtgtgcaaaggagttgatgactggagttccagtcttagctctgccatgtgtgggctgtgtcattctgagcaggtcacttagtttgttaatttatagttttcttgaggctaatctattattatactccacaacaacacatggctattgactacatatgttaaatagagctggtaagaataatctctgtggcacaagattcttgtaatagtctaataatagctaatggccaggcgcagtggctcacgcctgtaatcccagcactttgggaggccaaggcgggcagatcacctgaggtcgggagttcgagaccagcctgaccaatatggagaaaccctgtctctactaaaaatacaaaattagccgggcgtggtggtgcatgcctgtaatcccagctactcaggaggctgaggcaggagaatcacttgaacctgggaggcagaggttgcagtgagccgagatcgcaccattgcacaccagcctgtgcaacaagagcgaagctccgtctcaaaaaaaaaaaaaaaaatatatatatataaaaaaataaataataataactaacatttattgcatgcttactgcatatgccagtaagctttctaagcatcttgggaatattaatttatgtaatcaatcctagatgagacagtagtatcatcactttatgcaggaggagaccgaggcacagagaggttaagttaacttgcgtaaggtcacactgctagttagctgaggaggcaggatctgagctccaaagccaggaggctgagtccatagatgtatttacaatattgtagcgttaggattcttattctttgactgttactgttcttgtttgacagtcccagggagggataaactgagcctagaggtagattaagtgtacagatcacagtcttggaaacaatgagggatggaatatatgagagttttttttggagttctggggaaacagctgtttctaagtgtggggcagagctgaggagatctggcagagatagagaaggattttttttggggtggatttttactatctgctttgagggttgcatgtatgtggatttaagagccacgtgactctttcccctcctatcccattttatttgggaacttatctttaaattccaactcacctctccccctggcagccttagaaacttagaaaactgccatggatggtgaattcttgagacatgaaaggaaaggtgaagggtggggttcttagtggaatttcttccttgtggtagcatttctattaaatgcatatggggaatgagccacagcgtggcttatgtttggtggagagagggatgggaactcgggtgacttccctttttctcatgagctgatttaataagagaatgaatcatcctatgagctttaattctggaaaagaaagaaaggagaggcaaatgagtgagatggcatttgactgaagccagaagccttccatgtcagtctcctagggcgggcactaggctggcacccagggccttggcggttcgtgctagtggtgagttccctccaggggctttgggaagggctcccagcttccggtcactgccactgtcaccatcagccctctcatcctggtaaggctctggaacctaaggccttgaagggaaaagaatagggaggcatgtcgttaaaaatagactactggtaaaattcacatatagcagtgatcatttttgtttttgttttgttttgagacagagtctcactccgtcacccaggctggagtgcagtggcgcgatctcggctcactgcaagctccgcctcctgggttcatgccattctcctgcctcagcctcccgagtagctgggactacaggcacctgccaccacgcctggctaattttttgtatttttagtagagacggggtttcaccgtgttagccaggatgatctcgatctcctgacctcgtgatccacccgcctcggcctcccaaagtgctgggattacaggcgtgagccacagcgcccggcagcagtgattattttgaagacattaacataaaaattcatctcataaaactagacaatttggccgggtgtggtggctcacgcctgtaataccagcactttgggagaccaaggcgggtggatcacctgaggtcaggagttcaagaccagcctggccaacatggtgaaagcccatctctagtaacagtacaaaaattagctgggtgtggtggtgcatgcttgtagtgtcagctacttgggaggctgaggcaggagaatcacttgaacccaggaggcggaggttgcagtgagctgagagaacaccactgtactccagcctgggcgacagagcgagactctgtctcaaaaaacaaatcaaaccaaacaaacaaacgaaaaaaaactagacaattcaaaaatagtttttgacctacagggatgtgagtgggccattcgcaccccatgaaggtggcaggtgtcctctctgtgctaatggctgacctcctggaacatcttaggaaaagtcctgttctctttcaggacttcagatgtgagcactcccagcccagccagctccacctcccagctgccgggcccttctctgagtttgccgggaggccgggagcacatccttttctaagccactctttgtggcctttctgtggatcactgaccttaatttggattctgagccgagcctggggtccccagggaagtgtaaaggctgccaccgaagaaggggttgcatgagaactccttcagaccagccctgccccccaggctcaatttaggaacatgaatagggtggtcttattttcggactctggcttctccacacacatttcccaaaggcttgcttttttagacaatgtccctctgtccccattcacctcgttttccttcctggccccagccatcagcagtggctactgttaatagttcccatttgtaagaggacttgctccatgtcaaacatgctacttatgtaatttagtttagtccttatactgaccctaggagccagcgattattgtctttttggatgtgggaactgaggctgagggttaagtaacctggccaagtaacacacccactcacttggtgaggtgtttatttggttttggttttaaccttttactgtgaaaaatgtcaaacatctacaaaagtagagaggttagtatagtaacttccctttgctgttatggagaagccctggctccagttcttctgtggcatacagcagacacctttgggtgaattagaagaaggtgctcttcctgtaggtcacacagcttggtaggcagagtgtaggctggatttgagctccatttgcccctttggatgggcacgttgtagtgaacagcctgcataactgtatatggcaaccctgtctacctaacttttatctagcttttggcataaagaaaggagactatacccagacaccagttcctgacagaataatgacttctctgctcagtcctctgctatgtgggatagggggagaaaagctcagtcatgggggacttttccagttaaaatgaaacagggagatgattcccagaggagacatttcggctgcagaggagggtggggaagatgagtggtgtcttttgcggcttctgttttccatcagccacctgctctcttgatgactcctccttgatgccttctcccatgtgtctgcgcccagagcaagggaagcacttgtctacagccacacggctggcaggagtagagttggtagagccttgggtgtgaaagcctggtgtgaactcactcttggctgccaccctcctggagtcactaggacaagctgtctttgcctcctggcagcttagcttctctggggctcaggttagccaggggctgcgtgggagttctgctttgcacctgtagaactgtttcttttagtcccaagtggggcttatgagtcaccagatagggtgcttcctaagggtagttattgtatttttttaaaaactactgtgcccttgattatacccatgacagcacctggcactgttgctccagaaatatttgttaaacagatgaatgttaaacaaatgaatgcagcatcctgctgaagggcccaggctgaaaaattcctgtgctttagtcaggagaggctggattatgctgcaggaataatcaaatcctgacatcccaggggcttgacaccatctaggtttattttttgctcgtggaaagtcttgtaggtcaggcagtgcacctccatctgtagccacatcatctggaatatagggccttcaaggttactgcgggaggggaggagagagatggaggaaactgacacctgttacttccattcacattgtccagagctggtcacatggggccgacctcactgcaaggaaggctggcaaatgtagaggagagaagagctgtctttgccgatctaaaggagaggattttgaatttcttgtttccagcttcagtccattggagtgcctctggctgaatcgcttactgtgccaccatttttttttttttttttaaacactgacagaaatggaatacctgccacttcctttaatccagggaaggaggcatgggatggcactgaagaagagtcacatggcagggtttttaacggctcctttattacatgttgactatatgatgttgatttagtcacctctagagcctctttcctcatctgtacagggaggatagtgatgccagcttgtctctcagttcagactctactgaaggcaagtaacagaaaccagctcgagctatttgaagccataggggaattgaagactcaaaggaggaagtgcctggtctcccaagtgccgggggtgtgtgggggtgtggtgggggtggctgacgcagctgttctcagtgagtctgcatggtgcacctgcaggacgccgctgctgctgtggatgtgcaccaggtggtatggcccctcagctcccaaatacacccgtccactttccagtaacccttagttactgaatggtgtctgagccttgatgtgaactcctgaggagagagtctgatgggcttgtgtggatcagctatctaccactgggccagtcagctggggccaggagggcatgatcacgcagcaccagggggtaggagctttcccctgtgaatgggagtagaggcggtcctcacaggagggatatgagctggccagacatgtccagaagctgttcaggtcaggcgaaatggttcacgcctgtaatgtcagcactctggggggccaaggtgggaggatcacttgaggtcaggagttcgagaccagcctgggcaacatagtgagaccccctccccccacccacatctctacacataatttgaaaaattagctgggcgtggtgatgtgtgcctgtagtcccagctacttgggaggctgaggtgggaggatcacctgagcccaggagttcaaggctgcggtgagccgggattgttccactgcactccagtcttcacccagactgagatctcgtctcaaaaaaataaaaagctagaccgggcatggtggctcatgcctgcaatcccagcactttggggggccaaggcaggcagatcacttgaggtcaggagttcaagatcagcctggccaacaaggtgaaagcccgtctctactaaaatacaaaaattagccaggcatggtgtcacactcctgtagtcccagctactctggaggctgaggcaggagaatcgcttgaacccagaaggtggaggttgcagtgagccaggatcatgccattgcactcctgcttgggtgacagagtgagactccttttcaaaaaaaaaaaaaaaaaaaaaaggctgggcacggtggctcgtgcctgtaatcccagcattttggaggctgaggcaggcagatcacctgaggtcagaagttcgagaccagcctgaccaacatggaaaaaccccatctctaccaaaaatataaaattagccgggcgtggtggcacatgcctgtaatcccagctactcaggaggctgaggcaggagaatcgctcgaacccgggaggcagaggttgcgctgagctgagatagcgccactgcactccagcctgtgcaacaagagcaaaactctgtcttaaaaataaataaataaataaataataaataaataaaatttaaaaataaaataaaaagctgttgtccatgtttagctggttcagggttgctgagctggctgggtaatgtctgtaagaacactgagaactatcaggtattgcatatgtgtgctctggtatggtgctgccagctctctcattaggaatcatggagattgtactgccctaaaggggcatgggaagcattataacgctgtgagggagaatttaaaagtcttggtggaggcaggcgagctgtttgttggaaggccatggagcagggatgggagggagtagtcagggccggggccagcacagggcattgctggggttaagctaggtttatagggtgttaggccatgacatcataaaccagagagtaaacgtgtatttatcacctgcgtaaatacagatgcttctacacttgaaactgtgtaatggagaaaggatgttaggccggatatggcactttggtccctagaccaaagtccttgtccctagactgtctcaactggctgtgtgcctgtgactctgggcttgaggatcctgtgtgtgcagcctgtgtccatatagcatgggagttaaggcctgaagactgggattaggcagctggctttgagtcttgttcttcactctctgtgtgacttaggcagattataacaaattttttattacaattattttattttattttttggcttctcatgcttatttcctacctaggcagaattttagatttattttttagtttttcttgagactaggtctctctctgtcgtcccagctggagtgcagtagcaccatcacagctcactgcagcctggatcccctgggctcaaggggttttcccacctcagcttccctgagtagctgggactacaggcactcaccaccatgcctgactaattttaaaaattatttgtagagatagggtcttgctatgttgcccaggctggtgatcctaccaatctcctaaagtgttgagattataggtaggagccactgtgcccagcctctaggcagatttttttctttttctgtttttttttttttgagacagggtctcactttgtcacccaggctggagtgcagtggcacagtctcggcttactgcaacctagacctcccaggttcaagcatcctcctgcctcagcctcctgagtagctgggactaccggtgcatgctgccacatctcactaatttttgtattttttgtagagatgagatttcaccatgtttcccaggctggtcttgaacccctgggctcaagtgatcctcccaactcggcttcccaaagtgttgggatgacaggtgtgagccaccacgccaggcctctgggcagatttctaaatctccctgagttttagtttcctcatttgtgaaatgaggatatccatagtacctgctttgtgtggttactgtgaggatcacatgaaatgaatgtgcaatcaaatgttaactaatattattaatagaagctgaggccaggctgattccagggaaccatggcagggtgcccaggccctttaagagtaagaatgagggctgggtgcggtggctcacacctgtaatcccagcactttgggaggccgaggtgggcagatcacgaggtcaaaagatggagaccatcctggccaacatggtgaaaccctgtctctactaaaaatacaaaaattagcttgacgtggtggtgtatgcctgtagttccagctacttgggaggctgaggcaggagaatcgcttgaacccaggaggcggaggttgcagtgagccgagatcacgccactgtactccagcgtggtgatacagcgagacaccgtttcaaaaaaaaaaaaagtgtgaatgaacgtggagggctgtatgggggcgggatgggctgggggtgcaggaagaagccctgagaaaggatagataggaggctagaggagcagtgcgcaggagagtggagctgctgacagaggtggatctgagcctcacccgggttgcggctcaggtctttctattaatccagttctgccagcacagtagtgccatgctctgtggaaacagccctggagccagcactgcctcctctcctcccgctgcccatctgcatcccagccactgtccctgaggcctcaagatgtgttgaaccttagggatgagtctgcagaatcctagaagttgggtgcctccttccctgccatcctgggctgggggcttgagaggcacctggttgtgagggctgggattagagtgcttccattgcgaaactgtggagcctggagagttaaaaaataaatgaagaagctctgaccacagagcaatttgagggctgaattatttagagcctctgctccctctggcttctcctggggaagggccaaaggaggaatgtggagccagggagggctgagcttccctggccaggcttgtgcactcaggggccctgggagtccacactgtcctgccatgtcctcagccgcttttgtccttgggtcacaaggcctctgtggtttcccgcagcccacagggcctgacagattcaggttgaggctgagaggagagaccctccctttcctctttgccccactcctggtctggcctcccctgatgctgcttggctccaggacatagcgataatgaatgacataaataagtcattctcattagcagcgggtgggtcactggcccaggagacaggacagcaacagcggaggtgggtgtggacagggctggtcaagtcccctggtctttctctcaggagccccagagggaggcttaatcctctttcagtctctccaggattatgttttcagcttgggggacttgatgaaaatccatgcttccagcagtcaagggggcccaggagaggggtgccagtagggtcccctaggaaggaattggggtgggacggccaggcgctgaggctgctccaggcgggcctggcccgccaaggtggaccgtggccatggcaacccctggctgcacccggggtaaacacaggctttcaaagggggccttgttttgttccctgtggaagcctttcagttccagcctgctggggcttttcaaacctcgggaggaaagggagggcagcggggatggggcgggcctggctatgaggaaatgtcactcctggacccccttcaccccggccccaggcatatttcctggaggccccagtttctaaagctcctgcttctggagaatgaaaagaagagtaagcaccaggaatgtgtccagtctctaggcaacagggtgtgtgtgtgtgtgtttgtgtgtgtgtgtgtgtgtgtgtgtgtgtgtgtgtgtctaatggaagggagggaagcttaaaaaaaaaaatcactgtcacgctggtcactcaggatggaagccttcactgctctacactgatttcagcaagccagccagggctgcctgaagcaggtctttaaggattgctcatcctgttgtcatggaatatcaaataagtaaaatctcagagaaaacactaaaccgttcattaaatgtaaggtaaacacattggcagtttgcattcttgtgtattagtcagtgagttttagtaagaaagctgattgcgggcacttgaatagcctttgctgtcttggggagcttggtccctggattctatccccatcattttgtctgtgagcttaacccaagtataaaaatggggaacgggctgggtgtggtggctcatgcctgtaatcccagcactttgggaggctgaggcaggtggatcacctgagctcaggagttcgagaccagcctgagcaacatggcgaaaccctgtctctattaaaaatacaaaaattagctgggcatggtggggcatgcctgtaatcccagctactcgggaggctgaggcatgagaattgtttgaatctgggaggtagaggctgcagtgagccgaaatcacgccactgcatgccagcctgggcaacagagtgagattctgtctcaaaaaaacaatcgggaaggatggcatgtctgcccctctaagtattctctatgtatctgttaaggaatgagtagatagcaaatgcacttccactttttaaaaaagataggggttcatatccaaatattgtctttctttcctttttttttttttttttttttttttttagagagacagggtcttgctatattgcctaggctggagtacagtgtcacagtaatggctcactataacctggaatttgtgggctcaagctatacccctgcctcagcctcccaagtagctgagactacaggtgtgcaccaccatgtccggctatttttatttttatttttgagacggagtcttgctctgtttcccaggctggagtgcagtggtgtgatcttggctcactgcaacctccgactcctgggttcaagcaattctcctgcctcagcctcccgagtagctgggactataggcacgtgtcaccacgcctggctaatttttgtatttttagtagagacgggctttcaccatactagccaggctggtcttgaattcctgacctcatgatcctcctgccttggcctcccaaagtgttgggattagaggtgtgagccaccgcacctggcctttatttttatattgtagagaagaggtctcactatgttgcccagcccaggctggtctcaaactcctgggctcaagcagtcctcccaccttggctttaaatattctttcttgacactgcattcctctttgccttgtctgaagaggtggtgagcaggatggggaggggagcaggaggcagatatgactgcatctgttaacattgggctggcctctctcagccaggtccccagatgctcctggggagtcttgaaggaggtgtagggagaaagatcccagcccataagtcgggctccaaatagaggtgttctgggcctgtgttcatttgttctcgagtcactgtcggcctggggaatgcagcatccgatctggtagactagagtttactgctgaagaccccagcttcatgccttccagtctggccgggagaggtggggctgaggaagtatgagtatacctagccctgcatccctgcaactcagcaagctttccccacagctggcagagagcagtctcgttccaaggctagatcaggtggctgggtcctcctggattcccatctcttctgtcccttcctccctttgcaaattctcccttgtcatatgctgttgaactgggggagatgaaagtggcttcttcatctgaaattggggtggaggggggctcatgaacttgcccagcttttttgattagtataaaataagaggcactgcatacagctttgtggagacagggaaaaagaagatatggttcctgcttctggagagatttggtctaatgggaaccgaccaacacgttagaacatcaaggctatataaagttacagacattgttgtttacttgtagaatcttagactggctaagagatccaaaatgtccagagcagctctgttcagtggttctccccccttgctgcccgtgaggctgtctgattctgctagtgctgggtggggcccaggcaggggtaaattttatacattgcccaggtgtttctattgggcagccagggttgagaaccatctatctagtgcagtggttcacaagtggggatcatctggccccccaggagacattggcagtgttacaactgggggtgatgttgctactggcatttgtgggtagaggccagggatgctgctcaacatcttccaatatacaggacagccccttactctctagcccaaatgtcaatagtgcctaaggttgagaacccttgctctagcgcctggaccagacttttttttttttttaagacagagttttgctcttgttgcccaggccagagtgcagtggcacaatctcggctcactgcaacctctgcctcctgggttcaagcaattctcctgcctcagcctcccaagtagctgggattacaggagcctgccaccacgcgcagctaatttttgtatttttagtagagatggggtttcaccatgttggccaggctgatctggaactcctgacctcaaatgatccaaccaccttggccctccaacagacttttttttttttttttttttttttgagacagagtcttgctctgtcacccaggctggagtgcagtggcgtgatctctgctcactgcaagctctgcctcctgggttcacaacattctcctgcctcggcctcccgagtaactgggactacagcacccgctgccatgcccggctaatttttttgtatttttagtggagatggggtttcaccatgttagccaggatggtctcgatctcctgacctcgtgatttgcccatctcggcctcctgaagtgctgggattacaggcgtgagccaccatgcctggccttttttttgagacacagtgtcactttgttgcccaggctggagtgctgtcgcgcgatctcggctcactgcaacctccacctcccgggttcaagagattcttgtgcctcagccttccgagtagctgggattacaggcatgtaccacgacacccagctattttgtgtgtgtgtgtgtgtttttagtggagacgggatttcaccgtgttggccaggctggtttcgaactcctaacctcaggcgatgtgcctgcctcagcctgccaaagtgctgggattacaggcatgagctaccactcccagcctagagatgcgttttaagcagaattctgagagagggaaggacacatgtgggtgagaggagcagggtgggggcatcgtgtagggaagcagcacatggcagggtttggaggtgggagaatacgatttgatttttgcaaaggagaaagaggctcgtggtttcacgggagtcctctgcaatccagaggaggcttttcagccggatcctccctggattcgggactgtgtcttattgagacacctttggttgggacatgaagtccctctgactgtgttcctttgtgtgttcctaaccctcaggcctttcttggccctgtgtgagtaaagagaaggagatctgtcagccaccatcaacttgaatacccagtctcaccctcggactggctttccctgagtccatgcatatgtgagagcttctgcccaggaactctctttccccccactgcaggaacagcagtgccctttgacttagttaatgccctcatgaccccttttttgcttattccccacttctttagaggagggtaaggagaaggccccagcctgtgcctctatgcccacttcctgacagtgcccggcatgtggcagtggcttcatcagtgtttttgaatgaatgagcgactgcccggaatgaatgggagatctggggtttttcctgcgaattgtacctctccctctttttttgtttgtttcttttttctttctttcttttttttgagacaggatgtcacttagtcacccaggctggagtgtgaacacagctcactgcagcctcgacttcccaggctcagatgatcccacacttcagcccccaagtaactgagattataggtgtgtgccaccacctccagctaatttttgtattttttgtagagaccctgttttgccatgttgcccagactggtctcgaactcctgagctcgagtaatctgcctgtctcagcttccttaagtgctgggattacagacaggagccaccacacccggccagctcctttaataagtcattcagtccttgtgccagaaatggaactaggagagactgaggttggcactaaggaagaaggtctttagtgtcctttagtgtcaagaatttccagggagtagagcaggtcatgagaaggttacctgcaggaaatggggaccatttcccctttggagttggactgtttgtggctctttctggctacaggagcggtcacagaggggtcatttctgccctcctgtgttggccacagcacatcccttcctcccaggcttccagctcttagatttctcagctttcacgatagatgtggatatcttctttttaagaagtagaaagtgctgtccaaacacacgtgtgtagtgattctcccaggccatcactgttggagacccagcttcagtctggcttgagcagaaccaaagaagtgggcacagttttctcaaaatcctccctcctcttgctgtggttgtgggtagcgttcctcgcaatgtttgcaagtgcttctgagctgcttttctctgccttctgttaaacccctgggacggagagggctttggtttctgactcaggataaaagggcccctgggcatcccagactcagcctggagttggggaaaggtgtttgtaagggctaccttctggcctcctcacagccagtgctaactggtgagcctttgctggagtccgacttgtttgccaggtggagttcacagcatcagcctcgttggctctggtctgcttgtgcagttggagacttgctacccaaagtcaggtccctagaccagcagcgctgacatcacctggttagaaatggagaatcacgggccccaccttgaacttcctgaatctatctacattttaacaaggtccccagtggttcgtgtgcacattaaagtctgagaagtggccgggcgcagtggctcacgcctgtaatcccagcactttgggaggccgaggcgggtggatcacctgagggcaggagttcgataccagcccgacaaacatggtgaaaccctgtctctactaaatacaaaaaaaatttgctgggcgtggtggtgcctgcctgtaatcccagctactcgggaggctgaggcaggagaattgcttgaacctgggaggcggaggttgcagtgagccaagatcgcgccactgcactccagcctgggcaacaagagcgaaactccgtctcaaaaaagaaaaagagagagagagacagactgagaagcgctgtgctagaagactttggatgctgcagggacagctggggacgtgctgaaccttgtttgagtgtcttgtatgacccgtctttgcagtgctttaaaacagtgcttctcaaagtatctgaggtgaaggacaatatgctctattccttagttcaggaaccgatgagcatgaccagtctgagccagtctgagaacatccagactggtctataccctgttctaagagggaagtccacagatcacatgcttggatattgtgctaaggtcagattgctagaaacattttaaaatccttccttcctttctttttctctacttatttggtaaggacccacaactaacagtttgtaggtggtctgtggacatacttttagtggccctggtctagagccctgtctttggggtcagatagatccaggtttgaatcctggcactgtcactgacttgcggtgtgttcttgggcggctgtttaacctctctggggcttaattttgtcatctctaaattggagatgataatgcccctgcctcatagggcaggggtgaggattaaatgagataagtttgggtaaagcttatcgttaagagcccagcacacagaatttgggcttgataatattgggtgtcaaatgttggcagcagcatcattgtcattgtttgctgtcttggagcatctggaaatgaggacaatggcctcagttaaggaacacccttgtttttagacagacggtggcctttaaaactgtggcaaattagtatggaatggaaactttttttccccgcctgctaatttctgatagtttggggctgccgtaatgaattatttttctcagtgtggatccaagtaaaacccaggatcagaattgggacaatgttggaacttgtttttaagtgatggaaagaagtaataaacacagagtaggaaatcctttaatcccacaggacctgactcttaaccctttccctcccgccccccaccccgagtttatatcctggatactgtctcccaggcaggctgggtggactttcagtgccaggtacctctaattctcgaatgccagtatattctccctttctggagaaactcaagttgccctcttcgctatttcttgatagcaaagaggttgcgtgaaaacgtagaggactcaaatcggaagatctgtgttctagaatgtacttcacaaggcatcggagggttgttaccttattagccctaggttcttttttttttttttttttgagacagagtctcactctgtcgcccaggctggagtgcagtggcgatctcagctcactgtaagcgccaccttctgggttcacgccattctcctgcctcagcctcccgagtagctgggactacaggcacccgccaccacgcctggctaattttttgtatttttagtagagatggggtttcaccgtgttagccaggatggtctcgatctcctgacctggtgatccgcccacctcggcctcccaaagtgctgggattataggcgtgagccaccacgcccatcggccctaggttcttaagcttttttccggtcccagatcctgtggataatctaaagagaactttgacacccctcccaaaaagcataggcacacacaaacacattaaattgcattcgatttttgggacgaggggttccatagacctcacagaaatctcacagagccttcgctaagaaccttgtgccaggctgtaagcttcacaaggcgtgtttccactgcccagtgactacctgagtgccctgtggcatagactaggggttaaatacacaggctttggagtcagggtgccagggtttgaatccttcctctgctacttgtgggcttgttaaccttgggtacagctatttagtctctctaagcctcagtttccccatctataaagtggaggaaagaacagtaccgaccttacagggtagttgtgaagttagatgggataatatttttaaagcttacattgcatgaattgttttgcctacagaatgtccattgccatccagaggaatctcatgttggtagcaagaacttgcactgtctttgttgcagagcaacaggttattgggctgtgggttaatgtgaggctttctttggatgagtggggttggggggcagatcccctgacatacctcttggaaatttgaggggttgggagctttggagcagggctcctagaagcctgctaaacccagctgctcctattcagtaatttccatgtgctgttgttgattttggcttcaggcatggagagccctgccttgggagcttccttgaaactggatgccccaacccagagggtgtgggcaggagggaagcctcaatgaacactggagaagcagacttttttttctctctctaactctggcttttttttttttttctttctccctaggctttctgcagcagccccagcaattaccaggagtgttaactggggtcagggcaatggcagggcttctggagactcccggggggagtggggaggaggaggaagtgcctctcaggcaccctggaatgagggcttcacctcctgctgcccaggcccgcctgcccctggatgcccttttaagtgagctgcccagaaacccattggcaccctccataacagccccactctctgtcccagccgctcggtgagaatggcagggagttaaaggattctaaacattggcccccactgagcccttaattacattaacacacaaagcagcagggccggccatccctacaaacaattgccggcctgtttcccccagctgcgcctccctttcatctgggcctctttctcagagatgctgggttccaacctccctacgtttcctcctgtttcattggttttgtctcttcctttccctgtctgagtcattcctttcccgctttggtccaagaggcccggtgtggcaccagccgctgagccccatttcctatgttccagaagcagccccataactctgttttatggtggatacatgagtggtttgaaaagaaaaacgatgtggttatatttttgcctctaatttgcatattgtcctgaaagagaagcaaaatgccttcactttataatgacttcccgtgcatcttaaccacactttccatttgtttagagtttgacagctttaaatttattttttattttaaaatttgtaaatagagacagggtcttgctatgttgtccaggctggtcttgaactcttggcctcaagtgatccactcacctcagcctcccaaattgctggcattacacaggtgtgagccactgcacccggccagaatttggttgtttttagaagtcccatcccatacatttctcaccgatctgtaaatgttttgatgtagtatctaggatgggaatcacacctatttcagggggtgaaggggcttgaatggggacaagatccggctagtctgactgctaggccaatgctctttcctcctgcccacctttttggcttggtgtgggcctttttcggtcctctccagtgtctcagcaaaatgccagcagcaggaggccatgcagaggcacctttggtgatggtgaacttgagctccttgctatgagtggcaggtgagggacccctggagaactggcatttctcacctctgcacttgactctgcccctctcgcaactttgagggatgaatacgtcactttttccattccagtattggtgggtctctaacatttccagagaaggaagttctctagttatccccatgttccagggtctcctggcacagggcccctgaccctaggatgaggacttcccagtaagctgggcttggggcctccccacccagcttggggagccatcaggcctgcagccccagccagaccacccttgccacctctgggccaaccacaggtggcagaggacaggcggtcaggtgaacgctgagctcgagagcatctttgctggcagtaccaggcctgggtaagggaggacggccctgtaattagtgttcttttagagacagctgctgtggctccttctcttttgaccctcttcctccttcacatttgcacatggcttagggacctgccattctccctcattcaggcaggcattcccaggaggctcctgtgccccagatggtgaagcttatctcttttatatcctcatgcttgggggtggcggcactggcagggatcttcgtctgctgggggtctctcagggacactggaccctgcagcggcagctgtcttctgtctctttgcctggggcagagcacctgagcaggctgtgtttcactgcagtgtctttgccaaacttctttagagcactctaagggctaatgggcttttggttatgttccctggagaacttctgccccttgggaagggtaccccactggcttgcttgtttaggtgtgaccacagcagagcccgagggcctctagattacagctgtgcctgtcccatctcattgctcggggctgcctggaggggtttattccatcccagcagctcttcatcctgacttctcagtcacacggattttagtcagaatgtgttccccttgccccctgggtagtttacatgctcgttaaagaaaaactggaaaatgtttaatttccagtaaaattgatcattctgataatttcagtactacggctgaaaacatttggttatatttccctctgttcttttttttttttttaatgtgcacaagttttaaaaactagttgtgatcttactgatttacatacctttgaatctagctttttggtgtaacactacataatgagaatttttaatggaacggtgtggttttaaacactcttttaagtggctgtacagtgtttcatcctgtggctctgctatgctgactattgttgacaccccctcccctccaaactcatctttattttaagcctcagaactttatggagcgtgaaagtcaggagccatttgtttgggttctcttggtgtaatattaatccagagttggggcctctgccaaggacccttcttgccaaactgctagcaggagggacctggctgtggtacaggcctggggccttgatgggacagcggcttctagcatggcctcttcagccctcggctccatagaagtgggacactcatttgagcgccctttgacagcttcaggaagcttcctgtggcttatacaggggtggggtgatgggacccaggctcagattggctctcggtgcccatcagtgcatcgatagagtctcattccctgggcctggggctgggtgccttgcttagccacgcaacacacgggatagacaccacttccagttctattgatttacacacttttccctttcttctctgccccaaatgaaagggtaaaatgagtcgcagagatttttaagagttttgagcagcaacgtaaagaagccggaagaggcccggcgcggtggctcacgcctataatcccagcactttgggaggccgaggcgggcagatcacgaggtcaagagatcaagaccatcctggccaacatggtgaaaccctgtctctactaaaaatacaaaaattagctgggcatggtggcgtccgcccgtagtcccagctacttgggaggctgaggcataaaaatcgcttgaacctgggaggcggaggttgcagtgagctgagatcgtgccactgcactccagcctggcaacagagtgagacgctgtctcaaaaaaaaaaaatgcaggaagaatcggagcacagtggtgtgtgcctgtagaaccagatacttgggaggctgaggcaggaggattgattgagcccaggagcccagcctgggcaatataacaagacctcatctcaaaaaaaaaagtagaagtaggaagtattggacaggctttagttacatttctggctctgtcctgtgtaagttccattgttacttatccatcgagcctgtttcctcatgtgtacaataaagatgatgatgcccgccttgcaaagttgatgtgatgttcaaatgaaaatatttatgtaacattgcctggcacatagtaggtgtccagtcagtattgttttgttgatgttcagggtcacaaaatgcaccaacctcaaagccagaagggcctgccacccagcgccccaccagctctcgtttcacaggagcccatcaactgtgcctttactttgccagctcctggtgggaagctttcctggttggctgatcagagaagtctggttgaccagagttgccattgtttcagctccttctggctgggacatccagccaaggcaggccatgctgtcctataccctgcttatctgagtgaaagtgaccagggcccttgccttctgactctcccttggatgatcttgagacggcagctctacgtgaaagcagggtgtggcaccatggttaatttgctagtgcatctttgtggccacacttgtctgcagctcttggtagaacccaaaaagccaacaggaagccaaagagagagagagtcacctgaggacaagctttggttctgagtcttcatgccctaatctgaggtcatatagttgactgtctgcttccaggaggcagtgcactctagcctggctggacagagattcatgtaacctttccagccatctgcccaacaccttgagttttgggtgccatggaccagtggcattggcatcacctgggagctagttggaaattgtaaacaaaaaataaaattcacagccagatgcagaggctcatgcctgtaatcctagcactttgggaggccgaggtggatggattgcttgagctcaggagcttgagaccagcctgggcaatgtggcaaggcccgtctctataaaaaatcaaaaaatgaggtgggaaaatcgcttgagccctggaggtcaaggctgcagtgagccatgttcatgccactgtactgcagcctgggcaacagagcaagaccctatttaaaaaaaaaaaaaaagagagagggagaaattccctgggtgattctaatgtgcagctggattgcagaactgatttagacccctgtctttgggatggatggtctggaatgacagcgatcatgatggtaatagttgctgtttattgagctcctgctatgtaggaagagctttatccttatttgtaatcttccttttaaactgaaaggtggtagcactcttcctgtctttcatatgagaaaaatggaggctcagagaggtgaatccagtcacctaaggccacttaaatagtgaatctggaattgtctgccccgaggcttcttttgccattactttactgtaatgaaagctcatactggtttagacaggtctggttctccatggaaaatctggctgaggattctcttctcggtcagtttcaatgatactttcagagtatgtggttttaggattgttctgtttgaagaaaagcacagaaacttttaatccccagattcatgtctcctagaatgaacagaggggggaggtcagtgacagacaagttgcaaatgagtggtggacaagtcttgaggaaaggaggttatttccaaaggtcatagaggaaacagggtaaagaagcctggacttttgggccagagaaccccacccaactgtgtttgttttaagccggctatatgagtttgagcaagtcactttatccctccatatccaaactccacaccctccagatgagccaggggtaacatttgctgctttttctgcagatctgatctctttttgtttttttgagacagagtctgtctctattgcccaggctggagtgcagtggcgtgatcttggctcactgcaacctccacctcctgggttcaagtgattctcctgtctcagcctcctgaatagctggaactacaggcacgtgccaccatgcctggctaatttttgtatctttagtagagacagggtttcaccatgttggccaggctggttttgaactcctaacctcaagtgatacgcccatcttggcctcctaaagtgctgggattataggtgtgagccactgcgcctgaccaaatctgacttctaagatacaaagtggaaaacagaggcagtggtgagaattgagccgaaccacagaccccaggtcttttgctctaagagcagctgagaggtagcactggagacaggtgctggtagaaagccatgaaagcaaaggagagggcagccactgcgcccagacaggaagcacacagaaccctgggacagaagctccccagccctcgtgagcctgcagagaaaccgggagagaagcacaaagcaaatgggccagacattgagaaatagccctttcttttcatgttttgaaccacgtccaagcctaacttctaagttcgaataaggatttgaaaatcagcctgaggctcccacggaatctaaatccaggttactccgtatatcttccttataaagtcatgggatatctgtgtttggggaatggaatgagtgagggtgaatgtttcactgcttttttttttcatctcttttcttttcaagaaaacactcggccgttgcattgccaagcaccttgcagttcacaaggaacttttatgcctttcactgcattgttggtccctgagaggggaagggggttccccccattttatagcagaggaaacacaggcccgtggaggagagcctcaagatcgcacagcaaatcaggggcagagtctggactgttgtcttccagctccaagcacagcactccttttgttccaccaatatctccctattaactcgctaccttggctttccacagtcagaggctggatagctgacaataaccttggatagacggagctcataaagtacaactaattcccagtgatctgtacatgtgttttaaaacatactttccttttaaattgtataacctatatacaactatactctgtttattaaacatttcagctgggcatggtggctcacacctgtaatcccaacactttgggaggatgaagcgggcagatcacctgaggtcaggagttcaagactggcctggccaacatggcgaaaccctgttctctaataaaaatacaaaaatttactcggcatggtggtggtgggagcctatagtcccagctactaagggaggctaaggcaggagaatcactcaaacccaggaggtggagtttgcagtgagccgagattgcaccactacactccagcctgggcaacagagcaagactccatctcaaaaaaaaaaaaaaaagaaaagaaaaagaaaattcagataataaaaagccttctttggctcctcctaacaaccccccaatcccatcccatttctcagaggtgaccactgatgacagtttgatgtggatcctcctagcccttttctaaaaatgcattttgcatgtgttgctgatggattattataatccctaaccatcttgcttgctttaattgacagctgtgtgtgtgtgtgtgcatggagaaagcaaacatagtaatattaccttcagcaagataaaaccaggatggtaaaattagccagactagaggtttaaagcagtgattctcaaacttggatgtgcatatgaatccctcatagattttgctaaaatgcagatactgattcagtttgtttggagtagctcctgggatcctgcgttgctaataaggtaccagtctctgttgatgctgctggtctcaggctgcactttgagtagggagggtttttagagcacagtcactggaatcaaaaagacctactgggcccttaattgctagctgagtgagttgagcaagtctttaagctttccatgcctgtggatcaggaataagaatggcatctttcctgcagcgttgttgtgaaaacaaaatgagccggggcctgtgaagcacttagtccagtgcctggcacatagtgagcgctcgataaatgttagttattaatattgtctagagacaaataccatcaatttgtccaagccaaacagaaaacgcttgctggttggctattactgggggctgtttgtgctgaggcacttttaccttgttcatttaatgtcctcctcgtcatcaggattttgaatatatcttgtatggtattatctccatgtacttagggagaaactgaggctcaaggaggctgggtggcttaaccttctgagccacacagctaagaagtagcagaaataaagttacacccaggtttcaggtctagtgcttgttgtatacattgcagctgccttgtcttgaaaacttactatgtgcatggcttagtgggtttgtcggtgtgggagcttaagcctttgatcatggctccagggaaggaaagcaacaggcttcaaacttctttcacttgtacacctcaaaagaattttgaacaactgtgtatcccctcatatattaaaaaattgacatatatcgccgggcacacgcctgtaatcccagcactttgggaggccagggagggaagatcacttgaagtcaggagttcaagaccagcttggccaacttggtgaatccctgtctctactaaaaatacaaaaattagccaggcatggtggtgcctgcctgtaatcccagctacttgggaggctgaggcaggagaattgctcgaacccgggaggcggaggttgcagtgagccgagatcgcgccattgtactccagcctggatgacaagagcagaactccgtctcacaaaagaaaaattaattaagaaaacataaaaattgacatatattcccgggtgcaggggctcacacctgtaatctcagcagtttgggaggccagggcaggaggatcacttggagtcaggagttcgagaccagcctggcccacatggagaaaccctgtctctactataatacaaaaattagctgggcgtggtggcaggcgcctgtaatcccagctactggggaggctgaggcagaagcatcgcttcatcccgggaggtggaggctgcactgagccaagatcatgccactgcactccagcctgggtgacagagtgagactccatctcagaaaaataaaaataaaaataaaaattgacatataaaatgttttatcataactttaagtggaatgtatttccaggcctattgtatgccatctacttgcttcaaatttatttttgtcaaagccttagaacagcaaacccagcccaggcagttgtggaaaacatccaccataattcctaattggccaggctggatcttgtggttagaccagccagccaaatcatactttgtgtcggaaaaactctgactcctctttttaattcaaatatttattaaacaggttaaacaggtgtccctgtgtcagcttcctaattctaatcctaaaataaacagatgggtaggtaagatagataaggcccccttctcaacatcttaaggaagttctttgtcctgctggaactcctcccatgagggctgcattcttccgttgtctctttggtggcttttataacccagggcgggataccagggtgaggttgggatgactgggggtaggcctttcttttgggaagtgtttaggagggccttggtgaggggagaactggcagacccagagggttcccggctgatcagttttaggaagaagcacaggaagtggagctttcagaagttgattccctggaagccatccatgtctgaatacttctgggaagtccccaggttccctgagggttttgcacatgtactctggtgggaagactgttgagtagcagcctggatatcctacctaggattttgctctgtggacattacagagcttgtggatctttgagactgagactgcttctcccaccagctccctggtaacaccttgaatgcacgccccatgtttcttctcagctcctctcagtgagacagcaggggctcacactctaacgatgccaccttgttgagggggtaaactgaggtccagaacaggagagtgactacacagagcagtccatgtaccccaccaaaaaagccagctggcattcctagtggaggcatcacaaggcaaaaaagccttggggtgggtcaggaggagtagtcttcagagttcagcctctgcccctgcctcagtgcacgtcacctgcattctctcagcctcagtgtctctgcctgttaaatgaggctgatgtggcaggtgttgagcctgctgttcacaggctctgaagttgggcagacctatttttgaatcctagctttgccacttactcgctgtgtgaccttgggtgagttatttacctctctgtgcctgtctccacatcagtcaatggggagaagaaaggcctctctctcatgggatggttgagaggatcaatgagacaagtgttagtgtcaggcccacatggcatgctcagtaagtattattgttatccttggtttttgttccctgtaagaattatagtcaggaagagactccgtggagtgaaggcctggttgagactctccaagggcaggattgtgttggtgcatggccttgccccttcgtcccaggatgaccacatgtgctaagtggcacttagtatgtgtcacctgatgaacaatgagtgccagtcaagaggcccttatgacagcctctgagccgctgccatctgctgggcctcttgttgtcatcttcctccaacattcacccggggaggcatcaagccactggccttgttgccctgggggagatgaggctgcccccacatttccccatagcccagtggttttgagagcacctgtgtgccctgatgggacctgtggcaacctcagggacctagtgggacacctgttgccgcccattcttctccactgttcaggttcccatgtcctccctattggatgggcctcaggcgcttagcctgctcacctttctcttctaaagtcaccacgtctccattttcttgtgggcctctcctaggagatgttttatgaacagagtccagtccccacccctccatcccctcatctcttctcacaaactttcccctggaagttactcccttgaccccctcctcctcctgctcagagaagtgaataatgaaataaaacagacagtgcactccaggtgggattttgctgcttgaaggaatcccttagtcaagcaaggaatccttttgtaaagtaagtgctcactgtggatttccgtctgggagtttttgcttggactggttctcgagagcggggcccaggcgagtttgtgagcctgggggtgggcgaggctgctggcctcctctctgtggcctgaaagggctcccagtgtggcttctagatccactgattacctttcatccttccgctgtcttcctgtcagggctctggtctgccagcatcgatcacactggcctgggaggtggtgacgggtttgtgtttctccctgttttgttcctttgcttccccgtcgcatctccatggaaacaggtgcagcctttgtgttgcctttgctttgggcaaatcgatgccaagtggggacttctctggactctccaccccctcccctctctgggatcaaagtgggaggagggggcagtgcagggcctgacaggaagccttttgggggcctggagggcctggggtgggagaccccgctgcatggctcctgtcctggcctgccctcatgcctcaggcatcacaaggccatcgggatggagcaagtgtgctgtgatttagaaacactctcagcccccctcggccttctgcattctcagaggcagctgctggccacctggggcgggttgctgggtaggagtcggagagctggcaccagcttcgattctttggtgggaccttgagggtgaggcctttaacctttccggcccttggtttctcctgagaggttggagaggttttgaactcgtgagaagatgaggcttcggtaatatgactcctcttttaccttaaggaaaacctacatctgggtaaactctgcaaagtttttgtcatatgattgttctatggtgaatactaaattctgtgtttgattcaaacgggtgagttgcctggcaggaaatgaaaccttcagcttgggagcatgtctttagactgagctcttgcttatcataacagccccctgaggccccctcctccccgcccagcttgttccgccttcccaggctcttaacaacctattagggagccttctgttccaggccggagctcaagtgttggcccaaacagccgggggtagcagcaaccctgccttaagtccccgaggtcctaccagcattttagctgtggcacgtgggcaaggatacccaggccggacagggctccctaaggccaggcgccaactttctgcctgagctgttgctcagtccctgctggtttgataaactgcatcatccaaaactcatgtgctaactttaacgtagccacattaacctcattgatgacattggcaaactccaagccctgcccattcattaaaaaaagacttcattttaatatctgaacgctatgcctatctgcttgttaaatttagcaaaggatgtgtttgactttagattttgcattgtccacaagcctcacttgagatgggagctagagcccagttgcctgaggggacctctgagcgtgcctgtggtggtaaatgtcaaattgtccagtctcctgcctgcagagtgggcatttgatgtggttgcatctttcagggatctgtcctaggaaatgaactttctaatacctctttatagtcaggaagttttttttggaatccaacctaaatcccattttattttattctgtctttaagaaagatagcaaatgaagagtaagaatcctgaatgctttactcgaagacccttaaatctctacttggccttggccaaacacacccaggttttgagggttgcctcctggccttctctccttccagcagaacaatgcctgagtttcctgttggtaaaacaaggagaatagtagctgcctcattgggttggtgtgaaaattaaatcaagactgtggggacgcaccttgccaagtgcctggcatatggttcattttcaattacactagctgactctgaataaattttatttcctgcctactttaatgccactcagagttcctgcttttcttcacagtctctcttgagtaatgcacccaggattagtgggcctcctcctccctggcctgatcctggacccagagaggccaggtggggcaggtgcaggccacatccctctgtttctctcaaaccatcaggctaggagacttggaacccttctctctcccctgggagtctggacatgggaaagaaaagccctttcatgccaaggccccagatagcattatccctgtcccttttctaaatcgagctccaggagctcccagttgggactgctgactcccagaccctcccaaatggatgcaacaggatccctggtacctcattgagagagacctcctgccgagatatattgctcctccctgtgcacagcaacctgaacctgtgctttatccaaagggtgaagttatggagtcactgtgacctctaaggcacagggagcaaggacttcagaggtagctcctcccgaccccccaaggtttaactctttttctctttgaagcagagataccctgtggacttatttaccccctgtgtctcaggcttctctctctggcacacaggacatgctaatacaagtatttgctatagttttcctacagttttgaaaaatgtgcctaggataactgtttgatttaaaatctcctcctctccctttcttctgatcaacataaatagacatattccttgcctgctctatgctgggcactgagcaggttgttagggaccgagaactgaatgagatccaaaaaatcccgccttccaggtgggcaccatctgttggggccaccaacgggcacagtggcaatcgtgagaacatgtgactagtgctgccacattgatggtggaggagagagagggttcaataggccaaagccacgtgggagtgagccaagaagtgcatgtgagaagactttctggaggaggagatctacaacctgaatccttgaaataaagagttgcagttggccagggtgaggcttctggggccaaggagttagaacccagggtcaggaaagtatgctggggtggggtgctggccagtggtggccagaaggaggagtggcccaggacacagccatgcattgtgtgaatcagcaggtccctggaggactggtcagttcagacgagaaggatgatatttcctcgctagaaatccctgggatggggaggcagaaatgaggggttgctcaatgttgacctctcctccctagagtccctgggccctgtccctgctttacagcccctgcagcctctgctcctccctgcactcctctttgacttacttgggatcttggggatggggtttgggtgcacctcaggaaattctgattcagtagaattgacaaagacacatgggcctttttctttaaaaagcaccccagaggctggcacagtggttcatgcctgtaatcctagcactttgggaggctgaggcaggagtgcttgaacccaggagatggagataagtctgggcaacatagtgagaccagtttcttttcctttttttttttttgagatggagtcttgttcttgttgcccaggctggagtgcaatggcgtgatcttggctcactgcaacctccgcctctgggattcaagcgattctcctgcctcagcctcccaagtagttgggattacaggcacctgccaccacgcccagctaatttttttgtatttttagtagaggcggggttttaccatgttggccaggctggtcttgaacccctgacctcaggtaatccacccgcctcggcctcccaaagtgctgggattacaggtgtgagccactgtgcccggagacacccagtttctacaaaaatttgttttaatgtaagcagctggtcctggtatgagcctgtaggcctagctactctggaggctgaggtgggaggatcgcttttgagcccaggaggttgaggctacgatgagctatgaccgcaccactgcactacatacagcctaggtgacagagtgagaccctgtctctgaaaaaagaaagaaagaaaaaggctccccggagattctgatgcacccctctagttgagaatcagtgtgccaggtaggcctgtatacgtttagaattttcctgccaaggcattgatggagcttccctgagtggtctttttgcagtttatttttacacagtggcgttattattgtttgttttttactctccctttattcttccaaacggtgtctttatcatctttttttttggctttactattttttttaagtagtaaatattagtagatagtgaaactgaggcacaaacaagtaaaaagttgtccaagatcacagagaaaccaacatctaccttccagaatctatgatctcttcagcctgctccaaatgtctcacctggcagagggcctaagtgtccggaaccccagatgtttgaagaaatgggacaggagtctgttcctcagacatttaccgcctattaattaggaggtagtgtcttcttgactccctccagcgggtcccaggcctgcctgcccgaacatctgttctcctaacaatgtctgcccataaatcctgtccccgagtccagggtggcttagctggggaacaatggagcctatgaccggcagccaaatcctcaccatggttacacgagggtgtgactgcaactgtgtgtgcttgttggcaggcaccagcacctgcaactggggccaaggttgtgtgtgtgtagcggtctccagggccaggggtgggggcgttgggctgcggttgggagggatcctcacagagcaccttctgtaggcttctgccattcatgctgttgtaattcttggcctctgtgaagaaaagaggtttttatcttgcgcatcctgacatacagtaggtgctcagtaagtgttttttgactgccagtgaatgagcgagtgaataattagaagtctgtttgtgaatgtcactggggtgcctgagaatgaaacagattcagttcacctgggacatgaggaatgcctcctggttaatgaggaatcacttaagaaatgtctgtcccagtctgcccttaagagctgatagggacgggcacggtggctcatgcctgtaatcccagcagtttgggaggcagaagagggcggatcacttgagatcaggagatcacttgagtcaggcctggccaacatggtgaaatcccatctctactgaaaatacaaaaattagccaggtgtggtggcgcacgcctgtaatcccagctactcgggaggttgaggcagaagaattgcttgaacctgggaggcggagattgcagtgagctgagattgcaccactgcactccagcctgggtgacagagcaagaccccatctcaaaaaaagaaaagaaaaaagaaaaaagagagctggtaggatgaaggagagccagccacacaagacagcaggtgatgaagtgctacactgcccctgattatggccgctaagtgatctccccatctaccaaaccacccttaagaggaacaggtgctctggaagggaagagagagatcaatattggctgaagttctcagagattgcctcatgggacaggggaacttgagcgaggtcttgaaggatggacagggcttagttagggagacaggtgtggtccctggaccagtggtgccagcatcgcctaacaacttgttagatagcagattcttggacctcaccccagacccagggaatcaggaactctgggggtggaggccagcaatgtgtgtttaaccagccctccaggtgacagtgatgcttgctgagcatgaggaccgctgatgcagagggagggatgtgatctttacataagagactgaggagttcggaggggacctggcctgctcttccgttggtggcatagggagaaaatgggagggagacggcaagaggagcttgaaggcatcagggaagcgggcttgggaggctgagggtctcagctggattggtggtggccatggtaacagagcaaagccagggggtactgtgaaggcctggtgacacactgggtctcatgccagactttaagggcactcttctttgaaatgttttaaagaagacttgtcacctcatgatcacattatgatatgctaattgtggaaaaatataagaaaggaagaaaaagggggtgttcacagagttgtaccatccaggacagttattgatatatttggcatatttcttttcttttttcttttcttctcttttttcctttcctttctttccctttcccttttctttttctttcctttcttttctttttttaagagacaggatctcaccatgttgcccagggtggtctcagacacctgggctcaagcgatcctcctgccccggcctcccaaagtgctgggattacaggtgtgaaccactgtgccccgccctaggcatatatatttttgatccttttttctatgcatttttttttctgtggttgaaaacataacatatatatgttaatttgtattctgtgctcatttgcatcttgtattctttgcttaaactatcgtaagcatttccctatgtgctttcaggtgtactttttctttttattgtcacaggggccccatgggctgagcaggggaggtcactgaggtttagcaagaaaaaaaaacttactccatgaactccagtctgtggagaaggctgccattgaatggcctgtgttcttcaacacagaaattgtaaggaaaagaaagggatggagggagccagccatggtggcgtgtgcctgtgatcccagctactcaagaggctgaggcaggaggattgcttgagcccaggagtttgaggctgcagtgagctatggtcctgcaactgcactccagcctgggcaacagaagagagagaccccatctctaaaacaaaacaaaacaaaacaaaaccagaaccaaacacccagtcattgtgttgctagaacctctttcggttatttcctcagcctgaccgttgggttctctttgatatgcacttacctgctgtctacccgcacacacatgcataccccgcctcagctgccctttttctctgactcctccccattgctctggagaagcccaaggaggcagttttgcatttgcacactcaggacagggaacaggggaggagcctggggatgttaagacatccttcctcctggtgagacaaactgggaaagcctttctgagcctggtcctctgaggcctgggccctgccagtgtggacatcagaatttaggctcccagctggaccccagcttctctctgcctgggtgtgaagtttcacaggaaacagccaacgctttgatcttggatgaggctgaggactcagtgatgagaggacacagagctcaccccagctctgtttgcccaggagatgtggaagggctcctctgctggggattgaccatccatagtccttggtctccctcagaaagtcataataaagctcttccagttatagtgaatcagggcttatgttctaaaatacgtcctgttcaatatgatggccattaaccataatggctgatgaacacttgaaatgtgatggtatgaccaaagaactgcattttaaattttatttaattttaggctaggtgcggtggctcatgcctgtaatcccagcactttgggaggctgaggcgggcagattgaggtcaggagttcgagaccagcctggccaacgtggtgaaaccccgtctcgccatgacagaacgagatttcgtctcaaaaaaaattaacaaataaatacattttatttaattttaattaaaattaaaatttttattgtcatacatgaccagtggctaccttattggacagtaggttctagaagaagtaggtctctgagacagccatagtggctacattatgatcttccttttttttttgagacagtctcgttctgtcacccaggctggagtgcagtagcgcgatcttggctcactgcaacctctgcctcctgggttcaagcgattctcctgcctcagcctctcgagtagctgggaatagaggtgcatgccaccacacccagttgattttttctatttttagtagagacggggtttcactgtgttagccaggatggtctcgatctcctgaccttgtgatccacctgcctcagtctcccaaagtcctgggattacaggcgtaagccactgcacctggtcacattatgatctttcaaagctacctgtcttctttctaatgcgtgcacacacacaaatgcacacacacagccacaaataatacctggcatgtttcaggaagcccctggatacaacatccttttattaaaaaatctactctttaaatatcgttatctcaagtgaggcagagctgccgctgaccacaaatgtgccccacacaaggcttctcttagcccttgcatgattggagatatgtggctaaacctcaggaaaccgtgcccctgggaagcctgtcttggcatcacagttctcagcatgtggggccctacttgggtgtgcccaagctcctctgtgcttctctccttcaagaagaacctgatgaccaggcgcggtggctcacacctgtaatcccagtactttgggaggcctaggcaggcagattacctgaggtcaggagtttgagaccagcctggccaacatgacaaaacctcgtctctaccaaaaatacaaaaatttgtcaggtgtggtggcgagcacctgtagtcccagctgctcaggaggctgagacagaagaatcacttgaacctgggaggtggagattgcagtgagccgagatcatgccactgcactccagcctgggaaacagagcgagatttcgtctcaaaaagaacctgatgcctggtggctggcccgtgggcatgcgtgtgtgaacgaggtccagtcacaacggtgttcagctcaccctggcagtttttatcttattccctattctggatcttatggcttggcctcaagtcacaggaatttgggccttctgcaagaattggggggtggggtgcactggcagctttttctttctcattttagataggtacagtattttttttttttttttttgagtctcactcttttgcccaggctggagtgcagtggcgtgatctcggctcactgcaagcttcacctcccgggttcaagcaattttcctgcctcagcctcctgaatagctgggattacaagcgcttgtctccacacccagctaatttttgtatttttagtagagacagggtttcaccatgttggccaagctggtatcgaactcctgacctcaagtgatccgcctgccttggcctcccaaagttctgggattgcaggcatgagccactgcgcctggcccagtatgtacttttgaacaagatttgtgggggtactgaagatgtacagaggtatttactagatgtaaatagggtcctcttatcccttacccccactttcccactaccctgaacctgggagcatgctcccgtctgtggagtgaatgatccagcctgactgagggccctctaggacagactgctgatcctcttctcccagcctctcctgcccacttcctccagtatctctcttccccagtcccctcctgtccaaggttccctgatgcatgcttcgttttccagcacactagccttttaaaatactgtttcctagcgtatcataacgcaaggatttcaaatgtccacaaagtatccctgcagtgctgtctcccccagccttgtggcatgcgtgactctgcaggccatctgaacagccctcgtcaacaggggtgtcattgtctcccagcccactccatgcagatggggacagagcccctctgtgcaggccaggatttcctgtgtgctggctgccctctctctaaatagcccgagtagtgcccccttctgcctggtgatggtgattcatggtgtcttctttttttttttttttttgtgaggcagagtttcactcttgttgcccaggctggagtgcaatggcatgatctcggctcatcacaacctccacctcctgggttcaagcgattctcctgcctcagcctcaaagtagctgggattacaggcgcccgccatcacgcccgactaatttttatatttttagtagagacgaggtttcactatgttggccaggctggtctcggaactccctatctcaggtgatccacccgccttggcctcccaaggttctgggattacaggcatgagccaccgcacctggcctgactcatggtgtcttctacaatctggtgccttatttgtctctctctttcttgtgtaaaacatactaaatataaaacttaccattttaaccatttttaagcgtataattcagtggcatttagtagatccacattattgtgccaccatcaccactatccatttccagaacttgtttatcatcccaaacagaaactctatgcccattaagtaataagtccccaattctccctcttccctgagtccttggaaacctctattctactttctgtctctatgagtttacctgttctaggttcctcatataagtggaattatacaatatttgtacttctatgtctggcttctgtcacttagtataatgttttcaaggttcatccacattgtagcatgtgtcagcatttcattcctttttgtggctgagtaatattccattgttctaaatatgtagagtacattttgtttatccatttatctattgatggacacttggattgtttccagctgtggactattgtgaataacaccactatgaacactgatgtacaattacctatttgagtcctgtttccaatttgttgggttatatacccatgaatggaatcactggagcatatggtaattctgtgtttaactttgaggaaccaccaaactgtggtttttcactgtgtttcactatctttttcatagtggctgtaccattttacattgccaccaacaatgaactttattttgtttaatatcttattttaaactgcagaaacaaggcatatttcttgtaagaacaccaaaggttgcagaggtacatgaagcaaagagcaggagttgcccccacacaacccttccttttaggtaactgctgccttggatttggtgcatatccacccagacgtcttcctgtgtgtacccaagtgtacacatggacatccagacatttgaacaaaaatggtacggtgtacacatggcctggccacttggtttttttcatgcgattctatttggcactggaaggtgttggctgcatgtggatgtgccctgtgttttttgttgcatatggggtattgagagacaagtgggtggttccccattttagctctgcatttacggctttgcacgcgtgggcctgtgtttcaccagatcatagcctgtttggggaatgtgagctgagcacgcactggggaggccctccagcccagagccatcttccccgccagcctcagtctttcccaagttgcttgccacccccagtgcagctaaactgagctgagctgtgagcttccttgtgaaggagggccacccacctggcctcagcacgcaggcagcgcgcagccaggcatcccctcccctctggaataccagagtgacttagagctgggtggagagttgagcagcaggctggagtgtgtgtgtgtgtgtgtgtgtgtgtgtgtgtgtgtgtgtcagagagagagagagaagctgtagccattagcctgctggtctctagtggtaccgggtggcagtgttcttcatggtgacttgcaggaccctcgaggcatgcagccccctcattcgctcaggaaggcccagttaggcctggcaaaaggccacctgtaaagccagggaccagccggtctttctccagcacctttttctgcagagccccgggcagctggtgggagagtacaaaaaggcctggaaaatccgtaaactgtataatcagcccctgcatcttggccgcttgactctgtttattgcttcctgtccccgaaagccctttacaaaaagagctgctttggtagggggatgagttggacccggtgggtggcctgcccctgtggtcccagcacggatggagcaggtagcttccctgaacaagccacctctgctgcagccacccctgcagagccgaggaagggtgggaatgaggcccccccactcccctacggtagggcgatccccccacgcctagcccctagggccatttactttgtaattgccaaaggacaggggtcccatttctcccaatttccttgaaggcctcaaggttaagctctcctgaagtgcaggaggggagcagagtgaaatcttagcctcttgatgacccctgtgaaatgggacggggagcaggggccattcccggggaactaaggacaggcctgggccccagggcttataaggcttgctcaaagcctgtttttttgttgtttgcattacatttttagaaacagatttttcctcgttgattgacttttttcctctggtgaccatattcccttccctccctcccacctccccaaccttcatccctcttctccagaattcagcctttcccaccactcctggtggctgatgtgtgactttttcagggaacagctgcagctcgaaaagttgcccgagacacagtgtttcagggttgctgggtgcccgtgaggatggttatgggtgtttttctcacctaggagacgcggtggggtaggggggccaggacagctgcatggttggaggagagatgccatcttttggcaagggggtgcaggaaggcagtcttcctagagctggggctgccccctgccagctggggtgagggggtgtctttcatctctcccagacgcagggctcccactggggtctggctgcccagagtcccatccttccctctgtggccggccttgtgcctcctttgcttggtctccctgacttggaacacttttgaccacaaaaaccctgattttatccctgttggaaaccctctctgattttttttttttttgaaacacggtctctctctctgtcacccaggctggagtgcagtggagccatcatagctcactgcagccttgaacgcttgggctcaagtaatcctcccatctcaccctcctgaatagccgggactacaggtgtgcaccaccatgcctagctaatttttccttttgtgtagagaaagggtctctatgttgctcaagctggtctcaagctcctggcctcaagtggtcctctcatctcagccacccaaagcactgggattatataggttttcatatactgtgcccagcctctgatttaaaaaacagtggagatgagttggcctgtattttatctgtggacctgctgtatggggctgtgggttggcctgcacttttctgcaggtggcctgtctaagctgacttccacctgggacctgtgtgtgtttgagcctgtgctttggttgtgcaattctgagcctgccccaccctcctagctccttcctgaaagtgaaatgctacagtctttgctcaagaacaaaggactcaagctcagccctgcatgttaataattttcaagtgtggccacttcctcttgcctggcctgactcaccctggctgctgcccattgtggctgccatggaaatacaactcgaggagaacccagaccaggacagggaggccatgttctgggtggcagtggagcctggcaaggtgccctcctggcctgggactgctgtggcagaggaagcatgaggtggggcctggcctgcccagctcagagctgaggtgcccccttggttttttacctccctgttccctggctggcccactgcacccacgcactcaacgcagtggcttcgctcctcctccaggatggctggaggtgggaccattgccaggatggcctcaagtgcccagccctcctggaagactcagtttccctctttgtcccatgcagaggtgcagagattcattattgtaagtggggtgacaacatggtgaggggttggagtgtgggctctggggtagaatcctgacctggttactcctggctgcgagacttggggcaaggtatttaactcctctgtacttcaatcccctcctctgcaaaataacagtccctacttcataggattgttgtgaggatggcatggcacctgggccagctctctgctatagggtttgtgcccaacctggagcctggctgaatgcaaagcgttcggggactttcccgcaacgtcttaagctgttgagtgctgtgcacacgtaaagcacaatcattgtggacagtcagtgtggtcagagtgagaggataatctatcttgggattctcaaatgactagtatcagcagatcctggctacaattcacagatgtttcccctgtggaagctgggttttcatccttgcctttcctgttcatccttcctctttagttattttgcacatgcacacaggttcaccatacacaaaggtagcatgaatctcaattcaacccgtgtccgggctgtgggtctgctaatccccacaactctgctgttagggatacacagaccttgcaggacgagtcagtcatatgtttgccaccagcaagcagtgttcaagcactacctgaatgtatcatcgtttctctttttgagatggaggtctcgctctgttgcccaggctggagtgagtggtgtgatctcaggtcactgcaacctccgcctcccaggttcaagcactgaatgcatcatggttttttttgttttttgttttttgtttttttttttctgaggtggagtctcgctcttgtcttccaggctggagtgcaatggcgtgatcttggctccctgcaacctctgcctccctgcaacctctgcctcctgggctcaagcaattctcctgcctcagcctcctgagtagctgggattacaggcacctgccaccacgcctggctaatttttgtatttttagtagagatggggtttcaccatgttgtccaggccgatcttgaactcctgacctcaggtgattagcctgcctcggcctcccaaagtgctgggattacaggtgtgagccaccatgcccggccagtgcatcatattttaatgatgattatcgaagaagccaagggactgagaaatgtctagctgcttctggaagattcttgcaactgctggctgcttctcatgctgttttctcatatcccttaagtctaattaaacttgcaacccatttgtaggctggggccgttccggctacatcctctatacagcccaatccctcatgcccattctgtgttgggagaaggggagcacaccattcacacctcccaggtggctgcttccctgtgacagacagagtaggtgcaagtttgggcttgtgaggtgatttggcagtgcctttgtttgatgactgttgactaagcccaggtgtgcagactcagtgtttacagagtcctggttggctcacggctggggctggaatgaagaaaataaatattcaggggaggggtaggtggcatggatgatccaaaagccatctgtttagggcctagagccagaggtaaggtattttttcaggtttccttaaatcaactagacaggaactttatgtcatgagtgtctacagtgtgcgctggctgctacagggaccaagcagtctgtgaaagtcagtttgtatacctgtggaccagctgggaacctagagtggacacagagaatgttggaggtgaaaagagtcttggagattatttagtcctaccctcccattttccggatggaaacctggaggcccagtaggtaaaatgatgtgtccgaggtcacttggctagttagtgatgggaccaaaaccagcatccaggtctctgaactgcatcaccttgcaagagagtggtcctcacaatttactgtgtatcagaatgacccagggagcttgttagaaagcacatccccagagcatgttctcagagattctgatttaatagtgggttagagaatatgggttcttagcaaacacctcaggggagtctgaggaaggtggtcgccaccgtcctctgagatacacctgctatagtgcaaagaacatttgacttcttagactgatggaaaagctcattgcatttcctgaagcctcatcagtagcagtgagcagaacaggcagagatgcaaacagctttaaagatgagagcatgagggattaaacccaggctttaaaatgcattgcaagtaagtggtatgtcaggagacttgacatgtacatgcaatttcaatgtggcgcagtcctggacaacctctaggtcacacacgactcagtgtatctatctataaaatggtgatgatgatggtggaaggtaataacctgcactactacattgtcacgaggattaaatgatgtgatgcacgagaagtactttgcctagcacttggtaaatggcagcttctctgatgatgcataattgctgggggtggatgagggcaggtttctgtttaatgcctttacataatggacttctgctgagggtttcatttgaagaaaggggttctggttctgtagctaaagaaagtgtacagacccttccatccctgggggactaggatgcagcaggctgtttctgcagagggctcatcctggtttgtgcctagaacagtggtgcctttctctggtcctgaccggctcccccagcccccacctatatccctggaagatttcaatgatcagaccaaacagggactgtttctctccattttctagaagtagagattgaggccctcgggaggcgaaaggaagctggttatgggacccctaaaagctcttgcccccttcccctgattgttagatttggggctgaggctaccagccccagctggcctgaggtccttccctgcactgccttctaggagctgggcctgcagggaaccaggaagctggtgtcttggccagggtgtgccacttcctggttctggccagttttgctgcaagtcaggtcagcctgaccttaccaatgctgtaaaacccattctgggtgcagatgggggaagagagggatcccagggcctcatctggccctgctatcagcctaatgaagggggtggcttggagggtgggctgtgggagggctgagggtgctgtcagtgcgcactagcgagtgtgtatagaagagtgactgtaattttaaaaacatagcttcagagttgggcgaagaggggagtagtacattgagtgcctgggctgtgtgggacggttcaaaaaaaatcctaaagtgttgtctgtgtcctatggctgcgagggcctgggaggagcatgtggcactgtgcaagtgaatggggttgagtgagctggtgtgtgtggcagtgagtgggagcctgttagcacatgcaggcatgtgagctgtgtgctggcatgtgctgctgtatgtgcccatacaaggagagagcactggccaggagtctcacgatctgggttcgaatcccagtgctgcagccactgggctctctgacctctggcaacatgcaccatgtggaagtgaaaacatgaggtttctcctgcctccctaaccgtggcagctccagagtatacgtgtgggcacgtgggtatgtggatgggcaggagaggggacctgggcagctgggctctgggcgcccctgactgtgcaaggggatcgctgctgctacacaggcggagcaggggctgaggccgggtggagggagcagtctgtggttgcgggggtgcagctggcccagcagtgagtggctctaaattatcccatctgctgtctgggctgggcccttctcactctgggtggaatttctgatggtgtcccggctgcctgaggcgggcggcctcccagccgcagctgctgcctgctcttttgaagctcagccctgggccagccacccctccctcccagcctctgttcctctgtcctgggcctacattcctcagctgccagagaaggcatttctgagagggccactctgcctgtgctcctgctgcccagagcccatggagcccctcccttgggggacaggccccttcaagccacctccttcccctggttaggagtgggcaccctgcattattccaatcacttctcctacccttggaagcttagctggagggcagggtatgggcaggaatgggcacagggctgctggcccagctccctgctcctcccttggggtccctgagccctctcagcctgaggtcctggaggtccctgagtggggaggcctttgtgctccacattcactcccttcagggctggattcccaggccagacgcctgggccagactctagaatcagccccttggaactatgtggccttggggtgtgaatggcccgtgctcatagagtcttactaacagctgcctctgactgacagcttcccttgtggggtgctgtgcatgcccaccacagtcaatcccctgcaggagcgccatctgagaaggtatatgtatccccatattacagattgctcagagcaatcctgcttgccccataagctgcaggatcaggaggtaagcagaggactgcccaactcctgaccactcaggctaaagccccactcctgaccactcgctccatggcttcctaccccagacatagcaccagtaaacaacttgtggtctcccctccaccggcagcttcctggccagacccccagccctgttgtgccccaacaggccctccacactgtggttctacctctgaaacagctatgctatgagccagcactttgtccactcggccctcattccttccctgcatccccagcaggaggcaggtgagtccctgaccaaggttggagggtgcaccatggggtgcagtgactgaagaaagcctgcctaaatgatcagagcaggaaggattgggttgggattcttaggattgaaaaggttttaaagccctggaggctctggggtttgctttcttaagattttttctaccacaattcagtttttatttttttagacctagtctcgcactgtcgcccaggctggagtgcagtggtgcaatctcggctcattgcaacctctgcatcctggtttcaagcgattctcctgctccagcctcctgagtcgctgagattacaggcacctgccaccacgcccagctaagttttgtatttttagtagagacggggtttcaccatgttggccaggctggtctcaaactcctgacctcgtgattcacccgcctcagcctcccaaagtgctgggattacaggcgtgagctaccgcgcctggccataattcaggttttgtaaaattttgttttaattagagagtaaagacattctagaaaaactttttttttttttttttttcattgagaccaggctggagtgcagtggcacggtcttggctcactgcaagctccgcctcctgggttcacaccattctcctgcctcagcctcacgagtagctgggactacaggtgcctgccaccacacccggctaattttttgtatttttagtagagacggggtttcaccgtgttagccagaatggtctgaatctccctaccttgtgatccacctgcctcggcctccgaaagtgctgggattacaggcgtgagccactgcgcccggctagaaaaacttttaattagagacactataggttggaagttaagaagatcatggactccggggccagactgtttggattccaaatcgggctctgccactgactatgtgaccctgtgtaagttatttaatctctctgagccttagttttcttttctgtgaaatggatgtattcattgctgtactgtggggatttgatgagataatgcatgccaagtatatagaaaatgcatgtacctaccaagtgctcatagacgtttgctataattattattaaatagtaacttatgtctgctgtagatgatataatatgcaaaagacatggccaggcgcggtggctcatgcctgtaatcccagcactttgggaggcctaggcaggcagattatcagaggtcaggagttcgagaccagcctggccaacatggtgaaaccccatctttactaaaaatacaaaaaattagtttggcatggtggcacgcacctgtagtctcagctactctggaggctgaggcaggagaatcacttgaacccgggaggcagaggttgcataagctgagatcacatcactgcactccagcctggatgacagagagagactccatctcaaaaaaaaaaaaaaaaaaaaagaaagaagaaaaagatataaaaatcactggcaatgctattactttaatgttcttagtaatccaataataatggattatttgcatattttatttttaaattaataaatgagtatcaatcaaaattttagaggtatacaagaatctgtagtggaaaaatttccttgatctatctcttatgacccagttctccccaggggaaacatatattatcagtttcttgtgaatcctttcggatttcatacacacacacacacacacacacacacacacacaccccataatgcactatagtagagtgactatactcattgttttgtaccttgcattgttcccttaggtcttgggctaaagagacatattgaaatccctcatttttgtttgttattgaatagcattatatatagagaggaggatgctgataatgtatcatattttcatcagcctgctacgggtagacttgtagagtgtttccagtcttctgctgttagactattacaaggaatatccttatgcccatactcaacacagttgcaaacatatcatctgtaggtaaatttcatagaagtggaattcctgaatcagtaggtaggtgcaaagtgtgccttagtgtggagggcaagggcaggggttgggagttctgtttgcaggaccctcctctgcccatcctgagcactcctttctaatcatgggttccttgacccggattacctgggcatgttcggatgctaaattgtggggcatggattgctgcctgtccggggacccagaggtgtctcctgctgctgtccagacctcagaactcagcctactgggggggccttcagcctgactgcctataggagaagcccagggaggagcagctgaccccttttcccaagaagctgggcctggtccagtatgagctcatgcctggagccaacccagcttccttggccctgcacctgagttaccagtggcccccttcctccagcgtgggccctttgacttggtagcatgaacgcgcgtgttcctgccagcccagtggggtcccctagagctgtggcacctgggaggggaggggcagggggacagtagcccccttaatccgctgaggtttgatctcctcccaggcacctgagtcgaatatcttggctgagctggtggcttttgtttatggagtgagggactgttgtggaaatagtccccagccagcccaggttgtggtggaaaacagttggttgctcaggcaacttgacaacttcagtaggatgggaaaaaggttttgtgaggaaactgccactgttttgtcttctcctttgcttcctggacataagcaccatcccttatacctccagtggcacccaggcacccccagcctctccaggggcaaccctgtcctttagtattcaatttaactcacagttattgagttcttgctgtgtgcccagctctgtgctaggctctagggaatatggaatggtgatcaagcccaatggatacagagtgttaaatctggaatcggaccttctgggttcaaatttcagcttggccacttagctgtgtgaccttgaacaagttactcaacccttctacgcctcatttttctactatgaagtggaaatagcagtagtaatatgcaccttgtagagctgtagggaggatgaagagagttaacatgcaataaggcactttgagtagtggctagcatataaggaagcaggcaataagtgttatctattctcattatgactattatgaccattatcttgctaagatgaaccaaacaaatgacatgtttctctgctgagaagcctcatcttggatctttttcactagaaggcagaattggcttcttgatggtgccttttgtggcagccacacctgatatttgggcctcaggagcagagatgaatgatgatgtccttaggactgaggctctgggaccaatttgtccacaagggacctcattcaccttctctgaaacctcttgccctcgtccctgccccacatctcccattggctacagacttggccacaagtgttgaggcaggagagagaaaaattagaaaagaaaaggtcttttttgaatcgtattttttcttttgatttttttttgagacagagtctcactcttgctcaggctggagtacagtggtgtgatcttggctcactgcaacctctgcctcctggttcaagtgattcaagtgcctcagcctcccaagtagctgggattacaggcatgcgccaccacactgggctaatttttgtattttcagtagagacagggttttaccatgttggccaggctggtctcaaactcctgacctcagatgatctgcccgcctcggcctcccaaagtgctgggattacaggcatgagccaccaagcctggcctttcttctgatttttaaagattaaaaacaatttttaaaggaatgccccacccttacagatctaagtgataggggtgggggtggccaaggcatcatgccatgcccagcctgcacagctcatggagtagcctttggaaggcaggggctgcccccagcctcacccctgccggcagctctgctgtgtgggcatggaaaccaggtgtcctgcttctctgggtggcagtggggcttcttcctggcaaagaggtttaggagtccttttatcaaatcctcatggtttggttttgttttgtttttgagacggagtcttgctctgtcacccaggctggagtgcagtggtacgatcttggctcactgcaacctccacctcccaggttcaagcaattctctgcctcagcctcccgagtagctggaattacaggcacccaccaccatgcctggctaatttttgtatttttagtagagacggtgtttcaccattttggccaggctggtcttgaactcctgatctcgtgatccacctgccttggcctcccaaagtgctgggattacaggcgtgagccactgtgccctgccaaattctcgtgttttacagatgtagaagagatgagtggtccagagaagtacccaaggtcacacagcagcgcatgacagcattgtctgtctctcccctgctcctcctcctcctcccctaaggtccagtggcctcttttctccaatggctgtgcccgagggtcctctttgcccttcctggctgcctgggggtgggcacaggtgtggctgcccagcagctctgggggcctcgggaatgaggctggctttgttgcagccccggcagctgtggccatttgggtcgagtttccattaagccttttccgagccttgggcaggagcaggaggctcagcgtttaaaggtcacccggcttttgaagctgcagcgacattaatagcttgggaagaaaacaagcctttgcaggggcaggaggacaaggcgtctctgtcagggctgcctgaaacacacacacacacacacacacacacataccctgagagcctctgtctcttgctctcctcttcccttcctttcacccccttttggggcctcttcagctctgaagccaagaagctcaggcagatttccctgcaccccacccgctctgaggtgacaattggccgagaatgcagctgccccagcccagcagcctctgccattacacacttgaggtttccgcaggactcaaccatggttacacaagcctcccagggtcatatgacctcattctggccccactggcttttgcagcctggattcccaatgagacagagtgagcctggcctgcgtgtcctcatacgggaaatgagagcgctggcaagtggcttgtcttgcatgccagttctaatcacttggtcgtggcttgcacagaggcggtgttgcaaagggttctgaggttgtgtgtgttctgtaggacagtaatacctgggtggattagtgatgtctgccaaggatgagggctagaaggtggtggcacatgtgccaaagatttcctgcctaggattaaatgatttgacaactctgcgggtcttgggtgctaagacccctgaggcaactgggtggttcttctcccttttaatcaggccaagggtgggggtggggcacattcttgggttctgagagaaaagccactctggccctttccctgggagctgccagggcctgagctctgggacaccacctagtggcctggcttggcagcgccactgggctgtgccagatcttaggcaagaagcaaatccctctgcaggcaggcatcacggcagtcacagatggacgtagggtctgctccttggtgattttcagaggagggagcctggggtgcacagagacagagctggtctgaggagtcttaccctccttccagaagagtggcctctgggtgggacacaggaaggtgctggcaattgggacctgtggcttcctgttctaactcccacctttcagggttgggccctggtcctcctggggggcagaatggaaggtcaagtcagatctaggagggggttagcctcctgccccctggtgctggcactggcttggaaaggggcagcctgccatcagccttgtgtccacgtcactgggctgccttggcctcagaccccttgtctgtgaagtgagataataacgcattcccttatatatcttctaggtttgttgtgaggagtaaatgagtgtgtaggggagagagggctttggaaactgaaaaggccccctcccatcattgctgtgagccggaggaggaaggaaagggagggaaatccacagttacagcactcctccatctttccttcccttctttactcattcgcctaataaatgtctattgaccatgccaggcactgattcgggcactggggataccacagtgagtatagcaaagcccctgccttcatggagcttacattctagtggagaagatatcagtgacaaatgtataatattcaaggtggtctgtttcatgaagaagacagggaagcctaaagggttaggaacactgggatgttggggggtggacttgccactctgttccccctcaaggtgatggttgagtagggaccagaaggaagggagccatgcagatatgtgggagcagaacgtagcagttggtggaaaaagtaagttcagaggcccctgggtgggagtgtgcttggctcgttggtggactagcaaggatccaggtggccacagagagttaggctctgtctgtatgtgtgcgtgcacatatgacagcgaggtgacatgggcaggaccatgtgggttggccacggtaaagctctgggtattctggggacatgggagccattgggaggcatggagcagaggaagggcatgacccctgtgatgaggggtctctaggccaacacgtgggaggcagggagctagggagggtatggtagctgtggaggtggtaaggagtggccagattcagaaatcatttggaagacggggaagacaggcttcgccatagattggacatagagtataagagaatgagagcactccaagatgactccaaaggttttggctggagccagggagagttgccattaacaaagatggagaaggcaggggagaagcaggttggggtcggagggaatcacaggtcggatggatccatgttgttggagctgctgttggatgtccaagtggaggcagcaagaaggctgtatgagtgtggagttgaggggagtgcccatgagaggttggagcacatgagagccagtgttcagtatgcagatggtattccaagccatggggctggatgagattgctcagggagtgagtctagcccgggaaaaggtcccaggcctgtgccccaagccacagcagcctgtgtcactggtgcttattatacgccagctacccatgtacgttctattaatactcctcccctatgtctacaaatgagggagctgaggtgcaaagaaatgaaacaatttccccaagtcacacagccttactaaggtcacaaagtgcacccaggactctggctccccagctctcatagcccccatgcagaccctcgctggccctgatgtaccaggcaggaggctggctgggatgaccttgggcaaggccagatgaactgcactggggcagcttgcccacctccgtgggccaagccgggagtgactcaggccttggctgcgtgcttatgctaggagaggaggttggctgtttgccgcccctgccgggcctggattccttcacaggggaggtggagggccactgtgatcctggcttcctgggacctggaggaggacaggtgtggggtttctgcttcccagtctccaggtcatccacaaccatgagttcaggggagcctttgagtcagcctccgagaggtctgatgagcccagtgggttgtttgcttcctttttcagaagccagtcaggggttatgtccctctgtttccctgccagtgctcagcagctggggttctgagaggtggtatggtttctccaaggtcacagagccagctctggagcagagccaagagaccttgctaccatgctgtctgggtcatgtttcctgtgctgaaatgtcctctgggctgtgcccagtctcctgagcctggggcacacatggctgaatttcttatgctccttggctcatagccctgtgagccttacttggcattttttgcctcttaggaagtgggttcctattctggcctctccacatactggctgtgtgactttgggcaatttacccaacctctctgaaatggttcccacagctatgaaatggagacagcaacacctgtctcatggagttgtaataaagattaaatgtgaaagcatgtggcacaggctcgtaaacctgtcgcctacttgctttaatcctttcgtgtattttaaactgcttttcatttgagcagtgctagttgcaaaaggcagcctggcatggacggctctgaccctgctcccaggcacaccacagccatggcctcagactctgccctgagcttagccagggggagagagggacagtgctctgagaattgggggcctctatagtccacctggttctaactataggcagcctgggagtctctgagaccttatagagtcctgtggaaatggtacttctggtaatcaaaatgcttcccattactgcttccttgtgtttcccattactgtttctgagccactctcctcatccacagaaccaccctttgatagaaaagtctagactttgcctttactcgctgtgtgtccttgggcaactccctcctagacttgggtctcaggctcttcacctgtaatgtgaggcagggtgtggggctgggctggagttgtcagtcctttacattttgtggtccccacaaggatgctttcaaagctttgcacttgggccaaatggaagcggctgcttgagctgctgtgtctccagttgcccaggccagcccagcctcccctggggccatgaggatcaatatttccttacagagggctgaaagaattccagggattgacatccaggtgctggggaagacccccctagaatctccctaccccatcccccctgtgagggcagcttggccaatttacccactgctcctggctctttaccagcctcctggggcaatgataactcaaatgcagcatagccacgttctaggcagtgtgctgaggattatcttatttcattcccattgaaaccccctaagggatacatccagatgagggcttagggccacggagaggatgggagacttgtctgaggtcccacagctggggagtgcggaggccttgtctgaactggtgcgtgttccctataagtggcaagagtgcgaggcttctggagcttctcaacactcagagaggcccagaacccgagggagctgtccagagggctgctaatggggaaaatgtcggtcttgccatcttctttcttcctcccctgggggtggcccaggtcatctttctccgagggattgcctttggcagagtgagacctgggtccctccatctctgttagtaaattactggaggggcagagagatgatggctttactccagaaggccttaacacaagtcactgacccctgtgtgtgatgacactaggacagcagacagtagcccaaggcatcagcttctggggcctcctggccctgaggtctgtgttagaggcttgagggcaggtccccagagcccaggacaaaggcagctgtcagggtggagcccaggcgaagctgcatactcttctgatgtgtgtgggttcgtggagatgtgggtgtaggggtgttggggtgtctaaagccggctatgggaagccatgtcatacttggctaccttcctatgttccttctcacagcaaaactcttggactgatcatttgaagtcacccctctgtgtcttcttgtgaaatggcttgggcgtctctgggctctgacttgctcatctgggaagagatggggtagagggagttggattataaatcatgcttcactcagtcaacagaatgctactcaggcactaaaaatgatggcgtagccctacgtattctgacatgggaagatggccacaatatcttattatgtggaaaaaactagttgcataggatttatggtttgattacattttagtaaaataaattcatttatggtggtatatgcaaagaaaaaataatgccgggcgcagtggctcacgcctgtaatcccagcactttgggaggctgaggcaggtggatcacttgaggccaggaggttgagaccagcctggccaacatggtaaaaccccatttccattaaaaatacaaaaattagcaccaagcgtggtggcacgtgcctgtagtcccagctactcaggaggctgagatgggagacttgcttgaacctggaaggtggaggttgcggtgagccaagatcacgccactgcactccggcctgggctacagccagactctgtctcaaaaaaaaaaaaaaaaaaaaaagagaaaaagaaaaagaaaagaaaaaatcgagatgtagacacactaaagtgtgaacagattttctcaggggttgatgtactcacaaaaacatcttggccaagcattgaagctcatgcctgtaatcccagcactttgggagaccaaggtgggcagatcacctgacatcaggagtttgagaacagcctgaccaacatggcaaaaccccatctgtattaaaaatacaaaaaaaaaaaaaaaaaaaaaaaaaagccaggcgtggtggcgtgtacctgtagtcccagctactcgagaggctgaggcaggagaactgcttgaacctgggaggcagaggttgcagtgaaccaagatcacagcactgtactccagcctgggcgacaaagtgagaccgaaaaaaaaaaaaaaaatttctgtatcagctgttaagattgtgactccaagtcctagaaaagtgaaaacaagtttgcacctgtttcatcaaactcaaggatattatttgatggaattgtcccttaaaataaagctgccactgtcagaagttggtgtttaggcgcattccattcccagtggtctgtgctaacagaaatgcaaccttggcagtgatttacatgcctgggtttgagtgggccgggtggttttctgtggcagattaaggtccctcattgtgcttgattttcagttccacctatacatgttgtcaggacactgtgctgaccctgggggctgagggacacacattggctggggcaggagaactgggcttggtggggataagaacagaatttatggccgggcacggtggctcacgcctgtaatcccagcactttgggaggccgaggcgggcagatcacgaggtcaggagatcgagaccatcctggctaacatggtgaaaccctgtctctactaaaaatacaaaaaaaaattagccgggtgtggtggcgggcgcctgtagtcccagctactcgggaggctgaggcaggagaatggtgtgaacccgggaagcggagtttgcagtgaaccgagatcgtgccgctgcactccagcctgggtgacagagcgagactccgtctcaaaaaaaaaaaaaaaaaaacaaccagaatttatgatgtatatggtttctcaagacaactttgagaaaaaacttctagaatttttaaaaatatgtaaggacactgagtgttccataagaacaaacgtgtctgtgatataaataaaacatgtcggcctgacattggggtaaggaaaatgaagtccaggggttgacaatggccttgcatctctcttttgggctggtgcttctcaggggaatggactgagttttagggcctgacatgagttttccaagagtgggaactgggcctcccctattagcccgaggctctgcaaggatgaaaccctgtttcctctctcaggctggaagctcccggtgacactggagggtcccgcttctcatcactgctgttcccggggttcgatggagctctgcacaagattcctgccctggtggtgggaccacgatgttggggcagtgatgtgggaagatgagaacagggactagagatcagagaggcaggacatctttaaagagcccctcctgcctcactcaggtcttcaggggtctttggcagtatgtgtaatggtagagaccagtgacttgagggccatatgtcccagattcaaatcctggctcctccactaactcagcgtctatacctcacttttcccatctgcaacatggggatactagcacataccttacagtattgtcatgagttggcccacatagagcacttaggatggcacctgggtcggaggaatcccttgctaactggtggctgtcctgtgctagtaaagaactgtggggatttcattactgaagccggggagaaagcatgaggaagaagcaagcctcccttgcccgtggtaggggtcgcggctccctgccctcatttcttagtagcccttggccgccaccctgagctcatgttttgttagcctcggccctgactccatctctttcggtttcaggtgggaccatccgtgaagccggtgccaggatgcaccgggggtgtggatgaccggccgcccagccccagcacggcccggtcccgcatgccaccgccccgcgaggaccgctctccaagggctgcctggggccccgcgcccgtactctcctaacccggagctctcggcagcccattgctgcctggctacccggggaggaggaggcgcaggagtgagctgcccgagaccgcagggcaagtaagcggctgacggcggaaagaccctggggaaggggctttgcggccggctagaaacattttccccaagcggctccgcaaaatgaccagcctgttccgccggagcagcagcggcagcggcgggggtggcaccgccggggcacgcgggggcgggggaggcacggccgccccccaggagctcaacaacagccggcctgcccgccaggtgcgccgcctggagttcaaccaggccatggacgacttcaagaccatgttccccaacatggattacgacatcatcgaatgcgtgctgcgcgccaacagcggcgctgtggacgccaccatcgaccagctgctgcagatgaacctggagggcggtggcagcagcggcggcgtctatgaggacagctccgactcggaggacagcatccccccggaggtaggggcgcagcccgggtaattccaaccaccactggaggacagcatccccccggaggtaggggcacggcccgggtaattccaaccaccactggaacctctaagaggacctgggttactccgctgtctgggttctaattagcaagcagccttacttcccctagggaaaagtaccatccgtcagtcaccttattttatgggcagaaatcatgcagtcattcaacaaacactgagcgcccactcagtggtgtgcgagacgtggcactagaccctgagtcaggaggcatcagaatcaaggtgcttgttaaaaatgcaggtgcctgggccccaccccaacatactgaactccacatcaggcgtagagtccgctagtggccaagtcagaccaaatttctgccctcctggagctcacagtccagtgtggactagaagcgcgagtcgggtactgacggccagagtggtaagtgctcgatggagacgtggaagcagcagaaaggagtgacttcccagaggaagcgatggctaagccgaaaccctaagctgagacccaaaggaagagtgaagccgggggaagggtgtgcaggcaaagggaacagcttgtgcagaggctgggaggtgaaatagtgcctcactggctagggaactggcagcaggaccatctgtcagggtcctagagtgagaggagatcaatgaggttgacaaagccctgacgctgagaaaaagagtgcggctggggccgggcgaggtggctcatgcctgtaatcccagcactttgggaggccgaggcaggtggatcatgagttcaggagttcgagaccggcctggccaatatggtgaaaccccatctctactaaaaatacaaaaattagccaggcgtggtggtgcgcacctgtagtcccagctactcgggaggctgaggcaggagaatcgcctgaacccgggaggcagaggttgcagtgagccgagatcatgccactgcactccagcctgggtgacagaacaaggctccgtctcaaaaaaaaaaaaaaaaaaaaaaagaaaagaaaaagagtgcggctgtatcctgggagcatagccacggaaagggagtgaggaatcagacttgccagttaaatccctctgactgtggcctgatggaaacagtagtgagccatagccaagcagtctctccagggaagtggctggagagaggggacctgcgtactgcatcagtacccacctgctggaggttgtgagtcctttccagtcccacccgagttcagtggacatctggccacccagtatcagcagagcctgaggtgcttggtgcagaaggatgaggcacacagagcctgttaatcagaggggtgttgtccacagggccatctgggacatgcagccatggacaagaccaggacccagcaggatttaactccactctttattgagtcccgacccgtgccaggcatcatcctaagtgctttagatgtatcatatcttctttttttgtttgtttttttgtttttttgagacagagtcttgctctgtcgcccaggctggagtgcaatggcgcgatcttggttcactgcaacctccacctcccaggttcaagcgattctcctgcctcagcctctcgagtagctgggactacatgcatgtgccatcatgaccggctaattttgtagttttagtagagatggggtttcaccatgttggccaggctggtctcgaactcctgacctcaggtgatctgcccgcctcggcctcccaaagtattgggattacaggcatgagccactgcacctggcccgatgtgtcatctcttctaatcctcacaaactttgtgctgtggcattattattacccttgttcatcagccatcctgcagggcaaagtctccttgcttttcctccttagtgggtgctgctgagacttcccctagaggtggaaaagctctgttggcaaagacatctggctcatccctgtgtcatctgcagcacccaggacaatccacgcacatagcaagcactcagggagtgtttgttgaatgagtacgtgttgctgctgtctttgtacagttttctattgtctctctccttgggagaccactcctttgatctgcttggagtaggtggtggaaggaatattggaaaatatggatcctctttgtagaaagaaggagagagagagagtgagagtatgcgtatgtatgtgtgtgtctgcagatacagttgaccattgaacaatgcaggggttaggggcagtgaatcctccccttgcagtcaaaaatccactttttaatataacttttgattttcccagaaattgactgctaatagcctatcgttgacctcaagccttaactcaagccttaacataaacagtcgactaacatatattttgtgtgttgtatgtatcatatactgtattcctacaataaagtaagctagagacaagaaaatgttaagaaaatcataagcaagacaaaatatattttctattcattaagtggaagtagatcatcgtaaagggcttcatcctcatcttctcacattgagtaggctgaggaggagggacaggaggggttggttttgctgtctcaggggtggtggaggtggaagaaaatctacctataagtggacccacgcagttcaaactcttgttattcgagagtcaactgtatatgctttaagtgtgaactggaaggaaagctctctgcaagctctgaccctttctgcagtctgatttgccctgacagtctggcaggtagggtagtattttctcctttgtccatggcccccacagtcctatagacctctgcaaggcttcaccaccccctaggtaggcccttgctgtgtgtgcacttctgtttttctaagaatcttgctctccaaattgagccccctcccggtacccctcccctcccttggcagtctccccaaccccccacctttggaactctgcctgggcccataggcaggcagctcctgagccagcggaaagtgcttcggaaaatttatgagccacagctggaatgacaataactgctgactggaaaaaaaaaccctttctgggggctgatggatggtgggctggcccgaggggtatccttgccatggagaagtatctcctgtcagataaatggcctagaccctgccccctggagcacctggcaggcatccatcacccacaatgagttaagccaggaggctgcagagcccaaaaacttcagcacctttagagccagaagaacaacctctttgtggcggtggcagtgggagggagaggccagggaggccagcagtgctgctggggttactctccttgggactcgggccctgcattctggagcttgcctggccggccgcctgtcttctctgtgtttcccaagtcctctccaggaggctctgatgaacgtctgtctggtcttgctgccctgggaggctgcacagaggagcaggagggggcctcctggtgtggctggggagggctgattgccctgagtctggggggctgactgccactagccatggtcaggggaaaccccaagcagcttcctttaggggacagtttctactgcgctctcctcccctgctcacccacctcactctgacccatatcagtgggaatagcccaggccagccactgagacccaccactgctggcctcaaggctgcagcccaaagccctatccctcagagaagaggggtctgggaaacagggtgcctgggctgggggacagcagcagcaagttctcagaatgcaccaggtacctgctgggtcactgtcctgtgccaggcaccagagagtcgccagggaacaggagcagcgcttacagtgttctctctcttttttcctttcttgtggaaatttagggtaagcagagcagtggcctgccaagcactacattcttcctttcctgcaaaagcatctgtttaaatacttttggcctcaaaggaaagaacgttagtgcattccagggcgggaggcctccttgggtttagctagctatgtaagcgcagagcactgcagagtgcacgtgtgcatgtgtgtgcatgtgcgcgtgtgtgtgtatgtgtgctcacatgcacaggctcacttccctacccaccaggtgcccctgggaggctgtgtgtgctgggcatggctggtctcaagagcagagatgtaccagtgaggcctggcccagcccaggcttatacaggcagcattattatggtgacttctgcaaactcacctgaggtctgggggctctggggcacctgagattcacagcctctgagctcctcccatattctttgatcttggaggagatgggaacagagttgtggggagtgagcgggaggcgaaggtgtaggccaggttgggctgtgtggtgagggatctcccagtcaggggccgcccctatggtggatcacttgaggtcaggagttcaagaccagcctggccaacatggtgaaaccccatctctactaaaaatacaaagattagccaggggtggtggcgcacgcctgtaattccatctacttgggaggccgaggcaggagaacatatactttgatgtctgcggagtgtgccagaactggagggtcagaggtagccatgtgtttagctgccccaaactcctctctgggcttctggggaagaatctaagtcggtcagtggagcaggaccccagactttgcccagtccttggcctctccctggccctcttcttggctcctggataaagacaagagcttgggaaggagagcaggcatcccgggcactccccttgctactctccgccctgagagtccaacctgagtgtgcagccagtgtgcctgaaggagggacccttgtggtccaagttgaagactcagttctaaaaagcgtgtggcttttgccatgtcacttagcctcggcctcagtttccttctgtgtcaaatggggtaatgagccatatcctacagcgccaggttgttcgaggttaagatgagatcagagacgtggaggtactttgagagaaggtatgaaagatgttatcatcaaagaatagcatgggtacaggagcacatgagtcacacgcatgcagctcggtggagtttcacagtgcgaatattccacattatcagcaccagctcaataaccatcatccccagaacctggagtgcccctggtatctgttcccacccttacccgctccacagagggcacaccgccctgacccttaccactgtgtatttgtttctgcctgtatttgaactgcacatggagggagaatgctgctgtgaacattcttttggggacatacactttgatgtctgtggagttgccagaactggagggtcagaggtagccatgtgtttagctttttcaaaaaggcagttttctaaagtggtgattgtatcgatttacactcccactagcaacacacagagttcctttattatacctgccctcccacacttgattttgtctgaatggtatttaaattcaaggagggatgattaatatttctttctctgttgcctctgatttagatcttggaaaggactttggaacctgatagctcggatgaagagcccccacctgtgtactccccgccagcctaccacatgcacgtgttcgaccggccctaccctctggctcccccgactccgcctccccggtgagaatctgtcatgtctcagagcacagggtggcagggaagaggatcagtggctggggctgtgtacaaacaacacgaaacttggctggactgctcagtatatttcaaagaacaggcttctactgcagcaagagacattttagctagataccaaggagaacttgcaaaatgtaaggattgcaagagcaaacatttcctaaattcctactctaggctaggcggtatgtctggtaccatatgggacacagagttaagtaaagctcagcctctgctttctgggagcttatagtcaagggagatgccagagtaggaatgacaaacagggaatgtgtattggcacttcccctcccaagcccacagcaaacatggctgattcatcactgtgctctttcctgctgagtcaagacagagcctcagatcctccttaacacagaacacagcattcccagccagtcatcagtaattgatggaatggctagctgccatccttgggctagggatattgtgaggatttttaagcaatgagagcaagtctctttcattaagatagtttgataactggaggcagggaggtagactgcaaggtccctggaaacttcttccaggttagagactctgtaatttggaagcttaaaatgaagctaggctgggcacagtggctcacatctgtaatcccagcactttgggaggccaaggtgggtggatcacttgaggtcagtagttcaagaccagtctggccaacatggtgaaaccccatctctactaaaaatacaaagattagccaggggtggtggcgcatgcctgtaattccatctacttgggaggctgaggcaggagaaccgcttgaaccccggaggcggaggttgcagtgagccaagatggtgccactgcactccagcctgggtgacagagtgagactctcagtaaataaataaataaataaataaataaataaataaataatcaaggtagttgccaggaagatcccatgggtctccggggtgcttgtttttctgggctccacatttgtgctggggctgctggagctggggtgtgacctctttgccctagagctgctgtttcttagaatggctcaggcctggagtggtgagggggtggggagatgatgggacagggcacctgtcccagttagatcttcccttctccccagaacagccccagagcagtggtgaactctgttatcatacaagtgtagctagcattgactaagcacccttccaatgccagaaacggagcaggttctttacctacaccatcacatttaatgcagaggcgggcactgttgtcatcacccctatttatggacgaggaaactgagccttgagagatttcataacttccccaagactaagagctggagttcgaatccaggtcattctgacttaaagctaatcactcttcactgctgtgtcctgtcacctcccgaatgagaaaagtctctgtgattgcagcttacggagctcatagagtcctagaaagttactgaggggaggagggagggaagtgttttgagtcagggacaggaacagagctgggatctttgtcacgagtggtaccaggagctggcaggctgtactggagtgggaggtggggaatgagtgggtgggtctgggtgagacctaggcaggacttgcagcctgggatagatcacagagccctgggctaaatgattttcctttctttgactttttttttttttttttttgagtcggagtctcactctgtcatccaggctggagtgcactgggattatctctgttcactgcaacctccgcctcccaggttcaagtgattcttctgcctcagcctcccgagtagctgggattacagatgtgtgccaccacacccggctaacttttgtattttagtagagacggggtttcaccatgttgccaggctggtctcagactcctgatctcaggtgattcgcccacctcggcctctcaaagtgctgggattgcagatataagccaccgggcctatccccacccccacctttttttttttttttaatattccaatacacttttgcaaaaagttcagtttctgctaggcagagtggttccacctattttcagaagggaaaactgaggccataagagaaaggatttttttttctttaaatagaaacagggtctcactatgttgcccatggtgaatttgaactcctgggctctagcagtcctcccgcctcagcctcccaaatagctgggactacagggcataccgtcacgcttggctgaaaatcccagtataaatgtggtatggatatccatgccacatcctccctccctactctggctgggtgttcagcctgctgtgggtgggggccagggtggtgatgggagccccacttgggggcaaggtaacctcagcaccagaccaaggcttaggagaccctgtggactttagataagttactgctcttgcttgaggttctggagcctaactcaggaaatggaaggctttgctgggctgggagtggatgccctgaggagaacttgacttgtggagtcagacagaagcggtctgttctccccacccctttcttcagctgcctagcttagaattcttcaggcacctttgcaatgtggcctttggctcattgcttaacctctctgagcttcgtttgcctcacctgaaatgggaatagtaatttccaccttagcactgttaggaggattgaatgagatgtgtgtggagcacttagcacagacccaggtatagaccagacctataatcagtggtttactgctccttcctgtcccccagctacactggctggcttctaagtttagctctaacattgagaccaggggcgaggcttcccccagaggccagtgttcagtagaggcacagatccctttgccccaggatggctctgctagacctgggcctctaggccatctccagtgccttgtccagtccctccatccaggacattcatttccagcatttactgattgcctgccatacgcaggtgctgagccatgtgtatgatgaggtggtgagtacagcactcctgaactatgtgtgtgaaccacgtgctgagccatgtgtgtgatgtggaggtgaatacggtgctgcctgtttgcccacacactgccaaggagatcagggtctagggaagccgaagacacgggggcagggaaggctgccaggagaaactgatgtccaggctgtgacctgaaggccacattggcagtaatgtggagaagcagaggacagggaggcgctcaggcaaaggaaggagcacttgcagaggcctggaggcaggaaagagggctcatctggagacctcctggaagtacctaacggcgggtgaggctggaaaggcaagcagatcaaaggccctgtggccctccagggagcttccgtcttctcttgcagacagcggggagccattcaagggccttaacctggagagcgacacgatcaggttcgtgttttaggaatcttcctttggctgctgagggagatcagatttgagtgggggaatggcctggcccccatctgctacctccagtcactggggtgccgagaacctgcagatggggcagagtttgggagcgtgggtattggcctcctagggcacagagaggcagggccaccccggggagcatgcttcaaatgtcacaatccctgggcccaggttttgcctggatgatgtgtgtgtcctgggacatggcttgaaccccctctggacctcaatgtccagttcttaccaaaaattttacctggaagtcctgagtctgaaatccctttccatcaggtctgatgttccatgggtaaacctgggggtccgatggggcttgaagttgcagttttggggtccagaggcagaggctctgggctgggaaatcctccccagcttctccctccttcccctcccccagtctgtccttccctccatctgtctgaaagacagtctctgaaaccccggggacccttccacacaggccgcctgctgtttttccgttaaaattacagccttggaagtttttttttttatttgcgtctcagctcatttctgacattcctttccgaccacaatggagttgcctgggctgcctgtgccctggctcacgcagctgtgggctgacctcatctctaccagtgccagccaaggggccgggagggggctgggcctggccttccttcaggaccacaggcctagcagcaaggaaactcagctgagaacaggggcctcctccaccttgtgcccttctccacttggagtcttcatggctagaggggtccaggtgcacctctgaggttctccctccactgctttcctgggtggctccgaggtgtggttaaattgggggtgggcacccatgtcccagatgaagaccctgagacctcaagaactggtaatacccctggcgagggtccctccctgctgtagcctggggtggtctgcgagtcccttagagatgaggcttcctctctccccatctctggcctttggagaaaaatgaagcctccaacagtgacagaaggtggcagtgatgtagaaaaaaatttggcctaggaatgggagtcccgggttgtgatgcaagctgctctccagaccattccctctccccctgtgtctgtgcagggagagggtggacgaggcgtgctggggttcccttggctccagtctgcaagagctgagctcccaccaggcacttagcagctggttatcccttctgctgccgcccccgccccttcccctcgcccccgccgccggccacccgcccgaaatagaaaaggaaaggaagttatttccatagtcagcggcagcccggaaaagctcccctccagtgagggggcgggcgggattcctagagctgaagaccaaatcaaagccaggcccgagagctagagcagcccccaccgcccggccctcggctgccttctcagtgtgccgttttcctgattcagcggaacacgtgtcctgcggttgccacgctgcaggctgccatggagctgtggggacctcctggccgggctccgagctgccctcaggcccagggcggtagggcgggagcctgggggtcagggagggtgtgtgccaccccctcttcctctactgccttgcccagctgttggctctgccatggcacagagctcctgccacacacacaacgggcctggaaagagcggccccagagcaccctgagagcgagatcccttccacactcacatctccacgcacgttttcagaacattgctcaggacacggcctcctgaggggctccccagcacctgggcagggaggcagcagtttctagataaggaaaccgagccctagagggaacaggggcccacctaagactaccctgccggctggtggttgagccagaactggagctcagatctgctttaccctctgtagggatcctggcgtccccatatgccccttcctcagcaaaccagcatgcagcaggctgtgctgttggtggcttatgtgtctgttcctttggaccatacctgtcactcagcaccatgagcctggcactgtgtaggtgctaggatagaagcatgaaaggatgcgatccctgctgtctttaggggacatttgtaaacatctatggctaaatccacagagttccacatgtgcaccgtggacagacagctctgtaggtccagagacctggaagggcactgagtgactggagagcatgaatggctggggagttcgctgaggctggtggagacatctccagtgatgagacagagtgacgggcctttgttctggaggcagtggaggccatgggaatctctgagcaggatccgacctgcctgaggacctggtgtgatggggccaggagacctggggttgggcttaatgacttcctcttccctgtcacctgccatcccctagtatcgacgcgctgggctctggagcccctacaagccagagacgctatcggaactggaacccaccactgctgggcaaccttccggatgactttctccgcatcctgccccagcagctggacagcatacaggtaacaggggccgcccccgccttccactcccacctgcttgtccagcatctctctttgcccacacaatttgtgccagccagttttacttcctgatgtttaaacccaggctgagctatttctgttgccctgggttcgtagggcaggaatgctgaactgaaagcctcacttcctgcctgggcctggaggtttcctgttctatccagggaaggtgacagcctaaggaggctgtctgctgcagcagtcacctcaggctggagagaggcgggcatggggtggccaatggtggagggccagagcaccccccttcctcccttgggaaagggccagaggctgcttcttgctagatgttggcatgccccaaggtgccccacagcggggcaggtccaccctgaggctgctggtgcagggagagggttgagtttgggaattgacgtataggctgttccacagtctgcagatttgttttcaggactgttcaggttgtagatgaaggtatgaggtggtctgtggcgtgggggaaaaatagtttttaggctactgctgtgtcccctgcagcaatggctctgacctgtccgttggattttggctcgcaaccaggttccattaggaggtgtgagcctcaggtgagggctggaggatgttggacagggcatgtgtgcaaccagagggatgtggacgtttgtgcaacatgtacccttgtgtgtacacattcaacatgctcgcttccctcctcagggtaacgctgggggccccaagcctgggagtggagagggatgtccacctgccatggctgggccagggcccggagaccaggagagccgctggaagcagtacctggaggacgagaggatcgcgcttttcctgcagaacgaggagttcatgaaggagctgcaacggaaccgcgacttcctcctcgctctggagagaggtgggcagcgcctgcagccacttctccctggctgaagaagggaggtgatgctggctttagccttggggctcaggaaaacactgagctgggggctgagggggccaggtgctttctgtcctattgaggcatgactcccaccaagttatcccatgggagcctcagaattctgcctatggggacctgggtcactagcccacccctttctccctcgggactcagaggaagaaggatgtgcactcttaggccttcttccctttgcacacctgctctgtgccaggcactggccttggcacaaggcagcagggagaagagcactgcccctcctcacagagccccagccccaaggcaggcgtgatgtgtctggagctccggaaacagaacgactgggttcatgaaggccagggcgggggaggctcttgagtggaagactttagagcaggggctctggaactttgcaggtatttgggttgtctctgggttggagaccctgctccctagcctggctgcctttcccctgcagggtgggagtgcgtttggggtagaggagacgagagggctgtggagctctgtccctgtgacggccacagcgtgagagcttgtgtgtgtaactgatggtgtgttggtgggggaggagcaagttgtggagggagaaggctgggctgaggcccaaggttagccccagctctgcagcaaaggtgctagaagcctcaaggcttttccgtttattttttattttttgagacatagtctcgctcttgtcacccaggctgaagtgcagtggctcaatctcggctcactgcaacctccgcctcccaggttcaagtgtttctcctgcctcagtttttcaagtagctgggattataggcgcacgccaccgcacctggctgatttttgtatttttagtagagacggggtttcaccatgttggccaggctggtctcgaactcctgacctcaggtgatctgcctgccttagccttccagtgtgctggaattacaggcatgagccaccatccctggccgtgcctttctttttaaatgagggggtttggactctacagtctctctgagtccttttaattctgacatttgagatggctgtcaggcggtagtttcttttactgctggttctttgagagctggtagatgtgtgcactcatattttgggtgcccgtgtgtgctcatgtgtgattctggggacttagcctctagcaaactaccgtgtcccagcccagcctgcccctgggagcccaggagctaacctccctgacctgtgaatgtggtccttttccagatcgattgaaatacgaatcccagaaatctaaatccagcagcgtggctgtcggaaacgactttggcttttcctctcctgtcccaggtaactttgccttctggggaagaaaacctagaggcatagtggggagctcacacccaactttgctttgcatatttggagtttgagaggagggtgaaaaaacagattgtgggagggggcctgggcctcctcagcaggctggcggggctgcttctgcccccatctccatatccagtccatttagcagctctggggtctttccaatccagccactgctgggcttcagagcccacagttgtgttcaagtaacataggctggctgaactctcaacctatgcctcgagtgtaggctagtcaatgacacatggccaggtgcggtggctcacgcctataatcccaacactttgagaggccgaggagagtggattgcttcagcccaagagttcaagaccagcctgggcaacaaaatgagacccccctatctctaccaaaaaagtactaaaaattagctgggcatattggcctgtgcttctagtcccagctactcaggaggctgaggtgggaggatcacttgagcccaggaggttgaggctgcagtgagctgtgattatgccactgcactccagcttgagtgacagagtgagaccctgtctccaaaaaaaaaaaaaagaagaaaaggaccccaaaatgccccgtggtggggctcagagactcataagtcttggtctgtgtcctggggaagcttatggtcttgtaaggagaaatgcccagaaaacaggtagaacaaactagcaaagctgaggacttactgattttagcaaatgcatgggaaaaaaggagggcaggattaatctggggagtttactcattcattcatgacatagctggagaatatctgccatctgttgggccttgccctaggtgttggaggaagaggaatttctagctttgtgtacaaggtggtgggaagtaagaattgcctgtaaagagggccaggcccttctgctcagaagctctgatggctgaaagagggttggataggggtgagggggctgcagtgctcctgggatgcgcagactactgggttgagccacagctgggaacgatgacctggtgcctgtgtgcgaacagtggcccctcatcagtcagtgccccctgccccacatgtacacaagctgcccacctcggagaagggctcttgcctggaatagaccttgcatcatgcagtggagttgggggtggaggagcagagggatggggagctgagctgatcccagcttgaagggagaaaatcctgtggaactgactcataagcagcaggctgggagcttagggctcagcagatgtgcagctgggagttttaagcaggagcctcttgtccttgatcctgaattaactagagataccggggctgctgagatggatcagaatgactcaaaggggacttagcaggcaaggtgactggggattaaccaagttgcaggacagagagcaggggcttcagaaaccagcaaaaaacccaagtggatgctgagcgagcccgggagactctgggtggccggtggggttctgactccaggactagtcccattctattcctactcattgtctaatagccagaaaccctgtggctgggagggagcaatggatgggcttacctggcaggaaggacaagggacttgctacaggtgaatgccggctctgagccagcacctcatttgactgtcacatgaatgtcggggtgcaggaggcccctggtgtgctggtgaatgtttcacagccaactctgggtgcagcgggagcctgatatgtagtgcttggtgacctccatggtggaaatactcccaagctaccaaggtgatgtcatgaaacatggagttggtcagaggcgtggacagttgggagcacacacgagctggctgtctgcacacacagtagaccgctgaaccctccccatttttacagaggaggaaacaaagtccacaaggggaaagaggagctcctggaactccacatcctccttgctttaaactcccttctggccagggaagaagcctgctctttctttgcatttgtcctcagatgggtgggtagggctgggacagcggccatggctggccacggtggccggccttcagcaggtgtctccttccaggaactggcgacgccaaccccgctgtgtctgaagatgccttattcagggacaagctgaaacacatgggaaagtgtgagtcccactcaggccccgcttccctccccagcttttctgagacaggccctgtggcctcccaggagtgagggagcccctcagcacatgtaatgcagctgactcttggtgaaccagtgacattttcatcgcaggctggctccctcagccttcctgcctcacttccctctacagctgagtctagatacaaattaagttttaaatcctcttgagccagatgtctgcagaaaaataacgtgccacacatgccctcaccgcaatcctcatgttcacgttctctgtggctcgaggaggcttggccggagctgactgcacagagaggcccttgctaagcctctgtgggggtgggggacctctttccacaaagtcctaccagccttgaatgcccccttccctccccctcacctccccgccacacagacccacagccatgtgtgaatgaggctgcgatcctttcaggctccatttcaaggaaaatctcggattagtcatggaaatcccagaaccaactttggaggtggctaggggaggggcgggaaggcggtggcggcgggaaagcgagccaagatgcgttgcagtgtgttgcagctggggagggaatacttggatcttgagccgcctgcggtccctgggcctggctcagggtgtcctgtgctgcccctgcaggctgacccaggatgtagcctcttgctcctggggtggcgtcctcaggggtctgcgattcctgtcatctctccctcctcagctcccacccttgcctgccccctgctccctctccggggggccttggtcctcccctggcctttcccacacctgggaggaggccatctggtgtgctggctgctgagagaatgactcacaggtctctctgcccccagccacccggaggaaactgtttgaacttgcccgagccttctcagagaagaccaaaatgaggaagtcaaagaggaaacacttgttgaagcatcagtcgtatcctttccagcctggcactggtgggggtggtggaagccaagggccatggagcaagacccctgttggactccctgcagctgtgccctcccctgggagtggaacccggctctgtggccttcccttcctcctcccctctcctccatgagcttggccaccagtccactgcccgtctctcgttgccaaccagggaccaggcctagggagcagggcagcagctcctgtctcccttctgtaggcccagaagttgtcctattaactttttttttggtctgaggttatgtacttcttgggagaaaaagtggttcttccatcaatatcaaaccttcccttcatttctctagttgaactggtgcacgagtcctcctcactccaagcatgttggccctcccttcctcgagtagaaatacggctttccacctttttatcagaactcctattcatgcttctcaaacagggcctaggatagcagaggctcagcagccagagggaaacagggaggaagctgtttctccatccccagagatgtaagctgggcgagagtgtcagggcctggccataccactgacctcaggaaaatgagcctgggggacagtactaagggtgtggggggtcaggtgggtgtgtcaggtacctccagagctttgaggggtggggcagagagtcagtgggactgggaggactagggcagtgtcccctcatccctgggacggttttcctgaatggcctggcaggctgggggctgccgcgtcaacagccaacctcctggatgatgtggagggccacgcgtgtggtgaggctggaggggagtcgtaagctccaacttctctatgatcggtgatctcccagcggagttcctgggtgtttcatgggagcacccgccctgtcccctggaggaacacactgagggttggtgggcaggtgacccaaagatatggatccccctgacttggtcgacattgcttccccctttctgcaacccctgaaaaggggccctagccctacttccacctagatgtgtacctgtagcatgaagtgccaggtactgtttctggggaatattcttttgggtgtgaggtggcagacaggcctgcccccatgggggaccctcggcctgagaaccaagcactgggcagcttcagtctgtgggcccagaggcttctcaactttcacccagtcccttccaaaggccacgtgggccagaagactctgcctcagaccctcctgggcccgcagctgaaccctgatcctcatgccacattcgagggtcaggaggcatccagaaacaaggactggaagggcctcagaggtcatctagatagtccagcttttccatcccattttatagatgaggaaatttgaggcccaaagacgaggggagaacttgtccaaggtctcagagctcagtggtggaccctggccagcacctgagtgtcctgctgcctctctccctggacccatgcatcgtctacctggggggatctgcatgggtcccaaatgaagggggcagagagagtcgggtcagctctcttgcccagtctaggggccgtgcctgagcgaggccctgcagggtagaggatgaggcagcttccctctccttttcagatgaagacttccggggcaggcgtcaggaggcacccaaggtggaggaaggcctgcgagaaggacagtaagaggtaaggcctggagccatagcaacccagggactgcccaaggccagggccccccacactatgcaccccacatgtcctcccaggtgtccagaggcgctgggctcaggcaactgggtagcacaggccccacgtgtcttccctcatagttgcggcagggacacgggcgtgggaactagttcattgcatgtcttttttggttatttattcatttgacaaaagatgagcacacctgcctatgacagatgctgagaacaggaaaacaaaatcagctttgaccttgaagagtttacagtccagttgagaagacagtccaggacacacgtagcacactgagaggatgatttaagaaaaactggctgggcacggtgtcccatgcctgtaatcccagcactttgggaggccaaggtgggtggatcagctgaggtcaggagttcgagaccagcctggccaacatggtgaaaccctgtctctgctaaaaatacaaaaattagcctggcgtggtggcaagcgcctgtaatcccagctacttgggaggctgaggcaggagaatcacttgaatctgggaggcggaggtggcagtgagctgagatcgcgccattgcacaccagcctgggcgacaagagtgaaacttcatctcaaaaaaaaaaaaaaaagaaaaagaaaaactgaggtggtctcaacccggctgtgcacacacacaactctctccagccccctgcttgggttgggtgggctgggatctgccacaccaggatgaggaaaccctcctgaggcagcggtttctggctgaagccccagggctccaagccatttctcctcctcgcttcctgtgcaccctcttggggagaaaaagaaaataccaaggcctcctccaggagttggccaagacagctgtcccttttccagcccccgtttaccatgggagaggggaagctgcccggccttccccagccacttgtttggtcccagtgggcagcatctacaaggctttcttgagttgatggtgtggcaggtatggccctgtgtcagacgatggagaaatactcacttgcctcaggatagtcacaatggagggaaaccgggaacaagtaaatacaagtgccctctcctctctgcctgggcagctggcccccacacccactccacctgactccctaccacatctcccaccaggcactgcagccccttctattcccctcaggctttcctcaaacacaaagccgcggcccacttcccactgtcctggaatgcccagatagagcctgccggggaatcgcctccactgtcaccccacgctgctactatctccacgcccttctccttcctactggtccccagggagaacgggtcctgtccaaaccacccctacatcagaaacttgctcatcattcattcattcattcattcattcattcattttgagacagagtctcgctctgttgcccaggctggagtgcagtggcacaatcttggctcattgcaaccttcacctctcaggttcaagcgattctcctgcctcagcctcccgagtagctgggattataggcacccactatcttgcctggctaatttgtttttgtatttttagtagagatggatttttgccatgtggccaggctggtttcgaacatctgaccccaggtgacctgcccgcctggacctcccaaagtgctaggattacaggtgtgagccaccgtacctgcacctcatcatttatttctgtcctaggacttccagcttgtccccttccagctccttctgcaagttgacatcctcctcctcctccccttaaacaccaagggtccttgagtcttccctgccatcctccttcatccactgcaggctgacagcccctcccatcactcggattgactcggaggtcacccagcagctcagggccttagcatcttctgcattcttatggtgctcttccacacgcactcccctgatctctcctgaagctgccctcccttggctcctgtgaccccaggaagccaggttctccttcctctctcctggctcctgttgctccgcccactccctaaatactggctctccttgttgctctgcccttgaccctcttcgaagtcttctcactgcccactctggcagtgcctccgccctcttttatagcaccagcaacacttctgcgcatctggctcctacatctgaatctccatcgcagttaggcttccagagctgcttcgtgtccccagctgcacccaagattttcttttcagccttggatagcaactcagtctctcctcctgactgccccctttcattctcttttctattccttccattaccaccctgatagatgctcatcacctaggtcacagccctgttctcttcactgcccctacctactctgattatcccaccaccaaaacaccactttagttccatttttcctgtgctctttgaatgaatctttttttttctttttcttttctttctttttttttttttttttgagatggagtctcgctctgttgcccaggctagagtgcagtggtgcaatctccactcactgcaacctccccttctcaagttcaagccattctcctgcctcagcctcccgagtagctgggattacaggcacgtgccaccccgcccggctaatttttgtatttttagtagagacggggtttcaccatgctggttaggctggtcttaaacccctgacctcggcccgcctcagcctcccaaagtgctgagattacaggcgtgagccactgcgcctggcctgaatgagtcttctgagtaaagtcttaggaactcttcagcctggtgtctgagtcctaccaagttctgcccccagtttacttttctccacctacaggtctttgtggcctagctcccctgagctatgacgtattagaatgggccaggtaccctcccacgttgaagccctcccctacagctgcttcaccccgggattccattccttcactccatctcctgctgccagagtccctgcagctgggcaagctggaatggttctaggaatttgaatggggggatgacccaggcagagttctacggttgacctcgagtccctggaaaaaggagagggcttacgtctttagtaacttctcccaaaactgtctctccaggaaccagtgaccaggaaagaccattgggctcctttgaaaaagattcctcccatcccttttttcccctaccagatgccagcagctcttccttgccagagatgatctgacccggtgggggcagctggaaagcaacactggcccccagctgaagggcccagctgcagccagacagatggtgcttgagaaccgaggcccggtgatcctccagccacagtccagcccaaccactgccactttccatgggacttagaacttcggagttgctgccttgcaattggaggaaggacctggggcccctataggcagcagccaattacagccccttttgtagccaggcgttcctatggtcaaagagtggaaatgcaggaaccaacctccctttaaaaaaaaaaaaatccagaaagcagataaaagttggaatatggaaaagggcaagatgacccccaccagaggctctttggcctgaaggtggagtctctgcctccgtccgttctctatctctcctgtcacagactctgcctgaccccctttcctcagctcccttctggtcccccttcctcagctccctccgggcacttgtgcccttcccttccatgtcctcctgtatctcagccttcccccggggctgctggcccagcacacgagccctgcacccagcctgggtgggaggtccctggccagtcccccaggaactctgaggagctatgggctactgcaaagcatctgccgactgccctgccccgtctggcctcatcaggctgctgctgttagggatgggctcactcccagcagctcccggtcacccagcagggatggggagggtggccaccctggagctggaggactctggggaggcagggtctttaatttggcagcagacaaaagccagttctggagtcacaccacagtaggggctcacaggggctctgactccccagctggactggaagccctgctgtccgagggtgggcagcggtgggtcctggagtgacccctttgagcaggtgcagggctaaagagcaaggcggaaaggccgccagcctgggtgagcgcctagggcataagggcttgctgggtgcccctgagaagggcgggtgatctgaggaggagaactctgattctaggaacgcttacacggcactgaccactgccacggggagggaggctgcccagcccgtggccccgccctggacatgggagcgcgcagaccttccggagagccgggaagcctgggcaggcacgaggcttcggcgcggctctgggaggttgggagtggcatccgatccttggccgggccctggtggcctccgtggccccaagatcacaagggcgtagcgaaggcgagccggcgatcgcacctcgtcccgcccaccctgcccggactcgcaacgccgagcttggggagggccgggacgcgcagccgccgccgagcgtgaccaagtttggaaacgcgcgcggggccgggacgctggctcggggggccctgccgaggagcggtcgccccctccgctgctccccgcgccaggcctggggccctggagggaggggggggggtctccgaggagtgcctcggtaccccagctcgagttctcgacgggtctctgagccttccccgcgccaggacccggcgcactgtgggggaagccccagccccatgtctgttgagtgttgctttgttattttttttcctcctatgtgtgggttttttcttggagctgtttcataggaattcctgtaataaacagttggtgttctcttggtgctctgatgtggccagcggcgtgggctggaccctcctgctccctcctccctcccggcctggggcagggtttgtccccaggagccccgcgtcgcatccctagggtacccctgccttgcctggcccattcacccgcggcgctctccgactgcactctcgaggtgacacctgcggcaccgctgcacctcaaccttgcggacctgccggctgcgtctagcgctgtcgccttcctgtttggcccaggactgtaaaccgcttgctgtatcaggcaagggaaacaccatggggaaagccagtctgttgagaaagctccagacggccacctccctaaataaacagcttctggattaaaggcagactggaggttgcagggaagtgcaatttcagacttcaaagggaactcagagatcgccccagttgatacatctctccttcctcctcctcctccagctcagcaggactaccccgccctccaccacagggacagggccctcgctgccagaagaggaagctggtgccgtttccagacagggcagttctcaaggtcgaagtttttccttgtgttgagctaacggcctcctaggggttccaaccacacatcttactcctgggctctgggtcactgttgccaaggctgcctctcttgcccctgatgccatgtttcagctcagtgacctcaccctctctcttccctgacaacaactgtgcctcctgcactcctgcaggggcctccccacccatcagggtctggccccactcccagtcagacccaggggggcttgtaaagtggcacacctgggacagggtgacgctccacatgagctgtcctgagcaaaccaggattatcctccagccctggttctctgcgtggtattcattgcctgggaagctgttccaaatgccaattctcagtcccatccgagacctactgagtcagaaactctgggggtgcagcccagcaacctgtgattctgatgcacaccacagtttgggaaccatggtaccaggccagtacctagcactggctgcacagaattacttgagtagctttaaaaaaaatcctggccaagaccaggctcagtggcttacacttagaatcccagcactttgacaggtcgaggcagcaggatcgcttgaggccaggagttcaagaccagcctgggcaacgaagtgagacccatcccccaaccccccacatctctacaaaaaaaaaaaaaaaaaaaatagctgggttggtggcacacatgtgtaatcccagctacacgggagggtgaggggggaggatcgcttgagcccaggaggtcgaggctgcagtgagctgtgatcatgccactgcactccagcctgggtgacagagcaagaccctgtctcaattaaaaaaatagatcctggcccgcccttgtggttcatgcctgtaatcccagcactttgggaggccaaagtgggaggattgtttgaggtcaggaatttgacattacagtgagctataattgagccaccgcactccagcctgggtgacagagcaagacctcatctctattaaagaaaaaacgtcctgatgttcagtaccctagaccaattaaatcaactatgggttttttgtttgttttttaaaaaaagctcccaaggtaattaaatctgccgtcaagcttgaggaccagcccacttggcaatgtgttaggtgttttagctcatttgatcttgcccaataacgatcactttacagatagtataattacagttcagagaggttaagtaacttatccaagatcacagagctagagtgtcatgaggccagaaaaggaggctgagggctgcctgactccaaaacttgtgttgcctcctctacacccctgctgcccaaagtgtgccctgtggaccagcagcatcgccattccctgggaacttgttaggaatgcgtattatcaggccccattccagatctgaatcggaaactggcgtgcattttaacaagaccttcagatcattctgatacatgctcaaatttgagaaccacagttccacaatctgaccactcacagcttggtctatggaccagcaacattcattattacctaggagcttgttagaaaaagaatctcaggctctgccccagcctcactggatcagaattcgcattttaacaagctcttcaggtgacttctatgcacattaaagctagagaaacactgctctagaacactggttctcaaacttgctgtacgttagaatcatttctgatgtgtgggtctcattcccagagattctgatttaattggtttgggatttagcctgagaatcagattgtaaaatcccaggtgcttctaatatgcagcaagtttgagacccttacaccattttacctgttagtgtagatgacactggagatgattgtaatcagagagagaaagagagggagaatgcttaccaggtctaacaaggagtgcaggagatgaagcctctgctggagccgctgacgcctggttaaagatggctatgggtccaggggcagggacaggctggaccagatgactgccttagccacctaccctcacattgcttgctcatctgcaagtgctgaactcctggtatccacaaggcgatacttgcagatttatcctctgcaaaaatgcagagctgggctatctgaagtctggtccagccagggccccttccctatcttgatgatgctttgatgtcctcagggatcagccccaacttaaaaggcgatcatgggtctggaaaacgctgtgcccacaagaattgcctggttattaccatgctggggtctcaattctccctttgttttcttgaagcaactggttggagatagggtctgggggggaaacaggagaatttgctctgaagaatgaaggaggcaggcaaggtgtggtatgaagatggtagctctttatcgagtgtttattgtgtgccagacactcctagggtactttaccgaatccttcacaacaattatatgaaatcagtattactacgtgcgtttcacacagagatgttaaagtccttactcaacatctaccctcagtaagaggtggtagtacctgcatatgaatccaggcagctgagctcccgagatgatacctaaacactaagcatggtggggtcgggttgggatgcagggggatggggttaagatgcagcacctttgcacagatgcaatctgtggagcacagaagggcccacttgctcaaaaacatcaccaaagtgatccgtgatccaacagagtgcctggaacgcctccattagcattctttatctggttttaaaaacaatctctcagcatttccattaaatggcaaatatgctattgagagagaagcacatgaactccttatgcccattatcacagcatagattaatttgttggattaatgggctgcaccagctggaggaagagttggaaatttctggaggtggccaggcgggagagggtgggcatgtgaagggggctgtgtaaatcgactgccacctggtggtcatcttgcagaagtggcagtcactggccactgagacacccagcaccattttcccagaaggaagatgcgagcacctgtttggccttaggccaaagagacagagggaaatttactctgttcacatggttatatgttttctaaaatttgcaaaacaaagatattttaaattttttcttttctttttgtttttttgagatggagtttcactcttgttgcccaggctggagtgcaacagtgtgatctcagctcactgcaacccccgccttctgggttcaagtgattctcctgcctcagcgtcctgagtagctgggattacaggcacccgccaccacgcccagctaaatttttgtatttttagtagagacggggtttcgccatgttggccaggctggtctcgaactcctgacctcaggtgatccacccacctcagcctcccaaattgctgggattacaggccgtgagccactgcgcctggtcaaattttttcttaagagagccactaagattagataagcttcaggccccccaaaaccagcatctaccctgaagagctgaggcttggagtcaggtggcctttctagagcgtaaagagtcacagttctttatcaggacaagaggattattccagggactccagtgggaggaactatgaaactcagtacaaacagcacatgcttccttgctttgaccttgccattcaaagtgtggtctttggatacatcgaccaactgtcctggtttccctggatgcagaactttcagtgccaaaactaggaaagtcgtgggcatactcgggtgggttcgttatcccaactgcagattcgcagcactggcatcaacctggaaggttgctagaaatgcagacccagacctactgagtcacactgcattttccaagatctgcagcaaattcatgtgcatattaaagatcgagttgctgtggcttccccaggaagagaggggcccacactggccctgaaatgtatgccttcaaggggtttggtgggctgcaaaaccccacagagtgattgcaactggtcttgaattccaacaataaaaggccagcttcttgctccaggcctagctggcccttttttccctggtcacagtgacataggcctcccagggcataaagtacttagttctcttcctgaactggattcttcctgggggcaagcccaggtttggtgaagaaaagagtgggtagctaaatgaaaatagtttgtaggctgggcacggtggcttacgcctgtaaatcctagcactttgggaggctgaggtgggtggatcacttgaggtcaggaattcgagaccagcctggccaacatggtgaaacccggtctctactaaaaatacaaaaattagctgggcatgggggcgagcgcctgtaatcccagctactcaagaggctgaggcaggagaatcacttgaacccaggaggtggaggttgcagtgagccgagattgcgccgctgcactccatcttgggtgacagagcgagattccatctaaccgctgcactccagcttgggtgacacagcaagattctatctaaaaaaaaaacgaaaggcaagaggaaaggaaaatagtagcttgtatgttgttaggtaaggtttttttttttttttttttttttttatagagagtctcagctctgtcacccaggctggagtgcagtgccacaatcatagcccactgcagcctcgacttccagggctcaagcgatcctcccacctcagcctcccgagtagttgggactacaggcacatactaccacgcctggctaattttttgatttttaatagagacaaggtctctctgtattgctcaggctgctctcaaactcctgggctcaatcgatccttccacctcggcctcccaaagtgctggattacaggcatgagtcatggcagccagcctcaggtgagatttaattgaaggacactgttgctctaaagcgtagtccgaaattaccatcactctatttattgagtagttaccatataccgggcactgttttaaacacttagcaggtatgaacccactggtgcctcactacaaaccctctgctaggtgctatgattatccccactttacaaatgaagctgaggcccagaggactgtaaaagagaactatctgtcagtgaggcacagaggacagccagaccggaaatgctcacgatgtgaagtgaatggtgaggtaggggattatttccattcacccacagctctctccctatctgtgtatctggggaaggcctcaaaggaaagctgggcctgggagagagggagggctgggtatgcacaggcagtgaagggaaggctgagatgacagcatcctcatttgtcctaacttggctttatttatccatgctgttcactggaaaactctgagagctgtgggccaagcaccaggccgggtgtggggaggcagagctaaaagtcctagttcctgccctcaaaaaggcccctgtaaccagactcagacaggtaaacagagttacaacacagacatagccctgaaagagataagcataggaagggagggagcaggtctgggcactcacccgatcttaccgagtgtgtgctgggggctgaaaagcttttccacctgaactgattcttgacagttccttgaagcctaggaagggggtctgaaggggagctctcaggagaggggcacaagcccaacagccggaaggaaagagaaggtactctgactcccccccccttttttttttttttgagatggagtcttgctctgtcgccccaactggaatgcagtggcacgatctcagttcactgcaacctccgcctcctgggttcaagcaattctcttggctcagccttccaagtagcgagtagctaggattgtaggtgccaaccaccatgcctggctaatttttaaatttgtagtagagacggggtttcatcacgttggccaggctggtctcgaactcctgacctcaagtgatccacccaccccggccttccaaagtgctgggattacaggcgtgagcagctgtgcctggctgcctcctcctttaatagccctccctgcccttcatcctcctggtcctcagactcaggaagcctacaattcttttttttttaacggatcctgatataatcctctctctctttttttagagaaaagggctcactttgtcacacaggttggggtgcagtggcacgatcatagttcactgcagctgcgaactcctgggcgcaagcaatcttcttgtctcagcctcatgagtagctagcactaccagcttgtgccactgcactggctaacttttttctttctcttcttttcttcttcctttttttttttttttttttttttgtagagacaaggtctcgctatgttggccaggctagtctcaaactcctggcctcaagtcatcctcccgccttggcctcccaaagtgctgggattacagacatgatcctccacagctggcctgacataattcttaaactgtgtattgaatatactgtattgctttcctccctttaaagctaattgctccctgattttagctgtcataggtgagtagcagcattcatgatttcatcagtgtgctgggagtttcacttaccaaagctgttccactactggggatgatgctcttcctcattttgtctgacaaattcccacacaatatttatttatttatttttgagacggagtcttgctctgttactcagggtggagtgcagtggtgcaatctcagctcactgcaacctccgcttcctgggttcaagtgattctcctgcctcggcctcccaagtagctgggattacaggtgtgtgccatgacacccgcctaattttttttattttttattttttattttatttttagtagagacgaggtttcgccatgttggccaggctggtctcgaactcctgacctcaagtggtccacccgccttggcctcccaaagtgttgggattacaggcatgagccatcacgcctgacctccacgcactatttaaatacgggcattgtcacaaagatgtgggcagagtgatgggaagccacaagggatggcctagaccccgtggctaataacagaggggtacagcttgccaactacgtctaggcttgaaggagcaggagagggacggtggctggaacctggtgagagagctgtgattttatgttctagaactttatgttccaggagggagcccgctggcagtaccaactggaatccagccagaagcagagggcaaggagctggtggatgcaggccacagaagccagcctcccgaggcacagaacagggcgaaggacggcagagagtgggtgtggaactgcttgggcaaatgggaactattcagcacttactgatctatgttaggggctgagctgtgtctccccaaaaatcatatgttgaggtcctaactccagtacctcagaatgtgactataataggaggtagtctttaaagaggtaattaagttaaaatgaagtcagtagggtgggccctaatccaataagactggtgtcctcataagaagagattaggacaaaaccttcccacacagaggaaagaccatgtgaagacgtgggagaagaaagctgtctccaaggcaaggagaaactagccaagtgcagaataaactaaacttgcagacaccttgatcttggacttctggcctccagaatagggagaaaataaatctgtgtttaagccacccactttgtgtgcaagtggtgttagggcaggcctagcaaacttcatacaatcaacaagctattcagcacataacttaatatttatgtatttacctctctgtcttccctactggaccgttggattctctaagactcagaatagtcaggtaggtgtttatatgcttctggaacgaacggatcatctaacaagaaagtaaaacagtaaggcaatctatgaaatattatcaaaatgctgcagtccaggtggcaatgggtggatgacacagcacaacagcaatcgtgttgctgttacagccatcaggcttgttgctgctcacaggcactcactatgtcccaggtgctgtgattagtgctttacatgaatgatctcttttacttttgcaacaagccacgaagatagttgacactgccatccagattattattattattattattattattatttgagacagggtcttggctctgttgaccaggctggagtgcagtggtgtgatcatggctcactgcagccttgaactcctgggctcaggccatcctcccacctcagtcccctgagtagctgggattacaggcatgcaccaccacacctggctaattttgcccaggctggttttgatctcctggcttaagcaatcctcccacactggcctcccaaaatgttgggattacaagcatgagccactgagcccagctccacattttaacagttggagaaacagaggctcgaaaagttacataacttgctcagagtgaagcaattagtgggcacgtctacaatgagacagtgggattaatatgaggccgagtggtgttgtaggaacatggcctttgggagtttacaagcaccacttccttatctgtaagattagcaggacattacctatgtcagcaggtggttgaacaactgaatgagacacttgaggttccttggtacctcccgcggcacagtggtgcgtggtgtaagtgccccaggccctcacagccttgggcggctgtggtccccactcaagaagacagcctcaaatgtccattctgcctgccccctgctgcccgacagcttgctcctgtattatgaatgaatgtttcttgggtgtgtacttcttgtgtagcctcagaaggctgttatccccaaagtacccccaagtctgcccaccaatattctgctctcagtcacagaagcaggctggaaagggaaacttcaaaggcttggaagaggaagggaccaccccaagattagcgagaacatttctgccttgcagttcttcccctattgagggtttgcgtctttggttcccctccttgatcttggaataaaccctttaactctttagctgcagtgactgcactaacctacagtagcagttcctggtgggagaagagaagtgtgcctgtaatctgggctggcagatagtgcttgctggctgggacagaattagaaagttgttatgaggcctgggaagactatatttagctgggagcatgtttactctccccagagcaaggtcttttagacctcctgagggctgggatactagagcctttacacctggc

SEQ ID NO: 2931 - DNA, 3475 bp, Homo sapiens
tccacctgggacctgtgtgtgtttgagcctgtgctttggttgtgcaattctgagcctgccccaccctcctagctccttcctgaaagtgaaatgctacagtctttgctcaagaacaaaggactcaagctcagccctgcatgttaataattttcaagtgtggccacttcctcttgcctggcctgactcaccctggctgctgcccattgtggctgccatggaaatacaactcgaggagaacccagaccaggacagggaggccatgttctgggtggcagtggagcctggcaaggtgccctcctggcctgggactgctgtggcagaggaagcatgaggtggggcctggcctgcccagctcagagctgaggtgcccccttggttttttacctccctgttccctggctggcccactgcacccacgcactcaacgcagtggcttcgctcctcctccaggatggctggaggtgggaccattgccaggatggcctcaagtgcccagccctcctggaagactcagtttccctctttgtcccatgcagaggtgcagagattcattattgtgggaccatccgtgaagccggtgccaggatgcaccgggggtgtggatgaccggccgcccagccccagcacggcccggtcccgcatgccaccgccccgcgaggaccgctctccaagggctgcctggggccccgcgcccgtactctcctaacccggagctctcggcagcccattgctgcctggctacccggggaggaggaggcgcaggagtgagctgcccgagaccgcagggcaagtaagcggctgacggcggaaagaccctggggaaggggctttgcggccggctagaaacattttccccaagcggctccgcaaaatgaccagcctgttccgccggagcagcagcggcagcggcgggggtggcaccgccggggcacgcgggggcgggggaggcacggccgccccccaggagctcaacaacagccggcctgcccgccaggtgcgccgcctggagttcaaccaggccatggacgacttcaagaccatgttccccaacatggattacgacatcatcgaatgcgtgctgcgcgccaacagcggcgctgtggacgccaccatcgaccagctgctgcagatgaacctggagggcggtggcagcagcggcggcgtctatgaggacagctccgactcggaggacagcatccccccggagatcttggaaaggactttggaacctgatagctcggatgaagagcccccacctgtgtactccccgccagcctaccacatgcacgtgttcgaccggccctaccctctggctcccccgactccgcctccccgtatcgacgcgctgggctctggagcccctacaagccagagacgctatcggaactggaacccaccactgctgggcaaccttccggatgactttctccgcatcctgccccagcagctggacagcatacagggtaacgctgggggccccaagcctgggagtggagagggatgtccacctgccatggctgggccagggcccggagaccaggagagccgctggaagcagtacctggaggacgagaggatcgcgcttttcctgcagaacgaggagttcatgaaggagctgcaacggaaccgcgacttcctcctcgctctggagagagatcgattgaaatacgaatcccagaaatctaaatccagcagcgtggctgtcggaaacgactttggcttttcctctcctgtcccaggaactggcgacgccaaccccgctgtgtctgaagatgccttattcagggacaagctgaaacacatgggaaagtccacccggaggaaactgtttgaacttgcccgagccttctcagagaagaccaaaatgaggaagtcaaagaggaaacacttgttgaagcatcagtcgctgggggctgccgcgtcaacagccaacctcctggatgatgtggagggccacgcgtgtgatgaagacttccggggcaggcgtcaggaggcacccaaggtggaggaaggcctgcgagaaggacaatgccagcagctcttccttgccagagatgatctgacccggtgggggcagctggaaagcaacactggcccccagctgaagggcccagctgcagccagacagatggtgcttgagaaccgaggcccggtgatcctccagccacagtccagcccaaccactgccactttccatgggacttagaacttcggagttgctgccttgcaattggaggaaggacctggggcccctataggcagcagccaattacagccccttttgtagccaggcgttcctatggtcaaagagtggaaatgcaggaaccaacctccctttaaaaaaaaaaaaatccagaaagcagataaaagttggaatatggaaaagggcaagatgacccccaccagaggctctttggcctgaaggtggagtctctgcctccgtccgttctctatctctcctgtcacagactctgcctgaccccctttcctcagctcccttctggtcccccttcctcagctccctccgggcacttgtgcccttcccttccatgtcctcctgtatctcagccttcccccggggctgctggcccagcacacgagccctgcacccagcctgggtgggaggtccctggccagtcccccaggaactctgaggagctatgggctactgcaaagcatctgccgactgccctgccccgtctggcctcatcaggctgctgctgttagggatgggctcactcccagcagctcccggtcacccagcagggatggggagggtggccaccctggagctggaggactctggggaggcagggtctttaatttggcagcagacaaaagccagttctggagtcacaccacagtaggggctcacaggggctctgactccccagctggactggaagccctgctgtccgagggtgggcagcggtgggtcctggagtgacccctttgagcaggtgcagggctaaagagcaaggcggaaaggccgccagcctgggtgagcgcctagggcataagggcttgctgggtgcccctgagaagggcgggtgatctgaggaggagaactctgattctaggaacgcttacacggcactgaccactgccacggggagggaggctgcccagcccgtggccccgccctggacatgggagcgcgcagaccttccggagagccgggaagcctgggcaggcacgaggcttcggcgcggctctgggaggttgggagtggcatccgatccttggccgggccctggtggcctccgtggccccaagatcacaagggcgtagcgaaggcgagccggcgatcgcacctcgtcccgcccaccctgcccggactcgcaacgccgagcttggggagggccgggacgcgcagccgccgccgagcgtgaccaagtttggaaacgcgcgcggggccgggacgctggctcggggggccctgccgaggagcggtcgccccctccgctgctccccg

SEQ ID NO: 2932 - protein, 440 aa, Homo sapiens
MTSLFRRSSSGSGGGGTAGRGGGGTAAPQELNNSRPARQVRRLEFNQAMDDFKTMFPNMDYDIIECVLRANSGAVDATIDQLLQMNLEGGGSSGGVYEDSSDSEDSIPPEIRTLEPDSSDEEPPPVYSPPAYHMHVFDRPYPLAPPTPPPRIDALGSGAPTSQRRYRNWNPPLLGNLPDDFLRILPQQLDSIQGNAGGPKPGSGEGCPPAMAGPGPGDQESRWKQYLEDERIALFLQNEEFMKELQRNRDFLLALERDRLKYESQKSKSSSVAVGNDFGFSSPVPGTGDANPAVSEDALFRDKLKHMGKSTRRKLFELARAFSEKTKMRKSKRKHLLKHQSLGAAASTANLLDDVEGHACDEDFRGRRQEAPKVEEGLREGQCQQLFLARDDLTRWGQLESNTGPQLKGPAAARQMVLENRGPVILQPQSSPTTATFHGT

SEQ ID NO: 2933 - DNA, 2810 bp, Homo sapiens
cgcccggcccgcggcccggcccctgcggcccgcgcggagcggacgcgcgtggcgctgcccggtgggaccatccgtgaagccggtgccaggatgcaccgggggtgtggatgaccggccgcccagccccagcacggcccggtcccgcatgccaccgccccgcgaggaccgctctccaagggctgcctggggccccgcgcccgtactctcctaacccggagctctcggcagcccattgctgcctggctacccggggaggaggaggcgcaggagtgagctgcccgagaccgcagggcaagtaagcggctgacggcggaaagaccctggggaaggggctttgcggccggctagaaacattttccccaagcggctccgcaaaatgaccagcctgttccgccggagcagcagcggcagcggcgggggtggcaccgccggggcacgcgggggcgggggaggcacggccgccccccaggagctcaacaacagccggcctgcccgccaggtgcgccgcctggagttcaaccaggccatggacgacttcaagaccatgttccccaacatggattacgacatcatcgaatgcgtgctgcgcgccaacagcggcgctgtggacgccaccatcgaccagctgctgcagatgaacctggagggcggtggcagcagcggcggcgtctatgaggacagctccgactcggaggacagcatccccccggagatcttggaaaggactttggaacctgatagctcggatgaagagcccccacctgtgtactccccgccagcctaccacatgcacgtgttcgaccggccctaccctctggctcccccgactccgcctccccgtatcgacgcgctgggctctggagcccctacaagccagagacgctatcggaactggaacccaccactgctgggcaaccttccggatgactttctccgcatcctgccccagcagctggacagcatacagggtaacgctgggggccccaagcctgggagtggagagggatgtccacctgccatggctgggccagggcccggagaccaggagagccgctggaagcagtacctggaggacgagaggatcgcgcttttcctgcagaacgaggagttcatgaaggagctgcaacggaaccgcgacttcctcctcgctctggagagagatcgattgaaatacgaatcccagaaatctaaatccagcagcgtggctgtcggaaacgactttggcttttcctctcctgtcccaggaactggcgacgccaaccccgctgtgtctgaagatgccttattcagggacaagctgaaacacatgggaaagtccacccggaggaaactgtttgaacttgcccgagccttctcagagaagaccaaaatgaggaagtcaaagaggaaacacttgttgaagcatcagtcgctgggggctgccgcgtcaacagccaacctcctggatgatgtggagggccacgcgtgtgatgaagacttccggggcaggcgtcaggaggcacccaaggtggaggaaggcctgcgagaaggacagtaagagatgccagcagctcttccttgccagagatgatctgacccggtgggggcagctggaaagcaacactggcccccagctgaagggcccagctgcagccagacagatggtgcttgagaaccgaggcccggtgatcctccagccacagtccagcccaaccactgccactttccatgggacttagaacttcggagttgctgccttgcaattggaggaaggacctggggcccctataggcagcagccaattacagccccttttgtagccaggcgttcctatggtcaaagagtggaaatgcaggaacaaaaaaaaaaaatccagaaagcagataaaagttggaatatggaaaagggcaagatgacccccaccagaggctctttggcctgaaggtggagtctctgcctccgtccgttctctatctctcctgtcacagactctgcctgaccccctttcctcagctcccttctggtcccccttcctcagctccctccgggcacttgtgcccttcccttccatgtcctcctgtatctcagccttcccccggggctgctggcccagcacacgagccctgcacccagcctgggtgggaggtccctggccagtcccccaggaactctgaggagctatgggctactgcaaagcatctgccgactgccctgccccgtctggcctcatcaggctgctgctgttagggatgggctcactcccagcagctcccggtcacccagcagggatggggagggtggccaccctggagctggaggactctggggaggcagggtctttaatttggcagcagacaaaagccagttctggagtcacaccacagtaggggctcacaggggctctgactccccagctggactggaagccctgctgtccgagggtgggcagcggtgggtcctggagtgacccctttgagcaggtgcagggctaaagagcaaggcggaaaggccgccagcctgggtgagcgcctagggcataagggcttgctgggtgcccctgagaagggcgggtgatctgaggaggagaactctgattctaggaacgcttacacggcactgaccactgccacggggagggaggctgcccagcccgtggccccgccctggacatgggagcgcgcagaccttccggagagccgggaagcctgggcaggcacgaggcttcggcgcggctctgggaggttgggagtggcatccgatccttggccgggccctggtggcctccgtggccccaagatcacaagggcgtagcgaaggcgagccggcgatcg

SEQ ID NO: 2934 - protein, 382 aa, Homo sapiens
MTSLFRRSSSGSGGGGTAGRGGGGTAAPQELNNSRPARQVRRLEFNQAMDDFKTMFPNMDYDIIECVLRANSGAVDATIDQLLQMNLEGGGSSGGVYEDSSDSEDSIPPEIRTLEPDSSDEEPPPVYSPPAYHMHVFDRPYPLAPPTPPPRIDALGSGAPTSQRRYRNWNPPLLGNLPDDFLRILPQQLDSIQGNAGGPKPGSGEGCPPAMAGPGPGDQESRWKQYLEDERIALFLQNEEFMKELQRNRDFLLALERDRLKYESQKSKSSSVAVGNDFGFSSPVPGTGDANPAVSEDALFRDKLKHMGKSTRRKLFELARAFSEKTKMRKSKRKHLLKHQSLGAAASTANLLDDVEGHACDEDFRGRRQEAPKVEEGLREGQ

SEQ ID NO: 2935 - DNA, 2726 bp, Homo sapiens
cgcccggcccgcggcccggcccctgcggcccgcgcggagcggacgcgcgtggcgctgcccggtgggaccatccgtgaagccggtgccaggatgcaccgggggtgtggatgaccggccgcccagccccagcacggcccggtcccgcatgccaccgccccgcgaggaccgctctccaagggctgcctggggccccgcgcccgtactctcctaacccggagctctcggcagcccattgctgcctggctacccggggaggaggaggcgcaggagtgagctgcccgagaccgcagggcaagtaagcggctgacggcggaaagaccctggggaaggggctttgcggccggctagaaacattttccccaagcggctccgcaaaatgaccagcctgttccgccggagcagcagcggcagcggcgggggtggcaccgccggggcacgcgggggcgggggaggcacggccgccccccaggagctcaacaacagccggcctgcccgccaggtgcgccgcctggagttcaaccaggccatggacgacttcaagaccatgttccccaacatggattacgacatcatcgaatgcgtgctgcgcgccaacagcggcgctgtggacgccaccatcgaccagctgctgcagatgaacctggagggcggtggcagcagcggcggcgtctatgaggacagctccgactcggaggacagcatccccccggagatcttggaaaggactttggaacctgatagctcggatgaagagcccccacctgtgtactccccgccagcctaccacatgcacgtgttcgaccggccctaccctctggctcccccgactccgcctccccgtatcgacgcgctgggctctggagcccctacaagccagagacgctatcggaactggaacccaccactgctgggcaaccttccggatgactttctccgcatcctgccccagcagctggacagcatacagggtaacgctgggggccccaagcctgggagtggagagggatgtccacctgccatggctgggccagggcccggagaccaggagagccgctggaagcagtacctggaggacgatcgattgaaatacgaatcccagaaatctaaatccagcagcgtggctgtcggaaacgactttggcttttcctctcctgtcccaggaactggcgacgccaaccccgctgtgtctgaagatgccttattcagggacaagctgaaacacatgggaaagtccacccggaggaaactgtttgaacttgcccgagccttctcagagaagaccaaaatgaggaagtcaaagaggaaacacttgttgaagcatcagtcgctgggggctgccgcgtcaacagccaacctcctggatgatgtggagggccacgcgtgtgatgaagacttccggggcaggcgtcaggaggcacccaaggtggaggaaggcctgcgagaaggacagtaagagatgccagcagctcttccttgccagagatgatctgacccggtgggggcagctggaaagcaacactggcccccagctgaagggcccagctgcagccagacagatggtgcttgagaaccgaggcccggtgatcctccagccacagtccagcccaaccactgccactttccatgggacttagaacttcggagttgctgccttgcaattggaggaaggacctggggcccctataggcagcagccaattacagccccttttgtagccaggcgttcctatggtcaaagagtggaaatgcaggaacaaaaaaaaaaaatccagaaagcagataaaagttggaatatggaaaagggcaagatgacccccaccagaggctctttggcctgaaggtggagtctctgcctccgtccgttctctatctctcctgtcacagactctgcctgaccccctttcctcagctcccttctggtcccccttcctcagctccctccgggcacttgtgcccttcccttccatgtcctcctgtatctcagccttcccccggggctgctggcccagcacacgagccctgcacccagcctgggtgggaggtccctggccagtcccccaggaactctgaggagctatgggctactgcaaagcatctgccgactgccctgccccgtctggcctcatcaggctgctgctgttagggatgggctcactcccagcagctcccggtcacccagcagggatggggagggtggccaccctggagctggaggactctggggaggcagggtctttaatttggcagcagacaaaagccagttctggagtcacaccacagtaggggctcacaggggctctgactccccagctggactggaagccctgctgtccgagggtgggcagcggtgggtcctggagtgacccctttgagcaggtgcagggctaaagagcaaggcggaaaggccgccagcctgggtgagcgcctagggcataagggcttgctgggtgcccctgagaagggcgggtgatctgaggaggagaactctgattctaggaacgcttacacggcactgaccactgccacggggagggaggctgcccagcccgtggccccgccctggacatgggagcgcgcagaccttccggagagccgggaagcctgggcaggcacgaggcttcggcgcggctctgggaggttgggagtggcatccgatccttggccgggccctggtggcctccgtggccccaagatcacaagggcgtagcgaaggcgagccggcgatcg

SEQ ID NO: 2936 - protein, 354 aa, Homo sapiens
MTSLFRRSSSGSGGGGTAGRGGGGTAAPQELNNSRPARQVRRLEFNQAMDDFKTMFPNMDYDIIECVLRANSGAVDATIDQLLQMNLEGGGSSGGVYEDSSDSEDSIPPEIRTLEPDSSDEEPPPVYSPPAYHMHVFDRPYPLAPPTPPPRIDALGSGAPTSQRRYRNWNPPLLGNLPDDFLRILPQQLDSIQGNAGGPKPGSGEGCPPAMAGPGPGDQESRWKQYLEDDRLKYESQKSKSSSVAVGNDFGFSSPVPGTGDANPAVSEDALFRDKLKHMGKSTRRKLFELARAFSEKTKMRKSKRKHLLKHQSLGAAASTANLLDDVEGHACDEDFRGRRQEAPKVEEGLREGQ

SEQ ID NO: 2937 - DNA, 3482 bp, Homo sapiens
tccacctgggacctgtgtgtgtttgagcctgtgctttggttgtgcaattctgagcctgccccaccctcctagctccttcctgaaagtgaaatgctacagtctttgctcaagaacaaaggactcaagctcagccctgcatgttaataattttcaagtgtggccacttcctcttgcctggcctgactcaccctggctgctgcccattgtggctgccatggaaatacaactcgaggagaacccagaccaggacagggaggccatgttctgggtggcagtggagcctggcaaggtgccctcctggcctgggactgctgtggcagaggaagcatgaggtggggcctggcctgcccagctcagagctgaggtgcccccttggttttttacctccctgttccctggctggcccactgcacccacgcactcaacgcagtggcttcgctcctcctccaggatggctggaggtgggaccattgccaggatggcctcaagtgcccagccctcctggaagactcagtttccctctttgtcccatgcagaggtgcagagattcattattgtgggaccatccgtgaagccggtgccaggatgcaccgggggtgtggatgaccggccgcccagccccagcacggcccggtcccgcatgccaccgccccgcgaggaccgctctccaagggctgcctggggccccgcgcccgtactctcctaacccggagctctcggcagcccattgctgcctggctacccggggaggaggaggcgcaggagtgagctgcccgagaccgcagggcaagtaagcggctgacggcggaaagaccctggggaaggggctttgcggccggctagaaacattttccccaagcggctccgcaaaatgaccagcctgttccgccggagcagcagcggcagcggcgggggtggcaccgccggggcacgcgggggcgggggaggcacggccgccccccaggagctcaacaacagccggcctgcccgccaggtgcgccgcctggagttcaaccaggccatggacgacttcaagaccatgttccccaacatggattacgacatcatcgaatgcgtgctgcgcgccaacagcggcgctgtggacgccaccatcgaccagctgctgcagatgaacctggagggcggtggcagcagcggcggcgtctatgaggacagctccgactcggaggacagcatccccccggagatcttggaaaggactttggaacctgatagctcggatgaagagcccccacctgtgtactccccgccagcctaccacatgcacgtgttcgaccggccctaccctctggctcccccgactccgcctccccgtatcgacgcgctgggctctggagcccctacaagccagagacgctatcggaactggaacccaccactgctgggcaaccttccggatgactttctccgcatcctgccccagcagctggacagcatacagggtaacgctgggggccccaagcctgggagtggagagggatgtccacctgccatggctgggccagggcccggagaccaggagagccgctggaagcagtacctggaggacgagaggatcgcgcttttcctgcagaacgaggagttcatgaaggagctgcaacggaaccgcgacttcctcctcgctctggagagagatcgattgaaatacgaatcccagaaatctaaatccagcagcgtggctgtcggaaacgactttggcttttcctctcctgtcccaggaactggcgacgccaaccccgctgtgtctgaagatgccttattcagggacaagctgaaacacatgggaaagtccacccggaggaaactgtttgaacttgcccgagccttctcagagaagaccaaaatgaggaagtcaaagaggaaacacttgttgaagcatcagtcgctgggggctgccgcgtcaacagccaacctcctggatgatgtggagggccacgcgtgtgatgaagacttccggggcaggcgtcaggaggcacccaaggtggaggaaggcctgcgagaaggacagtaagagatgccagcagctcttccttgccagagatgatctgacccggtgggggcagctggaaagcaacactggcccccagctgaagggcccagctgcagccagacagatggtgcttgagaaccgaggcccggtgatcctccagccacagtccagcccaaccactgccactttccatgggacttagaacttcggagttgctgccttgcaattggaggaaggacctggggcccctataggcagcagccaattacagccccttttgtagccaggcgttcctatggtcaaagagtggaaatgcaggaaccaacctccctttaaaaaaaaaaaaatccagaaagcagataaaagttggaatatggaaaagggcaagatgacccccaccagaggctctttggcctgaaggtggagtctctgcctccgtccgttctctatctctcctgtcacagactctgcctgaccccctttcctcagctcccttctggtcccccttcctcagctccctccgggcacttgtgcccttcccttccatgtcctcctgtatctcagccttcccccggggctgctggcccagcacacgagccctgcacccagcctgggtgggaggtccctggccagtcccccaggaactctgaggagctatgggctactgcaaagcatctgccgactgccctgccccgtctggcctcatcaggctgctgctgttagggatgggctcactcccagcagctcccggtcacccagcagggatggggagggtggccaccctggagctggaggactctggggaggcagggtctttaatttggcagcagacaaaagccagttctggagtcacaccacagtaggggctcacaggggctctgactccccagctggactggaagccctgctgtccgagggtgggcagcggtgggtcctggagtgacccctttgagcaggtgcagggctaaagagcaaggcggaaaggccgccagcctgggtgagcgcctagggcataagggcttgctgggtgcccctgagaagggcgggtgatctgaggaggagaactctgattctaggaacgcttacacggcactgaccactgccacggggagggaggctgcccagcccgtggccccgccctggacatgggagcgcgcagaccttccggagagccgggaagcctgggcaggcacgaggcttcggcgcggctctgggaggttgggagtggcatccgatccttggccgggccctggtggcctccgtggccccaagatcacaagggcgtagcgaaggcgagccggcgatcgcacctcgtcccgcccaccctgcccggactcgcaacgccgagcttggggagggccgggacgcgcagccgccgccgagcgtgaccaagtttggaaacgcgcgcggggccgggacgctggctcggggggccctgccgaggagcggtcgccccctccgctgctccccg

SEQ ID NO: 2938 - protein, 382 aa, Homo sapiens; identical to SEQ ID NO: 2934

SEQ ID NO: 2939 - DNA, 36050 bp, Mus musculus
  misc_feature (1)...(36050): n = A, C, G or T/U
tcatagtcggctgctgcagacagtccgaagcagcccatatctccacacctggaattaaaacaaaaacacctccttataatatttctacgtttttaaaaaaagaacccaaaatccccaaattgtcacaaaaagtatgtgctattacagacatccccctgtcccacatgctttctttagattctcacatgcatgtaaaggcggtgaaaagattaatgcttacagaaaaaagctttaaagaataatattccgagtgtggtggtgcacacctgtttcctcaccagggaggctgaagcaggaggattacttcaagtttgaggccagcctcggcttcctagtgatatcaaggccaatttgaacctggcttaaacaaacgaaagtagtctctgataagttaatgttatgtgataattatgcccaaacaggaaaagtttcacagaaactcccacctcaaagcaattttactttgttcctttgagactgaatccagagtctcctgtgtgctaagtctatgtacttccactgagacatgccactgagccacaccctagtccttacttatcaccataaccaactgtgttgactgctgtctagacacttcgcagtcatcgccctcatcatcatcatcattattagttgttatttttgtcgttttgtttgttttttgttttctttttggtttttcgagacaggatttctctgtgtaaacaaccctggctgttctggaacttgctttgtagaccaggttaacctcacacacagaggtcaatttacctctgcttcccaagtgctcagattaaaggtgtgtaccaccacaacctggctcgtcatcctcattttatgtgtgaaggaatttttgttgttattacacagtcccagtcaactgaataggggctttgaccctgagattgtcttataccaaagctatgatggtcttaacctagctaacctttgtttggttttgtttttccagacaggatttctctgtctctaactgtcctggaactcaagatgtagaccaggctagccttgaactcaaagatccacctgcttctgcctccctagtattgggattaaaggtgtgtgccacagccacctggtgatattttcttttcttttttctttttgaaggctatctgtaatatcatctaaaactttgggttgcctagttcctgcccaggtccccttaaccagattatggcagagataggcatctcccttccctacaagatctccatccaggtcattcgttcatttatctattcaaaaaaataacttgtttaatttcctaaatatttcatatatcagaatttaaaactacatgctgcagggggctggggcggcagctcacctgtacggtgcctactgtccaaaaaacaaggacctgcctttgatccttagaacctacatataaagctgagtgctttgggcctggacagaagtcattgctcttccagaggaccagggttcaattccctgtacccacatggcaactcacaaccagctataactccagtcccagaggaatctggtgccctcttttggcctcttagggtactgcatgcacatggtgtacagacatacacatcaaataaaataatgactaaggttaataaaagctgagtgttgtgggttgtgcttgtaatcccagtgttagggagaattcttagggctcattggctagttggctgtctcacaaaaaaaggtggacagagactggggaacaaacaccgaaggttaacttttggcttctacacatatgattctatgtacacacacacacacacacacacacacacacacacacacacacccagacatacagcttgaaaagtcatagaacagacacgagtgaagctactacccagatgggcgtaatgtacaggagcagcagttctgtgtgcattgtcccctctgtccctgtcataggaaacacctgtcctggggtcttcatttcttttgctcttctttggtttgacccccccgcctccgcccaatatctctaaacaatatagtttcattttgaaaaactgtaaaacaagccccaacttagcctacccaggagttgccataaagccctcctctgtgaagactcctgggggatttaagctgaggggggatttaagctgagtttctcaggatcggagcatggactcagcttcccagagaagattccagcctgggaaggcaagggaagacctggtgagggaagataggtcatcgtggtggaaatttccaggtaggggtatagtctgacaaaaatatgttctcagagggaggatgctgtggggtactgagtatgttcatgtggctctggtagtggggtgaggtgctggggagcaggggcccccacagctctgggtgtccagatgcattgtggtagcaggtataggaggcactctgactatacctggctttctttacttactgttaacattttcttttccctctttgttccgttttgtctttcttccagatcatttgcccacctgcctctgggaggacgtcttgatggccgccaggctgtggtaaggatgagtgagcatccgagtgcagcttttcgtgtgggtagatacctctcttttaaacatatttttcttgttttcttaagcctccctgccattcctgccttattttaaaaaagatttcttcagtttttctcttaaatcctttttattaagttttcgatgtctgctcttgtgttaaaaaaatcttttaatttgtgtgtgtgtgcatatctgtgagcatgtgtgtgtgtatatgtatatatgtgcgtgtatgtgtgcatatgtgtgtgtatgtatgtatgtgtgtgtgtgtatgtatgtatgtttgcgctcccatgtgcccacaagccaaagtgattacctgaaggtcaggggagatgtttcaggatttagctctcctctttcaagatagatatggagattaaaatcaagttcaaagctcttacctactaagctctttcattagccctctggtttaatgtctagaattttctttcctttcttctccctcctctccctttcttttctcctttctttctttctttttccctccctccctccctctttctttctttctttctttctttctttctttctttctttctttctttctttctttctttctttctttccagacttgggtttctcaggctgtcctggaactcactctataaaccaggctggcctcagagtcagagatttgcccccctcttctgggattaaaggcatgcaccactcccccctggctctttctttcttgggtatgtgtgtgtgtgtgttttttggagaccaggtcacaccacatctacatctcttttctttttctgtcttctccatcatagcttgtcagatgctgaggaagcactgttgggggcccctggtctcagaagttttgtcagcctgacttctcgagagataccaccagaagaactatgtctaccttggtgtttctcccagaatgaatgctgtgtcccccagttccaggccgtgcactttcctttgaacatccgtctgcatcctacatccctgcccctctgcccacatgccgctccttcctgtttagcttggatagcaggctggctctggccatcagaaccattgctgaccttggctgtcttcacctgctgggcagacacaaagtgaggccaacatctggacccagaggagaaattagaggccatttgtggaagcactcaggaggccggaaggcctctgtccaaggccaaaacaccacaccattgttttccagttccaaacaggaaggggacctgggtgtgcttgggcaaaggaaagggaacctgaggtggatgtaagtgtggcaagtgatctcgagttaaaaaggggccacagtctcttctaataaacagcgtatactgttctgaatcctgatatgcgtgactaacctccgcatctttggtcctcagaaaccgtttcacaggctcatttttccccctttctgtttttaaagacaggatctcaagttcttcacgatggctttgaacttcctaagtagccaaggatgaccttgaccttcctgtcccctcctcccaagtgctaggattcctcgcatagcattccctgccaatcctgactgggtgtgcgactttctccttctgtcccttgtctgagaatgtatgcatttgtatgcaaagcaagaaagaatggcttcatacagagaaagaggaagaatgagagcaaccatttacaaccctctcctcctgtggtgtgtgtgtgtgtgtgtgtgtgtgtgtgtgtgtgtgtgtgagacaaggtcacaccacgtgtagctggcctgaagtttgggactctctgcctctttcctaattgctgggattacaggcggacgccacacctagctaaacctgggtttggagatgattccaaaagccacagttgcagccattagaccaccctgcctaccccaatgctttcatttgcttttggatgccattctgccaagggtctattactagtgttaatatactgcctggctcggtgggttgggggagggttggctgacccaggtagatctccttgaatgaatagcttcacaaacatattgcatacctcatttgtgtcatatcggcggtggtcccattgttcaaagagacattgcccaaagagacctggtccatcccttagctcctttaagtgggtgctgtgattcccatctgaatatcaggctgtggaatatttggtgacagtaaaaagtttctgaaagcaccgactcaggatcaaatgtgtaataaactcgaggcctttctggctgagcttccgtgagctgctcaggtcccccgtcactgtagactcggtttgaacacaagcatgcgtcacgctgcgagacaccaaggacagctgccagagtcccctccgctcggattggacactgaaatgttggcaagcgcagtgtttttactggacgtgcaaagctctccgctttggggtcagtaaagtgtctcagctgataaagatgcttgccacgatgacgatgcctaaccacttgagtttggtccccaagacccacatagtggaaggaaagaactgattccccaaagtcatctcctgacatctacccgactccccacctaaataaactaattaatgaaaaatttttttctttctttgttccaagcctggatggcactctcctatgtccttagacgttgtaaaatgggtaattgagttgttctagcccttagtatctgttgaagaccttcaagtaagggtccgaggtgggtggggctcagtggtagagaacttttctactatgctcaaggccttgggtttgagacctagtactgaaaaaaaaataaataaaatgacctcgagtagtacattgattaaatagtagagaaatagtcctgggcactggagtgtcacctcttcctgtgaccaatgatttcctgggagcctagctacatcaagaacagaaagttttgtgtcctcgtggggtcttgttctctatcctgccatcttgcggccatatttggaattgcatcctcttctgagaggcgaaactgaaatagctcacctagcttcagttctcctagctctacacttaccgggtcctttccaccagagcatctcagggtgtgatcgaggctctggctctcacttttccagtccactagaaaatacccactaatttagagcttacagcccaccagtggaggagacagtctttaaaaagcaaacaagtaaacttattgataaactgtggggcagaagtgggtgtaggaggcgggagaattttactgagaaggctacgaggagcagagttacccaaatgggagaaatttcaaattattaacgcatgaaagatgaggaggtggtcaggaaaagagcacatgccaaggtcctgaggcagaaacgtggtagtcactggggggccttcaacatgaagtgaatatgaatatattttatgaatacttcgtgactggaaagggttggaggggtggtgggagtggggttgcaaaaaatatatgcatatagcccagggtcatgcagcgcaagttaaagaccctgattttgtcttgagtctgttgggaaggtagtagaatttctattttttcaattaaaaaaaaaatgttttagacacagtctcattatgtagaccaggttggccttgaattcacagagatccacctgcctttgcctttcaaagctgtgtgccccgttacctgggtgagcttctatttgatggaggatagtttgacctgggcagcaggatgctggggactgctggggacctgggacagaggctgggtgaaaaagtttctttctcttgtaactgagtcagggtcttgctatgcatccacttggagaatcataattctcctcacctaggctgctgagtcggaggattaattacggctctgtgctatatctgtggctggttcacattgtgactttgtttgtttgtttgggttttggttttcaagacaaggcttttcttgtaagaacccgactgtccctctgacctttcaaattcaacaccgtgagtcttcctcccgttatttttcccaataactcacattcaaccactccctcttttttggacctcacccccctctggctctcaactttctcccacatccgaaaacgaccccacttttttttccaccccaatctttaacaggtgcgttggcaaccaaaacatccctgcctttctctaacgccccccacactccccacccctcttttttgcattcttgtttctttcccctgccttcaaaaccttccatctctcttttgttcaggatttcactaactccccaactttttctgtactcaacaaaatcttaaatcaaccatgcattaccctctatggaatcacggacatttcgaaactatctacatacccaccaatctcggacaaaaacttcgttctcaccatacaacctaaatttccataaaaacccccctggcgcaaccccccggctctaacaatctcttcccccctcacacatgttcttttaacagaatcgatctccaagcttaccctttttgaccggccctctcttttctctattcaaaaatttgttgtccccaactcttataaaacatataccctcgagtccccctttcgcgcccacccaccactcaatctcaaacccttcgnnnnnnnnnnnnnnnnnnnnaaccaaaaaaccaaaaaaaaaaaaagaagttactagattagagaggtgctttcagagtgagtgcatactgaacatttttagcaatttctagctaagtatagatttttttttctctaatggatggaagaagtttatttgatagcacaaaacaacagtgttctatccaaccacaaagaacgaaagaaataaaaaaaaataggtatgtggatagaagacaagatacctaaatactttattacatttatttatttatttatttatttacttgtgtgtttttgtagatacaaatgcatatggcacaagagtgccttggcacttgtggggaggtcagggctggttcaggctggttcactctgtaggtcctggggactgaatttaggttgtcaggcttagtatccattttaccaacaaaatgaaacaaatcaaagctgggcagtggtggcgcacgcctttaatcccaggacttcagaggcagaggcaggcagatctgtgtgagttcaaggcctgcctggtctacaggtctacagagtgagtttcaggtaggacagtgagacccagagagagggacagagggagggagaaagggtgagtctttgtatactaaaccagtgacaggatagttcagtctaaaacctctgtttattttttcttctgtcttttctttttggggatatgtcaatttaatatcagttaccaggcatcagcctggcctccgacaactgcggctcaggttctgttttctttggagctggcaaagtgaccacaggacagcagccattattctgaatggagagcattatacaaagaaatggcacgtcccctccagcctttatttgttatgtatttgatgatttcttcatatgatgtttattgatgactttcagagaaccacggtaccaagttggagcctctttttttggctgacacagagtcacaagagtcaggtctgcactgaactcactacgtggtggagaggatcttgagcttcccccatcctcctgcttctccctggaaggagctgggtccctgcagtatgcctccgcacccagcaggctttctgatctttatgacgataaccttgagtctaattaaagctgcttatggtctgactgatagttcctgaggccctgtgaaggaagaagtgtgttatggttgtgttagtcaagtttatgtctttgtgacccagtacctgagatgatcaatttataaagacaaaaggttgctttaaaaaaattattagccgggtgtggtggtgcacgcctttaatcccagcacttgggaggcagagacaggcagatttctaagttcgaggccagcctggtctacaaagtgagttccaggataaccagggctatacagagaaaccctgtctcgaaaccaccccccccccaaaattaatttttttgagattataatgtaattacataatttcccctcccctgaccccctcaagccttcttgtgtatctgcctgatttggtctcttttcagttcatggtttctttcccttaaaattttttttttaatgtttattttgttttatatatgagtgttttgcctaaatgtgttcatgggtgtgcttggtgcctgggaaggtcaggagagggcattggatcccctggaactggagttatgaatgtgggtaccaggaactgaggaacaccagaatctgggtactcccccagagcagtgggtgctcatgactgctgagacactgctctggccctgaggaaaggttcctttggtctcacagtgtagggggttctagcatgtgactgattgtccctctttggattgggcacgtgggtggtgagtcagcatatcatggcaggagcacagaatggaacagatcttgtcatgatccaggtgcaaaagagaaagaggagtagagccaggtcccaggtcctccccaccaaaagcctcggctgttctaaaactcatgatgtttaacagctggcctcaagctcatagagatccgcctgcctcttcctttcgggttctgagattaaagtcatgcaccactatatctgggctaggttccacattttaaaggttgtcccctcccccagtactggcctattggggtctacgcctttgacacatgggcctttatgagcagttggcatctaacctacagcatcatcatgagaacacgcagcgttaggtgtgaagacagatttagattctccctcgatacttacctatgaacctggactagattttatcatctctggatcttaattcccttacttttaaggaagagatggctaatagtgagtggtcacacctatggtgtgaagctcatgacttctcaccaatgcttcatcataccctatgagggcatgggttttgttggcttcttttccaagaaagaaagagagagagagagagagagagagagagagagagagagagagagaagttaagtcaggatttgatggttggtgtctttggctccaaagtcaagtggaaaaatctttttattcccttcatcttgctccttgcttggttccttacctacatctgaatatcagtgtgtgtggtgtgtgtgtgtgtgtgtgtgtgaacttagatggatggattttgggaaaatgtcataaaatatgcaaatagaagagacaattagggctggtgagatggcttagtgagcaaaggtgcttgctgccaagccggacaacctgagttcaatctccaagacctacacagtggagggagaggactgacgcccacaaactggcccctgacttatgtccttccatggaggcatgtaagtgcccacatacacacacacacccatacacataaaataattaaatgtcaaaagagagatggatgctatctcagtgaaacaaaacaaaacaaaacaaaacacccgtttcagaaacaattacagaatgcactaggtagacctgtttacacgaaatgaatgctctccaagccgcactcaggaggtcacatttcctgtctcaggatgaaaattcgcaggaattcggagggaaatattttagcagttattattgcaaattcagagtcagatgtgcttagcctcacaaggcaaactgtgttagcggaagtctacacagcattggatctgacaggcccccgcttttaagtaggtaggacgggtctggagagcgcagtcagctgagaggagcctggcatcatggagaagctgtttgtcttggtctttgctctcgccctgctggctttctcctcaggtaggttctcctctccccaagggtccgacctatttttacactgacataatgatatatagtgtatattgacatttttctgcgctctctttttgtaagagcaagcttgtagaattattatttgttaaagggaggtaaattcccttaattgaaaagtcttaaaaagtgtttgagaactattttaaaagaggctgacaagctttcaattgcgtcttcttctaaagttcgtatgggatcacagaagttttatattctcttattgtgctaatatcttttaatatttgcatgtgattaccccctcctcattaataattttgtgaccataccttctcagtgcgatgtgtgaagaccaggtttaacgcattcttactgccacagacaatagaacaggaaataaataaataaataaataaataaataaatatatacatatatatatatatattttttttaaaccatattcagggctgggggtgtagctcagttggcagagtccttgcccagcatctgcgaagaagccctgagcttagtctcaggatgacattaactggcatggtggtaaacaactgtaatttattgtagtattcagaaggatccgaaggtcaagttcctcccagctagacatggaattcaaacctggccagccgcaaaaccttgtctcaaaacacacagaagcaagcaagcaagcaagctagcaagcaagcaagcaagcaagcaagcaagcaagcaagcaagcagcacaacaaaacagaacaaagaaaaatcaaaccgcatgttacataaatgtccacttcaaataaatgggctattgcagggagtgcggtagatctgagttaattagaatagaaacaatgtaaaatttctgagtcctcagaaatgccacatcctttgggacagacttctttttgtattttaaaggagattagacttgcaaatcctcttgggaatactaaggtggagtgtggaatctctcaaatgcttttcctgctttttccagatgcctccccgattctgacagaaaagcaggcaaaacagctcctgaggtccaggcgacaggacaggcccaacaaacctggattcccggacgagcccatgcgggtgagcgcctggcccgggcaattttatagagctcgttatcttctaaatgggcattcattcgggctggtcgcagggtaggctgtgagatggacctttctgttacagactcaggagtaagacgtgtgatctccactcctggagatgctggctttatccacctacttaacacagaaatagcaggatctacagggatgtggagcgtgtgtcctagcgtcctgactgggctgccctgcatctccctcctccgatctgcttgttcaggagctgtttgctctctttggccgatgccaacccactgcctgcctcttggaccccaggccaactagactagcatccccagccggcgatggcctccctgagcagaatcttcatagcagctgcccctggttacagattttgtcctcagctctgccctgcagggttatgctgttttctcaaatcatctttttgaacccagggcatctgtgatagttaatattgtccacttaagaggatctagaatcaccttcaagacaagcctctgggtttgtctgtgagagttttaagactcagctaactgaggtggggaaaggcacattctaaatgtaagcagcaccattgaatggactggttctagacagccattaagaaaaacagaaagtaatctaatctgggcgtcagcttttatttattttttaatcgtatatatttttaattttttttgaaattataatgtaattgcgttattcccctctcgcatacctccccctttctctctctcaacttcatggcctccttttctttctttctccctcctccccaagacagggtttcagcctgtgctatgtataacagccctggaactcattttgtagatcaggctggcctcaaactgacagagatctacctgctaaagtggggttaaatgcatgggctaccatgctctacttttctttaattgttcttacacacacacacacacacacaaacacacacacacacacacacacacacacacagcacacacacacacacacacacaaatacagaaatacaacttgctcagtcgtatctatgtaatctcagggctaacaacttggtattagataaacctgttagggagggcttgtccctggagaagaccgtgtctccccctctcagaattccccggatgcctacagttctttgtctagggttgaagtctcccgagttctccttcttccacgttagcatgtccgtcggtgtcttccttgttcaagttttgtttggaaggccatgttgaccagatttcacggatgcaagctttctggagttgctaggacacacagtttcacagcaaactctcagttcctctggctcttacagtctctctggttcctcttctgtaatggtccccggccccttaggtacaggaattgtgtggagatgtatcagctgggctgggtcatttctttttacttcctggtggtggcagcaatatgaccagtagtctcagagtccctctgccctgcccccctccaccatgtatcaacaaacagtgaaggaaaataaatctccctcaagttgtatattttatcacaacaaaaaggaaagaaattacacagccctctttcctgctttcactttgggtgtttagtacaggatgtgagacctcggcaggctggtccagtctctgttttgggacctatcttggttcctgctgtggatggccggaagcactttggatatttatggtatttctgcgtcatgcaggtgaaagttgatcacaaggcaccagcaagctcggggagtctggacatgattgtctggctgtatctctgtggttcaggttggtttctttgttgggcccctgattcttctgttgaggctcccagggacctggaaccacgtttaccttctctcaatgcagactccatgtgcataatttgatatttaaaagactttttctctatataatttttaaaagatttgtttattgtatgtatatgagtacactgtcactgtcttcagacacaccagaagagagcatcaaatcccattacagatggttgtgagccaccatgtggttgccaggaattgaacctaggtcctctggaagagcagtcagtgctcttaaccactaagccatctctccagccttcccactgccccccaaagacttttactgggctggaaatgtatctcagtggtagaatgcttgtctggaaccaaggtcctagatttgatggccagcattgaaagaaaaacaacaacaacaaaaaaaaagacggtaaatgcttttgacgtaggtcgaactagatttgaatctttctgttcactttgcttcttctctcattcttcgtttgttttatatttacttatttagtgatgcgcgtgtgcacatggaggcagagggccacttgttggagctgggtctctccttctatcatgtatggctcagtcctgaactcaggttatcaggcttggcagcaagcacttttacctgctgagccctgcacatagcttgaatctcttgattctctaaatgtgtatgggggaagtttccttacattactatacaccattaccctcagctgtcattcctgcactggggatcaaatggagggccttgcatgtgtaaagcaagcattctacccgtaagctaacatcccgatctccgaggttttctctgacagcacctgcacctggctcatcttgaactctgtggggaaacagccgtggcccttcctgagggctctccgtaggcctatgtgcaggtgtttggaccgttgaagctcagtttcctgtctcctgtaacggtgcggcccttggccctgcactctgcattgtgtggtcctcttgcctcttagaagcttctgagtacacacactcctttgctgacactgtgcctcttcctggcttggggccatggcctgcctcaacccctgagaacatacacactggatttcagagcaaagcatagtggccctgtgtttgtcagcgtgccatgggaatgtcagtgaggtcccaggaccaggcagggtcaggggctggtggttagagctgcacagtgggtggacatcatccatgggcccttggctcctgagagtcatggcttccttccgatgtcccctttctccgatgttccctttctctctttctctcttgtgtttttttttttttttttttttgagacagggtttctcaacatagccttggctatcctggaactcactctgtagatcaggctgaccttgaactcacagagatccacctgaccctgtttcctgagttctgggattaaagacctgtgccaccatgtctggcttacacctatgtgttctgaaaaaggcttttgcagaatacatgtgtcagactatctgttattctttctccatgtttctctttgggccttgactggagccccttgggctacttggaatgatgcccacagaaggctctctcagggtcaggttgggtatcccctggatatcattgcaacatggttggggttaggtgttgcacacactgtggtggaaccatccaggggtttcgagcagggttctgataatgattaggtcagtgaatcagagattcagaatacagagcttcttagatgctggccttcagatgctgtacgtgggaaatagccagggacattgtaggacatatattacatctccttgtcatggacttggtggacttgggcaaatgagtacagttgatagctttggtgggggggaaggcatgtgcccctggaaactaagcctggagacccgtgtgcttactgtcaacttatgtagctgaaacattgactagtggggttgtcctatgggttatcttatgttgtttcttgctaagtgactggctagaagaaaactggttcagagaacagagaagccatggaagaagataatgggtggcgctttagggatgtgtgttgattcaaaataaaaacacttgtggagatttgcagtctctcctcatgaagggctaggtgcggtgtttgtcattgtgacccttggcttcaacactgaacaggctgacgtgtgcagagtcacaggcttattggacacaggttcaaattacccatgcacaccgtggccttgactgtttgaagcagttcctgtgtgtttcctgcccctgaccacgcactagtgatgctcaggctagcgtctgcctgggggaagcagagggaacaggacccttaatggaggaagttgggggcctggagggaaaaggaacagatattaagagggagagagaaggccctgggtgaggtgggagactttaaatgtatggaggcagccaggatgcaagtggataaggaccactgtgtggggaagagagagagtgaggccagagagaggggcaggtggatggtccctagtctaggaaacagctgacacccgggtctgaatacacttggccttgggtttgaagctagtttcgcagcgtgctgtttcctccgcaatccccaaccacaagaagccatccgtgttagcgggtttctggaaggaactgatactggcaggtgatacacagtgggggtgattgtggctgtcaagagaggaaagtcacccctagaatctagaagctgctgtcgtagagcagcaggccgtgactggctgtgacggttgtttatcattaactcgcctccagatttttggagatttgggagagtagggtctggacttcatgaacatggggtgggagctccccgagggctggcagttcatttaggtagatttgactgagttgtcacggtgactctactgtgtcagaggacttgggggcctaatggagcctcatggagcttacagaggcctagaccaaccccataacccaaccctgtttgtagacaatagcaagaagatggtgctacgggaagagagagcaggcatgaagacggggctatggggagagagagcaggcatgaagacggggctacaggaagagagagcaggcatgaagacagggctatgggaagagagagcaggcatgaagacagggctatgggaagagagagcaggcatgaagacggggctacgggaagagagagcagaacagaaaagcagtttgaagccgaaatgtccccacaggatcatgttttgaatatttgttcctcagctggcaccgagacctggctggtggtggaagaaaaacaaagcaaacacccccaaaacaaaaggggtatacctctgaaagttagacctggcccctggttcctgccttgctttaatctgttcctcggttcctcatgacaggaactcacacactctgttgccttgacctgataccggcgatgtcttccccacctagagggactaaataaattctaaaactgtgggccaaaataaatcttccataggtcttttaaagatctatttatttattttatgtatataagtacactgtagctgtactgatggttttgagccaccgtgtggtttctgggaattcagaacctctgcttgctcatgtcggcccctcttgctccagtcagccctgcttgctccagttagccctgcttgctccagtcagtcagccctgcttgctcatgtcggccccacttgctccagtcagccctgcttgctccagcctaaagatttatttattattatatctaaatacatggtagctgtcttcagtacacaccagaagagggcatcggatcttattacaagtggctgtgagccaccatgttgtttctgggaactgaactcaggacctctggaagagcagtcagtgctcttaaccactgagccatctctccagtcccctaaatcttcttttaaaaaagattttatctatattttcagttgttcatatttgcctgtacctgtgtggggttatgtgcatgtggatgcaggtgccccaaaaaagtcaggggtaagagattcccctggagatgcagtaagaggtggttgagagctacccatcatgggcaccgggaactgaactctggtcctctgggagagtggtaagtgttcttaaccgttggactgtctgtccaacctatatcattcctaggtactgaggtcataatgatgtgagaggaaccaacacggaatgacttctgccctgcaggagaggggttatagccctcttggctttttcttttctttcccagcacacctggcttctctgtttggctctggcactctggttgctaagtctcttaggacctccataccaagcacttcccacccccctgccccccatttctccttctgtttcacggctctgcagctgggttccctctgccagattcttagcattatgctgcttaatgccagagtatcccgggctctgccttcctggttctccagtcctgtggcttgactcttacctctttaccaaagagatggcagcaggcttctgcctgccgcctgacctctctcaggagctctggactggtttgatccaacttccctaactgtgcttgaatatctaataggcatctctgatgtcacggctccaaaaggaagttctgattttttactcaaaatggctactgctctagccttccacattggggtgcgtggcaccacccccaattctggagcccggcttctcatcttccattgttctcgtgacagtaggacaagcagtagccctgtggatgacattcctgcctccccactgagtcctctcgttccagcctttggtttcctgaggatctataagcacagaggcctgttgatccctcatcattattgtcctgactctgctccagccgtgctgggctgggctgggctgggctgggcctccaccatgtcaagcgaaggaccctccttggcctgctcacctgctggcaggggtggtaactaggtcgtgcttaggctttttctgcagtgtggtacagaataacacaattccattcaacacaatgtattccagctcgttaaatattaagtgatgtgtcttagaaccgtattacaacgtacttgctctttttctgaacaatgtgcattttaggtattaaccctatgtgataaaactctccacacatggggctggggaaatggctcagaggttaagagcacttgtctgcagtctgtaactccaatcttagggaattcattgtcatgctgtcttctggcctctgagggcaccaggcatgcacatggggcatggacatacatgcaggcaaataaccatacacatacggcaatgaaataaaactcatcatacacttgtgtgtttttcaggttcagtgggaaaaaaaaaagaaaattctcagagtttcatatgctttccattatactaggtactgccaaattgtaacaaggtctgccctcagtgtgtataagatctctctctctctctctctctctctctctctctctctctctctctctctcccctctctctctgacagggtctcactatgtagctctggctggcttgaacttgctaagtaggtcagactgatttcaaacccagaaatacaccttcttctgccttctgagtgctaggattaaagatgtgcgtcaccgtgctcagtggcttagtcagggtttttattgctgcacaaaacatcatgaccaagaagcaagtcggggaggaaaagggtttatttagcttacacttccacattgctgctcatcaccaaagaaactcacacagggcagaaacctggaggcaggagctgatgcagaggctatggagggatgnnnnnnnnnnnnnnnnnnnnnnnnnnnnnnnnnnnnnnnnnnnnnnnnnnnnnnnnnnnnnnnnnnnnnnnnnnnnnnnnnnnnnnnnnnnnnnnnnnnnnnnnnnnnnnnnnnnnnnnnnnnnnnnnnnnnnnnnnnnnnnnnnnnnnnnnnnnnnnnnnnnnnnnnnnnnnnnnnnnnnnnnnnnnnnnnnnnnnnnnnnnnnnnnnnnnnnnnnnnnnnnnnnnnnnnnnnnnnnnnnnnnnnnnnnnnnnnnnnnnnnnnnnnnnnnnnnnnnnnnnnnnnnnnnnnnnnnnnnnnnnnnnnnnnnnnnnnnnnnnnnnnnnnnnnnnnnnnnnnnnnnnnnnnnnnnnnnnnnnnnnnnnnnnnnnnnnnnnnnnnnnnnnnnnnnnnnnnnnnnnnnnnnnnnnnnnnnnnnnnnnnnnnnnnnnnnnnnnnnnnnnnnnnnnnnnnnnnnnnnnnnnnnnnnnnnnnnnnnnnnnnnnnnnnnnnnnnnnnnnnnnnnnnnnnnnnnnnnnnnnnnnnnnnnnnnnnnnnnnnnnnnnnnnnnnnnnnnnnnnnnnnnnnnnnnnnnnnnnnnnnnnnnnnnnnnnnnnnnnnnnnnnnnnnnnnnnnnnnnnnnnnnnnnnnnnnnnnnnnnnnnnnnnnnnnnnnnnnnnnnnnnnnnnnnnnnnnnnnnnnnnnnnnnnnnnnnnnnnnnnnnnnnnnnnnnnnnnnnnnnnnnnnnnnnnnnnnnnnnnnnnnnnnnnnnnnnnnnnnnnnnnnnnnnnnnnnnnnnnnnnnnnnnnnnnnnnnnnnnnnnnnnnnnnnnnnnnnnnnnnnnnnnnnnnnnnnnnnnnnnnnnnnnnnnnnnnnnnnnnnnnnnnnnnnnnnnnnnnnnnnnnnnnnnnnnnnnnnnnnnnnnnnnnnnnnnnnnnnnnnnnnnnnnnnnnnnnnnnnnnnnnnnnnnnnnnnnnnnnnnnnnnnnnnnnnnnnnnnnnnnnnnnnnnnnnnnnnnnnnnnnnnnnnnnnnnnnnnnnnnnnnnnnnnnnnnnnnnnnnnnnnnnnnnnnnnnnnnnnnnnnnnnnnnnnnnnnnnnnnnnnnnnnnnnnnnnnnnnnnnnnnnnnnnnnnnnnnnnnnnnnnnnnnnnnnnnnnnnnnnnnnnnnnnnnnnnnnnnnnnnnnnnnnnnnnnnnnnnnnnnnnnnnnnnnnnnnnnnnnnnnnnnnnnnnnnnnnnnnnnnnnnnnnnnnnnnnnnnnnnnnnnnnnnnnnnnnnnnnnnnnnnnnnnnnnnnnnnnnnnnnnnnnnnnnnnnnnnnnnnnnnnnnnnnnnnnnnnnnnnnnnnnnnnnnnnnnnnnnnnnnnnnnnnnnnnnnnnnnnnnnnnnnnnnnnnnnnnnnnnnnnnnnnnnnnnnnnnnnnnnnnnnnnnnnnnnnnnnnnnnnnnnnnnnnnnnnnnnnnnnnnnnnnnnnnnnnnnnnnnnnnnnnnnnnnnnnnnnnnnnnnnnnnnnnnnnnnnnnnnnnnnnnnnnnnnnnnnnnnnnnnnnnnnnnnnnnnnnnnnnnnnnnnnnnnnnnnnnnnnnnnnnnnnnnnnnnnnnnnnnnnnnnnnnnnnnnnnnnnnnnnnnnnnnnnnnnnnnnnnnnnnnnnnnnnnnnnnnnnnnnnnnnnnnnnnnnnnnnnnnnnnnnnnnnnnnnnnnnnnnnnnnnnnnnnnnnnnnnnnnnnnnnnnnnnnnnnnnnnnnnnnnnnnnnnnnnnnnnnnnnnnnnnnnnnnnnnnnnnnnnnnnnnnnnnnnnnnnnnnnnnnnnnnnnnnnnnnnnnnnnnnnnnnnnnnnnnnnnnnnnnnnnnnnnnnnnnnnnnnnnnnnnnnnnnnnnnnnnnnnnnnnnnnnnnnnnnnnnnnnnnnnnnnnnnnnnnnnnnnnnnnnnnnnnnnnnnnnnnnnnnnnnnnnnnnnnnnnnnnnnnnnnnnnnnnnnnnnnnnnnnnnnnnnnnnnnnnnnnnnnnnnnnnnnnnnnnnnnnnnnnnnnnnnnnnnnnnnnnnnnnnnnnnnnnnnnnnnnnnnnnnnnnnnnnnnnnnnnnnnnnnnnnnnnnnnnnnnnnnnnnnnnnnnnnnnnnnnnnnnnnnnnnnnnnnnnnnnnnnnnnnnnnnnnnnnnnnnnnnnnnnnnnnnnnnnnnnnnnnnnnnnnnnnnnnnnnnnnnnnnnnnnnnnnnnnnnnnnnnnnnnnnnnnnnnnnnnnnnnnnnnnnnnnnnnnnnnnnnnnnnnnnnnnnnnnnnnnnnnnnnnnnnnnnnnnnnnnnnnnnnnnnnnnnnnnnnnnnnnnnnnnnnnnnnnnnnnnnnnnnnnnnnnnnnnnnnnnnnnnnnnnnnnnnnnnnnnnnnnnnnnnnnnnnnnnnnnnnnnnnnnnnnnnnnnnnnnnnnnnnnnnnnnnnnnnnnnnnnnnnnnnnnnnnnnnncaattgttgaatttgtggtttttagctgatttgtagttgggcttttcatctttgaactaatgactgctttcaggcctttgtggcagattcatttccccaacatttaaaataaatactgaagtgtcatggaaaccggtgctggcttctttcttgttctcagtgtgtgtctattttggtggcttttcttcagtgatgacttcagctgctgtgagacagacactgacctttgcttttatgtagatttggctattatagcaaagacaatcgacacagacagcgagggaccctccaaggaggcatcagtgaggcagaaagcaacctcttcatgtattcatttatatatctcttcagcgagcggtactgaggccctactgtgtaccaggcgctaaaccacacacttggtgtaccgtggctgttgtcctaaaaaaacaaacgtacaaataaaacctaccctgggctgggtagcatgtgccatagtcctagctcttcagaagaccaaggtagagaattctcggagcctgggatttgtttgtttttgagagcctggttctctctgtagccctctccctacttaaaaattactttatggacttctttttattttatgtgtagaggtgttttgcttgcatgtatgtatgtatgtatgtatgtatgtatgtatgtatgtgtaccatgtgtgtgcggtgttcctagaggccaaaacatagatctaatctgcatatgaaagagaacacgagctgtttgtctttctgagtctgggttgtaacctcactcagtgtaagtttttccggttctgaaaaagcagtagatgctacaaagtgggtgggaatggtttatctgtgtgtgtgtgccttaggcccctgtcaggaggaatgttaaacatctcgttccacagaatacttcatttctttttcttttccttttctttttctttgaggtgggacctcacattaagcctaggctggcctggaatctattgttgcttggctggccttgaatgttggtgattctcctgtctcggcttgcagtatgctgggtttacatacagcacacagccatcacgtctggcttttctatgagtgtgtgttcacttatatgatgtacgtgcgtgaatgttttcctatgcagctatgcctggacagctgtgtgcacaagtaagccagaggtcctcagctgctctccacctgtgcttttgagataggggctctcactgaagccagagttccgcaagcctcaggatccttctgtccttgacccatcagtgctggaattatgggcatgcactatcatgcctgtttttgtttaatgcaggggctgggaactgaactcgggtcctaatcttgtatggcaagtattttgccaactgagctattttctagcttcatccccttttttcaaaaaaagatttatttattatatatatgtaagcacactgtagctatcttcagacacaccagaggagggcatctgatctcattactggtggttgtgagccaccatgtggttgctgggttgctgggatttgaactcaggatatcctatcctctcctctcctctcctctcctctcctnnnnnnnnnnnnnnnnnnnnnnnnnnnnnnnnnnnnnnnnnnnnnnnnnnnnnnnnnnnnnnnnnnnnnnnnnnnnnnnnnnnnnnnnnnnnnnnnnnnnnnnnnnnnnnnnnnnnnnnnnnnnnnnnnnnnnnnnnnnnnnnnnnnnnnnnnnnnnnnnnnnnnnnnnnnnnnnnnnnnnnnnnnnnnnnnnnnnnnnnnnnnnnnnnnnnnnnnnnnnnnnnnnnnnnnnnnnnnnnnnnnnnnnnnnnnnnnnnnnnnnnnnnnnnnnnnnnnnnnnnnnnnnnnnnnnnnnnnnnnnnnnnnnnnnnnnnnnnnnnnnnnnnnnnnnnnnnnnnnnnnnnnnnnnnnnnnnnnnnnnnnnnnnnnnnnnnnnnnnnnnnnnnnnnnnnnnnnnnnnnnnnnnnnnnnnnnnnnnnnnnnnnnnnnnnnnnnnnnnnnnnnnnnnnnnnnnnnnnnnnnnnnnnnnnnnnnnnnnnnnnnnnnnnnnnnnnnnnnnnnnnnnnnnnnnnnnnnnnnnnnnnnnnnnnnnnnnnnnnnnnnnnnnnnnnnnnnnnnnnnnnnnnnnnnnnnnnnnnnnnnnnnnnnnnnnnnnnnnnnnnnnnnnnnnnnnnnnnnnnnnnnnnnnnnnnnnnnnnnnnnnnnnnnnnnnnnnnnnnnnnnnnnnnnnnnnnnnnnnnnnnnnnnnnnnnnnnnnnnnnnnnnnnnnnnnnnnnnnnnnnnnnnnnnnnnnnnnnnnnnnnnnnnnnnnnnnnnnnnnnnnnnnnnnnnnnnnnnnnnnnnnnnnnnnnnnnnnnnnnnnnnnnnnnnnnnnnnnnnnnnnnnnnnnnnnnnnnnnnnnnnnnnnnnnnnnnnnnnnnnnnnnnnnnnnnnnnnnnnnnnnnnnnnnnnnnnnnnnnnnnnnnnnnnnnnnnnnnnnnnnnnnnnnnnnnnnnnnnnnnnnnnnnnnnnnnnnnnnnnnnnnnnnnnnnnnnnnnnnnnnnnnnnnnnnnnnnnnnnnnnnnnnnnnnnnnnnnnnnnnnnnnnnnnnnnnnnnnnnnnnnnnnnnnnnnnnnnnnnnnnnnnnnnnnnnnnnnnnnnnnnnnnnnnnnnnnnnnnnnnnnnnnnnnnnnnnnnnnnnnnnnnnnnnnnnnnnnnnnnnnnnnnnnnnnnnnnnnnnnnnnnnnnnnnnnnnnnnnnnnnnnnnnnnnnnnnnnnnnnnnnnnnnnnnnnnnnnnnnnnnnnnnnnnnnnnnnnnnnnnnnnnnnnnnnnnnnnnnnnnnnnnnnnnnnnnnnnnnnnnnnnnnnnnnnnnnnnnnnnnnnnnnnnnnnnnnnnnnnnnnnnnnnnnnnnnnnnnnnnnnnnnnnnnnnnnnnnnnnnnnnnnnnnnnnnnnnnnnnnnnnnnnnnnnnnnnnnnnnnnnnnnnnnnnnnnnnnnnnnnnnnnnnnnnnnnnnnnnnnnnnnnnnnnnnnnnnnnnnnnnnnnnnnnnnnnnnnnnnnnnnnnnnnnnnnnnnnnnnnnnnnnnnnnnnnnnnnnnnnnnnnnnnnnnnnnnnnnnnnnnnnnnnnnnnnnnnnnnnnnnnnnnnnnnnnnnnnnnnnnnnnnnnnnnnnnnnnnnnnnnnnnnnnnnnnnnnnnnnnnnnnnnnnnnnnnnnnnnnnnnnnnnnnnnnnnnnnnnnnnnnnnnnnnnnnnnnnnnnnnnnnnnnnnnnnnnnnnnnnnnnnnnnnnnnnnnnnnnnnnnnnnnnnnnnnnnnnnnnnnnnnnnnnnnnnnnnnnnnnnnnnnnnnnnnnnnnnnnnnnnnnnnnnnnnnnnnnnnnnnnnnnnnnnnnnnnnnnnnnnnnnnnnnnnnnnnnnnnnnnnnnnnnnnnnnnnnnnnnnnnnnnnnnnnnnnnnnnnnnnnnnnnnnnnnnnnnnnnnnnnnnnnnnnnnnnnnnnnnnnnnnnnnnnnnnnnncgcttgggttcagttcccagcacccatgtcaggaggctcacaatctcctatgtaactctagctccaggaaaatctgatgccctcttctggactcctggcacacctgatctatacacatgtgtacacatacagatacacaaatacataaataaataaaacaaatcttttaaaattggtccacacacagggtttgttttgttttttgttttttgttttttgttttttttttttttttaggagataacagctggcggcttcttctcctctttcttccaccaccactaccattacttccactacaaccaccatcaccaccaccatcactacaaccatcatcatcactatcaccaccaccaccatcactaccaccatcaccaccactatcaacaccaccaccatcacaaccaccaccatcaccaccatcaccaccacctccaccattaccaccaccatcaccccccccaccatcaccatcaccaccaccaccgacatcaccaccaccaccactatcaccaccaccacctccaccatcaccatcaccaccaccatcaccaccccccccccatcaccaccatcaccaccatcaccaccaccattattctaacattattttctcattcctttcttttccagcaagcacgctgacaggcagtgatccagagactgctggggcagagagaagcttaccttctatttaatctgaagccttagaaacaatgccttctgacctcaagaacacgtggctcttagtgagcaggccggaagttgccttggggggaaatgatgaacatgtattctgctccattttactaacccgtctacattgtgaaaactaacagcttgaagctcctgacggccttcctgccagttcgcaagtgtaggcagaacgccagtcctgccttagaagagggaagtgcatcacgtggggctgctgagtttcgggtcatctgcgttttcctttctttgctgaactaataaaggccagtgcttagtctttctgtgcgtctctttcctatgaggagagtactggagagtgaattcccttgctcatctttgtaaacccaggtccaggaagcatactaatctttattttttaagactaatttatctttagtttatgtatacgagtgtttgactgtatgtacaccatgtactggggagaccagaaagaggatgttaacccccaagaacaggggtaatagatggttatgagcctcagtgtgtgtgtgtgtgtgtgtgtgtgtgtgtgtacattgagaactgaacctgggtcctctgcaagagctggaggtgctcctaattattgagccatctctccagcccctatactcttcttcagtctatgaatggtgaggtggtgggtaagtgtgcctgctgctcagcctgatgacctgagtctgatccccaggacctacatggggcaaaagaattgacacctgtagatcatccctcattttgcacaagcatgctgaggcatgcacactcccactcatgtgcacagataggataggcatgcacatggaataaatgaacatgtagtgaaggtggaaaatgaaggggaacatgaactcaaagaaaatatttgcccaaggtcatcccaaaaagaaccatcagacaactaaatgcaaacctagtcctcctgcagaggagacgtttcctgtggaaagctgggtgcttctctgtgccccacagccctcagctgtacctcggtcccagaattagagactaaatagtgaaagctgaagcagggcaggggagttgccctgcgtggtgtcaggggtgggcctgtttaggaagagagttactggatctcggcatatcaatgtgaaagaaagccggcaggacaaaaatggagtcccctgtgtcagccctacaaagacaaaacagtaaataaaactggtagcttgtgcggcagggttttcccacatgatcgcctgatagtaactgtcatgaagaaatctagtagacctcagacaaaggccactgaaaccgtacacaggaagttcttgtggtggtttgaataggcctggcccctatagactcatgtgtttgaatgcttggccatatggagtggcattattaggaggtgtggccttgttggagtgggtgttgtaggcttatatttttcacaacctactttaataagagttcaacctcctctctagccaccacctaccagaggtagtggaaaagaaaggttattaggatacaggggaagcagacctgtttagagatagttcttggggcgattccaatctttcttagtccagtccagtagcaaacaccaaacatgaaccggcagctgtagttcagtctactcggcagacaccacacacgaatcagcaagacaattcaatccaggagaaatcacgcgcgtgcgtgcgcacacagacacacacacacacacacagacacacacacacaaagatgtaagaaaaaaagttaaaagtggatggacattaggacttctaattgcctttctttttttcttttttnnnnnnnnnnnnnnnnnnnnaaacagtaaataaaactggtagcttgtgcggcagggttttcccacatgatcgcctgatagtaactgtcatgaagaaatctagtagacctcagacaaaggccactgaaaccgtacacaggaagttcttgtggtggtttgaataggcctggcccctatagactcatgtgtttgaatgcttggccatatggagtggcattattaggaggtgtggccttgttggagtgggtgttgtaggcttatatttttcacaacctactttaataagagttcaacctcctctctagccaccacctaccagaggtagtggaaaagaaaggttattaggatacaggggaagcagacctgtttagagatagttcttggggcgattccaatctttcttagtccagtccagtagcaaacaccaaacatgaaccggcagctgtagttcagtctactcggcagacaccacacacgaatcagcaagacaattcaatccaggagaaatcacgcgcgtgcgtgcgcacacagacacacacacacacacacagacacacacacacaaagatgtaagaaaaaaagtaaaagtggatggacattaggacttctaattgcctttctttttttcttttttctttttggtttttcgagacagggtttctctttatagccctggctgtcctggaactcactctgtagaccaggctggcctcgaacagaaatccgtctgcctctgcctcccaagtgctgggattaaagtcgtgtgccatcatgcccagtgagaaattgcctttcatatttcatttttcatttagccagcacagcctctagccgggaagtgagtttgttcttttagatgcttagagataaatatggtccctgttcaaatgatcttactacacactgggagagacatatatgcattgagagagctgtactataggtcaggagttggcagacatttctgagaagggccccaacactctgtcacagtgggaggaggcacacagtaaatatctgttcaattgtgaatcctctccctgtcctgtcccaccccagctcagccttgaattgcaaacctttaccctggtaacacagaagcatggtattgttggatgtgagatgttcccagaagacttctgtactgggttggagaggtgactagtagagttgaccagatagcatgcagaaagccctgggtatggccactagccctccataaaactgggtgtggtggctcatgcctgtagctcccacaggagctagaggtggggggacctgaagttcaaggtcatcctcagctgcacagtgagtttgaagctcagcttaagttgcacgagaccccttgataataccaccagtgtggaatgaaaggcttgattgacagctagtggcacaactttagaagtcagtgcctacctgaaggaagtgggtcactgtaggcaggcccttggagtctgcatctggatgtcttgccccttcctgagcctgtaacttccctctgtaacatacagaatttaagaccctgcttgagatctctcagtatgaaactgaacccctccccccaggccgtgctcttcctccagatgtctcttttctctgagactcttcttttgtggctggatgtaatgcatgcagccatgttcttcaggcacggccctggggaaggacagatgttgagtcacacatgcaaactcccaagcctcaccagtcatctgaatcagtggggttttccaggagcatttggagtttgggaaccacagacccagagcttcctggaacttcatgaaaaggactgagtgtgttgggggatgtggatgctcattctaccattcacatcctaggaaatggtttctatattatatacttgacactgctctaggtccagggatgtgatgaacaaaatacgcaaagcagattgcgtgtgtgtgctcgcgcgcgcgcatgtgtgcgtgtgcgcgtatacacacaccccagaagtcaacctctttagtagtttgccattgtcttttttgaggaagcatcttttgctgagcctccatctcactgatggactggtctggctggctatcacgcctccaagtctccaccttccagagctgggattacaggtgcacactgccatatctgcctttttttttatatggctgctcgggatctgaactcaagttctcatgcctttgcagcaagggattgactgttcaaggtgtctttcctgcatctgaagggtggtttgtctgtctgtctatctatctatctatccatgcatccatatccacccacctgtctgtctgtctgtctgtcttgcatatatgtcatgctgtgaacctggaagtcagaggacagcttgcctgagtcggttctcttcttccaccacatggcctccatgtactgaacacaggttgtcaagggcttttctctgctgagacctctacgtagccctcttggaaccaacagaactcagtggtgtttcctactagcaccactgtctcattcccaccattccggcacccagaggagaccctatgtcccttaagtgatcactctctattttcccttctttacagtactcagcaacacctagctggttgttaggtatgggttgggtctattctggatatttcatatccatcgactcctataatcgtttttgactgacttcttacacatagcatgatttcaaggatatcattgctgtagcatgtatcactattccgttttggggccaactaatattccactgcatggccgtatatcccattccatgttcattaattgacaggcatttgggttcctcccacttcttagccctcctcagtggtataaacagtcaggtacatgtgtttgtttggattaactgttttcactttctttgggtctttacccagtgtgggcattgctgggtcatatgtgatttctattgagctttgttgatattctatgtgtgcaaattgtgtgtgtgcgagtatgtgtgtgcacaagcacgcacagccacacacctgtgtgtgctcaatggattgccaccacaggaccacctttggtgtgtgattccttagaaactccactcacctggctttgagtcagggtctctcctattaggccagagcggctggccagtgaggtccatggatccacctgtttctacctgtctacctgtgattacaagtgagtgtgccactgccctgcagtcagctttgaaaataacaacccaaaacctttcttagtgggttttagggattggactcaggtcctcagacttgcaaggcaaaccaaacacctttctgactgggccctctcctcagccctatattgaacctttttttttttttgaggcagggtttcggtttctctgtgtagccctggctgtcctggaactcactctgtagaccaggttggcctcgaactcagaaatccgcctgcttctgcctcccgagtgctgggattaaaggcatgcgccaccaccacccggcagtatattgaacttttttgaagcactcttctgtagggcagctgcctcatttctccctcccaacagcaacacatgaacacggggacttcccccacgaccttgccaataacttactattttccgcttaaaataattaagcactctccgtggtcgtgaaagggagtttgttgggattttgatctccatttctctaatgactaataataattctgagcgcctttccatttgtttattggccaattctgtatcttttagggggggaggaatctccaagcattgtgcttgttaaaaatttcaattttttttttttgctgttgatgggctaatgtttctgtcatgctgagagcaagcttatttggggctagctcagcttacttgagatggctcagcggttaagagcactgattgctcttccagaggtcctgagttcaattcccagcaatcacatggtggctcacaaccatctgtaatgggatctgacgccctcttctggtgtgtctgaagatagtacttatacacataaaataaataaataaatctaaaaaaaggggggggggagaacaaggcttactaagggcagaattttggataagttgtagaatgttctctgtcttggtttcctcttctatccagtagggataatggtagaacctactggcatgggttccagtgggtgaagctttaggaccccccccccccatggcccatggcaggcttttgctgtgtaacagacacccttattacacacgagctgaagcgaccaaggatgactgggcactaccaagattaataactgctgggaagcgatactgccgtgatgcaaccgtgggtaactggaaggctattttaggttggctgcacagggaaggcttttcggaggaggtgacacttgagctgacaccggaatgacaggaaggagccaacctcgtgaagatccatgtacaggaagagcactctcggctgagggaacggctcgggtaaaggtctgcagacaggaacaggccttacagaacagctagagggtgtgtgtgtgtgtggggggggagcaggtagctgcgttcccaccctgtgaggggcctgactgacagtcacagaaagggtagacagcttgcttggctcagggtgtgcaggctctctgctcattacccaggaaccttgaggcactgactgaggccatttgttagagacttgcatttttttcaaggaaaaaacaaaaaaaacccaaggctggtgggattctgagttgtctcagtggccgaggggctttgcggcaaggcttacggcccgagttcaatccctggcacccacatggtggaaggaaaggacagacacctgcaagttgtcttttgacctccagatgtgggttacagtacacgcataccttcccctactccacagagacatacagtacatggtgaaaacatttaaaaaaataaaaacccgagtggttctatttacttctgcgtagtaagacttctatgaaatgaaaaatgaaggagaatggatcctggtttcagatgtgcctcagggcagtgtgggggctgagctgaggtttccctcacctccttcgtactagctccaagatgaaagagagtgagggtgtgctcgaccccccccaccccccgaaactccccagagtatgaggtctgtttccccctcagcattatggttcccggagctctgagccgcccccttgctcctccattttgctagaaccttctcttcaaactctgtctagctcaggtttgattgaacgccctgcattgccaggcctgaggctctgaaaatgagtgatgttctgtgaagcaaaggacccactatgctgcctcctgcacatcacttctttctatggcttcatcctgcattgttctggtccttactccttgggcttaaaggggacacatggagaagagcttgggaatctagagccctgccacaccctgccatgatctcttctttgttggtatctacccacaaaccatagaggcaagtgcaatggctgagagataggctacctgggtttactgctggacacatcctcccttaattattaagcctttctaggtctcagtttgctcatctgtgaaatggtggcatagttctaactccatatagatgtcacatggataatttaaaaagtgtgtgtatatgtgtgtggatgtatacctgtggttccccaccaccctcccactaatgctgggtttacaggcacacctggatcctttttttttttaattatctttttcatgtatacatgtgtgtgtacatgggtgtttgcatgtgtggaagcctgagaaaggtccttagagactctccactatattaatggaggcaggatttctcacttgaactcagagctcacccacaggctagccagctccctctggaggtcaccggtaacagggggtggggtggggtacccacctggcgtttctgtgggttctaccttatcaaaactcaatgtttggacggctggtgcttcaatcactgggtcgtttcttcagcactccttctggttttcacatgggtgctaagagattggaactcagatcctcatacctgagcaggaagtgctcttattcactgaaccatctccccagccccgggttatatgggtgaggtgagggtgggggacggacggacacacatttatctttcttttcttttcttttcttttcttttcttttctttttttggtctttttgaaacagggttgctctgtatagccctggctgtccaggctggcctcgaactcagaaatccacctgcctccgcctcccaagtgctgggattaaaggcatgcgccaccacgcccgactcacacttacctttcttatgaactcccccagaatttagaaacctgctgagcctaggagccactcctaaggtacctaggaaattgttctctggaatggtctaaaggagggaaaattgcttctattgttcagaaggaaaaagggaaaaggagtgtgtgagtgcacgtgtgcataagtatgctgggtcaggtggtggagacacagcacgggccacacccactcaaggcgcactcggggattgcctgtgacaagggctagtttactgagcaagggtgggcccaggactgtaagggctcggctggccactaggggtcagtgtgtctccgctgcaggcgccagcgggcggctcacctgattgttgcagactcctgctgacagttccccctcttgctttgtatttggacaaaacaaaacaaacaaacaaaacaaaaaatcaccaccactgcagcagcagcagcagcagcagcagcaacaacaacaacaacagaaaaaatttctctgttgcaaggaagagagtctaaatagcctaaataacacactttctctttgaaggaaaatgcagaaggtggttaaactggctgtctttagcgtgcctgggcggagggagcatagctccaattgtggtttctggcctggttatcttggtgcctctgaggatgacacgggggaagggggtgtctgttgaattcttccttttctattttctgcctcagggaggaggagggtgttaataccgcttggcagttacatgaaaccgaggcggatggtgacggggtgtgttaacaaacaagggcaggaaatagtgtcatattttctggagagcgaaccgctcccaggagacagactacaggattccacccgaggagactcttggaaggggcggcggggcggataagaagtcctgcctcgagcgagcttccctcgcctttcactttctggtatctccgtacagtgacacattcggttttatccccagtctggctaactagacaaatcactgggcataaaaagaaaactatccactttgatctggtttcgttttggcaattagttatccctttgtcaagaatggcttctggaaataagacttcagggccggagcttggaacatacgcagaatctgggctgtgttgatttttatcctcgagtccaaccgctggttggccaggtgggacagggataaaccgtctccttgcctcggcttctctgccatcctccatcacatcttttctagttctttaagaattccacctgcctgccattgggttaatgatgaactttccctgaacttgaatcacatacagtgagcacccgaagactggctaggctgccccattctttttttttttttttttaaagatttacttatttttatttatatgactacactgtagctgtcttcagacacacaccagaagaatgcattgggccccattacaaatggctgtgagccaccatgtggttgcttgggaattgaactcaggacctctggaagagcagtcagtgctctttaccgctgagccatctctccagccctgccacattcttctttgtatctcaggtacgatgcctgatacattttcatcggcagtagggaataacaacaaccacaacaataatgataatagaaatatagatgaaaagattaaagaacaatagccttaattcctcaactggactctctctgctttctcttatttcacacggataccaggagatccggccaaggattccatcttcccatcatgatcactttatagactggcgggtggagcctgggtgtgtgttggggtaactagtagacctccagttctagaatctggcaagcaccaggcagggctgcagacctggcctctcatcatgtggcaggtctctcccttctgggacagctctgctgcacctgcattctatacactgcatggaacacatgctcacgtgtgtggctggaaatcctatgaacctttccgtgctctccctaccaagactaagcttctaaggctagggtgatggctgcagctctctggagagaaaggatgagtcagagctgggattcaggcctgacctgaaaagatggccacaggggctgggtcttcagagacactggacatagaatctgcagtctttgctgccatttctgaatggcttgtccctttacatttattgagagtcttacaccttcctcttttttcatttgcaaagtagatgtttccataaaaacccaacaatgcaaaccaggcc

SEQ ID NO: 2940 - DNA, 846 bp, Mus musculus
aacaaaacaaaacacccgtttcagaaacaattacagaatgcactaggtagacctgtttacacgaaatgaatgctctccaagccgcactcaggaggtcacatttcctgtctcaggatgaaaattcgcaggaattcggagggaaatattttagcagttattattgcaaattcagagtcagatgtgcttagcctcacaaggcaaactgtgttagcggaagtctacacagcattggatctgacaggcccccgcttttaagtaggtaggacgggtctggagagcgcagtcagctgagaggagcctggcatcatggagaagctgtttgtcttggtctttgctctcgccctgctggctttctcctcagatgcctccccgattctgacagaaaagcaggcaaaacagctcctgaggtccaggcgacaggacaggcccaacaaacctggattcccggacgagcccatgcggcaagcacgctgacaggcagtgatccagagactgctggggcagagagaagcttaccttctatttaatctgaagccttagaaacaatgccttctgacctcaagaacacgtggctcttagtgagcaggccggaagttgccttggggggaaatgatgaacatgtattctgctccattttactaacccgtctacattgtgaaaactaacagcttgaagctcctgacggccttcctgccagttcgcaagtgtaggcagaacgccagtcctgccttagaagagggaagtgcatcacgtggggctgctgagtttcgggtcatctgcgttttcctttctttgctgaactaataaaggccagtgcttagtctttctgtgcgtctctttcctatg

SEQ ID NO: 2941 - protein, 87 aa, Mus musculus
DGSGERSQLRGAWHHGEAVCLGLCSRPAGFLLRCLPDSDRKAGKTAPEVQATGQAQQTWIPGRAHAASTLTGSDPETAGAERSLPSI

SEQ ID NO: 2942 - DNA, 43765 bp, Homo sapiens
  misc_feature (1)...(43765): n = A, C, G or T/U
ttacttttttttaatgcatacttttgatgatgtggtagataatagtgtctatctggctcttatttagcattacaaaataacttttatatgttattaaaaagtcctatttaatggctacattatactccattctatgaatatagcttacagtgtgtataaccttacttttgttgtagctatttctaatattttgctattataaataattcctttgtttagggttatttccttagattctcagatttagttaaagaatttgaaaagtttaaggcttatgggaaagcttttaagaatagtagtctctctttgctaagtaaatttttatctggaaaatttacctgtgtagggacagattaatagaaattgccacacctgaggagatacactcttaattcactaaaagtaataataatatttgtggccaacatgtgttgatgagttagtaggtcctaggcactgtgttaagtttatcatccttattttacagatgaagaaaacctgcttgatatcacacagtcaggagtcaactgagttggggctttgaacttaggtttatctgatgccaaagtttgtgatgctcttcaaccatttagggtaccgcagagtgtggattttgaatcacctgcatcagcatcattttaaaatatagattctgtggtcctgaccaggtctctgaagtcagaatatgaagtggagctaggaatctaacttcttaacaagttccctaggtaattctttattcaaactttttttgtttatattttgaaatgtgtcacacatgcagaagagtttataaaacacatatacggttttaaaaataatagtaaaaacctggttaacatattgaagatttgagagctcttgtgtgctcacttgtttgatacaccttctcccccatcagaaggaactactatcgtaacttttgtggccttcatttctttgcttttctttatagatgcctaagggtatccctgaatgatacagttttgtttgaaagactgaaaagcccaaagctggcccttttgggaaatagcagtaaatcattgatatgtgaaggttcccagcaggaggtaagttgagcaatgtctttgggacagagtctggattcagtttctttgagaagattccacctggggaagtcagtgggcaaggtcttgggaagattgttaatcacagtgagggcatctgagcagggctgtggtttgaacagctggcaaaaatatggctgaagaggaaggaggctgcttttaatctttgcagctcagctcagggagacatgagtatctttagctaatccatgcaatggggtgtgggaatggggacatgggagaatggggagcccatcagctcctggttcttgtcttaatctgttttctgttgctatagcagaatacctgagacttggaaatttagaaagaaaaatggttcatctggctcatagctctggaggctgggaagtctaagggcatggtggcagcctctggtgagggcttttgctctgtgtcataacatgaacaaaaagctgaagggcaagccagtgtgtgcaaaagagaccacaagagtgatccaggctcaattttataacaacccgctttcaggagaactaactcactcctataagaactaatttactcccaagagaacaaactcactccccaaataacagtcttatccattcaggagggtggtgctcccgtgacttaatcaactcttaaaggccccacctcccaacaccatcagtggcaataaaatttcaacatgagttttggcaggggcactccaatcatagcagtcattaagataaagtacaaataagcttttgtatcaggctcaacaggcagcctgtccttagactgacttctttcattgagtaatatgcatttaagttttctccatatcttttcatggcctgatagctcatttttttttagtgctgaataatattccattgtctggatgtgccacagtttatttatccattcacctccagaagaacatcttggttgcttccaagttttgccagctatgaataaaactgttataaacatctgtgtgcaggtttttgtgtggacatgagttttcaactcatttaggtaaatgtcctgtcttttaaaaatatgtttttctctcttgtttttttaaaactttcctcctcatttttgctctatttttctaaaagatttccttagcttttttcttgactcaactgagttttaaatttctgctattatggtttttcatttctaagaagtattttggttaatttgttttctgaacattccttttttacagcatcttgttcatgttccacacaagcaaaactttggtctcttagaggatattaatgttatttatttattttctccaattgcatggtgtctgatttccccaagttgctttttcttttatcttttttgtctttacttttcatgtcagaggcgttctagatgtctgttgaacctcaggtgattctaatgcacctaatggcctgagaagcagtgctagagagtctcctaacctctccgaagcttaatcatcccaacagagatcccaccaagaaaagtgacacagttcagtatttttccccagaactagagcttttctcttccaattagaggcctagcacttttcctgaatgtaatgtcgtatgacagtagccttagaagtggtttcataaattattttgtgcatggttcactcccctagtatgtttattcatacccatcttacgtgattctgcctgtgccaatgctcctttgtccctgtttaagttggagagaagcctgacactggccatcaggaacatgatgctgaccttggctgtcctcacctgctgggcagacatagttgaggccaacatcctggacccagagtagaaattagagtccacttgtggaggcgtgcagcaggccggaaaggcccctgtccaaggccaaaacatcttaccattgtattgctgctgcagacaggaaggggtgtatgcctgtagaagtgctgaggatatgtaaagggaagccagggcctgcggtgttgacacggggcaagtcaactcacattagaaatgaaccatattttcttttctaatatatatatttcaacaataaagttgtgtgtcttaatacgtgtgattaatctatctttagtcattcaaaacatttttacaaaatagagtgcatatgcaaagagatttggcatagagaaggaggagaaataataacaatgatctccaagtagtagacttttattatgtgtcacgaactttacacatacctcttttaaatattaaccttatgaggtgaattttattataattctttttttttataagtgagaaaacagtgatttggaaagttaagaaatttccccaatgtcactcagctccaacgtaacacaggcaataagtttgagaatcagcattcaaggccaggtctgttgatgactctgctgcccacagtcataaccattataccacactgcctacacagtagaaactcagtcacttttgaatgaatgttctggcaggagcctattattaacttagatgcaatagcacccagatttggacacactaaccatcccattagaatcctctgtatcagttagctattgtcagagtaatgctatgaaacaaaccactcctagtcttagtggcttaaaataactgtcatttattctgagggatctgcaggtgatgtggctctgcttcaggctgtggtagctggaagtcagctgaaatagaccgggctgggttgagtgggtctcttttaagctacagatctgcataaacttggctcctttcttagctactttgcatgtaagctaattctgagactcagcttgaaggggcagtagccaacggggggaaggtctttttgtagcaatgacagacatgtcagagggcacacttaactgcacaaaccatttcacacccttgttagtgtcatgtctgccaccatcccactgcccaaaacaagtcatctggttgagtccaaagtcaagacatggggctgcaaagtcatgtggcagagagcataaatttggggtggtagtgaagaattgatgctaataattcaacctaccacacctgcccagacctaacatatgtctgcacagtatgcctgtaaataaatgtttacagggaagcaaagtgacgaggtctaacatatttcctatgtctatttcatgaagatcatcattgctgctgcatagagaatagattgaaggaacagggagggaagctgagatgccagctgggagcctggtgctgggtgagagataacagtggcctagatgtgggtggtgacaatagagatggaaggatctagacccataagcaccacacacagcttatggagttactatcattgctttaaagttactatcattattttaaaaaatactgtagtctagtctaccaactatactataaattccatatttttacaatgtatatataattctttacaatgtacatgtgaggtagacagtaaaaaagatgaaagcaaatatggagaggactgttagaatttatttaatttaccctgggcctaaaaaatgtcgacacattataattctcttgatggggacagatttggcatttttctatacttaaaaaaatgttcctttgggaggccaagggggtaggattacttgagcccaggagtttaagagcagcctggacaacatagcaagaccctgtttctaaaataaataaataaataaataaaaataattagctgggcatggtagtgcacgcctgtggttccagctatttgagaagctgaggcaggaggatcattggaacccaggagggtgaggctgcagtgagctatgcttgtgccactgcactccagcctgggcgacagagcgagaccctctctcaaaaaacaaaaacaaaacgaagttctcttgtctctaaagtttctatagttcagtgtgatgacatttagaactctagaatgttgggtttgtcatttgtcaatgacacttaaatatctgtgtaatgggacagttccttccaaaaaaaaaaaaaaaaaaaaaagggaaactcacccaaacaaaaagttgtgtttgggtgttgtgaatatgggtggtagcattattcctttataggcttttaaatgttatcaaatagttaacacaacaggtcctcaaataacattgtttccttcaacgttgtttcattacaatgttgatgagaaaaaaaattgattccagccccgggccactgtctgtgtggagtttgcatgttctttccatgtctgcgtgggttttctctgggtacttcggtttcttcccacatcctaaagctgtgcacgttatgttcattggtgtgtctgaattgtccccgcgtgagtgcgtgtgggtgggtgtgtgagagtgtgccctgcgatggaatggtgtcttctccagggctggtttctgcctggtgccctgagctgctgggacacgctccagccaccacggccctgaactagaataagtgggtaaatattaataactatcttacttgtttttattaatctttcttaaatacatgtatagccttcaacgtttgatattagaaatgttttgggtccttatttagaagtttggtgatgttttgtgaccagaaatatgccataggaactcacctcttgtgtatatcaattagcttatggtaaaattggttcattctggaccatttggcttaaagtctcagtttccaagaatttatcagcaataatgttatgaggacttactgtaccgctttcctaggccacaacatctgatgaatgccttcaagtagtacatcaattaaaataaaagtacggaaatagttttaggtgcagcagcaccctctctctccacctccagtagattctctggaatcgctggcaacttcttgaataattaaccttagtggccttgagctctttcccctgatcttagttgtccctggttccaccttctgctctgccaccttgtggatttattgggaattgcgtcttctactgggagccttgccgactcacctcgttaccccgctggggcttttcctgagaaccgggatggggtttagaagagaattctcaccgcctgagtgacactcacaataagacactttgctctttcggtctttctatattcctccccctctcgcttcttttaggacaacatccagaggccaagctgaagggcatttgatggccctgccagtatcacacctgaacggccctccccacccgagacttgcagcagcctcccagggtgtgatacaggctccgactctctccagtctcaccacctcagtccaccagaggttgccttatgctttaaaaaattataaaaataatacaagcttgcttaaagcttaccagtgaaggagacagatttttaaaaagtaaataaatgcaatacgtataaattatggtgagtgctgtgagatggagagtggtggtggtgggggcagggaactttttattaagaaggctggtaagggcaggctttcctgagtaggagaaatttcaaattgaaacctgaaggatgagatagatccagtcattaaaagagggagaaaaagcacatgcaaaggtcctgaggcgggagtgggcttgttaagctgaaagtgagtgagtgtggccagatggcagtgagcaggaggggagtggttggagtaaggttggaaagggcagtaggcacaaaaaacacagggtcctgttgtgcttggtagggattttaattttattctgactctcatgggaagatgaggaaagatcttatgcatggaagtgatgaggtctaactgatactttctatttcatccttgctgctacctggagaacagattgaagtgaacagggagggaaactagaatcccatttgggagcctggtgccagaagctgggtgagggaaacaatggcctagacttgggtggtggcattagagacggaaggatctagatccatgttgtctaatatggtagcactagccacatgtggctaccgagcacttgaaatgtataagtgtaaaatctacaccagatcttgaaggtttagtacaaaaaaaggcataaaatctctcattgacaacttgtttatattgattatgtgttaaaataataatattttggatatttcatcatgttaaaatataatattaaaatatttaacctttttacttaaaaaaagtggctactgaaaaaatttaaattacatatgttgtttgcatctgtggctttatgtttttatcggacagtgctgatatagacaaaagttgcaaaatttaaaaaaatatttttttttggagacagggtcttgttctgttgtccagacttgagtgtagtggcataatcattgctcactgcaggcttgaactcccgggctcaagtgatcctctgaccttggaatcccaaagtgttaagattataggtgtgagctactatgtctggccaaaaaatacttctattgtaaatttacattggacacattagaaatttatagctaagtatagattttgtttctggcccacagaagatatttatttgatatgataaaacaaaatagtgttctatccaaccacaaagagtaaaaggagtgaaaaatttgaatatacacatacaaaactcaagctgtttaacgtgacaatttttcttttttcttttttttttttttaaataatgctactagctgcacgtgttggctcacatctgtaattcaagcatttttggaggccaaggtaggagaattgcttgagctcaagagtttgagaccagcctgggcaatatggcaaaacccatttctacaaaaatatacaaaaattagctgggcatggtggcacatgcgtgtagtcccagctactagtgaggctgaggtaggaagatcacttaagcctgggaggttgaggctgtactgagccaagttcgtgcactccagcctaggtgacagagggagaccatgtttcaaaaaaaaaaaatgctctaaaattccttagttattgaaaattatgtgaaaacagaaggatgttaatagcagcagagtgcatgaaatcaaatattgaattttgagcaaatgggccaggtgcagtaattctttcttgcctgtaattccagcactttgggaggctgaagcaggaggatcacttgagcctgcgagtttgagaccagcctggctaacatagtgagcccctatctctgcaaggaagaaaaaaaatcagctgggcatggagatgcacacttgtagtcccagatactcaggaggctgagatgggagatcatgagctcaggaggttgaggctgtagtgggctgtgattgcaccactgcacttctgcctgggcaacagaatgagaccctgtctcaaaaaaaaaatttacttatatatatatatatttgagcaaatgaacatgtgagacaactttgctaacattgcatgatcttttttttcttgtttacaatctgctcaaaatatctttatgttgactgtgtgggcagcacattcaggtttaatatcagttacacattagcataaatttggagaaatacacatagggtattgttttcttttgagctggcaaagtgaccacagaaacatcagatcatctctctgaatacagaattttatccaaataaatgtcacatgctttccagacatattttaatcatgtattgaatttcttaggctgagagcagtgtctcatgcctgtaatcccagcactttgggaggctgaggcaggaggatcacttgagcccaggagtttgaaaccaacctggtcaaaatagtgagaccctgtctctacaaaataaaaaaataaaaaagttaattgagtgttgtggtgcgtgcctgtagtcccagctactcgggaggctgaggtggaaggatcgcttgagtctgggagttagaggctgcagtgagcctctgcacaccagcctgaagtgagacccagagtgagacccccatctcaaaaccaaaccaaaccaaaccaagccaaaccaaaccaaaacaaaacaagaaactttcttcatgtgatatttatagatgatttgaatttgaaatgacttcagcttcttaaacttttgttgtccttataaaaatacccttgaatctggagcatggctggttccagtcttatgacagcatgttgcgtgaggccctgtaaaagatgaggagttgtccctgaggttatggggcttactgggaagagcacatgatctaggtttgaagacagaagacgtaggctctaccttggcatccataatgtgtgaacttgaacttgatttcacatctttgaatctcacttttcttactgtaagatggaagtggacgatgaatagtactagctgccatgaaggtcatagctttcccctcatcctttattgcaccccacaaggtaggtgctcttatctccttttgacaggggaggaaactgaagttcagaaagggtaagtcacttacctaaggctacattgctagaaaaaattgaagctaggatttgaactctgtttttctgtctctaaagtcagctgaaaattgtttttccccactcatcatgccccttgctaatttccctgcctacctctgagattattgggaagatcaaattagactggtgaatgggctttagaaaaatgtcctaaaagatacaaatgtgtaatagatcatgaattctcaatgaaacaggagcataaatggaagctccagagaaacactcacaaacatctgtctggtgcttatctgtctgtttaaatgaagtgaatatcacatgttgctttttcagattcaagctctgaaagtcatattacagaggaacaatttccttcctcaggatgaaaatttacaggaattcggaggaaaatatttcagtggtcattactaaaacgctcagagtcagatacattcagcatcataccgtaagtcccgttagtcaaagcataaacaagcgcagggcctggcatggcttccttcaagttggctgactcagtctgggaggattcactcagcaagaggcagaggaaccaaggcaggatgaagacattgcctgtgctcgtgctgtctcttaccttactgactgtcttctcaggtgggcactgactccaaaaacagcctatttctatgctgacatgataaataatagtctatttgatatttaattttttaattttaaataatatatagtgtatatagatatttcaatgctctttcttttcttatttttccataagagtaggcttccagaatttttatcattaaagatgttatatattttttaaaaatctttaaatgtatttgagcactaattctcaaaaatgctgataaatcttcagcttctaatagcttattttagagtttatatgagatcaccaaaatttgatatatttttatgatgataatatcttttagaatttgcaagtaattatcaaagcacttttatactatcttctttgaggggttgtgatgatcaagtttaacataatcttattatcgctgggcatcttccagtaatgactttaaacttgatttagtgtagtgaggattaaaaaaaacttccatgaaagcaaacctaagacacacagaccagtgaactgaagattcattaaattaatacccactttcaaagagatggaccattgcaatcagtaaatatgtttaggttgtgcagcttttgctctgagtaatcatgttagaaacaattcaaaattccttcctgagccctctggaatgctgcatcctttgggacaggtccccgggaaagaactttcatgttttaaccaaaattgaacttgcaaatcttttgccttggactgttgagatggctcatgaactcctgagcctgagtgtccttaaggcaccttcccgacttttccagagacctccccgattttgacagagaagcaggccaaacagctcctaagatctcggcgacaggatagaccaagcaaacccggattccccgatgagccaatgcgggtgagtgctttgctctggcagttttaaagaaaatgtgatcatttgaatgccattcactatgaaactaggtgttggtcccagcatgggctgctagttaggggtttggttagagtttcaggtagaagatagctgcaatctcaatcttttacctatgcattttctcctttggaggtgccagcccgactcacctgttatgaacagggtaacttaaaatagaaaataatgaggccaatggtgggagttctagaatctggagagggctgctgaatgtcacccctgtcctgcttgctggggagctgttccctttagccaacgctaaccccatctcctgcctcttcccttgggccccggagcaggctggaccagcatccttggtcaatgatggtctgtccaggcagggagaatctctgccccagctgcctgaggggttctgctctgatctcatccctctgattttggtctctggccttacttctgccctgtggggtcatgatatccacctgtctagtctttctgaaccaggctccctctgtgagtagatgttactagaccctgctatgctggccccggacccaattcaggcctggcttggttcctcctgttgctaaaatgatactgactttggtggcattttagccccacccagtgaagggaagtagcagtgacccagcaaagttagaatgtctgggaagcctgtctgtcaggctggtctcccatcctggccccttcatctgggcacgatgcttatcctgttttccctgaatctccatgttgaggctcagaaggagctgcagtagcatttaccttcattcactgcaaaatctcgtgcataattagattatttcatttaaaggctcttattaagatatagtattgcacagtgacgaagagtgctgactttggggtcagactgggtttgaatctccctgtttactaactgggtaagtttggggaagtttcttcacatttctgcagctcagtactttcatctataaaatggggataataaatactattgctgatattactataatattattattataaataataatgtaaaataattattttatgatgataaaacaaagtactttttaagaaagcacttagaaagtgctcagcaaatggtaagtactcctctgagtattaagtacctggtacctgctaggtgccggggctgtaggtttctgctcaaagtctgtggtggagacagaagtaagcaaatggctgctatgcagtatgatttaagaacagatgacttcaggctcttagggatagatgtggcttttaatttttttttttttgtagaataagaggtatcttgggttttatcttgtatctagtagagaacaactgaaggatttttcaagttggggagtacagatctgggtgttagagagtttgagacaatgagagaaggggcccatgattgaagtctgggatcaccaacactcagaggtgggcaggggaagaggaaccctgaaagggctgagaaggaatgcagagagatagagaagccaagagagtgggggtggcagagcaaggcggggaggcataggaggggctggggtgaaggaagggcagcatgtgcacaactgtgatggggaggaggatgcctggagggagggatcctgttggcggctggcgggttgggggtgggggctctggctggccccctgtgcttttggcatgatgcctggagcggccattctgcagctcttcctcagggacccggcaggggctgggggagctggttgaagagtcctcaaagcagtggctcctgctcaaggtgctcgagaggcagctctaatgactcccacatctgccccctgacattttctgtgccagcatctgcacctggctcttttgaactctgtctgtggaataacagtctttgtcctaactgaggcattgtagatgtgggtgaacaggtgggtttgaattgctgcagcccgttgttgcaactgttgttgccaggctagactctggccctaaaaccctgttttgtgtggtccttcccctgctcaaaaacttctgaaagcttctcctctgtttgctttttcccacttgtggtcatcacctcccttaatccttgacagccctctgcttgcttccaactttgcaattttactgaatatctggctttttctggtttgttttgctcatcttttataggcttgaccaccacctgctcctcttaactgcctcgaacctacctgattagtttccatgtaactccttcttgcctcagaacctattgctgagccaccatcccatcctccatgtccctctcagagacacttcatccaatgtccagaatcctcaggcattcagtccagtttggaaaagtggtcatatgttttacaattgaaatgtgaaacaaacatgcagtcaattattgggtggctagtctacaccagtagttctcatccataggtgattatgccccctcatccccagggacatttgacaatatctgaagacatttttggttgttacacctgtgtggggcattgcttttggcacccagtgggtacagaccagggatgctgctaaacaccctacacagggcacagggcagcctccaccaccctctggcccaaaatgtcagtagtgccaaaggagaggaaccaagtctacacattgccaagtaaactttttcttgtttactctctgtcacgctgtgtgtgtctctctctgtctctctctataattgcactcacttgaacacacacagaattggttgaattaacaaatagtttctggtatcgtattttttctagaaatgtgtttcttaactttggttacattctggaaccacctggggaatttaaattccgatgcctgggtcccactcccagaggggtggcctggggtgggacctgggtatgggggatggggccaaagccccagtgatgccaacctgcagccgaggctgagaaccactgggctaggccatctgggagaaatcagccacgtgtgtaccagctcctgtggtctagttgggaacataaaagcatttagaaagctgttaaatgttgaactgggtggtatggagagtatcttagttgtttagacaaaaagagagagtgagagggtcaagtggtgcgtgctgatcaagatgtgcacttaattagattttatattgaccatgccctactaagcaccagggactgaggatgaaagataaaccagacattcttccttactcaaggtgcccattgtgtggaggtggagccagagtgccccagcctgatttgggctcactaacgaggttatctggtacaatggactgcggctctgcaagaagagagtctcgagccccagcctgatttgggctcactaacgaggttatctggtacaatggactgcggctctgcaagaagagagtctcgagctccaactggaaggaaaggggaggctgggaaggcttcccagaggaggtgcccacccagctgtggcttgaaggatgaccaggagttctcaggcagggcagggggtagggatgaggcaggaagaatattccacccagtgcatttccagtccatattctgccgctaactagttgtggactttgggtaagtcacttcctcttttggaagcctagttttttcatctataaaatgcagagtttggctggaatctggcctagattccagaatgtctaattccaggtctcatattgtagggctctggatagaaccttggggctgacacaggtttcctggtgccagtctgcaatgtgacagaagagccagaggcagcaggataccaacccaagcgaggagtcaggcagtttattctgaggcccctggaggggtatccctagaaaccacaggcctcctcacctcatgctggccctgcggctgggagtactccacatcctcgacttaccatttgacccactcacgcctcttgggtctccttgttgacttcttcttttatggatttactgaaagcaaaattaataatgccagtcagtggcatgtaaaaagaggtaatttactgcatttaactgtgactgtcaaaatgatcctggccctgcactcccagttggagcataagaggcagtggcctcaggtttgtccttgggtggtgaggagccgataagcctggacctctggccaggggaggccagaggctggcattagagctgccatacgggcccacatcttcatagcctgggaaggagggagttcagaggctaaggcctttgcctcctgggagccagcccttctggctctttgccttttgccaagacctcctcaccctccctgtttctgagtgtaggccaagaacagctgcgcacagatgtccctttgcttgggaagagggtgggatggatgcaccatgctgtgaatttggctgccagtattgtgtatgtgtgtatgtgtgtgtgaatgtgtgtgaggggtgtgtgtatgagggtatgtatgagggtgtgtgtgaggggtgtgtgtgaggggtttgtgcatgtgaggggtttgtgtgtgtgagggatgtgtgaggggtgtgtgtgtgagggtgtgtgtattcgaatgtgagaattgtatgaggggtatgtgtgtgaggagtatgtgaaggtgtgtgagggtgcatgaggagtgtgggagagcgatgcatgtgtgtgaggatgtatgtgaggggtgtgatggtgtgtgtgagagtgtgtgtgtgaagggtgtgttcaaggagtgtgtgtgaggtgggggtgtgaggggtgtgcgtgaggggtctgtgcaaggagtgtgagggtgtgtgtcagaagtgtgaggggtgtgtgagggtgtgtgtcagaagtgtgaggggtgtgtgaggggtgtgtgtgagggatgcatgtgtgagggtgtatgagggatgtctggcagtgtgtgtgttgaagggtcctgtgcaaggattgtgtgtgaggtgagtgaggagtatgtgtgaggagtatgtgtgaggggtgtgtgagggtgtgtgtaagggtgtgtgtaaggggtgtgtgtgagaggtgtgtgaaggtgcaggtgtgtgtgagggtgtatgtgtaaggggtgtgtgagtgtgtgagggtgtatgtgtaaggggtgtgtgaggggtctgtgtatgaggtgtgtgtgtagaggggtgtgtgtgagggtgtatgtgtgtagaggggtgtgagggtgtatgtgtgaggagtgtgtgaatgtgtgtaataggtgtgtgtgagggtctgtgtgtgagcagtctgtgaggggtctgtgtgtgagggtgtgtgtgtgggtgtgtgtgcgcgtgagggttgtgtgtgaggggtgtgtgtgaggggtgtgtgtgaggctgtgtatgtgtgagggtgtgtgtgaggggtgtacgtgagggtgtatgtgtgaggggtgtgtgagggttcgtgtgtgtgtgtgttttgaaaaggccttactgagtattttttcagaaggtctgagttccagccccctcttctactttcgccttgacttgcggacctgggttttgtggaatgatggcagatggcatcgccaggttgttgtgaggctgggttggaaggtacttggatgccacagcagagttgggtttctgtacacagtagggagctgtgcagggatttcaagcaggggaatgatgtgattagatcttgtttccaggggccctttagaggttcaggacacagcctcttaaatgcttgcctttagatgctgtcatacctgggaaataggaagtgacgttttggatgcgctattgcaccttcttgccatggtacccaggagacaaacaagtggacttgggcaaatgagtagagttagtgatcattggagaatgcatgtgcccttgagaacagagccacataccctcacactcacccctccacactaaatcaccgagagatgactggtcaggttattttattttgcttctccatgttaagggactgtgcaaaagaaaacacttccagagagggaagaggccattgatgagggtaaacaaatggtgctttaggggaggtgttaagaattcaaaatgaaaacaagtatgaagatttgcagaagtctctcctcatgaagatctactgagccatgtttatacacttaacacttggcttaaatattggcagaggttggcttctgtggatttataggctttttgaaaacaggttgagacaagctgtgcccgtgcacacaaagggctagactgtttgacatagatcctgctgattcactgcaacaagctgttcttttctgacttggtggtgggaaggacaaagtgcttttgagaagattgctgggtaaccctgtactgtagggagggccagtattcaacccagaggagcacggacatcttgcggggaacctagatgaaggaaggcaaggcccagaggggatggagagggagatcagagggagacagatggctctgggtaagagagaaggagggattttgagtgtatggaggcagcatatggaggtagcgtatgaagagaaaggtgggaaggtagaacccaaggagggcaacccactgaaattcccagcagcaggaataacggatacatttattttatggtaactctggacactgagtttaaatttgctttctgctctgtgctgttattacccactgctacccccaaaccttaggacaagtccgctacatacagaaactttgtgttagtagttccttgagggaatggtggatggcagggatgtgttgtatggggtggtgggggctgacaagagagcaagggaatggctagaatgtggaagtggcaggggtagagaaattggttatgagaatattcagaataaacttgaccccacattttcagagattttggagagtaggattctagacttcataggaatgggatgaaccctctccgaaggctggaactaatttgcttggagacatcccttttggaggcatgtaggtttcagctgaattgactttctactatttatttatttatttatttatttatttatttattatttatttatttttgagacagggtctcactgtgttgcccaggctggagtgcagtggtgcgatcatggctcactggagtctgggcctcctgggctcaagcgatcctcttgactttctactttagacaaagtggccccatcatgttagagagctcatggtataatgaaggctcaagatcctgacagagaaaaaacctctgtttggggagaaattaatgaagatcaggctgtgcgaaaagaagggctaggtttgtgtttagagggaagaaggtggaaaaatattctgagctttccttgaaggtttccttagtgatgaatgtgcttatgttgattttcaggattgtggtctaaactcttgctgttcaaaatatgatccccagctgggctgcacgggccttacctgggatcccgtcagacatgcagacccaggctcctctccatacttcccaaaggcaaatctgtgcctccctaacccccaggtgatccctgttcaccttcaagtcaagaagtgctgtcttggagaactgcaaaggtggtccatctctgctcctggcatcctaggactgggaaccagtacacgttagttttgttttgacacaattgatctctcttccttccttctgggcactctgctcacttggtttccactttcccagcatgcctcgcccaggcttctcattccacttggtggctcccgctgctaggtttcctttactggattcttggcctctgacagctgtttaaatgtcaggaggtcccagggctctgccctccatgtggctttaaagctcacctccctgctgacggcacacacttctatctccagcctgacctcttcctggtcatttacatgactgtctactccacaccactgtttgtactggaatatttaacaagcatttcagatctaacagccccaaacaaaatacactgttttaccctcataatggctgctgccttagcgttccacattgggctaaggggacaacctccaaatccagaacctgactacttctcgccctccactgccacctccaccacaattatctgtagagtggactaagcaataatctcttaatggtctccctacttcctgtcttgctgtcaatggagcagtcagagtcatttcttaaagtgtaaacaagatcctgaccctctcctgctcaaaacctgccaatgacttcctgtcttactctgaataaaattcacagtcctggtcaggtggggtggcatgcacctgtagttccagctactcaggagaggctgaggtgggagatcgattgagcccaggagttcaaggctgaagtgagctatgattgctgcactccaacctgggtaacagtaaaattctgccttcctaggactcacacccaaaacaatactatatgcagtatttatataggtacatggatatgcatgtaaatttctaaaagaagatctagagaggtaatcagttgacgtttaactgtatcatctcatttaggagactaggattaaaggtggtgatttgatgtttgaattgtatactagagtaattacttgtataattaaaaatatttaaacctttcacacgtactattgaaaaattggaaaccaagaaagagtcaaaagaataaaagaaaatcaactgtaggccgggtgcggtggctcacgcctgcaatcccagcactttgggaggctgaggcggccggatcatgaggtcaggagatcgagaccatcctggctaacatagtgaaaccccgtctctattaaaaatacaaaaaattagccaggtgtggtggtgggtacctgtagtcccagctactcgggaggctgaggcaggggaatggcgtgaacctgggaggcggagcttgcagtgagccaagatcacaccactgcactccagcctggacgacagagcgagactctgtctcaaaaaaaaaaaaaaaaaaaaaggaaaatcaactgtagtcctgtcccttctccccaaagacaggcatttaaaaaatgtatttctttttagtctttgtatatatttaaaaaaagtatctacaattttctatcctgttttttcccttaatattaacatacacatgtcctcatattattataatctatttgtaaccatgaattatcctcttttgttagatagttggatcatttccaatatctttctattataaacaacactcagaacatttttgtgcataaagtacttttaatattttaagttattttctatgggtatattccgagaaaatgaattactaggtccaagaatcagaatatttttaaagcttttagtatacattattgaattgctttccaaaagactttaaacaattcatgttatttttaatattcaatgtcactgtcttctgagagagtattgtagtagaggttttaaggtagagatatcatgggaacatgattatggtatcttgaattggagaccagtgggctgttgctggggcaggaggagtgggtgcagggagggaggaatagggataaaaaatgacgtgtagggttttgtataggcaacttagtgccattcattggcagtggaaatccatgagtagaaacaatgtatgtgggatgatggtgtgttgcaagttctcctcccatggcacctgcttttgtagttgtatcttctgctcttgtttacctggttaactcttattcatccccaaaaactcaccttaaatgatgtcgtttttgagaggcctttctggtgcctccccctagtaaatcagaacgtcccgctagcatagcaattgcagcgcaaggttgctatttttgactcttttatgtctgtctactagactgttctaaattacttgaggagatggactagttgttttacttctgggtccccaccaccaagcaccgtacagtattggcatttactaaatgattgttacttctttccattccttcctttgcttctctccagggtagaaattttgtgggatatagctctgctataaaacctggaggttattccaaataaatattttctatcgcctcacttagactcattaaatttctcttaatctactcaaattttaggaaagaggttgtttgccaattgctcgggtgagctgtggaaattctttaaaaagatgaatgtcttgaagcttgaataaagcttgaatgtcttcaagcttaaattatttcttttgtgattatatttgtaagtgcttgtgaaacctgggaatacacttttcttggaagtgttccattttggcctgtgatcctttaaggagtgttcttgttgggcaaatataaatcattttagctttattgtaagtagtctttgtaaaatatgctttcatgtttagctctttgacaaatgtatgtagtaactccattacccttttgttccccattacctcaaaggccagtttggagtgaccgaggtgtaaattgcccacagcactgttctgcctttctttaggacggagccttcagtattccagtgcagttaagttctgagccaccattctatatataggattaccttgcttgtactaatgagcaaaataatttttccaaatgctgatggatctttaattctgcaaaaatgtcacaggaagtattttgccttcttggaaaaaggtcctgccttgatagaataactgtccactttatgattctcagcataggtcaagttctggtgggtatttaagttcattatcacaccactccagagccataataaaggactacttttaatttctgctctaattactgagaaataatttacttaaatcattatagttggcatttgacatggaacacagatactggtttttgttttgctttgatttacacccccccacttggagaaaggaatctgaagaaattaaaactcattttccatataccccttcttccttggtccaggaacatttgagattatccttaatgttgggccatttctaactcagccagtgcaattgttgaatttgtggttttcagcagatttgcaatttgccttttgatttgactaatgattgctttttaagcctttgtggcatattcgttttcctaatattttaaataaatagtgaaatgtcatggaaaccagtgctcatttctttcttattctcagtgtgtgtctgttttggttgtttttcttcaatgattatttcagttggtgtttaggagtgtgaaatatatattactttttggtgcttttaatgtacatttggcctaggctgttataatgagcagactgacacagatatcaagaaaatttccaaggaggatttagcaagattatagggaaagagcagttatttcatttattcatttgctcctttatacatttttccagtgagctttgttgtggtcctactgtgtgccaagcactaaatcacagaccagatatactttggtcactgccataaaaaaactgggtggatatttggctgagagggacagagattaaatgagtaaagatgcaaatgagtatataattataaaaggtactgtgtatcagtagtgacattcgttaatatcaccagtgatctcattataaaagtctttaagtattgggaagttgccagccttctgtagcagatgtaagttttccaaaatctggtttcctctgggaagttctatttaataaatactgtaaattgtttttcttgaggtgacaggctcacttcattcattgtcaagatgtctgcccaacatgcacataaaacatgtatagccagttcaacaccagcaattgcacacatgcttttccttgtgaaaccccattgcactttgtcatacagcagaagtactgcctgcatatgcccttttgggtcactctatactgtttcaccagggcattcttcagggcaactggcattttaagaatgttttatttttattttcgtactgtaagtgcgtggtggggaaggatacgatgaccgctaatagaattgggtaccactgcctggattcctgctaaggcgccagtcattttacctgccactgccttggcacatcagtgaaaatgccaatacagcaggaagacaaataatgtctgagtattattctaaaaatagtttggccttatgggcctctgaggggagcacagctcacgctttgaagaatgatgctgtagtcttttcttcaacaagcctttacggaaagtttcctgtgtaccagttcctgggaaagatgctctccttcacaatcttgatgtgtactcagatctttgttatctaatagtagccaaagttaacagctagcatttaatgcattcttactatgtgccaagaatcatgtgccaaggccctgtagtattgggatcccagcaggagactgggtacctgaagagtgtttaataaagagactttttacaaaggcgtgggcaggattaaggcaaaccaacaagaaataataaaagatcagggttaacaacctctagaccataaaggggtaagggaggcagacggttcccggagctggagaggacagcctcctaggagctgtggccttcaggagagggatgcagccaattgctgaggtgaactgtggaaattctttaaaaagatgacattcaagctgaaatgatttcttttgagattgtatttatgcttggtgtggctgtgactccttggtgaggaactaggggattgaataccctggcctctccctcctcctaccttctaatccgttctggtgtctcccactgatgaaactcaaccagaagccacaggccaagggagtctacggcgacaattaatctgggtcccacggccaggcgaaaagggagacagacaggatctggagggacaaatgcaggctacttatttggcacaaaactttatttgcaccatttcatttagtatctaacccaaggaagcaagttaactaacttaaggaagcaagtgctagtgcaatccccatcttgcagatgaacaaactgaggctggagaggtaaagcaataatgacagggtccaggtttgaaggagactcagactcttagcttctattcctccctgtctggcaaacaggccagcaagaagcaggcagcaggggttccttcagtgtgctgcttccacagaatagttgaacaagtaaagttatatgctgggaacttgttgttccttatttacaagactgcacacggccttcctgttcctcccaattactattcttctggccaaagactccctggatagggaaggaactcagccccaaatccgcaaacatgttcagaaagcagccagggaatcactgttggatcccacaaggagccctctcaccatctgccctctaccccagctgacccagagactccctgccagaacactgagtgtattttgatgagttaaatgaaaacaacaaccataaccaaaacaaatccaaactgcatgggtcttgggggaaagaaaaaaaaaatcagaaaaattggacacttcataattccttcctttgcacattctttttctttttaaatgagtacatttgatgtagaatgcagagttcctagagggtgttctaaaaacttaaaaacttagagttctaaagtggacccgaccctttgttaaagccttcttaatgccataggaaggtttccatgatttagagtttttatgatattgatacatgccaaaaacaatttaatcacatcacaaatatgactgagtatgtctactctttcctaaggtgaaatgccacttctctgattattggcctgcagtttgtatggacctgttctatgcatactttgtaatggttcacatcctataattacagcaccaacatttccttcagggcaatataaaaaacacactccaagttaaaaatcattcccatctctatccattctctttggagggaacataaaagaacaagttttttgttttgagttttgtttgagcctcaccctgttgcctgcgctggagtgcggtggcacgatcatagctcactgaagcctcaaactcctgggcttaagtaattctctcgccttagcctcctgagtagcaaggactacaagtgtgcaccaccacacccagctggaacatccaattttgataccaatatatgagcgaacccacctacgacctccactaaacagtatgaggcaggccaatgaagtccccactctcagggagagctcactgccacacagaatgaccagggagggctatgctgggaaaagtctatggagctttggagacccagagaagtggggtcacagggaatctgagaaggcttcctagaggaagtaacatctaagctgaggcctgaaaagtcaggtaagagtgagatgggaaaataagaaggtacaggggtgttctaggcagagcaaacaacaggtgctttggaagccttagaaagaacagcaagcatggcccgttcagggaaagatggagaacaaagctcaagtgtattgatggtgagagaagaggctcaggagatgggtgtagctgggtcatggaaagaccttagccatattaaggaatcagaactttctcctgagaccagtgggaggcatacagacattttaagtgaagaagcaacgtgggtaaattaaaaaaatatatcactttgctgccgggcgcagtggctcacgcctgtaatcccagcactttgggaggctgaggcgggtggatcacgaggtcaggagattgagaccatcctggctaacacggtgaaaccccgtctctactaaaaattcaaaaaattagccgggtgtgatggtgggtgcctgtagttccagctactcgggaggctaaggcaggagaatggcgtgaacccgggaagcggagcttgcagtgagccgcgatggcgccactgcactccagcctgggcgacagagcgagactccgtctcaaaaaaaaaaaaaaaaaaaaaaaaattagtttgcaacaggatacagaaaaatcaagagggatttttcaacctcttctttataactttcttttttttttttttcatgactttaagaaagtaatatgtatcactgttgtgataaaaataaaaaccagtaaagctatttttgttctttatattttaaaaacccattctgacaaaagacttgaatagacatctactgaagaagatatacagatggcaagtaagcatgtgaaacatcgtacatcattagggaaatgcaacttaaaacaacgagatgccactatacacctattagaatggccaaaatctggaacatggacaacaccaaatgctggtgaggatgtgaagcaacagaactctcactcattgctggtggaaatgcaaaatggtgcagctactttggaagacagtttggcagtttcttacaaaaccagacgtactcttaacatacgattcaataatcacactccctggtgtttacccaaaggagttgaaaacttacatccacacaaaacctgcccccagatgtttatagcaattttattcataattactccaacttggaagcaaccaagatgtccaggtgaatgaataaataaactatgatacatgcagacaatggaatattattcaaccctaaaacaaaatgagctatcaagccacggaaagacatggagttaaacttaaatgcatattactaaagaaaagaaaccaatctgaaaattcaattacatgttctgtgattctaactatatgacattctgggaaaggcaaaactatagagacagtataaagatcagtggttgccaggggttaggcagatgagcaggcagagcaaagcagatttttagggcagtgaaactgttccgtgtgatattgcaatggtagtgctagggtttgtgtgtggtttgttcggccccatcaagtctcatgttgaaatttgatccccagtgttggaggtgtggccttatgggaggtgtttgggtcatggaggtggatccctcatgaatagcggtaatgagggagttttcactcttagttcccatgagaacggatttctgcaaagagcctggcaccttctctctttcttgcctcctgtctcaccatgtgatctgtgtatatcagctccccttcaccttctgccatgagtggaaacttcctgaggccctcatcagaaggagatgttggtgccatgcttttatttttatttgtgtttatttattttttttgagacaaaggctcgtactgtctccgagggctggagtgccatggtgcgatctcagctcactgcaacctctacctcctgggctcaagagatcctctcacctcagcttcctgagtagctgggactacaggcatgcaccaccacatctagctattttttttttgtatttttggtagagacagggtttcaccacgtcgcccaggctggtctcgaactccagagcttgagtgatctgcccacctcagcctcccaaattgctgggattacagatgtgagccatgatgcccgactgccatgcatttgtgtaataccaagagtgagccctaatatcaactatggactggtgatggtgctgtgtcaatgcaggtgcatcaactgtaaaaaatatcccatgctggtgggggatgttggtagtgggggaggctgtgcctgtgtgaagacaggggatatatgggaatgctatatttctgctcaattttgctgtgaacctaaaactgctgtaaacaataatgcctattaagaaaacaaaataaaacaataaaaaaaaccccacaagaagaagaaggtaggacaaggggtagtaagagcctgcagaggttgtggcaggggtctagccccagggctggggcctaagctgggcagaggcagtcgggctgggtagaagggattcaggagcattcacaggagttaggctgcttagatggtgggagggcaaggaagaggagtgcgctgaagcttcttgcttaactagcaatgtggtgccatgaagagagatatgatgaaccaccttcagtatgataggcagtacctgtaggccagagattgcactagaagatggagagggaaggaggagagcttataactgactaagacaagagaaatcacattttattcttttatttaagagaggtcctgttgttttatcatttttctgttttatgcatcacttataggacataatgccatgagtaacccatatacagaaaattcacagcctgaactggcttcggggaagaccaaggcgcatttggaggagaaggccagccctaaaggctggaagtgacattcctgttgataaagggcagagcacgagccaactgagagaggagatgcaaagacaaaaatttcatgcaaaggatgggtgtgttcagaggctgatgagctgcaggttgcagagaggccctatcatggccctctgttatttgtgctgtctgctcccttctctggtggtagcacacctgccactcctcatcatcctggtatggacgcggtttttctctgccctgaccccagtccgttctccaccctgctgtgccccactctgtgctcaaggagactgactcctgcagactgaatcccttggttccctggccggctggcttctgattgggccctgcaggatattgaggggaagaggagggagaggatgggctgtttgttccctgttccctccttgccttgcaaaggttgtgctgtgcccccaagaccacagcagccccacccacctggccccaggcctaatggctcctctaagggttctccacccttggccctgcaaacttagacatggtcatgacttccctctattgctagtccctgggtgctagaatattctttgatagttcccttaaccctactcacatggctatgaatgttcccttcattaaagtctcttcaggcaaccatttcagggagaaattgcgtttttgagaagcatagagattaacaaaggctgtcaatgaccattgtagaccaaggtgggagggcagggccactccctgctgttgggaggagtgggggaaggaggggaatcctacccaaagctgcactcatctgctggcttgcaagtacattatccagagccacagacaaaacccgtgggtagaggcagatgctgactccttgcaggtagacagcactggtgaaggcttcgaggaggaaggtggccctggtgggccacctttgacccttttgggtcactctgtcagagtggagcagggatgggggagggaggaggcatggggtgggaggaatgcaacacgcaggggtgggacagagagaggggtgaggagtctgcggcagccttggtggacaatggtgaagacctgacctagggaagtggcagagacgagggagggcatctgagaactattccggagatagcctcaacgtcccgatgctcagtcttatgttgagtttgagggtgagtgaggcaatgacagttggtgttctggagcgggttcctgagtagatggagatgctggccacagtaaggggcaggactggtcagggcaaggagctgctttctgttgtggacagattaatgtatggggctggccacctttcatatgaacagaatcatacaccgtgtggtcctttgtgacataagtgtcctaagtggcttctgtcacttagcataatgttctcaaggttcatccatgttgtagcagggatcactgcttcattcattttaattgccaaataatattccattatatggaagtagcatattttatttatccactcatttattggtggacatttgggttgcttctggtttttggctgtgacaaatgatgttggtgtgaacatctgtatacaagtttttgtgtggacatccatttttgtttctcttgggtatatacctacaagtacagttgctagccaggagtacgaatggtaattctaggtttaatattgtaaggaactgccagactatttttacaaaatgcttctctatttctagtaacatttttatattttaaagtctttttgtttgatattagcatagcaaccctagctttcttctgcttatcccttgtcttttaaaaaagatgattttatcagaaatgcatatagccataagtaatatattacatgatttagttacacatatttgaactttataaaaatagtgtcacactataaatgtagttacttggacttttcactcagtatgctatttctaagacccatctatgttgttgtatatagctacagtataatttatgttctctgctgtataatagtccatggcataaccctaacataatttattgattcattctcctgtaagtggctatttggcatgtttccagtgttttgctatgacaaatttattgctgctataaacatttttatatgcctttcctgatataagagtttcttttgttctcagagcaactagcaatataactattagctaggaacttgttagaaatgcaacttctcaagtcccacccaagacccactgagtcagaaactgtaagataggcccagcaatctgtgttgtaatatcagatatcaggtgactctgatatctgataaagtttgacgtccactgcgctagggtataaagtaggagtgaaatttctagattgcaggcaatcagatgttttctgaagttgttgtcccatgttttcatggaaatccacccgctcagcacttagtattgtcagacttctttattttgcccactgggtgggtcagtctgactggtcttccctacagagaggcatgggtgtggccgttgatttcttctccctgcctgtcctcccatcctgccctgtctagggagccagagccacaccacgcatattgatcccttggctgtcactgtgggtgaagccttcttcagtgtggtttgttttgacaggaatacatgcaccacctgctcgccctggagcatcgcgctgaggagcagttcctggagcactggctgaaccctcactgcaaaccccactgtgacaggaacaggattcatcctgtgtaaggggatcaggaccagcctcggtacgtctccttctctctcccggacctctgtctgagggagtggtgggggacagcatggcatgggctgggagactttccagaccatgcctcaggggggccagctggttagctggttatgggtttggaatgggggtggcaagagtgaggcaggagacatagtggggagccaggttgagaggagcactgggggacaaatgggggagcccaacttttattgaatcacaaagtgatcccgaatggggagggacgtgaccctatttgccatgcagaaaagctctctctggaccccaaatgtggagaagtgtgttttgttgagacttgggtctcttcaggtgggctcagcattcgtggagtcaacctgtgacatctaccatgatcatcaccactgtcatcaggatcaacaacttctttcccagatctcgctcctgttccctactgccttcctgcagccttcaaggctgccaatctgcccagcccaccctctgtctttccctttccctggggcttctgttttcagcccaccagcagggtactgcccagctttccccccacaccctgcatgcccccaactctgtacctctgtgcctagatgaggctgtttgcttctccctgtctgtcctcatcatcttcccccctttccaaatcctgttagataaggtagcaaaattccttcagagggtaagcccagtgaatttcatttctcctctgtaagttttgtggaccaagcaggacaagatataatcaggtagtttatctttgtggttaagagaaatcttatacctttgttgtttattttgtgctactgtgaattgacacagggacgctcctattaatcactctttataatgtaacataaattgcctcacatgatcctcttaataccctggtgtcattgcagggcatgcactttaaccccattttaaagaggaactaattgagcatgattaagctactaactcaggctaagcagtggttggtatgctaggcttctgaccaccgtaaatctgcatgctttatgtggaccgtgttgcacagtcctgtgtgtgtgtgggcatgaaatcactctgagggagctttcacagataatgagaggatcacctgctggcagtggaatagaagttctgcttttgaggggtagggatgggctacatccctcttctaattcttccagctgctggagctctattctaggtcagggttctggtgtgtctgggcttggctcccaactcccagggtgctggcctcccctgcaccaagggcctttgtcttttagcactggaagccctcacttggcttcttccagaaaacagcactgtggagtaattggatgcttaggctctggaactggccagagctgagtttgactttctgatttccagctctgtgcccttgggcaagttgcctaacctcactgactctttgcttctgcctctgtaagttggggtaataatgatgtctagggagcctggtgcatagtaagtgactctaaatataaaagcacttattactgttgtgcagttgaagttaaaggagaggtttctgggttcagccccacagtagtaccctccaagggtgactgaggcctctgattcttggtaggacaggcactgctggtgagcttgggtgcctagctcctgcaaacacagggttcctcagaggcctcactccaggcagctcccacttacataaagacaaggaagcggtggctggagaaatgtgttaacttggaattgggagtcagacagccttcagataatgagtcctccagtcactggctgaataaccttagaaaaaaatgcctaattgaataatttcctcatttgtaaaatgaggatagtaatggctccttccttatgattctaggattaaaaaagtcaatgcctggaaaatagttagtgttgccctggcacacaaaggaagtgctcagaaaatgatagctggatggtgtttgttcttccttggtctactcgtcctnnnnnnnnnnnnnnnnnnnnacaccaattagatcgatcaccatgaccatcaccacgaccactcttaccatcatcatcactgtcaccacgaccaccaccactaccaccatcactactatcgtcaccatcaccactaccttcatctccagcactagcacaccgaccaccactctcaccaccatcaccatcacccccatcatcaccatcatcaccatcaccaccatcatcatcgtcaccattgccaccatcatcaccatcaaccccatcatcaccatcaccaccatcagcaccatcaccaccaccaccacatcaccattatcaccaccaccaccataaccatcatcactattaccatcaccacaatcaccatcatcaccatcactgccacaccatcatcaccaccaccaccaccaccaccaccactatcatcattatcatcaccaccaccaccatcataaccatcatcactattaccaccaccacaatcaccatcatcaccatcactgccacaccatcatcaccaccaccaccactaccatcacaatcattatcattatcctaatgttattttcttgttctttttcagcaagcattttaatagacaacaagctggataatgtcgaagcaagacaaggctgcttctttcacttgtttttaaattgcagaaatggatgtcttcagacctcgtgaactgtgggcatatcaaagattgccttggaaatggcaaatatatatactgcttcattttactaacctgcatagatcactaaaaccaatagcttaaagcatagacacctcccaaaggtcttcccatcagtttgcaagagtgggaacaaccagaatcttacctggggttgatggagctggaactcccagaccaggagttggggcaggctgcctgccctaaggaatttggggaatccttgttcagagtagtgaagcataccacttggggttgctgagttgttttgtcctctatttttttcctcttcttttctgccctaataaacattggtattaaatttacttttagtggtctcttcctttctctctctctctcccccccacttttttttttttgagatggagtctcactctgtcactcagtctggagtacagtggcatgatcttggctcactgcaacctccgcctcccaggttcaagtgattttcctgcctcagcctccagagtagctgggactacaggtgcacaccaccatgctcagctaacttttgtatttttagtagagacggggtttcaccatgttgaccaggctggtctcaacctcctgacctcaggtgatccacccgccttggcctcccaaagtgctgggattacaggtgtgagccactgcgcctggcctctttctttctctgtaagtagtgaaacagagatttccctcttttgtttatctttgcaaatccagcatcagaaagcttactgttctttgaatgaatgaaaatacaaacaccctgcaattttgcacaagggttatgtatatatttatatacgtacatgtatatatatgagattatttgcctaaggccagttctggaactagggccattgcttaataccagttttacaccctggtcttttagcaaaggcaacatttcttgtgaaaagtgggttgtagttcctgtatcccggaggccctcacctgccccacaaccttggaatcagattggacaattagaggccaagaaaagcagaaatttggagggcaagggaaggtgggccaaatggttctggggaaagaagaatctggcatcctcaaaaaaaggtaaggagggatgcccacacaccctgggctacagaggagggcttgtcccaagggaggttgggtggtgtattagttcattattgcattcctataaagaaatatctaagactgggtaatttatacagaaaagaggtttaattggctcacagttctgcaggctgtacaggaagcatgatgatggcacctgcttggcttctggggaggcctcaggaaacttacaattatggtgaaaggtgaagtgggagcagtcacatggccagagcaagagcaagagaagaagcaggaagatgccacacacttttaaacaaccagatcttgtgagaacccactcactattgtgagaacagtaccaaggggatggtactacaccattaatgagaaactgcccccatgatctaattagctcccaccaggccccacttccaacattggggattaaatttcaacatgcaatttgggtagggacatagatccaaactatattaggtgtgttcatctagggataaaggcactgaatctctcaataacaataccaacattttgggtcaaactccgtacagatggtccctgagttctagtggtgtgaaagtgatatgccctcagccaaaaccatacttcaagaacccatacaaccgttctggttctcacttttagtacagcattcaataaattacatgagctcttcaacacttattataaaataggctttgtgttagatgatcttgcccaactgtaggctaatgtaagggttctgagcacatttacaggctaagctgtgatgtttggtaggttaggtgtattaaatgcaccttcaatttccagtgggtttattaggatgtaactgctttgtaagtctaggagcatctgtactatccccaacttataaatgaggaaactgaagtttacagaatttaggcagtgtattagttttctattttgactgtaattacttagtgggttaaaacaacacattaattatcttatgttctgtatgttagaagttcaaaaggagtctcctgggttaaatcaatgtgtcagcagggctgcattcttctcctctctggaggctcttggggtgaatctatttccttgtcttttccagctacccgcctttcttagctcatgactccttccatctcaaagccaccaatggtgagttgagcctcacatcatatcactctgcctttctcttctgcctccatcttccacttttaagggcctttatgattacactgggccctttagataactcagaataatttctctatcttaaggtcagttgattaacaactttaattccacccacaatgctaattcccccttgccatataaggtaacattttcgcaagttccagggattaggacctggacatctttggggaagccatcattctgcctaccctaggcagtttgttcaggttcatacagctggtgggtagaggacctgggatttgaacctgggaagcccctcactactatgcccgccctccccccatccacaaacactctgcacttctgccctaaacctgatattcttatgccttgaatgaagtagttttctaaaccgagttccttaagggatgaggatgtgtcttattaagactcaactgtactccttacctagctgggatgtcatctgagcacaggcaccttccatgggctctgatatttagtgctaggagttgcccagggtacatggaacaagggtggacagaaggctcccttgtccacctccccacctgcctctcagagtggtttacaagaagtaggagctgaatctgtgcatgtgggacagactgcacaggaacgagactagcacgtcccaaaagagagaaggagggaagcagaattaaaaataaatcagacccacagggagccaggttcctgcatccaggtagagaaggaagggcttccttgaggctctaaggaccctgggtatggcccacatatcaggggcaaaaacttcctttaagaacagagaggattcttcatcagtcacatacagcctggttctcagcctcctccccttgacacacaaaatgcatgtgtttacccagaacacactctcctgaggcccacagatgacggggctgaagcgcagcaattcacagtgagcttgctgcaacttcacaccccatttgcccaccaccaaagtttctcagaaggcaggtgagtgacaggaatcttcaaagtggtggacagcagtaattcataatccaggcttggagccagactacctgcattcaaattctggctccaccgactagctgtgtgtccttgggcaagctgattaacctctttgggcctgagtttccttactgtagaatgggaatgattacagttcttagttcaaaatgccattgtgataattagtttattgggtaagctctccatgaaactagctattactgtttttaaaattcttgggcattattctattaatcaagacaaatggtctgtctctgtctctctctatattttttaaaaaactattattttgagaagaggtggagagtgtttgggagacctagagtcaaaaggcctccctacttgagaaagggttgctttctttacagtattgcatcttcctatctatgaacctggtctatctctccatttacttaggccatttttatgtccatcattaaaattttgtaattttctttgtaaagatcatatatatgtttttaaaacagcactaatcctagatatattatggatctttatgaattataactggaattttcttaaatttacattttctagttggttattctggtatgtgtaggaataatattgatttttatacgttgttcgtatccaaaaacatccctcctgggaaggttctatggtggagcagaaacaactttaccaagagtacctccagtggggcagctcataggcttccgagctactggcagaagcattcagtcttattgactaatacatgtgcttcctgaaacagacagagaccattggctcctatggtctgggtttggggtcagaaaaaatgggcagaaggatttccagagggaattgcatttcatatttcatctaaccaacactgagacccttgcaaaaaagtgtgcttattcttcctagaggttcaaagagaaataagatcccagttcaaatgaacttactgtctagtggtggagacagatatataagcaggtagctgctctatagatcaggggttggtaaactttttctgtaaagggcctgatagcaagtatttttatcttgtgggccatgtcatctctgtcatacaactactttgctattgtatttgtaaagcagccaaagacagtaagtaaacagacgggcatggctactatagagagggataagtaggggacaagaatggggtaaatggtggactggaaagaaacctagttttcgagtaagacagattctaattgcaatttaaccttctgctgagtgctgtgattgggtgaatcacttaatttctccaagtctactgctcccctatctttatatgggatagtcatattggtctctatgttgctgggagtattaaatgggacaactgctaacattctattgagcacttgaaatgtaccaaccaccatgctaattccttcactgtattcatttaatcttcgcaataatcctgtgaggtaggtacaattattatccccattttacagatgtgggctcttgacgtttcgtgatggacccaaagtcattaagtcacaaaattaggaagtgacttgacccagaagccacagtgttagctctgtgctgtgcttcttcctcagggcccatagaaagtgtccatctcagaggctggcacacgtgagctggccaaaaaacattgcagtagttcccccatctgtggtttctctttctgaggtttcagttacccaaggtcaaccacagtctgaaaacatttaatggaaaattccagaaataaacaattcatcagttgtaaattacgcaccgtcctgagtaacgtgatgaaatctcacgccatcctgctgcttcctgcctggggcatgaatcactcctctgtgtgtactacctgccctcttagtcagttagtagctggctcaattatcagattgactgtcaggtggcattatggcagtgcttgtgttcaaggaacccttcttttacttaataatgcccccacattgcaagagtaatgatgctggcaattcagatatgccaaagagaaaccataatgtgctacctttaagtgaaaaggcgaaggttttcaacttagtttagaaaaaaaaaacgtgtgctgagattgccaagatctgtggtaagaacaaatcttctatctgagaaattgtgaagaaggaaaaataaatttgtgctagttttgctgttgcaccttgaactgcaaaagttaatggctacagtgaaaaatgcttcgttaagatggaaaagttctaaaacatgtgggtggaagatgtgaacagaaatgtggtcggcaattgggttcagtactatgcttggtttcagacatccactggggggtcctggcattccccgtggataagggaggtggctgttgtttgctggagcagtagctgagaggcacagacaatttcagtgtactgcatctccatgcctagctcattgctctgcgcataggtagcactcactaatatttatttgttgagaggtgagttctttccatgtcctgccccgccccaccccagcaccgaattgcaaacatggtacgatgataactctttccctgaggcagggggttagggatggctcaagacaaggcattactggaagcttacttagcaggaggggtaagaagccgtcttccaggtggaaaaggggaggaagggcatttcagtccgaaggaaaagctctttgcaaaggtgcacttttctataccacctggactttgttccaaacccttactcctccttcctctggcagctttctgtcatggacagtgctctgatgccagatgctggctggccttgattgcttttggcttctggacctggtttcttggtttgtttgttctttgcttatttattccctatgtgttaggcactgcactaggtactggagacgactcctgaaactcccacttaaacagaggccagtacggaagaacacattgtatgctgaatgttaggaaggagcagtcaagatgaccaggtatgtggccattgacaggtaccccacccagagctgcttgtcaggaaaggctctaggaagagggggtaccttcagtgatttgtcaaggaattagcttgacaaaggagatggaggtggggatacaaggcagggaagggtgggggtagaaggagtggcacaggatggaggtggagagagttgttgcaggcagaggcagcagcaagtgcaaagaccctgaggtggggaaggagcaggtttgtcctaggagcttccagaaggtcaccgtggccttccctaaagagtgaggggacagtgtctacaatgagcctgggaggcaggcaggggccaggtttatgggcctcacagacctttgtaaggaatttggatgttatcccaatgatacagggaaacagatgggcgtggaggcaggaagccacagtgagttctctgatttcaaatcagaacatgactctactcccacgatccagcaagtgtcatacagccaagttaccctcccccaaaacctgtaaactcaccggagagcaaataagctcctgcttcagaggttcttcaattgattaaaatcgacaagttatttcttgtgaggttcagttttcaggtggttgaaatctctctttctctttctaattacatgtgggccctgcttttcctccatccaggtcatgtcaatatgtgtcttgtcttctcttgtggtttaatgagtagctacagcttctgttctcaaagtgtgtcccccagacaacctgttagacatgcaaactctcaggcccaactcagatcttctgttaccagaaaggagtctcgacccagaccccaagagtgggttcttggatctcatgcaagaaagaatttacagcaagttgcagagtgcagtgtagtgaagatagcttattaaagactgctctatttcagagtaggctgtcctccaaaagcaagagaaggaacgcccctacctcaaatacagtgcttgcttgtataggataacagagctgaaaataatggccttatgtgctttactacaaaggctcatgacaagcttgtgacaggctgttagtattgttattctcttgtgtaactattgatttttgcaaaaatttatgaacctactattatctctaaagcaaaacctattcttaaactaagaatgctttttgttcttaagatattgggacatcaggagatttccttaagttctgagtcctgttccattagtaagcatcattaatctgttccctcagccataaacatcttgtgactaggagtgcatagcctcctgggattgtaacccagcaggtctgactttcttcaattcttattcaagatggagttaccctggttcggatgtctgtgacacttctgaatcagaaactctggggctgaggcccagccatctggattttcataagccctcctggtgattctgatgcatgctggagtttgggaaccaccagcatagagcttcctgaagcttcatgtgtggaaagaacctcaggctgacaagaaacaacagatgctattgaggttgtggagaaataggaacgcttttacactgttggtgggagtgtaaattagttcaaccattgtggaagacagtgtggcaattcctcaaagatctagaaccagaaataccatttgacccagcaatcccattactgggtacataccccccaaaatataaataattctatcataaagatacatggactcgtatgttcattgcagcgctattcgcaatagcaaagacgtggaatcaaccaaaatgcccatcaatgatagacttgataaagaaaatgtgctacatatacaccatgaaatactatgcagccataaaaaggaacaagatcatgtcctttgcaggaacatggatggagctggaagctattatccttagcaaactaatgcaggagcagaaaaccaaacaccacatattctcacttacaagtgggagctgaacaatgagaacgcatggacacagggaagggagcaacacacactggggcctgtcagggggtgggatgggggaggaagagcattaagaaaaatagctaaagcatgctgggcttaatacccaggtgatgggttgataggtgcatcaaaccaccatggcacacgtttacctatgtaacaaacctgtacatcctgcacatgtaccccagaacttaaaaataaaaattaaaaacaaaaggaacctgagactgagacctgggagacctgggttctcttcccctttactcatttctctaaaaaataaaaaatatattctgagacctactgtgtaccttgtactgctctaggctctaggagtgcagtgatgaaccagacagacaaggctgatttaaaaaaaaaggttgtaaaattcatataacataaaattaaccattttaaccattttaaagtatacgattcagtggtgtttagtacatttgcaatgttgcacaaccatcaccaccatttatcccagaactttttttttgtttttttttttttgttttttgagacagagtcttgctctgtctctcaggctgaagtgcagtggcatgatctcagctcactgcaaccttcgcctcctgggtttaagcaattctctgcctcagtctcctgagtagagtagctgggactatgggcgcatgccaccgtgcccagctaatttttgtatttgtagtagagacggtgtttcaccgtgttggccaggctggtcctgaactcctgagctcaggtgatccacccgcctcggcctcccaaagtgcggggattataggcgtgagtcactgcgccttgcctatcccagaacattttgctacccctaaatgaaaccccttactcattaggcagtcactccccatttctccctccttccagcccctggcaaccaccaatctactttctatccttatgcatttgcctatttggggtatttcacataagttgaatcatacaatatgtggccttttgtatctgacttcttttactcagcacatgttcttaaggtcagcaatgttgtagcatgtatcagcacttcattcctttctaggactgaataatattccattgtatggttataccacattttatttatccactcttcagttgatagacatttgggttgcttccaccttttagctattgtgagccatgctgctatgaacattcttgtacaggtttttgtttgagaacctgtttgcaattccttagggtatataccttggagtagaattgctggatcgaatggtaattctctgtttaacttttgaggaaacaacaaactattttccacagtggctgccccattttacattcccattagcaaggtacaagtgttacaatttctctatgcccttgtcaacaacttatttccccctgccaccccctttttttaaattaaaaattaagccatatgggtgtgaagtggtagcttactgtggttttgatttgcattcccctaacaactaataatgtcagcatcttttcatgtgctcattggccatttgcatattttctttggagaaatgtctatttaagtcctttatccatttacaaattctgctgatgtttttgtagtgactagagcacagcttactcagggtgaaatcttggacaggttactgaacctttcctgcctcagttccctcttctgtaaaatgagggttaaggacagcatccacagtaaagggtggttgtgaaaatttcatggctcactgtgagtaaagcttttggaactttgcttaggacattatcggtttgcactctgtaattgataccccttattatacatgagatgagtctaacaatagtaactgaataagaaattaccggagattaatacctgctgggaaatatataaaaccgtgatgcaacagagtgactggaaggctattttaggttgggtggacaaggaaggctttttggaggaggtgacatttgagctgacaccggaatgacaggaaggagccgactgtgtgaagacccacgtacaggaagggcatttcaggctgagggaatggctcagggaaaggtcttaggcaggaacaagcctggccagttcaaggggctgcttgagagaaggccagagctgcttgggtggggga

SEQ ID NO: 2943 - DNA, 732 bp, Homo sapiens
atgaagacattgcctgtgctcgtgctgtctcttaccttactgactgtcttctcagagacctccccgattttgacagagaagcaggccaaacagctcctaagatctcggcgacaggatagaccaagcaaacccggattccccgatgagccaatgcgggaatacatgcaccacctgctcgccctggagcatcgcgctgaggagcagttcctggagcactggctgaaccctcactgcaaaccccactgtgacaggaacaggattcatcctgtgtaaggggatcaggaccagcctcgcaagcattttaatagacaacaagctggataatgtcgaagcaagacaaggctgcttctttcacttgtttttaaattgcagaaatggatgtcttcagacctcgtgaactgtgggcatatcaaagattgccttggaaatggcaaatatatatactgcttcattttactaacctgcatagatcactaaaaccaatagcttaaagcatagacacctcccaaaggtcttcccatcagtttgcaagagtgggaacaaccagaatcttacctggggttgatggagctggaactcccagaccaggagttggggcaggctgcctgccctaaggaatttggggaatccttgttcagagtagtgaagcataccacttggggttgctgagttgttttgtcctctatttttttcctcttcttttctgccctaataaacattggtattaaattt

SEQ ID NO: 2944 - protein, 90 aa, Homo sapiens
MKTLPVLVLSLTLLTVFSETSPILTEKQAKQLLRSRRQDRPSKPGFPDEPMREYMHHLLALEHRAEEQFLEHWLNPHCKPHCDRNRIHPV

SEQ ID NO: 2945 - DNA, 67082 bp, Mus musculus
  misc_feature (1)...(67082): n = A, C, G or T/U
ttcaggcatgcactggagagggacatcaatatgccacctcctacctgtccaaggataagttccagaacttagttctattccaccatgtgcattccaagaataaaacttagctttttagacttgaccaaagcatctttacctgctgggtcatatcacctgccctatagtgtattttaatttatttttctgtgaattactgtttgcattctggccacagtgcgaggctgtagaataattaggatatgtaggattttttttttttgtttttgtttggtttttgttttttggttttttgagacagggtttctctgtgtagccttggctgtcctgggactcactctgtagaccagactagcctcgaactcagaattctgcctgcctctgccttccaagtgctgggattaaaggtgtgcgccaccactgcccggcaaccattagctttcttaagaagctattttaaaaaatgagaaatactggtaccggagagatggctcagcaggtaggagcacctgctactcttccagaagacctgagttgggttcctagcacccacatcaagtgggtagttcacagtctcctgtggcctctgctggcacctgcatacatgtacacacacacacacacacacacacacacacacacacacacacatacacacacacattgcagctcattgaagagcttcctacatggcccagaagcatcactgagctgggcagtggcaatacctttaatcctagcaccaggaagacagaggcaggcagatctctgtgagttccaggacaacctgatctacatagagagactgtctccaaaaaccaaaatgaaaagatgagcatggaccacaggctatccatagtgtatgtagcctaggctactcacagtgtgcatctctaagcctacatgtatctacatccattgagggggtgggttacatttactttatatattataaagtccagccattgcaaatgtgtatttctgtgtttaccattactacattttagttttagagcattttatgtcccagaaaatcctcttgggtgtgtttgcaaagaatagccactcctattcccaatgttaggcaactactgatctgctttctgtctctaggaatttgccctttctgcacatcctatatgtacagaattgtatgatgtgtttaatcttttgtgtctggcttttttacttggcatgtttctcatccatacccatagtgtaagagcatgtgtcagtagtccgctccttttttttttttttttattagcaatgctattccatataaattcttttagaagttgccaggtgacactcaggaagcagaggcaggtggatctctgagtttgaggccaaactagtccagagtgaattccagtacaaccagggatatacagagaaactcgatcttgaaaaacaaacaaacatggctggagagatgactcaacagttaagagcactgactgctcttcctgaggtcatgagttcaactcccaggaaccacatggtgactcacaaccatctgcaatgcaatctgatgacctcttctggtgtgtctgaagacagctacagtgtacacatatacataaaataagtaaatacatttgaaatttttttcttaaaaaaaagaaaaacaaacaaacaaaaattctcttaaaagttatttgtggggctggagagatggctcagcgggtaagagcactgactgctcttctgaaggtcctgagttcaattcccagcaaccacatggtggctcacagccatctgtaatgggatctgatgcactcttctggtgtgtctgaagacagtgtactcacatatataaaataaataaatcttttaaaaaaaagttatttgtgtttggaggcaacactgaacaaaaacttggtctctttgccctgcctctaacttaacctgtctagctgggtggccttaggcaagtccttcctttgggtgtctccatctgtaacacgaggggcctgtaacatctcttccaataatttttttcaggtataatacacaaaagaaaacaactttacttttctcttttgtttgtttattgagacggggtctctttgtgtagccctggctgtcctggagcttgttttgcagaccaggttggcctcgaactcacagtgatcctcctgcctctgcctcacctctgctagaatgaaaggcatgcaccaccattcccagcttgtttatctttttaattgagtattatatcatagtgtctccttaatgatgtttgtctttttgtggtactggggattaaaccatggttgcacgtatattaggcaagtgttctgccattgagctgtattctcactcctctttttctttatttcttgagataagacttcactaagttgcccaagctttctggaaactcaccctgtagcccagacacagggagaaatgagaaagctctgacaaaggagacagaatgtatgggccacagcaaggcacaaaatatgtcagagactacaaaaggtcaaaatccaggccagctggttatcgtgggagtaagggaagggttacagggagagagaagctaccagaatgggcaaaggtgctaagggataggacccccccttctgttcccataacctcattcatttccttgtccctccttctcaatccctctcaggctgccctgctcctttagctctgaccccatttcctcaggatttagttccctgaggagccaggcctgacatttcagacagaggctgaggaaaggaggtaggtcagaaagagacactgtgtgtnnnnnnnnnnnnnnnnnnnncagggatatacagagaaactcaatcttgaaaaacaaacaaacatggctggagagatgactcaacagttaagagcactgactgctcttccggaggtcatgagttcaactcccaggaaccacatggtgactcacaaccatctgcaatgcaatctgatgacctcttctggtgtgtctgaagacagctacagtgtacacatatacataaaataagtaaatacgtttgaaattttttttcttaaaaaaaaaagaaaaacaaacaaacaaaaattctcttaaaagttatttgtggggggctggtgagatggctcagtgggtaagagcacccgactgctcttctgaaggtcaggagttcaggtctcagcaaccacatggtggctcacaaccatccgtaatgagatctgactccctcttctggagtgtctgaggacagctacagtgtacttaaatataataaataaataaatctaaaaaaaaaaaaaaagttatttgtggggctggagagatggctcagcgggtaagagcactgactgctcttctgaaggtcctgagttcaattcccagcaaccacatggtggctcacagccatctgtaatgggatctgatgcactcttctggtgtgtctgaagacagtgtactcacatatataaaataaataaatcttaaaaaaaaagttatttgtgtttggaggcaacactgaacaaaaacttggtctctttgccttgcctctaacttaacctgtctagctgggtggccttaggcaagtccttcctttgggtgtctccatctgtaacacgaggggcctgtaacatctcttccaataatttttttcaggtgtaatacacaaaagaaaaaagctttacttttctcttttgtttgtttattgagaaggggtctctttgtgtagccctggctgtcctggagcttgttttgcagaccaggttggcctcgaactcacagtgatcctcctgcctctgcctcacctctgctagaataaaaggcatgcgccaccattcccagcttgtttatctttttaattgagtattatatcatagcgtctccttaatgatgtttgtctttttgtggtactggggattaaaccatggttgcacgtatattaggcaagtgttctgccattgagctgtagtctcagtcctctttttctttatttcttgagataagacttcactaagttgcccaagctttctggaaactcacccctgtagcccagacacagggagagggagaaatgagaaagctctgacaaaggagacagaatgtatgggccacagcaaggcacaaaatgtgtcagagactacaaaaggtcaaaatccaggccagctggttatcgtgggagtaagggaagggttacagggagagagaagctaccagaatgggcaaaggtgctaagggataggacccccccttctgttcccataacctcattcatttccttgtccctccttctcaatccctctcaggctgccctgctcctttagctctgaccccatttcctcaggatttagttcccctgaggagccaggcctgacatttcagacagaggctgaggaaaggaggtaggtcagaaagagacactgtgtgtgtttgcgtcatnnnnnnnnnnnnnnnnnnnnacacagggagaaatgagaaagctctgacaaaggagacagaatgtatgggccacagcaaggcacaaaatatgtcagagactacaaaaggtcaaaatccaggccagctggttatcgtgggagtaagggaagggttacagggaagagagaagctaccagaatgggcaaaggtgctaagggataggaccccccccttctgttcccataacctcattcatttccttgtccctccttctcaatccctctcaggctgccctgctcctttagctctgaccccatttcctcaggatttagttccctgaggagccaggcctgacatttcagacagaggctgaggaaaggaggtaggtcagaaagagacactgtgtgtgtttgcgtcatcttatattctgcttaattattttggaactagggggccaaagataagatgtaagcatgaagacatttaccaggaagtaaagagttagaagaccatcgcgctgtctccagtctctgctgaacaattgcttctgcttcttatattttggatggtagaaagttggaatcctcatattcgggagccttcagaactgaagttcctgttgcctctggcaactgtatcctttgttgattcaatggccactagggtaaggccttcctgctgactctgacctgtcaattctctcagagccttttatcctaggcaatccctcagggtcttttaaggcgcctgtactttatagtctgcttgaggagtggctatcctgactcatgcctgaggagaaataattccaattccttaagtctctgcagcagccatggacatcccaagagcattctgaggtcaaggaccttccctatttgctgttaggaccccttaaacaccaggtgtggcagtacacaccttcaatcctagcacttgagactaaggtgggagaagacagatcttcaggagctagcttgcactgcatagagagtttcatgccatccaggtttctgtagtgaaagtgtctcaaaaaccttaaacaattgagtgcaaaatacatgaaagactattaatatacatacttgctatatgtaatcctccactcttgatgcttttgtgtacctgcctctggccaacgccatcgttgttgttgctgttgctgttgnnnnnnnnnnnnnnnnnnnnccttttatcctaggcaatccctcagggtcttttaaggcgcctgtactttatagtctgcttgaggagtggctatcctgactcatgcctgaggagaaataattccaattccttaagtctctgcagcagccatggacatcccaagagcattctgaggtcaaggaccttccctatttgctgttaggaccccttaaacaccaggtgtggcagtacacaccttcaatcctagcacttgagactaaggtgggagaagacagatcttcaggagctagcttgcactgcatagagagtttcatgccatccaggtttctgtagtgaaagtgtctcaaaaaccttaaacaattgagtgcaaaatacatgaaagactattaatatacatacttgctatatgtaatcctccactcttgatgcttttgtgtacctgcctctggccaacgccatcgttgttgttgctgttgctgttgttgttgttcttcctccctctttctttctttctttctttctttctttctttctttctttctttctttctttctttctttctttctttctttctttctttctttctttctctttttttctttcttttctttctttctttctttctttctttctttttttttctttctttctttctttcttccctccctccctccctcccttcttccttccttccttccttcctttctttctttctttctttctttctttctttctttctttctttctttctttctttctttctttctttcttcctttctttctctctctctcagggtcttatgtatcctagaacagccaaaggatgaccctaaactattaatcttccttcctgtacatgtgcagttgcaaggatcacaggcatgtttgtataaccatgctcagttttatatagtacaagggatggaacccagggcttcatgcaatcgaaacaagcactttatcaactgagctacatcttaaccagagtctctgaaagcagaaaccaggtcatgacttcctattgcaatagcatctgtactgtaccacttccgtttataagcttcagagcttgctaggctgtgaactgcagggtaggaacagcatcgtttttatttttaacattttgtgtgtgtgtgctatgacatgtgtgccatgacatgcttgtggaggtacagaagatggacgactgtggaagtcagttttcttcttcccttgtgtgggttccagggatcaaactcaggctgtcaggcttgatagtgtttactgggccaactccctggtcctaggaacaccatcttggaacatttttgctaaattccataagctcagagtctgacacatagtactcacttcaactaatctgtgaggagtaaattattggctatggtgtctataaggataatgatgaaaacaataacaagcaagaaagtgctttgtaatgggaacatctcctcccttagcgtcacacagcctctccagagccttgactgcggactctttcattagtggaagcagacaggggccagtgttcagatgaggtccttatcctgctatcacgcccgtgctaggggaagctatcgggcacagagaagtgaacaagagagagctgcttgggcatgatacccagcagaggacaggagctgcatacatgcttgccgcctatgccttgagttagggtcaacttcagtgtcctttgccagcaacttatcaggaaagaccataacgttctggatttggaagattcaattcttcatttgtaccgcctttagtgactttctaccgcctaggtcctcagtactgctaccctggctttggggaaacatttaaaacttgtttctatctatctaacccctctttccaaggcaaaattacatctgtaaaacagtgtgtcaattcatccttacaataagtctggaaggttgatgggtcagggtgattcttaaacaaagagaaaagctatttgcctaatgtgtttcaaaatccctcagtccaaggctttttatcagtaacacacacttaaaatgctcacccaataaaaaccactccttattgcatgagactatctaaggatctatatacacgtgagaggtcctaaaatagcatacattatcagaggaatatgcaagagaccacatagttcaccctctccctctcaggcgatcctagtggtctggtcaggaagttgagtgttagttgggaaagtatttgaagctggaagtcctgtgtctgccaaaggatcttgggcaagcagttgagccactgtgacctaacctcctgtagaggttcactaagacaatcatatttgcattttgtacattccatggctatagtgagagttagataacacgatgatgtgtaagctgcaaagcactagacagatgttggcacaccagccagatacatgtcattgtagaaaaaagttcatgaaacgttttataagcatagagatcaagcaaggctcagatctggagtcagcctccagggtaaccccgagcatggggcttctttccaaagactcagtaaagagggcatagtagccacctctcactttcagtcataatggatgaatgaaatagtatgcaaagtacttgatatgtatctggcatgcaggaagggattcattgaatattagggctattgctgttggttttctcagtgaggctgtgagacccaggggtggaatacgccttgataaaggcagagatctgaagtgtatgagaatgttgagctaattgaaattgagaattcaatctgcttccctcatttccctccatagccggaatcaaacctaaagctttgagcattccaggcaggtattggcccactgacctccatccccagccatcagatgtactttttaaagctgagctagcctgagaatggctgagttttaattccaaccaccaggtcttattcatccctatcaggcatttagtaagactgtcgtcctcatggaaaaaaaagagtactattttcttccatcacaaacaatctatatgtcagagcttgaagcaaatcgttcaaacatgaaagtagtgtctttgcagagaaaaatcttttcacagtatgttcctttgcctccatgttctgtgttctggtctgattttaatattcagccaactgttgcattcccactctgagcgttatctgctttcagtattggatcccaaggtactctcgcagcacgcacacccagtttactccctttcctctgattagtaagtgtggcttcaagggaatacctttaaaaaaaatactaaactcggtagagactgaaatagaaagacaaatcggtagcaaggtcaaaattagaattcataactaaatataaatctagagggaattatccaattacttggatggtcccttctcacagacagtccagcgttgattggctctgtttcttttccatatatagaacaaagtagcaagagtaatggatttttttttgagatgcattgttttaatagtatcttaaatactgctttttcttttttccgaaaatgtgttcacatatacatagcatataattttcacagcttgccagtattctctttggggaccatctggtctttgacttgtaggtcagagagcaactgagctggaaagacaaagatttcctagtggagtcactatcaaacttgatcagatttatcatttactttgttttgctaggtacacttacaatggatggttctgaagggaaattcccagctcccttttaaaggctcaagttaatttacagactaacagctgtttttattgagattggaccagcttcaggaagggacttggaaacgtagaagacaaatgagtgtcatgtgaggcgaggtagccattaaatgtacgaatttaatgcaaagctcatgcaaatgataggcaaaccttctataaatttatcgaatctcagtttggagtttgtcagctgcagtgaaatctcatgagaattgaaaactaatgttttttagttaaactaaatgtaatggcttttgaagttaggcattctcagtcccattgaaactgcttagagtttgacactaccacctttaaagatttcagtagtgtttgattccagtccacatccagccccgccccctgcacagcctgacatcacatggcatatatttgcatactacctgggactgggtgtgacgatcctcccctttgaaccttctcattggcagtgctgaagaaccagccctctactggaaggtccaatcggcagccttaaggacattaaaaaaaaaaaaaaaaaagaaaagaagaaaatcaggagggtgggggtcttgacttgatggctgagcacatggaccaatcatcctcggaaacagaagagccccgccatggattggttgagggggaggtcctgggactctgtaggccaattagaactctgggccgagggggccggtccgcgcccgtagggcagataagtagcggccgcgggggttgggggcagtgtggggctcgccgtgggggtgaggcggcaggtagccgggtgggccatgtccggggccgcagcgggcggccgaggcggaggttcctgggggccggggcgcggaggggcggggggtctccggcggggctgctctccaccggcgcccgctggctccccccgggtcggtctgcagccactcagggctacggtccccttccagctgcagcagcctcaccagcgccgggacgggggtggccgcgcaggtgagccgggtccggagcgggtgctggggcgacgggctggagagtactagaagtagatgggaggtgagagaagagaaaaaggggcgctcagagttcgcgagggcggagggagcgaaggcgagcagctgcgaacctgcggtgcaactccgggacggggtgccgggtgcatgggccggggaccagaggggagggacctggcagatggaagctagctttgggggggcgtaaccgaaaagtggtccgaagtgtccgcccgggcggtgtgagaagtgctagagtgcgtgcaaggagtgttgtgggcgtccggagtcgagggcttcactgggagccagaaccggtgggcgctggacgcctgctcagtgagggggaggggcatggaagagagccgggtggagccatgtgttacttctcctgcttgagtttggccccagcgtctctctctatggctctcgagttcctttcttcaccacttcacgtgcgctttcacattatgcttcttccaggagatgatttgaactcagcccgttggaataagttagtttaacggcttttacttcggtgcaaacatacctctgttaccgattttctacattcctctcggggtagccccgaagttgaatgttcccatatctcagacttgcttaacatggctgtctctttccagttattctgtgcgtgtgtgcttatgtacaggagttgggcagtttgcatcctacttcttgcctcctccgaaggtgttttgccctgagcattcccagccaacgtggcagtggagtgcttacaatcaagtatgctgtgttaaataccccactttctgaacagcgccgaagcagtttcttaatagcagcttgatgtggtgggtgtggggaaactagggtggagcaaatttaaccttgctttcacacttaaggctgtgatgggacccacaattgcaggccctttggaacggaaagggaacctacttgcatgaggaggttggcagtaagttaaaagtgaagtttgcgtttgattcacaccagatgtgaaaggatcattgcacacttcctaagtctaagtttgtaccaaatgtacagaagctatggtccctgccatcctactgtgacagtccctacaccagtctcttgtgctttctgcagatgactaagcttggacattgcatatcctcttcctgaaggtattctgttacaggagtcttgctagataggaatgggattcatcgggtctttgaggtagaaagccaagtctatttggacctcactgtatgtgctagtatcacattctggaacgcagaacttgatcaaatctggtagcaagatggtgaccaagtagtcaaagtatgtgtagaatctggtggtatagaagaaggcaatgcccagacaaactcgtgcctatcgtcaactataaagcaaaccacaagactacaaacctgttggttttgtttgggcttccttgaaacccagggaagctagagcagcaagcaccagaaccttcatcactctcgggagaaattgacagaagccttgcccgtgcagtagttagaaattgtttagccatcattttaagagcagttgttttgtgatccctacagagctagcattagaagggagaacagtgtgtgtgtgtgtgtgggggggggctgtgcaaaggggatgaacataggctagcaagcttgggtttcattacatggccaactccttttgtagcgtcagggtctctaaaggtactgatgaaaacaggagagcagaggtctctgtaacttcaggtgacttagagagattgaatgggttcctgcattatgtatttggttggcccattgtttcttcacttgttaatatcccagacgtattaaagagacatttgcctatgaggtgggattattgttatgttttcagtaggaatggagggggagagttgaaatagtagcttgaacctcttggtcttctttgtggctaagcattaaagggaggtggggggcgtacctgggctttgacttgggacctcactctatctattccttctgtgctttgggaagtgtgcaggagtgttttcccctaggccattagggcatgtgacagggactttttttttttcttttctctcacagaccctgaaaagaatgatgtttgtaatttgggttttaaacacaggctctcccacttgcgagctggtgtatgctcttgaggaagcttctggactccctttcttttcctgtgggcaacagtatctgtgtcataagaattaagtgagctcatgaaaagcttagaagggcgcccggcacaggaaaggggctggaaaaagtgtgtctctgctgagctactgtaagtgtgctgttggggagagcccactgccttttcaggcttcaaagagcaaacccagactgctctgaaaccagtgctgcaggtttcagaatttcagggcctctcgagttttgattctgtcatcttgtagaacaagcgctctaaatgaggctcaggaacacaactgtttaaaaaggctgcgagccgggggactgggtttcaggagcaattaagtgccgtcactgtttctgtttcccatcccaaaagatgtaacactctgcccgtgcagttatcttgcaccacacaccctgctgtgttcttgacaagatagattaggcctcgtttaaagggttacggtgcaaagagcgggtttaccttctgtgaccgttcatccagaagggatgtcttcataaagcgaggaatggcttcgtttttttttttttttttttatgagctggagctgggacagctgagagaaaaatgagggccaactctaagaaaaccatgagccactggtgagtaattgaaacccacgctatacttcttactgcaattgccccttgaattaaattaaattccctgtgtgtgtgtgtgtgtgtgtgtctgaagccagtttgaggctgctaaactttgtgctcttccagaaccaatgatgatagataaaagagaagtaggaattggtttttttctgggctccagtctcacctatcctgagagtgtccttctccatatccctagaatggaaacaacagttttgttgtttattttgtggtgcttaggattgagcccaggactttgtgcatgctacacaaacactaccacagagccacatgtcctgccccatgaagataacacttaattaaactatgctaattatttctccaaacctgggaaaccagatgctgtctgggaacttaccgtactccaccagaaccttcttaaaccaggagctggtaattatagcctgtaggttatgtctggccctgagcctgtttttgtaaataaagttttattggaacacagccacactctttggatattggctatgtctgttttcatgctgtcagtggcagagttgagtcattgtataaaagttaatccctccttgtcctgaacaatacacctgactcttactccagggtaagaatcagtttcaagcatgtgtaatgtacacttcctcagaacaccctgaggtagggtccggtaacaatcctgtgtccctactcatattttaggggaaaaggaaccatctgtttctagtcacttcccagtctttgtggccgatcagcacgtgtgaggacagctcccccacccccgaggttgtcaggtggcatgtgttcaggggacatagctcatttgaatttacataaaagcttaacagttaagcaaatttgttccccctctttccttatggccccctaccctcaacctaacaactcagactacagagaacatattttaaaaattagatggaaatcacgtgaggcatagctcctgttttgaattgttctcattaccttttagttttctcaacaaatcagtgagagctgatagaagtcatggctgccctaaaatactagagtccctagagggacatagggagtggctctcccgaggagctagttcctgaatataaggtagcattgttattagtaatgccattgctaagtataaaatgccttttcttgcattattttgaaaacttagcccttgggggctaggtgtttagatgggtatggagccatacagagaggttgtagagtagaggttctgagagaggtgctcattcccgtggcttgtgatgccccaaacagctggaagactaaaatagagttaggactttttctgccacttgatatagtaaagcttgggggtacagttaacatccttgaagagccaccatttcccttctgtaacctgtgattgagatggcttctatttgggaagcgttgaactctggggctctccctagcctgatactgctagctgctgtcttccatagcttttccaggcccaggcgtggccataaagtgcattttttgaagcatctgacccttaaatattttatcagtaatgatgattttcttgaagttgggaggggggggtctccagtttctaggatgtcattagcagtgacaagtgccaatcttttgggtacccaaaacagtgtaggtctgtgtgttcttcaggatagcacagtattagatagtatgagaagtccttacataacgcagagcaaagatgttggtagaaaggggatgagaacattgtggggtgtggcggtaagaggatattgttctctctggttcagatatggatctctaagaaacatgaggcagggttacaaaattttcatagtgatgatgtgaatttgagtgttgcccaagcagttaggtgggcttagtagccaaaagaactctgcttgcatttgctgctgaagtcagtgtgttctgagtcatatggtagccccgggtccacctattccccgatcatagtagtagttgggaattaaacagctgcctctaggttcttaccaatctcacactgagtcttttttctaaagtattgagatttgatgatgtgatgtgggaagccacatgtgccgttgctggtcgagtccagcgcgcgcaagaatgtgacattttctgacaggtctggtttgggtattttatatataatactgtcacgtgtatcaagcactacttgacactagctcaagggttctgcctggtcttacctggtcttactcttgttctatgggcagcatggagcccttctaagggctggaaaggtaaacctggtgttacttcataggacaagtggatactatatatgttacttgtcttgttgctgagacaaaatacctggctgaaaaggaaggaagagtttattttggttcgtagttcaagggtatagtcctacaggacagggaagcagggagcaggagagtgctgcctgtagtacatctgcactcaggaggcagagagaggaccctggtgctcagctctctttctaggcagtcctaggaatgctgccacctatatttagggtagctcttccatcttcaattaacttaatagagacagtcccttggagacatacccagaggcttgttccttctatcattctaggccccatcaaggtggcaatcacagttaaccaccagagatgcccaacagcaagttcctttaaagagtgtggacaatctcttgatgaattagtaattcctgccctcctggtacagaatttgtgcccttctgatacagaagttgttcttccctgtcttagaagagggagtcgaagccaaaggaagccgagtaggaactgctcccagctttctcctctgcctgagttgcagcctcacagaggttccattatttggtttgcagagtatgaattaaccaaacactagccaaatctattcacatagttaggtcaaaaacaaaccctggtctcagggagggaagagttgaggatgctatctgaagttgataaattgtctgtgctccagttcctcctgccctgtggagctcaggatggattgtcattcctgggcacagctggctgtgaacacgaagccttccagctcacagtgcccactggacatccgagttttctggcactttgctctctccctagagtcacaacaaagctgcatgcttagcttgagagtcatttaaatggttatcctcaggctgagtaagcttcacttgtctttcctgtgtgggagtaccacagccaatcaagagcagcttaaatgaacttaaaagaacgctatcagagtatttcataataggaaaactgcaagcccagccctggggaacctggaactgaagtcttggccatgtacagacacttaccctgccctgttcaggcacacaggtctgtgggttgctcacgagccctagacagctgatactgggggaggatggagtgccttaggcttcacccgcctgcacattagcagtttgtgcttccagctccctattaaaaggggcgtgtggaagcctgggaagattcttctaaaggatttgattgctctcatgcagttgggccatggttaagaattggggtgcattctattagaggctgcaagaatgtgtcatcttaaatggtggacaatatttggcagggtagtgctgtaaatttagggccctcctccctgccatagctccctgtctgctaatggcaggcaactttttccaggaaaccatcttgttagggaacagtttagtgtaccagcagctctgctacctgagtcccttgtcctgtggtctgaaataacaacctttaggagaacattgaagtgttaaggccatacgtggaatttgacacacagctgtaagacataagctgtagcatatctacaagcattctaaatgcaagctggagaaggtgcaaaatgagaggctacttagtgtgtgctaggctaattatagaattgtagggttttgaatagtcagtttctctttctttcaaattaaattaggtttctattgtcttctctcctttttcttttaaaagtgaccttgtttttggtccctgggatgtattatggtaaagcatatgcctagcatgtgcaaaactttgggttctatccccatcactgcaaacacacacacaaagtgccaatgttatatagtctcatctggtcagcagtgttctcaaatctctgtagtgccttctgccccatcctggaaattgtgtgcatgcctttttaagtaggtacctagtatttcaagtgcaggggaacaaaccccacagcttgaacagatttgagtgcttttgctgagggagggcaggggcgaagtggggagtgtcatgctcaataaatacttgttgggctgagttgctggaaaggcagtggagtgccgaagggagccacacctcccccaggcttacttgtaatggcctttcccctcctggtccccataaatggttccccctctagaatacccctccagctacttgcagaacaacctgcccactctccaaagtgtcagggttcctctctccttaaatcattgggcttcttttcagcctggtttttgggcctcaagcccagctggtgacaaagatgttgcatttccatgtaagtcattgctaggcctgtaggttctcttcccaacacgggggcaaacatggacagtcaccaggttgatctgtggaaagaaagactgtgtaggattttgttaaaagttttgtttaaagtctgagctatctggcttttggcctagaaataggtgtggttgatgatcaaggagactgagacaagtgcccagtgtccttttacaccagatagaccggtgccaatttttttggtagtgttatactgcaacaaggagaagcaggaattgcaaaattagtggttttttaggccaggcattagagttatagtgtaccctagggtggctttcccagttgtgatcagattgaaagccccctcccccatgccaggcaccatcccaggtatttctgttccttctcttcccctacggggatatgcaggggagaggtgttcatgatcactgtcctaaccctagacacttggacagttcttcagtctgtttccctgtttctaaccgtgggtctagtgacttagataaaatggtttaataaacctgctcagctgggtgtgaccttgagcagagctaacatgtgatgaggaggggaggcagcttcttttcccttcttccctcctccctcctctttcttctgctcctccccttgcccccttgcctctcctttacactccctccaccgtgagtttcctgagcctgtctgatcaaccacatggttttggagaaccactgttggtaacagatgcgttccctgccccgcatctgtaggttggcagaagcctgtcctactgtcctgggatgggggttatctgcctaactcatgcacatcagacatcacacaggaccggggaggtggggaggtgggtgtggatnnnnnnnnnnnnnnnnnnnnnnnnnnnnnnnnnnnnnnnnnnnnnnnnnnnnnnnnnnnnnnnnnnnnnnnnnnnnnnnnnnnnnnnnnnnnnnnnnnnnnnnnnnnnnnnnnnnnnnnatgtagccagtgggctttttatagtacatacagcatagtctggcatggagaggggagaagagggccgtgggagccgcatccttggggacaagcacctcttaacctgagggaagtgctgggcacttctccagtggaaccgtcacatgaatcattctgcattcacaacagaaaagtaatcaatagctgtttgtgtagtaagaggctgagaatttcaaatctgaatggccccagattcacctgcattgctcagagaatctgagataattggtacacccaccttcagcgtgccctgctgggaaggatggcatttccttgttcttgcagacagggaaaccgaggcccagggaaacaacttgtccacaaccatctgattgacaaagcccttttgcttggttaagcaaaggcctcttcccacacgtggaagtctattgtgaacttgctgtagcgtagcacccccactgcctagcatatctccagctctgctttcccttctgatgtgtatctgtattccaggctgaaagtgtacctgataaactgattaaaagagaactggaagtgggctgcagagataagcctgttccttcagcatcccaaggtgatcacaccatggattttccacaccttggacttgtcctgtgagctgtagattggtggatagtgggaagatggtggacagtgggaagccctgcacgtgtggtatggtggtggctcttcagtgtttctggctgttctgaggtgtccagttgccatctggaatcagtagctcaccagggacaggcagggaactggggacagactgatggtgctgcctctggaatcatggtttatgagtactgagtttggaatggtatggggaagatctgcctatgtggattgtaagagggtatctttcctatatgtgactgagtgaaaccataaaaatgcacctgggtgcattcctatggcagggagtgggcacaagtgacattgtgccaccaaaacaacttagccctccaggtagggtaacgcctggtaccaccactctcacatttctaatgggaaggaagcctgggacacgtgacctgccaaagcacagccctcttcttgcttttggctaagcaggagtggggtccttgtggtatttaatagcacccagtaggggagacagcagagacttggactctgggcaaaagctccatctagggagccttgcctgatgttcttcttggagttaactaatccctctacaagatcactttcctctctataggtttatgtcatgtcctaatgtttgtttgcttgtatgtacacaggtttcttttccagtaactttccaaccttgtaaggcaaaatcttatttaacaaatattataaaaaaacatttctatataataaagttcccatttatataatgttttgttgtttgttttgtatgttttgtgtctttaaggaaaaaacaacaaatgaggaagggctcggagagatggctcagttggcgcctccgagctagctacgcaagcgtgagctgattcagcttcccagcacccgtgtggaagcagggtgcacttaccctgttaccccagcacagcgggcagtggggatagggacatccccgctgtccccactatcataggctggccagcctagctgaatttgtgaactccaggtttagtgagagaccatgtctcagaagtgtgatagagctggtaggatggttcagtgggtaaaacacttgcttcgcaagcttgacctgacttcaggcccggatcccattgttgaaggagagaactgactcctgaaggttgtcctctgacttcccatgcacactgtggcatgcacgtccctgtattcccacacatatggtacatacacactcagagaaaaagaataattgaaaaaaaattaatttaagtgtgacagaacacggttttaatcccagaactcaagaggcagagaaaggcaaatctcggagttgcagtccagtcaaggctgcagagtaagactctgtctcccaaaaccaaaccaaacaacttcaaattcagtgggaaagccattgatgaagattttggtctccacgtgtatatacacttgcacacaaatgcacacatcccagagcacagacagaaactgactttgcatcactttatgtgacttgtctgagctgtgtggtcactagccaggtcaaacagaacatttggatgtttgtcgtgtgcaggggaaggagcagagcccataagcccgccagttagaaagacttccttctgctttctgtttgtccctaacctcccattttgtcacagttgccttttcctttcaaggtgtccccccacactgagagagagagagagagagagagagagaatgagtgaacatgtgggtgtcaagtatgaatgtaggaaagtacgaaggtagctggacagtggtggcacacacctttaatcccagcacttgggaggcagaggcaggcggatttctgagttcgaggccagcctggtctgcagagtgagttccaggacagccaagggtacacagagaaaccctgtcttgaaaaaaaaaaaaaagaaaggaagaaagaaagtaagtctgtgagtgttcaacatgcctgcaccaccagccgtcaggacagcaaatggtgtgtgtgcttgtaggcaaatnnnnnnnnnnnnnnnnnnnnnnnnnnnnnnnnnnnnnnnnnnnnnnnnnnnnnnnnnnnnnnnnnnnnnntgctcattcttgaacaatcagtttcaaatcatttccaaataaaaacatctaagtaataattactagaccaatgtgactaccaggttgctcctacatgcttgtcatgtctcttattctccccatttaacagatggaacagttggtatgcaagaagttatgagtttacataacatgctggggtggagcccaggttttgcctcttgtgtttcaggagcttgcagcttacccttctccaggtggacaaaattggtatcataccctggaaactgactgggtgccagtttctgtgtttgcaagtgcggcccttgcttcatcttgacccagcattcgagtgtgcagggttaccccaacatgctgtcactctgagcacgatcccacatcgagcatgctctgaatgcctcctctcttggagatggaacactactactgtgttcctctgctctgcgcttagctcttcattcttttttttgttttttttttgttttttgttttttttttgtttgtttgtttgtttttaaagacagggtttctctgtgtagccctggctgtcctagaactcactctgtagaccaggttggcctggaactcagaaatcctcctgcctctgcctcccaagtgctggatggaattcaaggtatgcaccaccactgtccggcttcaattcttaaaatacacggaactggaaggctcatcggtgccatagccatacagtaagactattgcatatttactcgggagagatgccaggctataggcctagtccaggctatggctcttctgggcccatatactaggcagttgtaccctctgccttgtgaatatggtaggcctcaggggagtttgtgtggtttagtgcaggacattgcaccaagtggagcaggagttagaacttaacactcagggaagtgccctttcgtccatctttcccttaaccccaggcctgaggaggctgggtctgggattactaagcaaagtcagaggaacggactgacccggctgtattcccacccttccctcttacacaccacactacctcagccatctggctgtgctccttaaaggcatccagtcatttttgcttatgctgcagggaatgaatgaaccctcgtctacttagactgttgagccagattcttactatagcccaggcgattgtagagtttgcagtcctcccacctctgtcctctgactgctaggactgcgggttatatatcaccacactgggctttactatttaacaaagccccctctttgttaaaagttttctgtgactggtgagacggctcaggggttaagaacacttgatggccttacagaggatccaaattcagttaccaggagttgagtagctctcaaccacccagggctccagtttcaggggatccagccctttctggcctttataagcacctgtatacacatacgaagcccacacacagacacataagtacacacataattaaaaataagtcttgttttgaaaaggcagttttctgaaaaaccttcagttgtggtgagcaagcatcttttatctcaggcgcttgcagtggctgctgtagacgtgattaacctggctgtaattaagctgtccttaagggatttttttttttttcatggcccagccagctgaatgtgaagtagagccgtgagccatttgctgtgtaagtgtccctgcttggactcagattgctcgtccttaggaaatgatcaagtcgtatagactccttccatgatcctctttgtgtatctgcctgtgtcttccactgtcctggctgtgtcctgactcaaggtaactgatgggtggtgacagtcagtcagagcaaggaggaggagggtgaaaagagactgatcccaattcctaggggtctgtctgaagcctagatgtctgtgtgggagccaccatgccaataacagtgctgtctgcttccaaaggactaaactgagcttgccttctgggtctcagatgctgggataggacatatggctgattaatatcccatactgtctcctggatccaattatccttttgcatcagtaagataagccttttccttacttctagaaggtaacattaccatgaagcagcttgagggaggaggtctggtctgtcacctacctcccgagtaatgtgtgtcgccacaccctctgcctcacgaagctgcttctagagaggtaaccagggaacagccttctgttaggaggcctttggcagctttcttctcttcccggcagttgtcaaggctctcaacgctgggggccacctagccttgcttctcaggctggcttaccctggaggcaccgtataacctttgtgcttctcttaggaaatctgaacaactggcaagagcaggacttcagagcaggggctgccctggagtgttgcccagcacactctggggtttttccacagccaggccacagcatagtaatttgccactgatttccagttcagttccagaaggtcagggcccaggtatggattcactgggtgggatgtagaaggcttttggggctcactgctgtgttgctgggcggggaggcgggggggggggggcatgaaataaagcttaagtgaggatgacccaggctttctgcaagtggaacaagagttcacacaggtttttgtttttgtttttttggcaacgttggggattgaacccagggcctcagacatgctgggtaaaggctctgctactgagctgcaccccaggaaacccttcccacaggttttcatgaatgaagcagcgcagagtgggtgactgatggtcctagttctgaggaacctaactgagcccttgtccctagcccagcccagagcagaaggaatcaaaaaccaaggttaagtgcagtggatcctgacagagtccaagctagcgaagtgtaccaagccagcaccctatgtgccctctgctcctgagtaagcttggtggttaccgcagctcacccagtcatgtgaccaggccttctgctgtggccagccacaggtaaattgagcactatttatatttcctgcttgggaggaggtgggcagggacacctgggagcctacaacacagctgtcttagctgcttggagggcttgtttacctttgactttgtactgttttctctttctcttccttatgccccagatgataacatgagttctgagattgcacctgagctgcgttggtcagcagcattctctttaccctctaggagttggaaccttctgccctcaagggcaaatattgagtcaagaacctgtaatgatctattcctggtgctgttttcagggacagactactttaaaatctctcattcagtgctgatgagtgagtacagttcctcccattgttaagatagactctctagctttttaatcccagcacttggggggcagaggtaggtggatccctgaattgaggccagcgtggtctatagagtgagttccagcgcagccagggctacacagagaaaccctcaaaaagaaaaaaaaaagtcagagtcacactttgtagccctggctagcctgtataactagtactagatatatatataggccaagttatctgaatgctgtcctgtgttcattaatatatgtgtaactagacagacctctacatgtgtgcatccatgtgcagtcttttcagttaattatttgaaactatcgtgacgcttccccccttcacttcagcagcttctcctgacaataaagacagtttccttcacaatattatcatgcctaaggaaattaactgtgcctgtgtgtcatttaatatcccatcagttttcacacctcccatttggtggcttgctttgtaaccttggtatagggcttggaactcagaccttaaacatactgggccaatgctcttcccatatcctcagcataaaggatcttacttaattcttacttaaaaagcttctcaatccagtactccaagtgtgtgtgtgtgtagagatgatttacgtacgtacatgtgtgtatacttgtggatgctagagaccaatgtcaggtatctttaatggttccccattgtcattgtggtcctcctcctcttcctctccttcttcctcctcctcttcatcttcttcctcctcctcctcgtcttctttaacagggtctgttagtgaacttggagcttgctgtttggtgtaatctaggtggccagcaagcacctgatgtgtctttccctcccctctgggtgctgggttacaggcacatgtttgctactgcacttagcttttacatggatgctgggatccatggaagagtctcgcgcttgctcagtaaacactttgcccactgagctgtctcccagcacatccctctatttcattgctgttgtggtgtctccatcctatgtttttgtggtatgtgtgcatgccacctagtgcccatgtgaaggtcagaggtcattttggggcccattctctccttccacccatgcaatgagttctagggatgacattcaggctgtgctttacccaccgagccatctcgccagcccatgtttgttttaaataacatttctttgtctaatgtaatgtcctttttttttttttttgagaagttcatacatataaataatgcatttgatctctcacaactctttccccataatacatttttcaaaagtcattttaggccaggtggtggcagtacagagaaatgcacatctctgagttcgaggccagcctgctctactgagtgagtttcaggacagctaggctacacaaaaagactctgtctcgaaaaaaacacacacacacacaaaaagtcattttggagctctcttctagaccctgttagctctattcctgtttcctcagaagacaagggcaggtgtatctgtaagttcaagactagccagggcaacatagtgagatgccatctcaaaacaaaaataagcctcccatgggtaaaggtgtgtctttgtacaggtcactttagcaagtttgtcgtagcaggttgttcctaagcgataatgctgtctctgaagatggacagggattgagcagaagggcttcatacacaaacacggtgtcactgagctgggcctccatcctcctcatgctaaatttggtcactttaggtggtcaccaccagatccctcactgaaggcacagtcttctcctcttaagtggtttgtgtggtgatagtttggcgttgcgtaactataaataccccttccccgtaaccgttggcccaggaagtctcggcatctgttgattcttcatgattgagatattccattgagagtttgataaagacagttctgaattaatgtgacttgacaagaatgttgacgtgacaaagtcaacaggaggaatgacacaaacggtttcctttgggcggggaaggtgacaaaacagggctgtcatattttgtcaacattcataagcattttgtgtaacttggctgatattgaattgcataccggttgcttaagcatatgttgcctagaagtttgctgaaagtcaggaagaaagcagacgggatagagttaaaattactaatggtttattcataaagtagaatttattttgattgaggaaattacttgattgatagtaatctgtaattttttttttatttttaaggcatttttaattagatattttcttcatttacatttcaaatgctatccccaaagccccctatacccttcccccgccctgctccccaacccacccactcccacttcctggccctggcagtgatctgtaatcttatttcccttttacttggtttaaccttcctcactagaacttgtcttacttctaaattattttcatctttccttgaccaatcaatccaacatgcccagagactaaaagcaacgttcctgagtcccaagtaggatcgtctagttcctagcaagggaagggacctttcggttctcattgtttcctgagccacggcagccaggaagccatggaacagttgagtcttactaaaatacaagtgtgggaaatgtccttgaaaaatcttctattcggggaatgaaaggtttcactttgcactctaatcttggagagatgagttcaccttcagcatgaggtgataaaagtctcagagattctgccgcacatcggaatggatgcgtgagcacgtggggtgcacagaatcagaacagaaaccacggtacaacagtttcacagttgtcctcttgcaaaactcattctagatgaaccgccctaatctggttctccttctccccacttaccttacaagctaacttaagagctgactggatgccatgatttcttctctgttgaatagaaatcagattaccatgagaacggaagcaaggaaaaagatgtctgttcgtcctttgagtttgtatgtccctaaggcacctgttactttcaaacagtcacgaggtgaggattgttttatgggaggttaggctactgtgtgggctcctcttacagcggctccattagatcctcaaggaaagcagcttccatcagtaactgctggcgacttgttttgtcttgaatgctccgatcctacagaaactcctcttcagagaatcaagttaaagggtgaaaagttcaccctacttccttttcttctaactgtagtttcttgagagctgaacaaatgtcagaggcccacagcccgcttttttttgatgcctgtgcacacactgcagggctaccctttgcctcctggaagatacagttagtggattctttatattcttttcccacagtgacatctctaaaaaggcttctctcttgacccattcttccagctgcctgcagacgtgatctacatttagggaagtcagacatgaagccagaaatggtttccctggttctcttgagttgtacgtttaaatatggagtcaagtgattgatggagggtttggctgagcagttcttagagtgtacacaaatcccgttgctcttttctgggtaaagtctctttggaagggatagcatgatggaacttccccctgccccttccagtctagttcttttgagtttcttctccctgtgaaggtttaagttagctgtggcttagtgttgaaagaaatgttagtcaggactggggttatagctcatcgatagagtgcttccttgagtttcagtgctagacaacagaacagagaaagccctctcactccatttccaaagtaacagctgggatagatggggactccgtgggccctccatgaaggtccgtaacccccccaatagacatatagatggggtctctgtgggctctccatggaggtctgtaacccccggatagtcatattgggggtttcggtttcaccacagcttctcttccaaaacccacatgtcccgagttaagcagtgaagtggccccaaaccacagggagctcatgaggccatctacactgttcaatcccagcacacgtccaaaaatagaaagacaatccctgtgaggctgtttgcaggaacttcccctccgtcctgcgaatcagttcttgggggaaaatgttgtattttgttctccaggtggacaccccaagtggacaaggcagggtaggagcccccagggtccctcagggtccctccacactgccctggctttgcctgcatctcatccctgtgtgaagctcattggttactgaacaaaaggaaacagacgcgtgcctatgagcatggagagaaaccaggatccttgtagcgctgtgctgcttcgcggtgagcatgcatagcttttggctttgtgttccctcagctggatgttcttatttcctatagcatatttgtcatgagggctattttctctttaaaagaggggatgggagaaggcttcaaagtctgatggcatgagaaagtgactcatgccttgtttgttgaaccagctagttgttgagttttttgctgggtgtaaaattatgtctccattttggagatgtactaggaaggctaggcacatgctgtcggtgggattaagagcatcttcccatcccaggttcctccctcctacctggcctgcaagacagcgaaacgatgaacttgtccctccaggtgcccaacccgaaggcttgggtctgagctgattgctctctcccctggccaagctgagaagaaccagagatgtctcacgccctacattatctatagtcttcatcctgaggactctcacctctccttcgagttcctatgccagggttaggcttgagttgatttcaaaggagaggtcttagggggaggcagagacgaactggtggcccttctgaaagcacctttgctgggggtgggtgtgggtatcccctgccagtgtgcctggtgtcagatagctggcattgatggagcagtggcatcagctctcccctctactcccctgccagtagcttcttgtcttactcctctcccatcagcagagactatcagcgcgttgatgctcagtgggcactcatacctacttaccaaaggcgttatctgccgtgtgtgcagttggctccgttgacaccacctgactgctgggcctctcctctcttagcccctctccctggagccataacaagtgtagcagttgggagacagggccaagtggctctggaagatagcacctaaggcttcttatctagtaggtgctgttttgttttgttttctccatttgctgttgcccaagaaccaaagcatccgccactgctcagctgtgtggtgaaatggtctggcctggtgccagggtgcctcgccaggtggctgagctgtggaggctgctgcatgcgatgggccgataataccccatggtgctgtaaacaggacaccccaccctcctgcagacacccagcccatgccccagtgctggctgctttgtcattgcctgtcatgatactggcttgtcttctctgatacaggagccgattgttctgtttctctcccaggttcccaaatctgagaggggcgctttccagaaataaaaccagttcatctttcagccacaagcaaccgttttgacttctcaacacttcctatcctttagctgtaatcacacgagtgcaggacagcgcccattccccacatctttccggtatgcccataagcacccacttccccctcacttgtgggtctgctaggggatgcttgtgagccgcggagcttaagcccttgctcatcaacagctgccaatgcccaagtctctaagaagctttattgacttttgtttgtttgagacaagggatcaccctgtagccaaggctggcctggaactcctgttcctaatgcctctgccttccatgtgctgggactacaggcacgtatcccttgcctactcctttccgcacacttctctcagacagacagtatccaggagagcagtaggctgtccctagtaaaggacagtgaatatacagtaaattcaagtaccttgccaggcctggtggacaggcctgtaatcacaactactgaggaggctagggcagaagaaatggaaaggcaaggcttccctagactaaagattgaattcaagaataccctgggcaaggtagggagaccctgtcccaaaataaaaagtaaagagagggctggggccatagctcaggagtagagtgcttgcctggtgtgtgtgaggccctaggttcaatccccaggcctgtgatacacctgtagaaccttcttgcaacagacttctcagtagtcgtctctttctccacctccttccctgtatcttcctcgggaataaaagcatatttgcatttcttttctcttcagaatccctaggaggcaaggtggaccagattgggccctgctggcagagggaaggcagatccgtgaagatggtagtgttggctgcagtcacactgcagtgaggataggactgtcagacctatgctgtttggatagcccctcctaggtatcagcactgtgcctgctagtctgcagcctctttaaggatggcacaggatagcatcgctatctggttttggctttggtttgtccttaggggaaattgatgccttgggttagcagctcccactcagttttggtgcctaaaacaacaggtgcttgccaaaccattttgggggatgcagtaggttagtttgtttttgtttttgtttttttccctagtcgaaaacctaatctttttagaagtgccctctcctttattttctaggcaggagagaaacatggcattttagtctcctcagaggggttgggacatgccaagaatttggggatttgggaggggccatggagccttgctaagggctctgagacaggaggtaattctaccttgtggctagctaggagctgagccagcaccctgtgctgggatgtggccgctgtggagataaggctggagcccagctgtgacctcatccgcaggggtggggaggcaggtgggacctgcaggtgggctgagcaaggtctttgcaggtctgtctgccagcaagggaggcagcgcagcccttcctcattccattctctccttccctccgtttctagctttttttcctttaatttttttttccttttttcccatttctgttatgtttatgtatatatggaggaacaggtcacacagcttttgtgatcagttttgatccgaggcagctgagtagaatgaggtatcaaggggaatagtggttgggtctcttaccgattccaggattttgcgtatttcctggaacctgtctgtcagtactgtgagtgaaataccattcagttccctgttgtggaaatcggaccccagctaaatagtttgctgactagggtggttctgagggtggtgagaactgacataaaatcagtgtgggggcagttgttgctaggtgatagattcctctgttacaggcttcaaaggcctggcaagaaacaaatgaaaacaaatacactttacagcagaccccaaactcaggcctgcccctaccacacaagcacgcacacatgcacgcacgcagacatagatggagatatagatccctatatatccacacacatcccgaagaggagctgacagggcagtcccctccaggtacccagcagcctcagggcaggtggaaaggggcttggtttaggtataggacacagacaccttcttgaggtgtggagtgtcatcagacactgcctctctgattgacattcctcagtctctctatccctttccagggccgacaggagaggaaagggcgactgcagaccaaagtaatttgtagcaatggggcaagactgaaaagtattctctaagcctgagatgtttcagaatctccacagggtcttcctgctgagaggacggggcaagtgactctgactgacctttctcccccatcactgttcctcagccctggaggcagtctctgtccttccaaactaggaagacgcagctgcgaggattgtgacatccaagcctacatgctagtcattttcttacctgcctctttgattatctgtcatgtaatactgcaaaggtgctttctagaggccaggccttctaattgggttctcagggaccgccttaaaggaggcctagaggacaggatttcagtgtctgagccggtttccatagtagaccagaagcctccagaaatatttgaattaccacctttctaccttaagcccaactcagaataatgcctgattgaattgcttgtggaggaggtaaacttgaagcttaaaccagtgggcctgtctgtaaaccactgcagtaacagggtcacaaggaagtgaaggaggaggtggcccccagaacctcagacatagcagagacgtggctatggggtctttctgaaggtgagcggctgctgtggatgcccagaggtgcagcgggctaattacagaagctttgcctttctactatagggttttcagttttatccaagtgcttgggttcttgccaacctgggctctctgtgctgtagccattggggactacaaagctaaatcagagcccggcctcacagactgttcattctctgggagtcacaagtgctgtaaccctagagagaggcagtaagtacaaggagagcccagaccatcccgaaacactcctccaagggccttcccagcatccacaggctggggaggaggtggaggcagttaggctggcctgggggatggcaaagacatcagcagcagggagagggaaaggccccggaagtggtgggaaacggcacagggtgtcggatctgcagtgtagaggaatgaagtgcacaggacaggtaagtaggccagagcatggcctgtgactccgggcttttacgcatgtgtacatgtgcatgtgtgtgtgcgtgtgcgtgtgcatgtgtgtgtgttgtacacaagcatagccaaggcatgagaatggaggtcagaggacaatctgaacaactttcaggagttggtctttctttccaccagtgtgatcggggtatcaaacgtgggcctttaggcctggcatcaggcgccttttctttctgggtcatcttgctagctcctgacttccgactttgaaagggcctttggaaaattttagagtagagattttataaacatttaaaataatgtattgccaggcatggtggtgcttacctataaccctaacccttgggaggcagaggaggagtgcaagtttaaggcctgattgggctatataagagaccagctgaaagccaaaaacacgggtggtggtaatgctctcggcaggcagatggatctgagttgaggctagcccagtctacaaattcaggggtacacagagaaatcatgtcttgaaacaaaacaaacaaacaaacaaaaaaatccaaggtctgcctggatgtgatagtgagacactgtctcaaaaacaaaaacaatttcctggtaaatgtatgttgtagtcagcatatactgattagaaagaaggtagggacacagccaaacaacattatgatgtgcttccgttttattattgttatcgtcaccatcaccatcaccatcatcgacagggtttctctgtgtagctctgactgtctggaactctctgtagactaggctggcctccaactgagagttctgcctgcctctgccttctgagtttgtgcccagcctttttgtttgttttgttttgttttgtttcttaccctagcccatttaaaacatttaaaatgtatgcatgtccacattcagaaagtaagattgcatgatgaaacttctttttttccccagacagggtctctctgtgcaaccctggcttgcctagaactcactgtgtaaggctggcctcaaacatagagacccacctcctgagtgcggagactaaaggtgtgagccaccgcacccaccagtgtttcatgattaacagtgattgtctctgggtgaggaggtggtgatgacccatctctgtgtgtgtgtttcttttgtttatatatttcttgaatttttttgacaattcatacttataacttttttcattgaaagtcatttttagtctcttctaagtgagtacttatttgctggctgaaggagatgatttacagtatgacaaaggttacattaaaaactaagagagcaggctggagagatggctcagtgggtaagagcactgactgctcttccagaggtcctgagttcaattcccagcaaccacatggtggctcacaaccatctgcagtgggatccaataccctcttctggtgtgtctgaagacatctatatatactaacagcatattagagagcaatccaaatgtccagcaaagtaggaatggttaaacaaatcactgtttgatatcataaattctttaaaatggcaaatatgtagatcattgatactttgaattgggattttgtaatatataaaacaatgcaaaatatattttataatttatattgattaggagcctgtcaaaacatatgtaagtatctaaattaatttgaagaatttcacattattggtatcttttttttaaaaagctggttaacataaataatgtaaaattcactgccaggtaacagtagtgcacacctttagtctcagcacttgagaggcagaggcaggtagatttctgtgacttccaggacagccagggctacacagagaagccctgtcttaaaaaataaaacaacccaccgagcagtggtggctcatgcttttaatcctagcacttgggaggcagatttctgaatttgaggctagcctggtctacggagtgagttctagaacagacagggctacacagagaaaccctgtctcaaaaaatcaaaaacaaacaaacaaaaaagaaacaaacaacaaaagcaaaacaacagcaaaattaccattttaagcatcttaagtttacaattccatggcataagtacatttatagtgtagccatcagactatcatttctggaatgttttaccatcccagaggtaaccatcgattaacagaaccccccatccccttccttctgtgctcatggtcaccttagtcgtccttggccctatggatttggctattccagatgtctcatgaaggtggactcctatgacatttgctgtctgtctgtatctggactatttcaccctgtgccaccaggttgccttcaatttatggctattataattgatgctactgtgatcatacatatataaataacttttcaaatctctgctttcagaggtgtttttctttttttcttttcttttttttttttttttttttttgaggggagtctttacctagaattggaatttctggacccgaagggaattttctgtttaattttttggggaactgccaatctttctgtgtctttttaatgtaaacctcttcaagtctatttatacctacagttcccagttccttctgctatgctgaatatacacataaatcacaagggattactacagatgtgaaggcagtttgtctgtttaaaggagagtctttatagatcctcagatagtggagtgtttgaacagggacatagaaaacagagtcaactcagacccctgagacttccagatgatcccagaactcttatgttttaaaaagagtttcaacttttaatttctcccagaaatcttaagccaacataaaataaaatgaatgcatttataattgccccttcttgtgttttgttttttgccattcagataaaagtcagagaaggggttgggaaaggcccgcagacttggctgctgtcttctgctgcacgccttggcttagagctttgaggctctttctgggccagtgccctagctctcctggagctgcctgggctggaggaagtagtaaggacccttcatgctgggcctggtggtacacacccgaaatcccagtttgggagacaggcagaggattgaattcaggatgggcctgggctacacagcccattcaaggccatcctgggcaatatggcaagatcctatctcaaaaacatagcgctgtggaatacagtccttgtttggcctatgtaaggatctgggtccagtctttaacaccataaaaagaagaaaagaatgttttttaattaattgagccatttgtgcagcaaagaagattcaaaatggatgcaggaggagggaaggagggcagaaaatgtaaaaagggaagaaggcttgtgttttatgaacatggagttccctccgaggctaggaaacagttcctccagggagtctctcggagtggacacctgggagtgctgggctcagagtaccctagagcaggaacaaaggacatcgtaagggacctctgtgtccactgtgaagtggtcagaagggatccagtgaggacgtgaagtcagggttgctggtcagacaggatgggcctttgctgttgtgaattctttcaggaaggtgggaagacatggcaggcagatgaggtatcctggaagagaggaggctggttgccatgactccttcctccatgctgatggcaaggccttgcgggctgtgctctctttcagccagcgttccatgttcggtggccccagaaaagtcggtgtgtaggcctcagccaccccaggtccggcgtacgttctccctggacaccatcctcagttcctaccttctgggccagtggccacgagatgccgatggggccttcacctgctgtaccaatgacaaggccacccaggtaatgggatcaggggggtgggagggctggctgaggccactggtgacttctgtcacaaaagtgacttgacctgggttttgggtgtacataaaagcttttcttcttctactgtttaccagggtttttccatctttgttttcttttgtaaacataggtgaaaatgagtttgcattccacctggtggaaaagagacgtcaagctggggcttacagtttggatttcagggtttacatgtggagaatctgcagctggcttttaagtttgggacttttaaaatgagatttgccctcctgaagttaaactaaggccaacatttggtccagtttgcattccccaggcattcgaggaagtggccaaagaggcgctgagccagggtcgaccccattggatcagtaggtgtagggcattctcgtgaagagctacaccttgccagcagccaggccagagctgctccagggcatccgagtcctgcacagcccagctttctctcctgtgttttcatgaacagtcctgcccttggaagggatctccacagaccatccagcccatgtgtccatcttttggataagatttgttaacttgagcaaaaaagtcaatctcatctggaaattacccaaagaagtttcttagtctgacctaggatttcagtcttcttagcatttaagtttggtaagagccaggctccctttgggggcagcttaagctgagtcctcttcaacttgcagggaagaacacctagcttggcccagcccttcattctgggtaacaggacaagaaggggtgaggcagctcttcctttgctgtgtagagtgtatccagtctgcccccatccatgttgcatgacagccgggtcgtatggacccccatgctccatgcagctcgctctgcctcctcagctcatcccaccagctcctttctttttatgagatccactttcaaatgtgtctaatgaacatttgaacaccctctcctttccaatggttacaagatttggtttctttgagcctggtttccagttgcctgaaggcccgagaacagacaaccaagggatgtcatggggctgatgtctggcaaagtctagaggagcaagagtcttccagaaatgccccttgttgtatcaaaaagaattgaaacaaggttaaagcagtaaggtgatatcaatggccagtcctctgtagaagtgcaggaaggaggtgaaggggagcaggcgctctccgggagcctgcactggtctccctttatccttagataaggagacaggggcatgcttcatccctcgtgagcctggcagtacacactcctttctctatggctcaggccagataatgtagtaaatcacggagggcttcctgcaggggtggaccttgatgttgcttcaagtaggtggatgcatgagcatcttgctttgctagacatcaggcagcgtatccctacctcggtcatttcctgtttgccagcctctgtccagtggctgtcctattcctcatggagctttctctctgtcaccccaggcagggctggcctcagacattctctggccaagttggagtggcctgggttctgagctgcgtgtttttgcttcggcttccagctgcaggccagatcttttatataacaagtctgggctccttgccacagcgagacagaggtcagcgatgtgcctccatgggtctggcaaggcccagccctcgagctttcctctttcccgggatgggctccagccctcgctcgaggaactcttagcaacctgtcaatattgtggctgcaggcaagaggtgggaggattctgatcggtgtaagcatccaaccccaagtatgtgctctgcccatctcccaggcctgctcttcagggaagtttctgctcctaggcttgggttccactcaaattactgcttgaggctcctgtgcctggtacaagctgccacatttagcactggcattacactgtgaaagctttaggctcaactgccatctccccagaaggccttgtgcatcccttctgaacagcgagagatcacccaggaggatggatgaaattttcaggaaatgtggagaagggaaaggggagtggggaatctagatctattaaggtctttgaaagcatgcctctgtgtgtgtgtgtatgtgtgtgtgtgtgtccgtccgtctgtctgtctgtctgtctggttggtttgcttgttgggttgtaatgctggagatagatagagcttagggcttcaggcaggcaaggcaagtgcttgtgctctgccactgagctacatcctgagttcattaaaagcctttcagctgttaggagtggatggatgccagacctttcccagtcgctttgagcaagccagctattcctaccctgcccctcactcgcaccctttctctctagccatagcagtgaaacattccgtggtctgcttcatccagcctaatggcaggtacttgttactgttctcctgggtgcctaacctccctgtgttagaggctatgccattgctgacactcccaggaatgtgcttttcagttacagctgaggctaagcagctctttcccagaacctcccctagagggctttgctccttccaagccagtgtcagagctaggcctcagacccagagcacctgcctttagagagctgggcgtgctgtgtgctccaggcctgttagtgcatagggcagaagagattgaagagtgctcagcacttgggtctatggcaatgctatgatcccaggatccccttcctggccatgttccatgttttcagtcaagtacaagtcaatgttcagacaaccgtagactgagtaggagcaaggctcctcacatatgagggaagaggaacaaaaacagctattctggaaaggaggaaggggtgtaaccgggacacctggggaggggccacggcttcgatgcttgtatctttttcaatgttggggatggaacccagggcctgcacatgctagccagatgctgtacttctgagctagacttccagctggcttgctttgagccaagagggccaatgtgaaaggtgtgaacaggtgtttccagcagtggcttcctgagacagggccagcgagagctagggagtcactccccccagcaccacttcctgtggcatctccatcttctgcaggaagtcctgtgtctgagagaagtttttcagaattgtctcagtttatttgagtgtgttttctcttctgtggcccacccttcctccaggccatctgggaacccagagctggccaccaagtgctttaagttggcctctcctagtggctgtgccctggccagggctcgtgatggcagcacatgccagtggctgtggttacctctatcccttcttactgggcaaagtatatgagccttgtactcttctggagggaggaagtgggcttcccacagccgggatgactgtttgagcaaagttccccagctggtggcatccttcccacagaagggacctcgggtacctcccctgcctggctccactcacactcgcttctttccatccccatttctgcttaattgtggggaaacctctgtgatccccactcctgctcccatttacctctgacttttctttagtcttaagttcttaccagacgtcatcagggagcatcccaaaggccggaggctgagcagcctcctggctggagaggacttcctttctgtctttcctgcatcaggggcaggggtcctgcctttccctgagctgctgcctcagtgttccctgatggcacatgacccagtgtgaccgtcacagacctttaaaaaattgttttgttttttgtttgtttttgtttttgtgggcataagggcttgggcacagagcctgttttccaaactagtgtccaagaccagtgggtcagtgcatggtttgacaatacaacaaatacttaaatgtggccatgatggaaaatctgagggttatccagtcactgctaaggtagaaatggcagctttggccacctgcagccatagttctggtgctggccagtggaccaccctccgagcctttttgtttggtcaaagtcctaatggactggcttccttctgaactgagctcagcacctgccctctgccctatatatatatatatatatatatatatatatatatatatatatatatatatatatatatatatatacccccagttaggtcctgggctgctctttacttctgacaggtacagtgtgggtatgttcccaggccccagcctggctctgcgcatggagcatgcccaggagccaaggttactggagacattgagggcctggactcttcccctcctggtcatgacctccaggtagaaacttagctgggttggagaccaagaaagccatcccagtgtggagggcccatcctccttgctttggctgctctgttggctctgtgggaagctgtcttcctcttccatgcccatctatccctccacatgctgccctggaatcttataatccctggcaagacaatcgtcctctacccatgcatgcacggttttgtacagcagctgcagacctgccgctcactcatggttagtaatcttaccccaccctccctcgctcccttagccagggtgtggagaaagtccattctagtgcatgagtcccctgacaagcatggacttttggtcccctatgcccagactctcctccacacgaaggggcgtctagcatgactatttacactgctgccccacagcttggcctgactctatcctggtgacctccttgaagtagatcttagctgtgactttactgttccccaaggagaccatgaccaaggcctttgtagtgaggctcagaaaggaggatcctgagcaatctggggtacatttcccccacttgacatatccactgcagctagaaaggcagaaagctggacctttgtacctgcccggcttgacagtactcacaccagcctgtaaacagctttcagtagtggttggcttctcttagctcatagcaccttgctctagcctctgctttagtggtcacatggctttatcctctgtatgcaccggctccttcagcctctctctcacaagaacactctggcaaggcagggattggcagtaaggctcgcccatcgtagaagggagagagatgagtttgtctgggttgagggatggggtgatgatttccatgggcaggtggtggatgctgagataaagtgatggcgtcagcatcacatgtacagagagtacgcagtagtttgtaggaagatgttgctcaggagaggtcggaaatggattaggaaaggagatgataccaactcctatggtttcctcatctttcttccactcctgtaccagtctacatctccctgtactccttcacagctcctaggaggaggtagctgagacacatgtagaggtgttagtagccagttgcaacctgacccagcatccttcttgtctttcaccacccacttgtgagcccggtatcttcagtggtgaggagggaacatcatcctcttaggttttgccatctctcctctgtggtctttgctccttttccagaggtgacagagatgtgtaggactcaactctactggcagcactggtgatctgcaagcttggtctaggcacatgagcagaggaggacatgcgtgttactgcagagtcctagtagctgatggggagataggctatgttctccctgtcagctggtgtagctcttctgaggtctgatagactgagttagagagccaggcatttggaaggagatcagctacttggtttctagagactgtgagagccagtgtcacctgagggctttggggtacatggctgcattcctggctgctcttttcataaaggaagaaggctgggaatggacctgaggatgcactccctggggctgccagtggtctcaccctggctgtggtccacggcctgggaaaggtcctgcttgcgggcagctgcagacaggaagggccagaagctcagtctgcagcggcttctccacgtgcagctgtcgcaccaggcagtctgttctcacaatcctggctcagacttgccctgcgagctcctcttagcagctgttgggtggtgaggagtcttgttttcccctgatcctccccctctctctgtgtacagcagcctctcgggggaggtcagcagatctcttagaggagccggttcccaggccctgtgtttttggcagcttgtgcatagtagtcagagaggagctggtcccactagagcactccccttcgccactcccttggaatggaaataggatgttggtgatggggaaggctctgcgcctcttgagcttcatgcttggagccagtaacttcctcttttagtggaggctcctccactaccatcttgggtcccctgtcttcgtgcagcagagggaagggagcacatggaatgttcttccccacaaggaacaaagaaggaccacggggaggaggcacgaggcatgaacagaccaagaatcagtgctggattcagaattctgaaacggtcttcccctgcctgtgctggaggactttggcatccctgacactctgcctatgtgatgacacaagcttgcatcatggcattaaacagttgccacctgcttcatcctgaggcacccatggagacctttctcctgtttcctctttgggatcctgtatgatcacttgttttccccgggttcccaggcacctggccttacctggattcatggggagagaataaaagatacaggactctttgaaacttcctgggagagggacagcacttggcctcaccatgggagtgtatccagactgactataacataggtttgaaaaagggataaggaagggctgatgtagctcagtcatagaacacttgcctagcattttcaaggccctgggttccatccccagtaccaaacactcaataaaaaaaaaataaannnnnnnnnnnnnnnnnnnnggctctttggaaacttcctgggagagggacagcacttggcctcaccatggggagtgtatccagactgactataacataggtttgaaagggataaggaagggctgatgtagctcagtcatagaacacttgcctagcattttcaaggccctgggttccatccccagtaccaaacactcaataaaaaaaaaataaaagagccgggcgtggtggtgcacgcctttaatcccagcacttgggaggcagaggcaggcagatttctgagttcgaggccagcctggtctacaaagtgagttccaggacagccagagctatacagagaaaccctgtctcgaaaaaccaaaataaataaataaataaataaataaataaataaataaataaatgaatgaatgaatgaatgaatgaatgaatgaatgaatgaatgaataaataaataaataaataaataaaataaaagagagaggaggccagcacttttgggccttggggacagtttcctggagagtaaagatcgggatgaggccacacacatgcttctcttgcccgaaaggataaagtgggctgggtgtgtccatgaggttgatgaacagatgtgaggaggctgtacaggccaccacctctattcaggaaaccgaccagctgtttcctgccagtggagctgcctgtcttactgtatttctttctacagacacccctgtcctggcaagaaccagaaggtgagcgggccagcttctgcatgcacaagcgatcagcatcgtggggcagcacagaccaccgaaaagaggtaaatgccttctccctacaccgtccatctcctggtactatatgacagttttatcccgaggatagctacacctccatcctctcttcttcctgctagcctccttctgagggagtggctcttcaactggctccccggcttctagtagcttgggtgtggggcctcagaccctcttgctagagaaactccagccactggctgcgggggagtccagcctgcaggttgggagagtcgtttgcttagttcctttgaggctggactctggtaagtgagtcagagactgaaggaagacagggagcaaggccctggcaatcaggagcccccagcctcatttgctacttaaccatccaccaagtttccttttcaaagagaaaaacaatcctgggttcccaatactttttcttggtcctcctccctctgcccctggggagggctggaggccctgacacctaggagagaaagccacaggctggaattccagggcttctgaaccagctccttctgacaagtcctgtggcagctccaaaggaaaggtcaacttagcaggactcacccctgacccattcacagagggaagttgtttctgccctcggtggtcacgctcagagtgctgagaaaacgcacaaccactggactgtaagcttcaagccaagtgaaaatgtaaaacattctcaaaaccttaaatggcagagtaaacacattctgcctaggaagggtggagagtcctggtctttcttcatggtcggatcgatccccagcagcaagtctaaaggcaggcacatccttgggctgggagatgcagcccagggctagcgccctccttagcttggctgaggccctgggttcagtccccaacagtgtgattgcaaaggggctggagaggtagttggagaagtggctcagaagttaagaatgctcattgctgtttctgaggttctgtccccagcacctacatggtggcacataaccatcagaaactccagttctaggggactcagtgccctctttgacctccacagacaccaggcacacgtgcatgtaggcaagacactcatacacatacactaaatgcattgaaaacaataatttaaaaaagtagtttcttagccaggcagtggtggtgcacacctttcatcccagcacttgagaggcagaggcaggcaggtctgtggccagctggatctatggagtgagttctaggacagccaaggctacacagagaaaccctgtctcaaaaaaccaaaaccaataaaacaaacaaataagcaaataaataaaatatgcttcttcttgactgtcatcacaacttttatggcagtgggcagcaaatnnnnnnnnnnnnnnnnnnnncacacgtgcatgtaggcaagacactcatacacatacactaaatgcattgaaaacaataatttaaaaaagtagtttcttagccaggcagtggtggtgcacacctttcgtcccagcacttgagaggcagaggcaggcaggtctgtggccagctggatctatggagtgagttctaggacagccaaggctacacagagaaaccctgtctcaaaaaaccaaaaccaataaaacaaacaaataaacaaataaataaaatatgcttcttcttgactgtcatcacaacttttatggcagtgagcagcaaatctactttctgaatttcattaggctccttcgcattcataaaattctgcatcctgctcagggtataaaggcccagaattacaagtgtgatgggaatcatatttcaaaagtggttgtccgtttatttgtttggtttagggattgttggtgggggacagggcaggatattgctgtatagcttagtctggcctcaaactaagacttgtgactcagcctcctgcgtctggattatagtaggcttgatcctccaccactacagaaatgcctgtggtaccctatattgttacagggcctgggcgtctccctcttttcttggtataatttacttttaaacgagtgggaggattgcatgtccacactccctggtcgcaaggtctctgggatacttgaggaaatgattcgagaaacgaaaggttattgatgctcggaaatgccatgttcagtcaggtatggaggcgaatgcctataattccaaccctcaggaggctaaggcaggaagactgctgtgttcagggcagcctgcgatacacagaaggagacctgcctcaagataagaaaaaagaaaaatccagccaagttagagagatggctcagcagttaagatcattcattgtcctgggaaaggactagagttcagttcccagcacctatgtcagacagctcacagccacatatatgtaactccagctccagaggacccggtgccttggtttctatgctcacctgcacatacctgcacacatgcacacacacacacacacacacacacacacacacacacacacacacacacacaattaaaaatgaggcttgaaaaaaatttttttaaatttttagctttattttaaatgtatgaatattttgcctacatgtgtgtctattactgtatgcatggttagtgctcacagaattcagaagagagcattagatcacctggaatctgagttacagatggttgtaagcgacagtgtgggtgctgagactcgaactcagatccattgcaagagcagtaagttgcaagtgctcttaatcactaagccatctctccagcctcctgaaaataatccttaaaaaaagaaaagaggctggagagatggctcagtggttgagagcactgactgctcttctgaaggtcctgagttcaaatcccagcaaccacatgctggctcacaaccatccataatgagatctgatgacctgatgccctcttctggggtgtctgaagacagctacagtgtacttacatataataaataaataaaatctttgaaatgaaaagaaaaggctacacattgccccccacctttttgagacattgccttttttttccccccaagtacccccaactgacctggagcttgttaatgtagaccaggctggcctgcaacttatagagatctgtctgcctctgcctcccaagtgctgggattaaactctatgccaccatgcctgcctcatgcacttaggggaagggtgtcccttacagtccataaccatgatgctgtatgttctctgtttggagtctgactcatccaggacaccagctttcaagcatcctaactctgcgaccctttgatacggttcctcatgttgtggtgactccagctataaaacaatttttgtcgctacttcataactgtaattttgctgctgttaggaatggtaatgcaaatgtctgatatgttaccctcaaagaggtcgtgacccacaggttgagaactgctgatctctaggggaggaatagcaatttaaaaaatcaggtctagcagcagggtatctagcttagtggaacctctggctgtcatgggttagcacctttggtgtccatgtcccttttaggtatcctcagggacgggggcctcacctagggaaggaaccaggatactccagctttgcctcatgtcctttctcccccatctcttctgctagatcaccaagttgaagcagcagctgcagaggacaaaactgagccgcagtgggaaggagaaggagcggagctgccctgtccaaggggaccatgctgcgctgggagcagggagggtatgctgtctcccctgacctccagctcccctgtcctccctcatggcaggcttctgtggcgatagagttctgtctggctgtgcagtacagagctgcatagatgcctgtcagaagttttagtccaaagttgggctctgctgcatggccttggaaggcctcactgtgcttagtgtctttctcctctgtctcaataaaggcagtgacactagcagcatcttccaggtgtctaagctccaactcctggagaaatcccctctgaatcagtttgttggcaatatccagttgggattaaactctatgccaccatgcctgcctcatgcacttagcggaagggtgtcccttatagtccataaccatgatgctgtatgttctctgtttgggagtctgactcatccagtacaccagctttcaagcatcctaactnnnnnnnnnnnnnnnnnnnnggaggaggcacgaggcatgaacagacccaagaaatcagtgctggattcagaatttttgaaacggtcttcccctgcctgtgctggaggactttggcatcccctgacactctgcctatgtgatgacacaagcttgcatcatggcattaaacagttgccacctgcttcatcctgaggcacccatggagacctttctcctgtttcctctttgggatcctgtatgatcacttgttttccccgggttcccaggcacctggccttacctggattcatggggagagaataaaagatacaggactctttgaaacttcctgggagagggacagcacttggcctcaccatgggagtgtatccagactgactataacataggtttgaaaaagggataaggaagggctgatgtagctcagtcatagaacacttgcctagcattttcaaggccctgggttccatccccagtaccaaacattcaataaaaaaaataaaagagccgggcgtggtggtgcatgcctttaatcccagcacttgggaggcagaggcaggcagatttctgagttcgaggccagcctggtctacaaagtgagttccaggacagccagagctatacagagaaaccctgtctcgaaaaaccaaaataaataaataaataaataataaaagagagaggaggcagcactgttgggccttggggacagtttcctggagagtaaagatcgggatgaggccacacacatgcttctcttgcccgaaaggataaagtgggctgggtgtgtccatgaggttgatgaacagatgtgaggaggctgtacaggccaccacctctattcaggaaactgaccagctgtttcctgccagtggagctgtctatcttacttactgtatgtctttctacagacacccctgtcctggcaagaaccagaaggtgagcgggccagcttctgcatgcacaagcggtcagcatcgtggggcagcacagaccaccgaaaagaggtaaatgccttctccctacaccgtccatctcctggtactatatgacagtttttttttttttttttttttttttttttttttnnnnnnnnnnnnnnnnnnnngctgccctgtccaaggggaccatgctgcgctgggagcagggagggtatgctgtctcccctgacctccagctcccctgtcctccctcatggcaggcttctgtggcgatagagttctgtctggctgtgcagtacagagctgcatagatgcctgtcagaagttttagtccaaagttgggctctgctgcatggccttggaaggcctcactgtgcttagtgtctttctcctctgtctcaataaaggcagtgacactagcagcatcttccaggtgtctaagctccaactcctggagaaatcccctctgaatcagtttgttggcaatatccagttgggattaaactctatgccaccatgcctgcctcatgcacttagcggaagggtgtcccttatagtccataaccatgatgctgtatgttctctgtttggagtctgactcatccagtacaccagctttcaagcatcctaactctgagtgaagaaaaacgctttatggacatgatcgttccctccagtcatagctgataactgttggggctgagtgcggagggacatcatctgatggcttcatttgcctctctgtaggcatcccttcccagccaccccccaggaccccccgtcctgcgactcagcccttgtctgcacagaagcctagaagggctcaaccaggagctggaagaggtgtttgtgaaggagcagggtgaagaggagctgctgagggtgagtggtggctgccccgacggtactggccggctgctcctgcacgagggcagacggcagtgccgctctttggggactctcaggctgtggctctgcaagcaacaacatgtaaacaccaccttccagaagtacacaaatggagcgcatttgtctcaagtgaacttaagcacgggggcagcagggataggtgggtgtcactagggaaggccgtgtggtagggacaggcatgttaactctttgtctttgctgtgacaaatacccaacaaaagcagctcagggaagggagcacaggctgcctcccagtcccaggtgtgacccattgtggtaggcagtcatggtaacagcgtgaggcagaaggtcaaggggcatctgtggccatgacacagaaagcagcgagtgcttggcctcagtttgggttttactctttactcagtgtgggacccctgctggggatggggctgtgtcctttacagtggctctgcccagctcagctaacctgattcagggagtgcctcacagacatgctcagagactgttgctgctgggctgttaatgtccataaagttagattagccatcacagatgagcacagagagggcctgctaggagaaaaccattagctaactggccacccttacccacacgtgccagctcacactaccttactttcagtcactacgtcccgccccgtgtctcactactcccaggcacccatcagtccttcatgtacagttgccatatgcagtcttcctccaccccacgctcaggcagaatcaccagccgcctcctttgccatctcgggacatctttatattggcacagttcagttagggaatgtcagttgagctgtatgaacataattttgatgcgcacaagcttcggcttgttatttccctacaggctagtttttgtttgtttgtttggagacaggatttctctgtatagccctggctgtcctggaactcactctgtagaccaggctggccttgaactcagaaatccgcctgcctctgcctcccaagtgctgggattaaaggcatgcgataccaccacctggcttgtttgtttatttttatgtgtttgtttgtttggttgttttgagacagggtctcactatgtctggctgtcctggaactccatatgtagactagtctgtcttggcaggaaggtctctgtgggttcaagagcactgagatcaactcagagatctgggtgctgggattaaagacatgttctaccacagccggctgctggctgatttttaaatggatgtatgggcgattccttatgcccctgaacatatgcacacactagttcattgggagacaaaatatcatcaaatatttaaaaagaaggatgtgaggtatttaatgtatgaaaaccatctgcacgtttgtcctgcagtggcttatagcatgtgtgatgttctggtaccttggccctattatgtcaccctgtgtatcagtcacctttgtgtccaagagcctgtgtacatagaggggcactgatcacatcacacaaatgaacgtgactgtagagaggattaacaagtctcgaggaaaaagaacaaaagtactctgggagaaacagtttctcctagactgtaagttgtcaggcttaaggaagtgacattcttctgtcctcgaggctaagagaaaaggtacagggagacccctgagggtcactgcaatgtcacaggcctgagaagaccctggactgagtctcttctctttcctcgtcagatacttgaggtccctgatgggcaccgtgccccagctcctccacagaatagcagctgtgaccattccctccttttggagccaggcaacctgaccagctctccctccgtgccactggcatccccccagcctcccagccaggccagccgtgaggagcaccagggtgccaccgaggaactagcatccatccacggtaacaaaggtaagtcatggaaccggagcactagagctggctctgggctacagcagggactccactgatctttgctgtgaagcattcaggcctagcattctgaaccaaccagctctgtgtgagtcagttctgcacactatacctgtgataataatggtccttacagcactctgactccatgtttatattataaattctcttacccaaaagagcaacctttcccatccctgttatttggctaaggttcaggctgccaaggtagaaagctagcccatctgtgttcaagggttcccttgactcatatccaggaagaccttcaaggcagttacaaattagataagagaatatagtctcttattcagggtcctgcatgtttgacccagactgattccacaaatttttggttctaaatccctagtttctaccatgtaggacttggctttctacttagaataaggcaggaatcctattaacacccagtgttagaaaaaaacggttgcccgcaccacctgacttgttcatagtaacctcatgagctaggctggtcaagggcatcatttaacaatacacacaggaaatagacagcacagaatgggaaggaagaagtataagagaaacacagataaagtcaatatttgcagcctaggcaaagtgcagtcacaggatggaaagtgagagaaatgttatcctctgagtggggcagagtcaaggttgcttcttggagttaatacaggagtcctctctgcaaggaggggctagctttccaaaataaagaagggatgaagctatggtgctccttggccagggcactggccccaggagaaggcagaggacagcaggtatttcctttatgtcagaggtccaggcattctctttgctcctgggaatacaggattacaaggaatcttctccatcaattcagcaagttttgtcccctcttgtggtgctactggaataggacccatggcctcatactgtttaacaagtgctctacagctgagctacagcccccatctccagtggtgtagcatgaaacacagcagcccaaatagcagcgctacccagccccgtggtacagaaggcttgagctaaggagagtagaggttttccttggtctccactgactcagccctgctctctctctagcctcctctccaggcaacccagccttcctagaagatggcagtccgtctccagtccttgcctttgctgcttcccctcggcccaatcacagctacgtcttcaaacgggagcccccagaaggctgtgagagagtgcgtgtgtttgaggaggccacgtgagtgcatcccatggatgaagcatgggagggagggagggagggacactatggaaggggagcccgtgttgtcccactgttcaggtccttcttcagtctccagtctctccagtctagagagtctagaggttgtcaacatcagacgatcggtctcgcagattttccatgatcaaacttgttgacattgcctactctgagcacttaactctttgcttatcattatctccatagaaacctgctttctgcccacacgccagccacaagcgcagcgggagctggaagggaaagagatctgaaacttaagcctttttgttccttctatttttttttttaaccatccctggggaaagtgtgaggacttgctagaccatgatggggggtagaggggagagtgtgaggacttgctaaaccatgatggggaggggaggggggaggtgcagaggcagagacagagagacagannnnnnnnnnnnnnnnnnnnatgaatatgaatgagcgagagagaaaatgaacataccagtatttctttacccactggctgttcagttccagtgttgtaaacttccagggagaaatttctaattcttgcaagaaagaactttggaatattctcaagtcatattggacggttcaggagccagacactgatctctttaccatccgtgtggggtttgaccatggcctttcctgagtccaccccagtcccctttgtaggcctgagagagcttgctctattttctcctgcagctttatattcgtttaggcagattcacactggaagttgtggttttgatagcagccaggaagtttagtcatggtgtgggagtaaagatttggctaggtctgggtttgggcattgagggcaccatttgtatctcagctgagggagaagacaacccatgggagtgggcgttttggaaaaacaaacccactgtcagcaggtcttcgttaccattcccactgctgcctggtgttctcctgacttctggtcctctgaggcactgtggaggaaaaaggttttgttctgcaaattatgcaggcttgtagctttcctccctctcccatagaggcaggtagaagtgaggctgtgactggtcctcattctgtcacaggctcatgaagctagagcagtctccctcccagtcatctctgctagcttcccactctgtgttagacctttaaggaaggtggtgttgatcagttatttcctaagaagtcctgggctttcttcacgtcagcaactttcctcctgggaagctcctgatgggtaggaagctcctgatgtccctagcccaagagacatttttagttgtcataactagggagaaagggacatgatcgtgctgatagctagttggtacagtccagggatgctgttaaatgtcctgtgacttgtagggaagtgttctctaccatgatccctgcagcaggaaatcattcaactttggatgtgaatagggttaaggctgagaaccatgcttcaggcaaaacccaccacagcagcaatgagacccgaggggcctcaaaagtggcagagctttccaggttttgaccaggttactgtcattttgagcaggaacccagctccccagaagccctgctgaggcagtcacccttccagctccccaggcaccctgctcaggcagtcctccttgcttcgctggctatttttcttgcacttatgtgtctgtgtctctctccattcctcaggtccccaggtcctgacttggccttcttgacttcctgtcctgacaagaacaaagtccatttcaacccgactggctccgccttctgccctgtcagcttgatcaagcccctcttccccagtatgggcttcatcttccgtaactgcccctccagccctggctcccctcttcccactgccagccccagggcacctcggaagggtccagaagcttccaaggcctcctcgctgccatctgagccatggcagcgcagcccaccatcggaagagtctgtgcttttccagagctccttggtagtctgagtcccccaggcccctaccacactttaccatggagactagtgccttggtggcaagctctttgttagcttcccaagctgggggatggaggagcccttccttccctcttggcctttgagcactttcctttattgtgtcaaagccccaggtcctttggtggacatcagccctccacagggaggagacttacctcctccaccagcagcaggcagctcacaacttacacttgtgtacctgcggtttccctcacctgccagaaggtcttgaatcttctagcccagggtgtgagtccagatgacttataagaggctcttgtcatggaacagttggctgtggctaagagaggggaggtgccacaggcttcctgacagctccactctagagacacagaaaggcagaccagatgcctccctcctagaggagttgaccagagtggccctcagggccagaacacttgaccaatcagctgttggcaggggaccatgagatttcccaagtggcattttcatctcagttttaccctgactaaagattgtcttaggggaatcccaacccaaagtgaatagtgggaagaggggtctggcattccttcagggggcatgcagcagccccgtacttgccacctgccccagggggcatgagcagctccatgccctctacccaccccaaggttgggttgaattagaaaaatgcctatttttcttgtatcgatgtagaaactctattttctcccaaagacactatttttgcagctatttgaagtttgtatattttccgtattgcagagcttacacaaaattgaagaatgttaatgttcaaggtttcatatcttgtgtttagaggttattgtggtttttgtttgtttattttttgcagatcttgattttaatagaccaaataaatatgtattccagcagtttgggttttctgaatacctgggatgggaggagtgaagtagagtggaaggtattgtatccatcactgtatcctgtcttcaagagaaggaacttccatttaacatacaatggtctagttgctgtatggatgggccttgctagagacttttcacaaagacacattaacatgacatcttgtgtagaatggagaatgtgatgtgtcctgcaagtggacatggaagtcactagggaagcggcccattctaataagagtcccccaaaagctcctgagcgtcagtggacttgagagagaatgtgaatacaactgaagggagacagtctggcatttcagggactccttgtacttgcagggaaaatgagactaggaaatggcttgtagctggagcagcattaaggcagtagctaccatgcctatctgtgtgccagtgagtacccaaggcaagagtgtgcagccttggacacagaaaccatccttgtcctttcatagcctctcagatgtaagagctcttagatgtttgagcaaagtgggaatcaccatcccaacattctgttagtgcgtggaacttatgaagcatttcagcaaaaggcatttccattctactggggggaatacagtggtgcaatcatatctgtctcagaagacttcaggaacgcccaccccccatcccccgagcgcaggtcaggctatcccaagtactatcaccagcaaaccaaatgagaagatgtaagagaatgtcattgaaaatatgacaaccgggctggtgagatggctcagtgggtaagagcacccaactgctcttccgaaggtccgcagttcaaatcccagcaaccacatggtggctcacaaccatccgagatctgactccctcttctggaatgtctgaagacagctacagtgtacttacatataaataaataaaatcttttaaaaaaaaaaaaaaaaaaaaaaaagaaaatatgacaaccgttggggtgagagaagaaccattctgtgagtgaaggaatatccaaacagctttttctaaaaagactgtaccaagtcagggagtaaggattggcaccctgacccacttcacagctggtgcttcctaaccaaagaacccccctgctggttatcaccattgatctcacctgaggagactcagccaggtggtggcggcggcaaccgcacacatctttaattccagcacttaggaggcagaggcaggtggagctcttgagttcaaggccagcctgtctacagagagttccaggacagccagtgaaatcctgtcttggaaaaaaataaaaaacacatggggaaactcaacccaggtcaagtgaattgtttgaggtcccagttggaaaataaaaggcagaagtggaatccagactcactgtttggttccctggaagtgtctgtctgctgattcactagaataaaccaaaggccaagaaagtaaacgtatagtgactcccagaaggagacaccaggaaagggacagaccctattttctcttagtcctcctagccttgaaagatgtctggcttgtccccaaagccttagtgagtcaggtccccagtgatgggtgtggtgctgcctgcctttccttcctttgcctgaggacgtgccaaaggagcaagcctgcttagaggaaagcaacccaagacccacaactgcttgacaattgggactgttattaggtaggggacttggtgacctggtgttaagtcttgcttttgcaattctagcaaagcaggtgaagacccaactgttaaatcagggagaagtccatggatgagaccaaaaataggaagaggtgtggtgtggtgtggtgtggtgtggtgtgtgtgtgtgtgtgtgtgtgttgcttcattggagagttggaaggtcttgaagaaaatttacttaagaagttggaagggagccaggcagtggtggcgcactcctttaatcccagcacttgggaggctgaggcaggcagatttctgagttcgaggtcagccaggtctacagagtgagttccaggacagccagggctacacagagaaacctgtctcgaaaaaccaaaaaaaaaaaaaaaaaaaaaaaaacactcggaagggaggtaaagagaaaaggattgtaaattcaacattattctacatagcagattcgaggacagcctgcgctacatgtgattatgtcttttgttgttttttaaaaggcatttcaataaattgaatttttcacctcgaagaggtgaggaaatacgattagagttgagaaaatatgatgactaatactccaaacttgcacagcacacttaacagtttataaaacactttggtaaaccttagctcatttaatcctcacaccgttcaatgagtgacagggtggttattactaattacccctcgtttgcagagcgagaaaactgtagctcggaatttaagcaacacgtgatgtgctgcctctaagtgataagagccctgacctatcacagagcctgcccggtggctccctgcccaaagaagaggacctggacttcttagccaggtcttgaacacagggtagacagggttggagtcgctaacgttgggcagcggctagagggcgctacggctctatgaagcgttcttggcgttaggacccagccgaggcctgacagccaactgcaaaaaaaaaaaaaagcctttaattctcttctggcctcaccgcctctttctccgcccatctgtctattttcgctctgcggagccaattgataacatccacatacttatacgtcatcactatacgccgcgtaatcgcctaggcctccccaccgagctccagcttgtagatgtcctcggcgttgcctgatcggaaaaacctaaaagaggagacaataacctcgatatggctggctttcctggccaccaggaatggagccaagatcttaaagccttccttctttcctagaacgctcctgccggggcaggaggcatttccctctcggaagctctgagctggcatatctggaggtagctgctccggcctacgagccggcggtcgcacgcagctcctatgaggtccctgccgccggccggcgatgtccgcctggagctttcgccttcgccgccggtaccgctacctgctctgaacggatcttcggccgactcgtccgtgcgtctcatggccgctagtagatccctggtgcctgatcggctgcgcctgccgctctgcttcttgggtgtctttgtctgctatttctactatgggatcctgcaggagaagatgtgagcagacccttgagggggcaggactcctagcatcccccagccagggccggaattcagtctccaccatccattttacggtctagtcttcaggcttcctgtgtctggtacagggttttctcttctccggctcggccctctgacctttttttgcaccctgctattatacattactagctgagcatccttgtaattctaaaatttcagggccggcctctggagttttagaacgcgattttttttttccctttagatatttttacttttgttgattccaagagtgctccgtgacctgagccaggtcttattttattttatttttagaaagccccgaggtgtttgcagaccgttaatcttcttgctctgggtcttgccttttttttttttttttctcctacgggggatacttttgttcagctgtcttgactttttttttttctcctacctgtgtcctttacggatattttttccttaggctatggtagcagtaggttggcgtctactgtttagacttagtttttaggcttaaatcaaatcgtctcctttgggtaaatgagctcagtaatccttcctaactctaactacacccacaaaagcatgatacttccaaagctctcagtggatctgaacatacttgatgccaccgagtagcacacactaattgcttttttatgtgtttcgtcttagcacaagagggaagtatggagaaggacccaaacaggagacattcacctttgccttaactttggttttcatccagtgtgtgatcaatgctatgtttgccaagatctgtgagtacctcatagtaatttgttgggctcactctccttcctcccatattctgggcatagacgtggattcatctttaaaaatcaaagttttccctacctccacacccttgagtatttaaacagcttctctacagactgtaaaaccaatggctgtgaaatgagattaaaatattaggcctctaaattataccaacttttgagttggagacgactgggccgtctatattccaaatccccattgaaagcccttagaacattttcccctttatccctttgacttcgctttgtgtgtcagcttcaaacatgtctttgttcctgtcagtagagttaagccatcctttcttgaactcagtgaatctctccctccactcagcatgtggttgtgttaggcttaaggggaactgggacgatgaataattttcagagatttcccagcttaagaggatagaaatagcggtcttacttgacaggcaagttcctttcctatggcctcaactttttgcttagtggtccatccttgccccaccgggtttctcttgtatgttttgtttgtttttgttttattttttgtcttctcccagtgatccagttttttgacactgccagggtggatcgcactcggacctggctctatgctgcctgttctgtctcctatgtgggtgccatggtctccagcaactcagccctgcagtttgtcaactatccaactcaggtgaaacctcagggtgagatgagagttggctcagaaattgtgtggacaggactaaggggatcttccctcctcttcccctcaggtctgtgacttaaaggaaacaatcctagaaggctagggagtgagctcagttagtagagctggcttagcatgcgtgaagacctgggttccatccccaacactgcatgagcgaggcatggtgtcacatgcctgcctgcagtccttgtacttgggaggtagaggctggagggtcagaatcagaggctcatgatcatgttctgctgtagcagtgtatccagttcaaagccagcctgggctacttgaaactatgttcaaaacaaaacaaaccttgaaactatgttcaaaatataaataaataataggaaaaaagaaagaaacactcaaagcagagtatgcttgagaaagagtttaggacctagagttgggtacaggttgggtttggccatgatagggctgcctcctgagaccaagctgtggggttgagggccaatgttgtcgcctctgaatgtagcagcgacatccttcctgggaccccacagatgctcagaagttatttgctcacttttatttcaggttctcggtaaatcctgcaagccaatcccaggtaagccgagatggtgaactcgggcttcctctttctccccaagtgactctgggtggcaccatcccgtcggaggtctccctagtgtctttcctgtcgccggtgttgcttcctgtggtgtgcacaggccaagtgggagcgagaggctgaccttgcctgccttgtgtcctcagttactgtagtgtcccccgtgttttcattatcatcacacacccagaatcccgtgcgggccagctacctcttcctttcagtgtctggtgtcccctcccttgtcctccgcccttcccaggtccttcctggacctttgacttttgtcccctcccttccccacctgtgcactactcacaccctgttgctcaaccatctttatctgggtgccagcctgacacccctcccacctcaccctcggtagggcttctttctcagacgtttctccctcagtcttgacatggctctcaggaagagggtgctggggtcactgagaccagtgggacttgagtttcactgtcttgtttgcttgtctctctgtagttatgctcctgggagtgacgctcttgaagaagaagtacccgctggccaagtacctgtgtgtattgctaattgtggctggcgtggctcttttcatgtataagcccaagaaggtggttggaatagaagagcacactgttggctttggagagcttcttctggtatgcagtcctattttgaaggcagccttttctagcagattctaccaaggacagcccttaacaaggcaggcagaaagccaagggagggcgtgttgtcccttgactccttcctgttgctggtctttgttgaaaggtccctggctctgctatggccacaacaaggagcctgaaatatttagccatagctaaggaagctctcctggagaagagctctctgaggtctgtgtctagatccctgtgtgagctcagagatacccgagagctgaggaggaaaggatgcagtgtgcgtccctgggtttccaggcaacacagaagccagacttgaatgaacgacagttgtcatttagtgttaggccctgtcccaagtgcttcacatcgtcgctgatttacaacagtattctaacacagtgttacctccattttataagtgaagaaactgaggggaggctaactcacttgatcactcacttgatcacttaagtggcagggttccaggccaggcagtctgatcacagaacctaggctctggagtatagttctcgccatccccctccccccccaaccaccttttgagacagaatttctgtgtataggcctggctggcctcaaattttaaagatccgcctgtctctgcttcccgagtgctgggattaaaggcgtgcgctactactaccgtgctggaacacagtccttactgagccagaaagctagcctgcggatgaagcagcccttgcccaactccctggttcagtccctgtgcaccagcttgtaggctttgacactgagaactggtgggcttcctgctctactctgatgacagccccattgtgaccagtctggtgcctgccacgaaagaggctggcacagtcttttttttgttttatttttttgtttttcgtgacagggtttctctgtttagtcctggctgtcctggaactcactctgtagaccaggctggcctcgaactcagaaatctgcctgcctctgcctcctgggtgctgggattaaaggcgtgcaccaccacgcccggctggcacagtctttctacccctgcacctgaccgtaggcagggtaattctgaggactctgtccagggctgtggaggcaccctgctggccagctcactgccggctgctcttcttcctttcccagctcatgtctctgaccctggatggactgacaggtgtttcccaggaccatatgcgggctcattaccaaacaggttccaaccacatgatgttgaacatcaacctttggtccacgttcttgcttggtgctggtaaggagccattgtgctgttctgtgcacagatcaccagagggcagactcctctcatccagttatccctagcttggcttccagttgttaacttccttgcaggccaagagccccacttaattccaaaatgtcctactgtctaatgcctgagagaccttcctggaaagaccagtgctggcagtatctctcctctccctattactaacactgtaggggtagacatgttccagcagtcgagaagcacacggtgaaacacacagagataattaggaacagtctttctcatgaggtagacaagacatgagtatagtgctcgccgacttacgagggcactgaatggaggttacagatgacggcctttgctttggagacgtctgagcacacgtagaaagtatttttcatgtaacacactgggataacggagaagactgttggtgctagaggtgaccgattcccggagcttccttgagctgcagacctgtgggtcactgtctgcaacatctaaggatgcctgcgtttgatcactatttaaattgctggtttggttttgtttttaaagatttatttcttttatgtacactgtcttcagacacagaagaagagggcattggatcccatgacagatggttgtgagccaccatgtggttgctgggatttgaactcagagcctctggaaaagcagccagtgctcttaaccactgagccatctctccagcccactggctttcgattttactttcgtttttctgaggcattttctcactctagttcaggctaacctaaaactcacaatccgtacagtctcagcttcccagactctgagattatagacccaagccaaatatacccaccatcagtcactttggcagaagaaaaccattaacttcgaagcctttcttggaaaatcaagttggtttctgtaactagataaaagtttgagaaagatgcataccaggccagaataaactccacacatggttcctccccccagctgccctcagggtgtttaagcagggctgcgtgcagtgtgcgggtaagcataagacacgcaggtcacctcttctctttttagggatcctgtttactggggagctctgggagttcttgagcttcgccgagaggtacccgaccatcatctataacatcctgctctttggcctgaccagtgccttgggtcaggtgaggtccttggaggaggcagcttggcttccctcctatgtggttcagaaagaatggctgggagcagaggggagcagttagccctggtatgggtggcgacctcagggctgtgctcagtctcactctgcttctctttttagagctttatcttcatgacagtcgtgtacttcggtcccctgacctgctccatcatcaccacaacccggaagttcttcaccatcttggcttctgtgatcctctttgccaaccccatcagctccatgcagtgggtgggcaccgtgctggttttcctgggtgagttctacccagagcaaatgcctgtaggggccacagagggaaagcagcagagacttaccttgttattttagaggaaactttcctaaaggagaaaaggaagcattctttgtgatgcggcctccctcctgtgcattccatcttagtgatgccctttaatgtcatgggcattcaggatcctgagtgggacaaagtatggtatttactcccctgctaacgtgtgtgtgtctgtgtctgtgtgtctgtgtctgtgtgtctgtctgtctgtctgtgtttataggcaagctataaacagctggggaattttgattctgatttttcttttggtgttggtgtgtgtgtgtgtgtgtgtgtgtgtgtatgtatatgtgtctgtgtgtgtgtgtgtttgtatgtgtctatgtgtctgtatatgtgtgtctatgtatatgtgtgtgtgtctgtgtgtgttcccagtgtcttggtgacttgtcatttgttggcattctcttgtctttgaggaagctatatacaactagtcatccaaagtgtgttatgcccaaaactgggcacagtgatgcccacctttaatcccaaaacttgggaagcagaagcagacagaaaggtctctatttacagagtgagttccaggaagctaaatctatgtagcgagaccttgtctcaaaacaaacaaaaacaaaacaaagttggctgcatctaaagccacaccttagggaagctaagctgacttccttaggccattggcaggcttcacgtcctcctgtggaatttaagtagcttttctcctttccataggtctcggtcttgatgccaagtttgggaaaggaacaaagaagacctcccactaggaagaaagaggcttcctctactccagaaacacttaaattattatctcgaacagtggcatcttgggaaaatggactcgggtcatgataagggattgggttccaatctttttataaaaaaaaaaaaaaaaatcaaaggaagcaagatggaatattctaaacaaagtgcttagggtttaacaagatgtgttgctaatttctgattttgcacaaataaagagaagaaaggcaagctggaagtgcgagaccctgctgctgctcgctgggctgggctgggctgggctgggtgagactgggtggtgagactcccccccctggagtgcacagaagtgtgtgtgagcaggggg

SEQ ID NO: 2946 - DNA, 2146 bp, Mus musculus
gtgtggggctcgccgtgggggtgaggcggcagctgcagcagcctcaccagcgccgggacgggggtggccgcgcagccagcgttccatgttcggtggccccagaaaagtcggtgtgtaggcctcagccaccccaggtccggcgtacgttctccctggacaccatcctcagttcctaccttctgggccagtggccacgagatgccgatggggccttcacctgctgtaccaatgacaaggccacccagacacccctgtcctggcaagaaccagaaggtgagcgggccagcttctgcatgcacaagcgatcagcatcgtggggcagcacagaccaccgaaaagagatcaccaagttgaagcagcagctgcagaggacaaaactgagccgcagtgggaaggagaaggagcggagctgccctgtccaaggggaccatgctgcgctgggagcagggagggcatcccttcccagccaccccccaggaccccccgtcctgcgactcagcccttgtctgcacagaagcctagaagggctcaaccaggagctggaagaggtgtttgtgaaggagcagggtgaagaggagctgctgaggatacttgaggtccctgatgggcaccgtgccccagctcctccacagaatagcagctgtgaccattccctccttttggagccaggcaacctgaccagctctccctccgtgccactggcatccccccagcctcccagccaggccagccgtgaggagcaccagggtgccaccgaggaactagcatccatccacggtaacaaagcctcctctccaggcaacccagccttcctagaagatggcagtccgtctccagtccttgcctttgctgcttcccctcggcccaatcacagctacgtcttcaaacgggagcccccagaaggctgtgagagagtgcgtgtgtttgaggaggccacgtccccaggtcctgacttggccttcttgacttcctgtcctgacaagaacaaagtccatttcaacccgactggctccgccttctgccctgtcagcttgatcaagcccctcttccccagtatgggcttcatcttccgtaactgcccctccagccctggctcccctcttcccactgccagccccagggcacctcggaagggtccagaagcttccaaggcctcctcgctgccatctgagccatggcagcgcagcccaccatcggaagagtctgtgcttttccagagctccttggtagtctgagtcccccaggcccctaccacactttaccatggagactagtgccttggtggcaagctctttgttagcttcccaagctgggggatggaggagcccttccttccctcttggcctttgagcactttcctttattgtgtcaaagccccaggtcctttggtggacatcagccctccacagggaggagacttacctcctccaccagcagcaggcagctcacaacttacacttgtgtacctgcggtttccctcacctgccagaaggtcttgaatcttctagcccagggtgtgagtccagatgacttataagaggctcttgtcatggaacagttggctgtggctaagagaggggaggtgccacaggcttcctgacagctccactctagagacacagaaaggcagaccagatgcctccctcctagaggagttgaccagagtggccctcagggccagaacacttgaccaatcagctgttggcaggggaccatgagatttcccaagtggcattttcatctcagttttaccctgactaaagattgtcttaggggaatcccaacccaaagtgaatagtgggaagaggggtctggcattccttcagggggcatgcagcagccccgtacttgccacctgccccagggggcatgagcagctccatgccctctacccaccccaaggttgggttgaattagaaaaatgcctatttttcttgtatcgatgtagaaactctattttctcccaaagacactatttttgcagctatttgaagtttgtatattttccgtattgcagagcttacacaaaattgaagaatgttaatgttcaaggtttcatatcttgtgtttagaggttattgtggtttttgtttgtttattttttgcagatcttgattttaatagaccaaataaatatgtattccag

SEQ ID NO: 2947 - protein, 303 aa, Mus musculus
MHKRSASWGSTDHRKEITKLKQQLQRTKLSRSGKEKERSCPVQGDHAALGAGRASLPSHPPGPPVLRLSPCLHRSLEQQELEEVFVKEQGEEELLRIVPDGHRAPAPPQNSSCDHSLLLEPGNLTSSPSVPLDQPPSQASREEHQGATEELASIHGNKASSPGNPAFLEDGSPSPVLAFADRPNHSYVFKREPPEGCERVRVFEEATSPGPDLAFLTSCPDKNKVHFNPTGSAFCPVSLIKPLFPSMGFIFRNCPSSPGSPLPTDRAPRKGPEASKASSLPSEPWQRSPPSEESVLFQSSLVV

SEQ ID NO: 2948 - DNA, 2317 bp, Mus musculus
gcagtgtggggctcgccgtgggggtgaggcggcaggtagccgggtgggccatgtccggggccgcagcgggcggccgaggcggaggttcctgggggccggggcgcggaggggcggggggtctccggcggggctgctctccaccggcgcccgctggctccccccgggtcggtctgcagccactcagggctacggtccccttccagctgcagcagcctcaccagcgccgggacgggggtggccgcgcagccagcgttccatgttcggtggccccagaaaagtcggtgtgtaggcctcagccaccccaggtccggcgtacgttctccctggacaccatcctcagttcctaccttctgggccagtggccacgagatgccgatggggccttcacctgctgtaccaatgacaaggccacccagacacccctgtcctggcaagaaccagaaggtgagcgggccagcttctgcatgcacaagcgatcagcatcgtggggcagcacagaccaccgaaaagagatcaccaagttgaagcagcagctgcagaggacaaaactgagccgcagtgggaaggagaaggagcggagctgccctgtccaaggggaccatgctgcgctgggagcagggagggcatcccttcccagccaccccccaggaccccccgtcctgcgactcagcccttgtctgcacagaagcctagaagggctcaaccaggagctggaagaggtgtttgtgaaggagcagggtgaagaggagctgctgaggatacttgaggtccctgatgggcaccgtgccccagctcctccacagaatagcagctgtgaccattccctccttttggagccaggcaacctgaccagctctccctccgtgccactggcatccccccagcctcccagccaggccagccgtgaggagcaccagggtgccaccgaggaactagcatccatccacggtaacaaagcctcctctccaggcaacccagccttcctagaagatggcagtccgtctccagtccttgcctttgctgcttcccctcggcccaatcacagctacgtcttcaaacgggagcccccagaaggctgtgagagagtgcgtgtgtttgaggaggccacgtccccaggtcctgacttggccttcttgacttcctgtcctgacaagaacaaagtccatttcaacccgactggctccgccttctgccctgtcagcttgatcaagcccctcttccccagtatgggcttcatcttccgtaactgcccctccagccctggctcccctcttcccactgccagccccagggcacctcggaagggtccagaagcttccaaggcctcctcgctgccatctgagccatggcagcgcagcccaccatcggaagagtctgtgcttttccagagctccttggtagtctgagtcccccaggcccctaccacactttaccatggagactagtgccttggtggcaagctctttgttagcttcccaagctgggggatggaggagcccttccttccctcttggcctttgagcactttcctttattgtgtcaaagccccaggtcctttggtggacatcagccctccacagggaggagacttacctcctccaccagcagcaggcagctcacaacttacacttgtgtacctgcggtttccctcacctgccagaaggtcttgaatcttctagcccagggtgtgagtccagatgacttataagaggctcttgtcatggaacagttggctgtggctaagagaggggaggtgccacaggcttcctgacagctccactctagagacacagaaaggcagaccagatgcctccctcctagaggagttgaccagagtggccctcagggccagaacacttgaccaatcagctgttggcaggggaccatgagatttcccaagtggcattttcatctcagttttaccctgactaaagattgtcttaggggaatcccaacccaaagtgaatagtgggaagaggggtctggcattccttcagggggcatgcagcagccccgtacttgccacctgccccagggggcatgagcagctccatgccctctacccaccccaaggttgggttgaattagaaaaatgcctatttttcttgtatcgatgtagaaactctattttctcccaaagacactatttttgcagctatttgaagtttgtatattttccgtattgcagagcttacacaaaattgaagaatgttaatgttcaaggtttcatatcttgtgtttagaggttattgtggtttttgtttgtttattttttgcagatcttgattttaatagaccaaataaatatgtattccag

SEQ ID NO: 2949 - protein, 441 aa, Mus musculus
MSGAAAGGRGGGSWGPGRGGAGGLRRGCSPPAPAGSPRVGLQPLRATVPFQLQQPHQRRDGGGRAASVPCSVAPEKSVCRPQPPQVRRTFSLDTILSSYLLGQWPRDADGAFTCCTNDKATQTPLSWQEPEGERASFCMHKRSASWGSTDHRKEITKLKQQLQRTKLSRSGKEKERSCPVQGDHAALGAGRASLPSHPPGPPVLRLSPCLHRSLEQQELEEVFVKEQGEEELLRIVPDGHRAPAPPQNSSCDHSLLLEPGNLTSSPSVPLDQPPSQASREEHQGATEELASIHGNKASSPGNPAFLEDGSPSPVLAFADRPNHSYVFKREPPEGCERVRVFEEATSPGPDLAFLTSCPDKNKVHFNPTGSAFCPVSLIKPLFPSMGFIFRNCPSSPGSPLPTDRAPRKGPEASKASSLPSEPWQRSPPSEESVLFQSSLVV

SEQ ID NO: 2950 - DNA, 73834 bp, Homo sapiens
ctatctcaaaaaagaaaaagaaataccagagttaatgagttcctttgctttcagctgtggagaaaagacaaccatatttaaaatgacttggagaaattataaagctaccttaaggctaggcgcagtggctcacgcctgtaatcccagcactttgggaggccaaggcgggcagattgcctgaggtcgggaatttgacaccaacctgaccaacatggaaaaatcccatctctactaaaaatacaaaaattagctgggcgtggtggcgcatgcctgtaatcccagctattcgggaggctgaggcaggagaatcgcttgaaccagggtggcggaggttacagtgagccgagatcgtgccattacactccagcctgggcaacaagaatgaaactcagtcgccagaaaaaaaaaaaagctaccttaagctactacaaaattattatgggctacaaactgaacacctaagtcctgaaagaattagtagctgataagggtagatgaggaacacttggagaaagcgaggtctaatttgaagctaaagtaaatgatggtgaagatggagttgcagggcagggtgatatctcattgaccaaggcacagaaaataaaatttaataagaatctgtggtgatattttgtagttatgtacaacaatttatatctacaatataaatgatatttttctttctttttttttttttttttggttggagtcttgctctgctgcccaggctggagtgcagtggtgtgatctcggctcactacaacttccgtctcccgggttcaagagattctcctgcctcagcctcctgagtagctgggattacaggtgtgtgccactacgcctggctaattttttgttttgttttgagacagtctcactctgtcgcccaggctggagtgcagtggtgtgatctcggctcactacaacctccgcctcccaggttcaagcaattctctgcctcagcctcccaggtagctgggattataggcgcccaccaccacgcctggctaattttttgtatttttagtagagacggggtttcaccatgttggccaggctggtcttgaattcctgaccttgtgatccactcgcctcagcctcccaaagtgctgggattacagttgtgagccaccacgcccggccaatttttgtattttttagtagagacggggtttcaccatgttggtcaggctggtcttgaactcttgacctcgtgatcctcctgccttggcttcccaaagtgctgggatgacaggcatgagccaccgcgcctggccataaatgatatttttcaactctgaaaataagctctggggcctatgccctgggtctaaaggaaatcagaccatagaccacttttcaaattactcatctcttctgttatattttcatatctttgaactggatttttttttttgacagagtctcactgtattgtccaggctggagtgcagtggcatgatctcggctcactgcagcctctccctcccaggttcaggcgattctcctgcctcagcctcccaactagctgggactacaggtgcccaccaccacacccggctaatttttttctatttttagtagagatggggtttcaccgtgttagccaggatggtctcgatcttctgacctcgtaatccacccgcctcagcctcccaaagtgctgagattacaggcgtgagtcactgcgcccggccaacacctggctaatttttgaatttttagtagagacagggtttcactatgttggccaggctggtcttgaactcctgaccttgtgatccacccacctagacctctcaaagtgctaggattacaggcatgagccaccgcacccagcttgaactggattttgatgatactttttttttttttgaggtggagtttccctcagttgcccaggctagaatgtagtgacacaaaattagcttgctgcagccttgatctcctgggttaagcaatcctcccacctcagcctcccaaataactgggactacaggtatgccccaccatacctggctaattttttaaatttttactagagaccaggtctcactgtatcatccaggctggtctcaaactcctgagctcaagtactcctcccacctcagcttcccaaattgctgggattacaggtgtgagccaccgtacctggcccttttgatgatacttgttgcctgatttggtgcatggtgtgaagggaagggagtgggagtggatgtagaatcaggtggagagtgtcaaagatatattgtagcttatttgcccccagggacaattgtagttttgaggcagacttgaagaagataagtgggaacagtggagaagaaagaaatctaaagtggggcatgaaacagatcttttggtttatacacagtctcctgggaatgtactcaaccagcatcccctctccagagactttcctctgggagggggtgcctaggaaagtcaggtgtggaggatgcagactgttcctgctaaggcactgctctagaaaccagctggtttctcaaggtacccacttgacacagtggaactagagtaaactttaattcatttttcatgaagcaccatctgcatgccggttacagtgctaggtgttatggagagatgaccaagacatacctgctctccttaggaagcttatatattttagtgcaggaggacatttttttttttaatgagaaataccagcctggatattccatagtccaaagagcggcatcttctgtctgtcacagtaactctttagggatatcataagggcaggtatatttgtttcctaagacattcccctgaaaagattagcagggtctcccacacatcatcaatctctcagagataaatgtatctaaatcctttttgtttttcaaaacagcttgattgaggtataatttataaaccataaaattcacccattactcatgtataattctattctttatttatttatttattgagacagagatctcgctctgttgcctgggccggagtgcagtggcacaatcttggctcactgcaacctccacctcccaggttcaaacgattcttctgcctcagccccctagtagctgggattacaggcacctgccaccacacccagctaatttttgtatttttagtagagatgggggtgtctccatgttggccaggctggtctcgaactcctgacctcaagtgattcacccaccttggccacccaaagtgctgggattacagtcatgagccaccatgcccagcctatttttatttttatttttttgagacagggtctcactctgtcacccagggtggagtgcagtggtatgatcatggctcactgcaacctccacctcccaggctcaacagatctgccagccgcagccttccgaggagttgggactacaggcgtgcaccaccacactcggctaattgttgtattttttgtagagacagggtttcaccatgttagccaggctggtcttgaactcctggattcaagtgatcctcccaccttggcctcccaaagtggtgtgattacaggcgtgagccaccacgcctggccgattctattatttttaagtgtatttatagaattgtgcaaccatcacaacattctagcatagaaacattcccatcaccccaaagagttcgaaaaagtgtccattggcaggtaatccctgctcccacctccagtcctaggcaatcacaaatctgcttgctctctctataaatttgcgtttctggacatttcatatacatggaatcatataatatgtagttctttgcgcctggcttctttcatttagcataattttttcaaggtcgattcatgctatagcaaatatcagtagcttgttcctttttgttgctgaaaagtactccatctaaatccttttttttttttttttttttttgatacagagtcttgctctgtcaaccaggctggagtgcagtggcgcgatctcagctcacggcaacctctgcctcctgggttgaagcaattctcctgcctcagccttctgagtaattgggattataggcacgtaccaccacacctggctaatttttgtatttttagtagagacagggttttaccatgttggccaggctggtctcgaactcctgacctcgtgatctgcccaccttggcctcccaaagtagtgggattacaggtgtgagccaccatgcctggtcctaaattcttttagaagttatttatgttttgaggcagcactgaacgggatccagaagtcctggtcctttgcttgtctctgatttgctgaatggcctctgacaagtcctccccttgtctgggcatctgtttctaggtctgtaatgtgagaggctgaatcacatatagtttctactgtttcttccaattgtttgtttaaaatctaccttgtatttttcttagagtaccattaagtccaatattctagagttttatttattatttatttatttatctatttattttttgagacggagtttcgctctgtcgcccaggctggagtgcagtggcgcgatctcagctcactgcaagctctgcctcctgggttcacgccattctcctgcctcagcctcccgagtagagtagctgggactacaggcgcccgccaccatgcccggctaattttttttgtatttttagtagagatggggtttcaccatgttagccaagatggtctcgatctcctgacctcgtgatccacctgcttcggcctcccaaagcgttaggattacaggcgtgagccaccgcgcccggcctattctaaagttttaatgtctctgatcctacatttaccctttacctgtttgaaaacttccaccatatcatatattgtcaaggatgagaatcttcattttattttatttatttatttatttttgagatggagtcttattctgtcacccaggctggagtgcagtggcacgatctcggcttactgcagcctccgcctcccgggttcaagggattcttctatctcagcctcccaagcagctgggactacaggcgcgtgccaccatggccagctaatttttgtattttagtagagacggggtttcaccatgttggccaggccggtcttgaactcctgatctcaagtgatctgcccgcctcagcctcccaaagtgctgggattacaggcatgagccaccacacccagccaagaatcttcattttaaaagggctgccatttagcaaggaaagtagatggccactgagagcaaaaggagactgaaggggtgaatgtcagccagtctgaatgaagaaggaacaagtgagagaactaagaagacagcatgtcgtgggccacagcaagggacaaaatgagtcagagaaagtactgaaggtcaaaatccaggccatctggctaccctgagagtaagagggaagggacgcagggagagggaggcaccagagtgggaagagatgctgagggctaggacccccctccctactctgttcccataacctcattcattccctcaaccctccttcccaatccctctcaggctgctttgctccttcagttctgaccccatttcctcaggatcttgttccctgaggagccagtcctgacatttcagacagaggctgagtaaaggaggtaggtcggaaagagacacagtgtatctgcgtcatcttattttctgttttattattttggaacttggagtggggagcaaagacgtaagcacttagaatttactaggaagttcagagaccgtcttccaggtaccaaggaataccaagacttctctagcccgctgaataattgctactgggtgtcatattttgaagggtaaaaatggtgatttgaaactcccattcttgttggttcctgtggcataaatggaggcacagggtggaattcaaggtgccctggatgtaggcccagcgaggtccttcaggagtggaaagttcctcttgattcagtagccagcagggtaaggcttccctgctgatcctctgatctgccagaagtccccacagccttttgcccttggtaatctcttagacccttgcagcttttaagacttgaaacctcatagggactgcttggggaatggctatatctctgacttacacctgtaggaaaaataatgccaattctcatttatttctgacatttagctgtggacatcccaagagcatgctgcagtcaacagcatttgctgttggaaacccataaagcaaataagtctcttatagattaaaaaaaattattgatacacttagtatctataatcttctactttttttttttattattatttttagacagtcttgctctgtcgcccagtctggagcgcagtggtgcaatcttggttcactgcagcctccgcctcctgggttcaagcaattctctgcctcagcctcccgagtagctgggattacaggcacctgccaccattcccggctaattttttgtatttttagcagagacaggatttcaccatcttggccaggctggtcttgaactcctaacctggtgatccacccacctcggcctcctaaagtgctgggattacaggcgtgagccaccacacccagccaatcctctacttttgatgtttttgaatgtcatcctctgacccaaagtctctgaaagcaggaaccaggtcatgtatcccaaatgaaatagcatctagcccagggccacttctgcatacaggcttcaaggcctgctggcttgtgaacttcagcatagggacaatgtctctgaacattattgtcattcagagctcagtgcctagctcagtgtctggcacatagtgttcatttcaataaatttgtgatgagctaattaattaatggcgatgatgttgataagcatgacagtaagggcagtggcaaaggttttgttgcaagttagatgctttgtaatgaatgcaagtcatctccccttagcagtgcacagcctccccaaagccaaggcttccttcattggaggaagcagacggattaatcttcagatgtagtccttatcctcccatcatgcccatgccaggagaagctatcagtgatagagaagagaataagagacagctggttggacatgatacctagtaaggagaggaccaaattgtcctatgcatgcctcccttctcactcctccagctaggatcaactttagtgtcttgccagcaacttatcaggaaagaccatgactttctggactcagaagatccatttctttagctataccacctccactgcctctttttctaccgtccaggttcttaatttctggtaccttggctttggaataaagtttaaacacagtatccatggaaccatgcacattactcctctctctgagggaaggaagcatctgtacgataatgtgtcgccttatttttagaacaagtctgtgaggttgatggagcagggatgattctggcacagagagaggaagccacttacccaaagtgtttcaagattctcatcctagggctttacttctaaacacacattgtctggctcagccaataaaaaccactcatcatctcctaagattgagaatttacatgttgaggggtcctaacacagtataagttgtcagacaagaaaagctttcaaaagaccaactagtctaccttttgcctctcaggcaggaccaatgatctagaagttgagtgttggttgggaaagcattgaatctggagtcaaaagaccaaggatgtaagtcctaggtctgccatttactaagatgatcttgggcaagtcacctagcctctgtaggacttaacctcctgaagaatgaggacaataatatctacattttctgccttacatgcctattgtgataattaaatgagataatgtatgtgaaagctataaaacactagacagatgttaattttaacatcttaatcagatttgcatctttggagaccctttatgtaagatgtgaacagtaatcctgtgttcttaagaaaattttacactcatagagatcaggagctcagctctggagtcaggctacctgggtaatcttgggcatgttactgtatttctccctgaagtctcaatgaagaggaaataatacccatttcacaagtgtggtcttgagcaataaataagataaagtatgcatggtacttaacatgtacctagcatggagaaaggaattcaatgaatattcgttgctaccattactgattttattaatgaagatgtgaggcagggtggttcaatatgatgtgttagagatctgagctaggaatcaaaaggactcacttctttggacttcagtttcactacttgtaacatggtaagaatccatgtttttccttttccagattgtcatgaggatttcttaaaagtacatgaagactttgaactacttgaaattgaggaacaatataaatgcaagatatcttttttcaactgagttaattaatcttataaagactgagtttttaatcagttcatcaatttttgtttattcttctctgtctttgattagattgtcctcttcatggaaaagtagtacagcatttcttcaatcaattaaaaaaacagttcaaatgtcagatcttgaagtaaatccttcaaaactgcaagagtacactctttgcaaagaaaacctttcttcggtatgttccattgcctcaattcattcagtgtatgtaggctaattttaatattcaacccactcttgaatttccactttgggtattatctactttcaatatttaatcccagaatgacttctctttgcctcacagcaggctcccagattacctctttttctctgattagttagtatggcttcagggaatatcttctttttaacattaaactgggcaaaaacagaaatagaaagaaaaatctgtagcaagatcaaaaatagaattcacagctaaatataaatctggagggaattattcaattatttgaatggtccccaatcacagacaatccagggttgattgacttttgctttttccatatgtagaacaaaatggttaacaaataccaagagtaatattttttttcttttgaagcataatactttttaatagtatcttaaatgttattttctttcccaaatccctttatattattatatcatgtgcttttcacaactgcatgcattctctttggggaccttccagtctcattctgacttgtaagtcagagagcattgatcttggaagaccaggatttgttaacggagtcgcggtgcaaacttgggcaagtttttcagttgctttgttcctttcactctgctgagctagacttggagtggacgactctgaagggaaattccctgcttcttttcagagtcccaatttaatttacaggctagcaattgtttttttaaggttggatcaacaccaagtagggacttggaaacgtggagaaagacagatgtaagtgtcacacgaggcaaggtcgccattaaatacacaaatataatgcaaatcacatgcaaatgatatgcaaaccttgcattaatttgtaggatcttagtttggagcttgtaagtagcactgagatcctataaggatttaaaactaatgttttttaggttaaattaaatgtaatactttttgaaggtatcgctttctctgtgattcagggactcaactgtgtaaagtttgacactgctccctactcccgcccccaaaaattatttcactagtgtttgactccaacctacacccagcgccgcgcccactctccagctcgcctgacgtcacgtgacattatatttgcatactacctgggactgggtgtgacgctcccctattctgcgtcttctcattggtggcgctggagaaccagccctcttctgtacaggccaatcagcagcccctgggatgttggaaaaccgaagggggcggtgtgagggtggggtcttggcttggatcgctaggctcatcgaccaatcatcctcaggaaagggaaggctaagctgtggattggctggggtggaaggtctgggtttccgcagtccaatgacagctctaggatgagggggccggtccccgccccgtacagcagataagcagcggcctcgggggttggggggctgtgtgagtctcgcagtggggctgaggcaggcagccgggagagccatggcgggggccgcagcgggcggcagaggcggaggtgcctgggggccggggcgcggaggggccggggggctccggcggggctgctctcccccagcccccgccggctccccccgggctgggctgcagccgctcagggccacgatccccttccagctgcagcagccgcaccagcgccgggacgggggtggccgtgcaggtgagccgggcctggagcgggtgccgtggaaggagccattgggggagggggggcgcgtgaccgcgggagggggacggggagaagtgtgaggggaaagtggatgggggcgagggaagagaaagggggcgttcagagtctatgagggcggagggagcaagagcgaggagccgtgaaacgtggggagcaccgctgggacggagtgtgcggggagtcgggtcccggaggtgaggggagggacctggcagatggaggctggctttgggggcgtaaccgaaaagtgggcagaggtgtcgtgtggggtgagtggaagatgcagggggtgggagcgaggcgtgaggaggagtggcgcgtggtgggggcgccccgtgcggatggctggcgctgggagcaggagtcggtgggcgctggactattgcacggggagggggaggggcatggagtagagccccgtgcagccgtgtgttacttctccagcttgagtttggccccagcatccctctcaactgcgctggagttccattctccaccacttcacgtgcgcttccctttatgccacctcctggaactgatttcatctcagcccgctggactaagtttaacggcttttaccgtggtgcaaatgcccagctccctgcattcttctccctgtgtcccagaagttgtacgttcccagattcttgacctgcttaatatggctgtctcattccaaccatcgtttgtgtacgagcgtgtgtgtgtgtgtgtgtgtgtgtgtgtgtgtgtgtgtgtagcgggggggagacctgggcagttttgccccctacctttctttctactccctccacccctctacccaccaaggctgttttgtccggggcattgcagccaacgtggcagtggggtgagggctacagtcaagtgcatggtggcaagtaccccactttctgaacagcactgaaatgggttcttaataacagcttgatgtggtggctgtggggaaactagggagaagcaaacttaaccttgctttgatactcaaatctgtgaggatcccacaaatgcaagtacttaggaaggggaaaaggaacctacttgcatgaggaggttggcaataagttgaaagtgaggcttgcatttgattcacaccagatgtgaaaagatcattgcacacttccaaagccggagcctctaccaaatgtacaaaaatcatgattcctgccgtcttaacggttaatgacattctctaaaccagagtctcttgagcttctgatgattaccaagcctagttactgcacatctccttcctgcttctgcagggctattacagaagtagtagctactacagggctactccttgctaggtaggaatgggcttaagaggatctctgagatagaaagcccccaagtctttctggacttttcactgtatatgttagcatcacatcttgggatgcagaaacttggtcaaatctggtagcaagatggtgaccaagtagtaaaagtatgtttagaatccggtggtgtagagtaaggcaatgcccagactaactcatgcctatcatgagttataaagcaaaccacaagactacaaacctgttggttttgtttgggcttccttgaaaccccgggaagttggtagaacaagaaccggaaccttagtcacttttagtggaaaacaacagaaagcctacctgtatagtagctggaaactgattagcaatcattttaagatcagttattttgtgtctattatagaactaatattaaaaggacaattgctggtggatgctgtggaagggggaagaacgtaggtttggatgtctgggttcattacatggcctgctccttttatagagccagaggccctgggatactggtagaaatgtaggaagctagagctctgcataatttgtcaggtgatttaaggcaagttgggtggactcttgcttatagattggtctgatcaataatttgtccacctattaatatcttagaagtgttaataaggcattcgcctagttggtagttggggggattatctgtagattttcagtatggcaggagaggggaaaaaataggagaagaaagtggccaggcattaggggaatgtacctggcctctgttttggaggcacatcagggcttttatatgttaacttcagcccacatacgtgttcacattatttccattccttggccttggaaagcaccagaggtggttttttctaggacagtagagtatatgggataaaaggaaaccccttgtagtcataaacctttaagagattggcactgggagctggaatgcctgggttttaaatccaggttctgccatttactagttgtgtggctttgaggaagttctttctgtgtcttagtttcctcatctgtggataataatatctatatcataagaattaaatgagttaatagatagaaagtgcttaaaacgtgcctggcacatgagaagtgctataaaagtgtttgctgctgcttatattattattccctctgctcgccaaggtgagagcactgttggccagagcccattgccttttcaggcttcaaagagcaaacccagattgatctgaaaccagtactgcaggtttcagaatttcagggcctcctcttgcatttttattccctcatcttttaaaatgaactttctaaacagagctctgaaacccagctgtttaaaaaggcatgtgagctgtgactgggcttcaggaacaattaagggtcgccactgtttctcttgcccatctcaaagtgatgtaacgctcagggctctgcagttatctccccaccacacatcctgctgtgttcttgacaagatatattagacctcgtgaaaagggttatggtgtaaagagcaggatttgccttctgcaaccattcatcataaggtatgtcttcgtaaaatgaggaatggcttcatttttatgaacctgggctaggagtgaggaaggctgaagagagtggagagaaaaatgaaagataactctaaaaaagctaagagccattattgggtagtagaaacctaagataaacttctcactgcaattctcccttaaattaaattctcttttgtgtcttaatgtcagttagaggccgctgacttttatactcttccaggaccatgatgaaggacaaaataggactaggaggtgaattgttctgggttccagtcttacctatcttgtttagcgtgtctgtctgtatgtccctaaaatgaagataatgtttcatctaggtttgcaaattatttctccagtggaccagccccactgggaccagctgggtgctagggaagctaaatactgccttggaacctcctctgaccaccagaaccttctttaaccagggattggcagttatggtctacaggccatatctggccctgggcctatttttgtaaataaagttttattggaaccagccacactgcttcatttaaatattgtctagggctgcttttgtgctgtcggtggtggagtgaagagttgtgataaagactgtagggctcacaaagcctaaaatatttactatatgtcactttacagaaaagtttgccaactcttgtctcaaacagtgtacctgtttttcctatataaagatcagtttcaaatgtgtgtaatataaacctcagaaaattctaagggggtaaagaaaacgaacaagcctgtagtcccactctattttaaggcaaaagaaaagaaggtcacctgcttccagtcagttctcaatctttgtagaacatcatcatgtgtgaatccagcctctccacccccaccattgtcaggtgatgtgttcagtagacataagctaatttgaatttatataaaagcttaactgttaggcaaatttgccccctctcctctcttaacccatttcccccaacctgacaacccaaaactgcggtgaacacatttcaaaatcagatggaaattactttaggcttatctcctgttttgaatttttctcattaccttttatttttgtgaacagattatgaagagctggcagtagtcatggttgccctaaaatattggcttccccatggggatataagaagggtaatttatatcaaatgtcgattaggttccccaggatggctgtttcgtgaatacgaggctgcagtgcttatattattaaattgttaaactcctttctttgcaatgctttgaaaacttatttcttgggggataggtgtttagataggtctggaaccataaaaaggaggttgcatattagagaccctaagagaaagccctcagcaaactggtccgtgtggctactggtgccagaaacagcctggagattagaagagatttccaaccgttctatgccaaggcatcatcttgctataatgaggcctgggggtgcagttaaaaccctttaagagctacaattccccttctaaaacctgtgattgaggcagcttctgtttgggaagcattaaaacaccagacacttcctagcccaacactgctaactgttgcttttgacagctttgccagcaccaggcacatacatggtcagcaaaatgcactgctgaagcatctggctcttaaatgttatcaccagtgatgacatccttgaatttggggactagctgcttaactgctttatctctttggtacccaaaggagtgtgagtccatgtgttcttcggtattttggatagcaaaggattatatagtacgagaaggtctcacttatataacatagagctaagagatcttaaaccatttgaggtcagtgtcagaggggtgagaacaacagtgggctgtgatggcaagaggactttgttctctcacattctagacatagatagatctttagaaagttgcaagcagtaatgcaaaactttcatagtgatggtgctaatttgggtgttaccacagtggttggtgggctttaatagccaagagaacactatgcctttattttctgctgaattcagtttattttgaatggtgtgatgggcatcagggccacactattccttgatcttagaagaactgttagagcatcttcctccagattcttagatgactcacatagagccttcctgctaaaggattcaggcttttgggtgtggcatcttctgaggggcaggtctggttatggagttcttactgacactatcacgtttgactctagctcaagtgttctgactagacctgcctgggcttaccgttactccacagacagtttggagcccttttattttatttatttatttatttatttatttatttatttatttattttattttattttttttttgagacagtctcgctttgtcacccaggatggagcgcaatggcacgatctcggctcactgcaacctccgcctcccaggttcaagcagttctcctgcctcagcctcccaagtagctgggaccacaggtgcccaccaccatacccggctaatttttgtatttttagtagagacggggtttcaccatattggccaggctggtctcaaactcctgaccttgtgatccacccgcctcagcctcccaaagtgctgggattacaggcgtgagccaccgcacccggcctatttattttttggagacggactctcactctgtcacccaggctggagtgcaatggcatgatctcggctcatggcaacctccaccttcagattcaagcgcttctcctgcctcagcttcccaagtagctgggattacaggcacgcaccaccatgcccagctaatttttttgtatttttattagagacgggggtttcaccatgttggccaggctggtctccaacatctgacctcaggtgatccacctgccttggccacccaaagtgctgggattacaggcgtgagccaccacacctggccctggagcccttttaaagcagtggaaaggaaaactttgggtgtcgctcccagttcagagcaaaggtagatgctcactagagagtgagttagtgagagtggacagtctcttcttgggttagtaagctctgccatcctttgagatgcatgttacccttctttgtcacagaagtgggaacagggaagagtggaagcaaagaaaggatgggtgggaaatctggtcagtttccccccttcgtctaggttcaatcttcacagagggctccattatttggtttgcagggtatgaattaaccaaacattagccaaatctactcacattattaggtcaaaaacaaatcctgatctcagggaagagttgtggatgatatttgaaatttctaagttatctgtgcccccattttctccagtcgtgtggagctcatgaaggggccgttgttgttggcaacagctggatggtgggaggttctcgtaacagctggctgctagtgttcgggctcagcttgtggtccccaccaaacctcctggtttggaaaactctgcctggcactgtgctttcccctcagggtcactacaaagctgaatgccaagccttgcagtcatttaaatgcttcccctcaggcccacatatgccttgatcgacccttactgtgtgggagcactgcagctaatcaagggtggctttaatgaacttaaaagaatgctatccaagtatttcataatagaaaaacttcaagtccaggccctgggggacctggaactgaagtccaggccatgtacagacatttaccctgccctgctcaggcatacaggtttgtggatttgctcaggagcccccgagagttgctgggggggtggaggacagatggagtgcctttagctcagctctgcctacacattagcagtttgagctcccagctccccaataaaaggggtggaggctgggggaggcctgggaagactcggagggttttggttgctctgaagcagctggcctgtgatcaagggttgaggagttttctctcagagactgtctgaatgtggcttcttagaggatggatggtatttgacagaacaaagctgtaggtttggggtgcctcctctttctctctctcttttttttttttttttttgaggcagagtctcattctatagctcaagctggagtgcagtggcgtgatctcagctcactgaaacctccacctctctgggttcaagcaattctcctgcctcagcctcgcaaatagctgggactacacaagtgtgccaccacgcccagataattgctgtatttttagtagagatagggttttaccatgttggccagtctggtctcgaactcctgacctcaagtgatccccctgccttggcctcccaaagtgctgcgattacaggtgtgaaccaccacgcctggcctttgtctctttttttttttttttgagagatggggtcttgcttcatcacccaggttggaatccagtaatgccatcatagctcactatagcatcctgggctcaagccatccacggggtgcctcctttctgactctgaactctctatcttgtaaatgaaggatcacttttccagggaagccatgtttgttagggggcagcctagttcaccccgagctctgccacttgagtctcttattatctgatcctaaatgaagacatgcaggagagcaccaaggtattacctcctcaaaggtcaaaggaaggattaatgtgcaactctaaaagtagattgctaacacatccataagtgaataaaatataaattcaagctggagtaggcaaagaatgaagaaatactcagtgtttggtgaggttaattagagaaaactactgggatgttttgaataggctttaaaaaaaaagtgtcaatatattattctccctaaggttaaattaagtttttactctctcctttcctttccctttcaaaagtgacattgtttcgccttgtctagtcagctatattccttatttttctcaaacctcttgagtcccttctgccgtatactggaaattgtgtgcctgcctttttaagagtaggcacctcacgtttcaagttcaagtgcaatggaactcaccctgcagcttgaacagatttgagtgtttttgcagagggaggaccagggcagatggggagtgtcatgctcaataaatacttgttggattgagttgctgggaaggcagcagagtggggagagtaagccacacctcccccaggctcactcagaatggtctttcccacttctggtccccacatactgttccccctctataatacctctcttcagctacttacaaggcaaaaccccccgaagtgttagtattctctctttctttaaatcactggtctcctattcatcctggtcattgggcttgaagcccagttggtggcaaagacgtggcatttccatagatgtcattgctaggcctgtaggttcttttcccaacacacttatagctagagggtgagcttgggcagttaccaggtcgatccatggaaacagccaatgtgtaggattttgttatgattttgttaaaaagccagactgcctggctttaggctttgaagtggatatggtgagaggccaaggagaccaagatgaatgctaactgtcttttcactccaggtagatttttgccaacttcctagtagtgttctgtgtagcaagaagatggaggaaaacaaaatctggatcagtggcttttctaggccaaggaggagaattatctgttggccctaggatggcttcagaggtgtgatcaggctgaaagcgcccctctcccaagccagccaccatcctgtgatagcaggcactgctatttcttctcccaccaaccaccagatagggaagtgcaagaaagagatgcttgttaccacttcgcaggccctggacacttacactgttgtccacagagtctgtgttccttgccttgaaggctgccaaccatgtgtctggtggcttagtgaaaatggcttttttttttttttttttttttgagacggagtttcacttttgttgcccaggctggagtgcaatggtgcgatctcggctcaccacaacctccacctcccgggttcaagcgattctcctgcctcagcctctcgagtagctgggattacaggcatgtaccaccatgcccagctatttttgtatttttagtagagatggggtttctgcatgttggtcaggctggtctcgaactcccgacctcaggtaatccacccgccttggcctcccaaagggctgggattacaggtgtgagccactgcacctggccgaaaacggctgttttaacctgcccagctgggtgtaagtttgaacagagtgaaaatgtgattgggagcataggcagcttctcttatcccctcttccctccccttcttctcctctctaccccacactcccttccctttaagagtttgctgtgcttggccgggcacggtggctcacgcctgtaatcctagcactttgggaggctgaggcgggtggatcatgacgtcaggagatcgagaccatcatggctaacacagtgaaaccctgtctctagtaaaaatacaaaaaattagccgggcgtggtggtgggctcctgtagtcccagctacttgggaggctgaggcaggagaatggtgtgaacccgggagacagagcttgcagtgcgccgagatggcgccactacactccagcctgggtgacagagcgagactccatctcgaaaaaaaaaaaaagagtttgctgtgctctgtgcatgtctggtcgcccacgtggctttgggaaaaccactcctgataacacgtgcactccctgccccacagctgcaggctggtggaaaacttgccacacagcccctgtttggggattgtcttcttaactcctgcccatcagatatgacataagccaggggtggggttggggtgggagtggatagcatttggcatgatagaggggatgcagccagagggctttcacaatatgacatagtctggatttagcaactggggagagaagggctatgtgaaccacatccatggggggtgtgcacatcttaatgctgagagcagcatctggactctttcttattggaatctggagtagttccgtgttcacagaggaagacaaaaacagttgcttctgtagaaagaaagagtctctgaatctcaactctaagaggcccaaaaattcacctgtatttttcagggaaatggagaatatagatagcattaggttttttgtttgtttgtttgtttgtttttgagacagagtctcactctgttacccaggctggagtgcagtggcacaatctctgctgactgcaacctccacctcccaggttcaagtgattctcctgcctcagcctcccaagtagctaatttttttatttgtgatagaaacggggtttcaccatgttggccaggctggtctcgaactcctgacctcaggtggtccaaccgccccagcctcccaaagtgctgggattacaggcgtgagccaccgtgcctggccttcattagttttgacaatatgttccatttgtttagctctgtggtgcttctgatgggaactctcaaatgttttcgtgcatcttcacaacagtcctgcaggtgcaggtggcatttcattgtttttgcagataaggaaactgaggcccagaaaggaagttcttgtccaacaccaaatgactaataaaccccttttgcttaattaggcaaagggcatttcccacatatgcagaaaaagtccgttgtgaattttgtctcaggctggcatccactgccacctgcccagcacacctccagcatttgtttcttctatgtttatatacctgtattccaggagcaaagattcatttgttaagctaagcaaaagagaattggggccgggtgtggtggctcacacctgtaatcccagcactttgggaggccgaggcgggcagatcacttgaggtcaggagtttgagactagcctggccaacatggtgaaaccccatctctactaaaactacaaaaattagcagggtgtggtgacaccttcctttagtcccagctactcggaaggctaaggtaggggaatcacttgagtccagaggcgaaggttgcagtgagctaagactgcaccactgccctccagcctgggtgacatagtgagactctgtctcaaaaaaaaaaaaaaagaattggaaactgggctgcaaagaagtccgtttcttcctttagcaccccaaggtgactatccacaccataaatactcacttggtgtgagtagttggaagatgatggttactattaatacattattatgtgtgtgatatggtggcggcttttgagtgtttccagctggtttgagatatgccatttccatgtagaatgagtggctaaccagggacagataggacataggaggcagaccagatttttctgcctctgtggggtggtcatggttactgagcttggggcaaggccatgttagggagacatgcgaagatggatcttacaggaaaaggattcttatgtgtgatgatgtgaaacccagaaaagcacctgggaatacatgtgggtgatgcgttcctatggcaggggtgggggtagatgcaagtggcattgtgccataatagcttagtcctctctgtaagggacccctggtgtaaccatccccctacttctagtgggaaagaagcctggggggcgcaggatctgtctgagcatgtctccctctcctagctttaggttaactgaaagtggagtcattgtaatgtatgatagtgctcttccgagacaggcatgtgcccagtaagggaaatagcaaggccttaaactctgggagaaagctccatctagggactatgtatcacggataattgacttcttggaggttatctaaccctcccaagtagattacaagccactcttacctccaaagcatactctgtatagaatttttttttttaatagagatgggatctcactatgttgctcaggctggtctcaaactcctgggctcaagtgatcctcctgcctcagcctcccaaagtgctgggattgcaggcgtgagccattgcatctggcctagaagtctttttttttttttttttttttgagatggagtctcactctgttgcccagactggagtgcagtggtgcaatcttggctcactgcaacctccatctcccgggttcaagcaattctcctgcctcagcctcctgagtagctgggattacagacacccgccaccatgccggctaatttttttgtatttttagtagagacagggtttcaccattattggccaggctggtctcaaactcctgaccttgtgatctgcccacctcagcctccccaagtgctgggattacagacgtgagccactgtgcgtggcccagaagtctttaatattctaataaccatatgctgtgtgaaacctttctttcttgtttgtttatttatttatttatttatttttgagaccgagtctcactctgttgccaggctggagtatagtggtgcaatctcgtctcactgcaacctctgcctccctggttcaagcgattctcctgcctcagcctcccgagtagctgggaccacaggcgcatgccaccatgcccagctaatttttgtatttcttagtagaaatggggtttcaccatgttgaccaggatggtctcgatctcttgacctcgtgatccacctgcctgggcctcccaaagtgttgggattacaggtgtgagccagcgcgcccggcttttttttttttttttttttggagacagattttgctcttgttgcccagactgagtgcaatggcgtggtctcacctcactgcaacttccgcctcctgggttcaagcgattcttctgcctcagcctcccaagtagctgggattacaggcacacaccaccacaccaggctaatttttgtgcttttagtagagacagggttttgccatgttggccaggctggttttaaactcctgacctcaggtgatccgcctgcctcggccccccaaagtgctgggattataggcgtgcgccattgtacccagccgaaacctttctttcctacttatttcccaacttcacaaggtaaaatcccattacaacaaatattacaaaaatgcttctgtatgataaagctgtttccatggttcatataaatgctttgttgttttttgtggggtttgttgtttttaaaaaagtagtaactaataatcttatataccaagcactttttctggtacctgttcgtgtaatagctcatctttttttgagatggagttttgctcttgttgcccaggctggagtgcagtggcacaatcttggctcactgaaacctctgcctcctgggttcaagcgatgctcctgtctcagcctcccaagtagctgaattacaggtgcctgccaccatgccgggctaatttttgtatttttagtagagatggggggtttcaccatgttggccaggctggtctcgaactcctgacctcaggtgatctgcctgccttggcctcccaaagtgctgggattacaggcgtgagccaccatgcccggccagtaatagctcatctctaaagcaggaacacctgagtgcttgctgtttgcattgttggcaaagaaaaaggaacagagctgtggaaccatcaccaaatagcatgcctccttcgctttctcttcatcttgatcctcccctcctccagtagttccctgttcttttcaaatagaacaccacacaaggaaactcaatgaaggaaagtgtgtgtgtgtgtgtctgcatgtgagtatctgtcttgcgtgtggacatgtgggcgtgtttgagcatgtgtaagaaaaagtgcatgtgaagaaagcaaacagtaaagcaaatggggcagctgttaataggcgaatctgtgtaaagattatatgagtgttctatgtactgttcttattcttgcatctataaatttgaagttatttccaaagaagatacttaacacatggatatatgtgagactaatttgactgcactaggagttctctggaatggaaattttcttctacatcctgataacatatcttactctccccatttaacagatggaacaactgacacccagagaagttaagtgatcagtctgagttcacatagcacattggggtggaagcaggatgtgagcccaggtattgaccgttatagtaggccacctcttaggagaccatagctggtccttactactctagctggaccaggttggcatcagattctgagagctgattgggtgcccactgccgtgtgtcccagcccagtccacgcctcacattgacccagcagtggagtcagcagggttgcagctatatatatgctgaagcacactgagcatattcaggatggccaggaactttctagagaaagtgcttccttagactaagaaacactctcactgtgttctgccctcaacaatctccattttttttttttttttttttttttgagacggagtcttgctctgtcaccaggctagagtacagtggcgcgatctcggctcactgcaacttctgcctcccagattcaggcgattctcctgcctcagcctctcgagtagctgggactacaggcgcgtgccaccatgcccggctaattttttgtgtattttagtagagatggggtttcaccatgttggccaggatggtcttgatctcctgaccttgtgatccgcccaccttgcctcccaaagtgctgggattacaggtgtgagccactgcgcctggccttcatttcttaaaatacatgaaaatggaaggccctgctgcaccagagccatgagggactattacctcatatatatatagtcgagatctgagggaaaaaggagtgggtttggtttacaaagtgatgccaggtatacgcctaggccagagagctttcttctgctacgtaccagtcgattgtttgtacccaccgccttgtgagtgagcaggttgcgtggttcagtgcagcacattgtatcaagtaggtcaggagttacaacttcatgcacaaagagatggctcatttttagtcagtgaaaacctttcattaaccacagggcccaaggaggggtggatctggtaatcattgctaagcagacagagctagaggttcagacactgccgcttgtgtgccggcccctttcctctcacaccaaaccacatgttatgcacctgtttgtactccttgaaggcccttgaattattcttgtcatttttgcttactgatgttttcccccagctgtcagagttgggggtaagtgaatgaatgtgtcccactcaaattcttaacatagagaaaacattttcctgaaaatctttagttttagagtgcatcctttatctgaaatgcctacctgtaggtaccttagacttaattaatcctgaccatggttaagttgtcatcaaaatattttttttcaggggcccagctagttgtatgaaatagatccatgagcacttactatattgttaccccagcttatatacttagattttttgtccttaggcagtgatgaagttatacacactgcccccaccattctcttgattcctcaggctctttcctcctctaacgtaagtttccggtagtggccaaccagaatcagggcaagatgcaggaggatgcgaagaggctgccctcaaattcctgttgggttgtctgaagcttagaggtgtgtgttggagctgctgtgcaaatggcaatgctgtctgctcagagaggaccatcataactgagcctggaccttctagttcttggaggtttggttaggacttattggtaattaatgtaccaatgtttccctggatcaattttttgcttcatgaggttaagcctttttacttaagtataaaagaaggtgacattactgttaagcatccctgatttcagaacagatctaaagcccatcatatacaggggaagaggctataacttaccttccagtggtgttgccacccactcctctgcatctggaagcacaggagaggcgacctcataagtatccttctgatatgaagctgtcagcatatattgagggtaggaggaatctttccaatgtgatatcttcaacactctttctggaagggccatctaatcttgcttttcagactaggtttaccctggaggcactacataacctttgagcttcccttaggaaatctgaacaaccagcaagaccagggcttcaaaacaaggtctgccctggaatgttgcccagtgcactttggggttctttcacagctagagctcagcatgggaatttgccactgatttgaggtttgttccaaaatatcagggcccgggcagggaaccactagatgggatgttgtggtctctaaggtatctcccctttttgaagctgggggcatgaagtagatagagcttgactaaggagttggagatgatcagagaagactttctgcaagtgggttgagatggttcacacagattttcaaggatgcggggggtagagaagaacaactctactaggatctttgatcctgaaggcagagcaaattctattactgtgacctttctagccctgaggaacttgaatagttccttataagtgccccccaacttcctccccatagcccagagcaaaatgaatcagtcagggttaggagcagagggtcctgacagagtccaacctagtgagctgtagcgagagagcaaacctgccctctgagtgttcatgtctacttgatggttactcccagcttgcccagtcatgtgaccagacttctgcttgtggctagccacaggtaaactgagtgctatttatattctcctgtgtggtagaggaggtgggagagatcatctgggagcccacaacacagctgtttgatcagcctaggtaaggcaaatcttcctttgaatttgtgcctttttttttttctacttatcttgccccaagtaatagcatgggttctgagctttcaatttagctgattgatcagtagccatctcttatttaccctttaatagttggggaattctagaactagaggaggcccaaactcatctgcgtacagtttcctgtcttcaagggtaaataactgagacagctggggacgtgtaatgatctcttcctggggctgttcagaggcggattctagccaccctcattcaaccttttatctatctagctagactccctcttattctaactaaagcctttttactgtccttcatgtttgcacctgcaaggaagactaccgataaattctaattcattttccttcccccttgggatcaagctaccctccgtttagctgtttttacctctgtctctgggatctctctggtttctgcattccttttgaagagcaatcatgacaaatggatgccgaggggccacttggctgtgtatatctgaggttatatcccactccagccatgtttctggacttataggaagctcttaattctgcctatagtcttggtcttgctcctgggatgacatgacacttcttaatttagtttagtgtctctttcacttagtatcttgattctaccttgcattaacttacatcttgtgagtttcagttccttgcctcagccttatccatgcttttattccttgcctaccttcagtcccccaaattagaagtctagtgacccagttgaatttggctataacctgccaatgttgaaatgctaaagggtttaggtcctttctgaggagtgatttgaatttgtcttcctaaatgaagccagtattttttttttcttacaactttattttggaaaatttcaaacctacagaaaagttagaagcacaatgtctacctatttatctttcacctagactcattgataacttttgccacaatggtcttatctctcttttctccttctgtttatgtatatgtgtgtctagacatacccacatatgcacatatatacatccatatgcacttttttgggtgcacaatttgacagtaagttgcaaatatcatgacatttgtcacttcataacagtggcatctcctgagaataaaaacatccttctccataatcataataccatcattatacctaatgaaatgacatcatctatgaggttggtacaaaagtaattgtggctttgccaaaggcaaaaatggactagagatgtcatttagtccattttcaaatttcccctttgatggctcttttgtttttgatcagaacccagccaaagtccccttttggttatgtctgttttaaaagtctctcaatctggaactacttcccattcctgtttctttgttttgctgtatttgttttttgagactaacattttgaaaacatgtcaattgtctctggttgtcccacactggatttttctgtttcctcatggtggtatctaacttgctcctctatcccctgtatttcctgtaaatgggaagttagatctggggcctgattagattcaggttaaacatttctgacaagaacatctcatggataaagctatgtacttcataaaatgtcactttaggagatacataatgccagaatgtccactgctagtcaggctcagttggatcacttgaggtggtatggtagcccccaggctataaaagtacattattctctttgtaagtggtttctggataatactttgggattatataaatcttctgttccctatgacctttggcccagtggtgttggcatctgttgacaactcttcctgatagagatattactctgggagttgcataaagccagttctgaattaacactaatagatgtgagtgttgacatgagcagttcaaaagaagaataaccaaaaaattgtcttttggcctttgaaatcactggagggaaggcaacaaaatggggccatcaaattctgtcaacgtttgtaggtttttaacttgagtatcagttgctaaaacatataccatcagccctctgtatctgtgggttctgtatctgtgagttctaccaactgagtattaaaaatacttggaaaaaattgtacagacttattttttcttgtgtgtgtgtgtgtttttttttttttttttttgagacagagtctcgctctgtctcccaggctggagtgcagtgatgcgatcacagctcactgcagctttgacttccttggctcaagcaatcttcacacctcagcctccagagtagttgggcctacaggcacataccaccaaattttaaaattgtttaaattttttgtagagatctggtctctttatattgcacaggctggtctcaaactcctgggctcaagtgatcctcctgccccagtctcccaaagtgctgggatgacaggtgtgagccaccatgcctggtttcttgtcttgtcattatttcttaaataatacagtacgacaactatttatatagcatttacattatattaggtattataagtaatctagagagaaagtgtgggattgcagggaggccaggcaaggtgactcacacctataatcccagcactttgggaggccaaggcaggagaatcgcttgagcccaggagttcaagaccagcctaggcaacatagggagatcctgtctttacaaaaaatttagaaattagctaggcaaagtagttctcacctgttgtcccagctacccgggaggctgaggtgggtcatgcctgtaatcccagcactttgcaaggccaaggatggagaatcacttgagcccaggagtttgaggttgcaatgaactatgatcatgccactgtactccagcctgggcaacagagcaaaaacctgaatcaaaagaaaaataaataaacaaataataaagtattcgggaggatgtgcataggtcatatgaaaatactacactattttatatgagggacttgagcatccatagcttttggtatctgcaggaggtcctgaaaccaatcccccatggataccgagtgatgactgtatgctgctgtctggcagtttgttttaagttagggagaaggcaagctgaatggagccaaaaataagtcatggtttgttcataaagcagaaattattttgattatccgaaagttatctctaatcctgttctgatttccttttccttctttcacttgctttctaccttcctcactggaaaagggacgccccccccaacctttttttttttaagacagggtctcactgtcacccaggctggagtgtagtggcacaatcatagctcactgcagcctcaacctctcgggctcaagcagtcctctcaacctcagcctcccaagtagctgggactaacaggcatgtcgtgccaccatgctagctaataaaacattttttcttttttgtttttattttttatttttttatttttttgagacagagtctcactctgttgcccaggctggagtgcagtggcacgatctcggctcactgcaagctccacctcccgggttcatgccattctcctgcctcagcctcccaagtagctgggactacaggcacccgccaccatgcccagctaatgttttggtattttagtagagacggggtttcactgtgttagccaggatggtcttcatctcctgacctcgtgatccgcccgcctcagcctcccagagtgctgggattacaggcgtgagccactgtgcctggccttttttttcttttttttggaggtggagtctcgctatgttgcccaggtcggtctcaagctcctggactcaagtgattctcctgccttggcctcccaaagttctggacttactggtaggaaccaccactcctggccaatccctgatttttaaattgttctcttcctaccttggcccacccaacatgcccaatgggtatactagtgttcctgagacccaggtgtgatcatcctggtttctagcaagggaaaggaatagacccttccaacccacggagtagttcctgaaccaagggtgccaggaggtcatgacatagttgagtctgataacaaaacacagggtaggaaatgtactttcagaaatcttctgtttgggtaataaaaggtctcagttttttctatgaccttggagaaatcagttcacctgtctacatgggggtgtgtcataggccctgcatcaccttggaagctcagccctctcttccataagagaattcatgagcttgtgggggtgcacatacccataacagaaatcagagtacagtttcaatcatggttgtcctcttgtaggattttttgtctttgaacttccctaatgtttgtttttccttcaccttacttaaaacactacctaagagctgactgggcttcatgatttctttcctacttgatggaaatcagattcctgtgagaagtgaagattcaaagggtttatgcctgtcctttgagtttaaaacagccctccagaaacccatcactcccaaataaccatggagtaaggatttttttttttagagataggggctaggctatgtgctatttatgctattcttgcaaaggccatgtagatcccaaaggaaagtatgttccaatcagtaactgctagtgttttgttttaaggatgttgaaatcctgcagaactcctcttcagagaattcagataaaaggtgaaaagttcacaccacttccttttcttctaactgcagcttaagaattgaacaaatgtctaagtaactgctgtctactctttttatatacacacatagactttgggttcaccctttttctccttactgttacaaagagccaatgtattccttattttttttcccacaatgacatctccagaagggtttctcttggcctgtctctccagctgcctacagatatggtctgcatcttgggaagtcggacacacagccagaaatgctttcagtggctctcacttaagctgtacacttaaatatggagtcagtaattaattgagagcctggctgagaagtttttcatgtgtgtacaaatatcgtcgctccttttttcatttggggtagtcttattggtagggataacatgggatattatcatttttcttctttctttctaatgtagtttctttagtttcttctacctgttaaggatagctattgaaagaagtgttgtttaaagaagtgtttgcagctccagatttaattttttcagctgggatggatggggtctccttgggctttccaaggagggcttctaactcttgtacagtcatattggaaatttcagtttcgccacaacttccccacaaaacccacccatccctagttaagcagttaagcagcactggaccacagggagctcagaagacggcctgccctgtttaatcccaacaaatgtgctgaaatagaaaaataatccctgtgaggctgctaggaggaacttcccgtgcttactgcaaacctgttattggggaaatgtttagaaattctgaatttctgttttactttgctcttctaactccagattaacatttccctctaacagaaatgctgtatcacaactaggacaggacaggacaggatctgttcctcctgtgtctaaccacactgctctgaccctgcctgcttctcctccttaagtgaagatcactgactgaaaaaaaacaggttgtagaaaagcatgtataatatgacctcattttactaaaaatacatatgcaggctcgtgcatggagagagatcaggattggtgagcaaagtggtgatctctgagtgcgggcatgcatagttggtcattttcagtttttgtttatctgcattttcttcttctaacatgtgcatagtttctgttataagttattttctctttaaggggagaggtgagatcaaaaaatcaaaaataaaaacaaaaaacaggggaaatgagaagactagtgctaataatgcttcaagtcttgatgccatgagaaaatgactcataacttgtttgttgaaccagctagttgttgagtttttgccatgtgtaagatctcgttggctgcctctctcattttccttctgtagtccttcttgggtattttgggataactacgatgggtggagagtagccctgtctttatttcacaggcttttctctcctatatcaccccaaagatagtgaaataagtggagcacgtcccctagatgcccagaacccactggtcaggggcttgtttccccttgtaaagtgctaagcctctaccccacagtctatctctggtcacgctgagaagagcagccacaatgcctcagttcctgcattatctactgtctttcctctaatgccattcctgcccttcttctaagagctgtcacccttctcctttaggtacctgttggggagatatgctggtgtggccaggcctgagctgattttcagcaagggatattgggaatagcagagacaaattggtggtccttctgaaaaagcatttcctgggggagtatcccctgggggtcttgcctggtagcctggcacttagagagaatttgcatcagccttgctcacttcaatctcatcagcaggttcttgtcttactcctccagtgtttatcacagacagatggctcgtagtgagtgctcaaaatctgcttaccaggctgggtgcagtggctcacgcctgtaatcccagcactttgggaggacaaggtgggcggatcacaaggtcagaagatcaagaccatcctggctaacacggtgaaaccccgtctctactaaaaatacaaaaaattagccgggcgcggtggtgggcgcctgtagtcccagctactcgggaggctgaggcaggagaatggcgtgaacccgggaggcggagcttgcaatgagcgccgagatcgcgccactgcactccagcctgagggacagagtgagactccctctcaaaaaaaaaaaaaaaatctgcttaccaaaggcatcagtctgctgcagtgtgccaggcccatcttttgctcttggttcattgtcttatctgccgtttgtgtgccttctgccatgttgactttcccccaacaggcagatacttgaccgctggccctctccactcatagctccctctctctaaagccatcctagtgtagcagttgtgagacaggaccaagtggctctggaagatagcacctaaggcttcttatctcctgtgtgtgctgttttgttttgttttttccatttgccgttgctcaagaaccaaagcatccgccactgctcagctgcatggtgaaatggcctggcctggtgccagggtgcttcaccaggtggttgggctgtggaggctgctgcatgtgatgggctgataataccccacggtgctgtaaacaggacactccaccctcctgcagccacccagccagtgccccaacagcctgctgctttgtcatggcctgtcatgatatgggcttctcttctctgatagggaagcctattgtcgtatttccctcccctatttcctaaatctgagaggggtactttccagaaatgaaaccagttcatcttccaaccacaagcaaccgttgtgacttctcaatgctgcttctcctttaacaataatcacacaagtgcagggcagaacccgatgcccagatctttccggtatgcccatggaggataaacccaagagcctctatctcaactaggctcacctagaagatttcttaggggacgttctctattgaggtcaatctcattgggcagcagaacttaagtgttgacctgaagctgctgatgctccggtctgcaagcagctttgtattctaccctgcatcacttattcctgggttagactgtcactagtaaaggaaagggctttgacattaaaaatgggcatcttcccaggggcccaggagagtgtaggcctacggatagaggggctagggcttactctgcacgtctttgggtagtctcctctttccggactccttcacctacaccttcaatcctaaaggacatgaattgatttgacataatctttctaactaaggctttaaagtgtatttgcatctcttcataacatccctcagaggtaacttaggccagagggagagccagcccagtgaggctgggtggcgttggctgtagtcagacctaccctccccacctcttagctcctactagatatctggggtggccatgctgcaccagcctgcagccccttcaagggtggcacgagacatgtcattgtctcattttggctttggtttgtgttgcatttgggggaagtttgacaccttggtttagcccttaaccaattttgatgtccaaagaagcaggtgcttaccaaaccacttgcgatgaggtttgtgaaataagtggtagttttttttaaactattaaaatctaatttttaaaaaaagtcccctcccttatttcctaggcttaaaggaaatatggtattttcgtctcctcaaaagagctgggacatgccaagaatttggagagttgggagggtagtggaccttgctaagggttctgagacagaaggtaattctgtcatctcatggccagtgaggcgctgtgccagcaccctgtgccaggatgtggcctctgtggaaataaggctgaggcccagctgtctcttcatttaaggaaaagaaactgaggcaagtcctcctgtttgatttagatgtagtaagatccttgcatatctgccaggggagagggagtcaggggctgcagattctggattgggggttccttggtttctcctcaatcctttcccctccctccttttttcccctttttatttcttttctgctatttgtgtgacatttttttgtatatggaggaacaagtcaggacccactgagtcctgagtcttaatggataactggtcagagggagccggaaagaatgtagagtttaccaaaatgcgttggttggattctcacatcacattccaggaatttgggtgctccccagccctgtgagtactgggagcaaagtaccacctatgattattgtcctagagattggattcattgaatagggtaggatatgaagagtgatggaaaccaatataaaatgggttaaagttatccctaggagataatagagtcctttacttcaagtttcaaaggcttcctcaagaaacaaacaaaagcaaaacaaaaaataggtcattggagacaataggattgggcctgccatctcctccattaggtgctaaaaagaagctattaatacaaaagcaattcatcctccaggtgtctaggcaggtgtcccagcagcctcagagggtgtccctgatagaagagggatgtgagcctcagtgagtagttggaagactgatttaggaggaaggaggcttggatttagatctgggactgctgctgacttacagagtgaaggagtctaatcagagactaagcttctttgtgccttagtcttccttaacagtctttccctatccccttttacagctgacaggagagtaaaagattacagcacaccaaagtactttgtggggatggggcaaaacttgaaagcacaacgtaaacacgagatagctttagggtcccagtaaggaaagaatctaaaagagatttttgcagggacttcagatgagggcatgggagaagcagctccaggaaacctttctcctgtcacttatccctcagccttggagtcctactccttttccttcgaaacagtgatgaagcagcctttaggattatgagatcctaccccttatgccaatcacttgctcgtccgtggcccatctgcctctttggttatctgtcatgtaattttgtaaatccactttccagagtccctgcctcgtcactggactctaatagacagttttggaggcccgtaggacagcattttggcctgagctggctgctgatgtgggtcagaagctcccagaaatatctggattgctatcttttgattttaaacccaggttaggaaaatgagtctttgaaatgctggtgtagagataaagttgtgccttgaacccagtgtgcctgtcaccaacttactaggcaacaaggttgcaggaagggtaagaaagaggttgggccttcctgagcctcagagagagaaaaaaagacaagcagctatgggatctttactccaagtgggtgtgttgaacacacatgcaaagtcagaacccctggtaaaagtagagccagttgacccttcttgtgaaggtttttcaattttattcaaatattagatgcctgccaattgccagccctatgctttagacattgtgggggatacacagagcctgcccttggcctcaggctgtttattatctaggagttacaaataccctattcctcaagagaaggtgctcattactagaagagtacaaagtactgaggaaacagaaaattctaagacattgcttccaggggattccagtggatgcagaaggcttggtggagtggaggcagtaaagctggccctgacagatgaacagattttaaccctgggcccatgcaaaatctcagaggagggaaggcttgggacatgggtgggaaatggtatgcagtatagtttgtctgagatttagtgaccttaaggaagagtgaggtataaaggacaggtaagtgggaccagaacatgaaggctttacctccgtctttgaaagagggcctttgggccgggtgcagtggctcacatatgtaatcccagcactttgggaggctgaggcaggcagatcacgaggtcaggagatcgagaccatggtgaaaccctgtctctactaaaaatacaaaaaaattagccgggcatggtggtgggtgcctgtagtcccagttatttgggaggctgaggcaggagaatggtgtgaacctgggaggcggagcttgcagtaagccgagcttgtgccactgcactccagcctgggcgacaaagcgtgactccgtctcaaaaaaaaaaaaaagaaagagagcctttgaagaggtttaacctaggaatgttaatatcatttaaaatgatgtgttttatgtcaatatatattgatttggaaagatgtttataaggtaaaaacataacaaaacaatacgtacagtataatcccattttaaattgtaaagcgtatatatacacacacacatacacacacacagaagaggtaagacctgtaagtttatatttctcataacattggttatctctgggtgttgagagttgagggtttttttctgtttgtttatatttatatatttcctgacttttctacagttcacacttactactgttgtagttataaattattcacttgttttaaataagcacatatatgatggctgagtgagaatgatctagaactatgccagggattagataaaaacacagagtaaaagttggccatatagtaacatttttgatgtccaaattggagaggaatccctcaaatgttcaaaaatataggaatgggtcgggtgtggtggctcatgcctgtaatcccagcactttgggaggccaaggcaggaagatcacttgagcccaggagttcaagaccagcctgggcaacacagtgagaccctgactcaaaaaataaaaagaaaagacaaaaatacaagaatggctaagcaaactagtgtacatcaacctggaggaatattatatagtcttttaaaataacaaatatgtagattgttaatacatgggaaaaggtatatgaaataggtggaaccaagcagaacataatatagcatatttcctactgattacaactatggcaaaatgtatgtaaatgcttcagtgaatttggagagtggaggtagtattgttagtgtctttttttttttgagacggagtcttgctgtgttgcccaggctggagtgcagtggcgtgatctcacctcactgcagcctccgcttcccgggttcaagcaattctcctgtctcagcctcccaagtagctgggattacaggtgtgcaccaccacgcccggctaatttttgcatttttagtagatgaggtttcaccatattggtcagttagtgtccttttttttattgtagtaaaatatatactcactattttaaccataaaagcttatgttcactggcattacatacatttacaatgttgtgcaaccataaccagggtccatttccacaacctgaatttcatcatctcaaacagagactgtgtatccattaaacaataactcctactccccctcctcctcctaagcccttggtaaagtctattctatttttttgtccctatgaatttgcctattctagatacctcaagaaaaacagaatatttgtccttttgtcttgcttacttaactcagcatcatctgtattggagtgtgtgtcagaattgccttccttttgaagactgaatagtattccacagtatggatgtgctgcatttgtttatccgtttctccattcgtggatgctcgggttgctcccaccttttggctattgtgaaaaatgcttcaagtccctgctttcggttctttgttggtatatacctaggagtggaactgctgggtcatatggtaattctatgtttcactttttgaggaactgccaaccttttagtgtctttttattttttttaatttttatttttatttatttattttttgagatggagtctcactctttcgcccaggctggactgcagtggcgctatctcggctcactgcaaggtctgcctcccaggttcacaccattctcctgcctcagcctcccgagtagctgggactacaggcactcgccaccaagcccgggtaatttttttttttgtttttagagacggggtttcactgtgttagccaggatggtctcgatctcccgacctcgtgatccgcctgcctcggcctcccaaagtgctgggattacaggtgtgagccactgcgcccggccctagtgtctttttaatataaagttcttcaggtttatttatacctacagctcccagttctttttgctgtgctaaatacatgtgaattattaagggattactacagatgtgaaagtgttttgttctgtttaaatgcaacagcctttataggtctttttttttttttttttgagacagagtctcgctctgttgtccaggctggagagcagtggcgtgatctcgactcactgcaagcactgcctcctgggttcacaccattctcctgcctcagcctcccgagtagctgggactacaggcgcctgccaccacgcctggctaatttttttgtatttttagtagagacgcggcttcaccgtgttagctaggatagtctcaatctcctgatctcatgatccacctgcctcgacctcccaaagtgctggggttacaggcttgagccaccacgcccagccatagatcttaagatagtagagtgttttgaatgtggccatggaaaacagggtcaacttagatgattgcaacttccaaatgattccagtacccttacattttatccacagtttcaacttttacctccttctagaaagctttaaccaaagtaaaaataaatgaatggatttatttatttaatttattttttgagacagagtcttcctctgttacccaggctggagtgcagtggtgcgatcttggctcactgcagcctccacctcccaggttcaaccaattctcatgcctcagcctcctgagtagctgggattacaggcaccctccaccacgcccggctaatttttgtatttttagtagagatggggtttcaccatgttagccaggctggtctcaaactcctgacctcaagtgatctgcccacctcccaaagtgctgggattacaagcatgagccaccaccacccggcctatgaatggatttataattgctttatttttgtcccatttagacagaagtcagagacagaggagagaaccaaaaaacttggatgtttccgtaaactagattcgtcaatcctcgataattgaaagtagttccagtatgtcagccaccggggttccctggggagctaaccagtcctgaaggaagtatgaagaggaagaggaggtcttcagttaaggggatgaatttgtgcagtgcctaagccctgcaaaggtgctggagggaggaagaagggcaggagataaaagatggaagaaaatttgttttttatccacttagagttttatctttaatgatgggaaacagtgctgctctcaggaaactcagtgtggagatctaggagttcacggttcatagtccattaggagcaggaaaaggatagaggacatttataaagtaacatccaagtccaaagtaaaatggtataaattgtttcccatgataaaggctggctgagtaggtcaggaaaggtcttgtcagaccatatgtgctgtttcaggctgcttcaaattcttttaggacagtggtggatatgagtgaagacggggcaggcaggccacatctcttagaagaggaaggtgattgccacgtctccttcctccatgctgatggcaaggcgtgcgggctgtgttctcttgcagccagcgtcccatgctcggtggccccagaaaagtcagtgtgtaggcctcagccacttcaggtccggcgtacattctccctggacaccatcctcagctcctaccttctgggccagtggccacgagatgctgatggggccttcacctgctgcaccaatgacaaggccacccaggtaatgaagctctctcctgatgggataagggataaggatggggcgggagagctggctgaggaggcctttggtcttcctcaagtcattgcgatgatttgtcttgggttttggtcgtacatattatccatgtaatgttttatcttcttaagacagagtttccttttgtcacccaggctggagtgcagtggtgcgatcttggctcactgcaacctctgcctcccgggttcaagtgattctcgtgcctcatcctcccaagtggctgggattacaggtgcctgctaccacgccctgctaatttaccaccgtttttctttgtaaacttatatggaaatgagtttgcattccacctgcctggtggaagagagaagtcaatctgggtttttcagtttagctttgagtatttgtgtcggggtaatcaacagctgactttagagtttattctagctttttaaaaaatgagatttaggctgggcgcagtggctcacgcctataatctcagcacttttggaggcctaggcaggcggatcacctgaggtcaagagtttgaaaccagcctggctaacatggtgaaaccccgtctctactaaaaatacaaaaattagctgggcgtggtggtgggtgcctgcagtcccagctacttgggaggctgaggcgggagaatcgcttgaaccttggagggagaggttgcagtgagctgagatcacgccattgcattccatcctgggtgacagagcaagactccatctcaaaaaaataaaaaaaataaaaaatgagatttaccttgctaaaattaaaccaaggccaacattctattgagtttgtatttcccaaagaagtggccaaaaagtatgctgagccagaatagatcccactggagccataggaatgggaagttctcagataatggagaattcttccttgccagcagccccgactgggatttcagtgtacccattcaaggactggggagccagcttcctctccttcagtattttcattaagacagtcttttcattaagaatcccaagctcggaaagaatctctgcagatcatccagttcatttaccaatttttggataagctagcacgaacgtatctcatatgtgaaattatacagacatttcttaatctgattcaggacttcattcttagcagctaagttgttaagagtcaaatctcccttttgatgcagtttaaacgcactcttgttcatcttcagagcaaatgagttatttcgagataggcagaaacagggtggctaggacatgagggtccgagtcagcccttcaccctgggggacattgggcaagtcagctcttcctttgcaaactgggtggagagtgcgtggtctgcctctgtgtaggtggcatgatggccaaatgacacatgaaagtgcttggtacctcttctgaccacatcatgtcagtttctttcctttatttattttgttaatgcgatccattttcaaatgttgttagtgaatgtttgaatgcccagtactgttcttggcatgttggaatgaagaataaggaaatgaggacaagatttggcctccatgagtctggattccagttctatgagggccagtaaacagacagccaagggatgagatggagccaaatatctggcaaagtttaaagaaggggaattctcatgggaataccccaccttgaatcaacaagaatttgctgcagttaaaatcatggccctctttggatctacaaatagactgtgaaaggagaataccctccaggaaggagagagagtaggcttccttcctgggagccctgggcactgccattccctttatcctttggaaaaggcaagtaggataaattatgcttcctcctcacaggcctgggagcacacataactttgtcttttgataggagtgcttagttcaaatatgtttgtagtcaaggagggcttcctggaggaacaggacttgagattcctttgagtgtgtaagctcattattgcatccctgtttgtcagatggcaggcttctgtgtagcccacctatttctgcctctgtcatttcctgctttcagccttctaggaagtcaccatcccactcctcagatagctttctctttgtcaactgaaggcagggttggcctcagatgttccctggctgagtttagaggcatgggccctaggctgtgtgtttttgctcaggctccagctgtaggccagatcttttatataacaagtctgggcttcttgccacagcaagacagaggtcagcgatgagcctccgtgggtctggcaaggccaagccatgcagctttcctctttccctgggatgggctccagccctcgaggaactcttagcaacctgtcaatattgtggccgcagtcaggaggtggagaatgctgatcaacctaggcatccaaaccaaaatatgcactctacccatctttcattcctggtcttctgggaatttgctgcttctaggttttgggctccattcaaattcctgcttaagcccccgggcctggtccaagctaccctcttcaacactggtattacactgtggaggtctgaggctcacctgacatattcctaagtaactggtgttcctttcctattgagtactgggatatcacccagaaaggactggagaggaaggagaggtttgactgggaagacatgaaggtgtctggagaggggaagagggaagggagggtggcaggatctaccaaagtccttgaaagcttttaagctgttaaaaatggactaatatggccaggcatggtggctcacgcctgtaatcccagcactttgggaggccgaggtgggcagatcacaaggtcaggaggtcgagaccatcctggccaacatggtgaaaccccatctctactaaaaatacaaaaattagctgggcatggtgactcacatctgtagtcccagctactcgggagactgagacaggagaatcgcttgaacccggaggcagaggttgcagtaaaccgagatcatgccactgcactccagcctggcaacagagcgagactctgtgtcaaaaaaaaaaaaaaaaaaaagactgatgccagaaccttttcccaattgccctaagctgagggtggggctgttcctaccgctgcccttaccttttgccctttctcttctagtcataccaatatagtagttattttctgcttcatcctccctcactggtgggcactcactactactgtcctacttgcctaacctccctccaccaagagccagcagccctggcattcccagggcatgccttgcaatgaggtcagcagctgcagttatggttcaggctaagcagctccttcctctgaatccctgagaggagaccagggccctgcccattgcaagccagcttcagatctaggcagcaagcctgggacacctgctgtctagatagccgggcatgctatcttgaggcttcttcacagagtagaagatggagcgaaaagctctcagttcttgaatatagcccagtagtgccaacaatctcatcctagtatctccttcctcgttgtgttttaaactcttaggtggttacaaaggattgtcctcaggccatttacagtcagacatggagaactgggttacccaaatatttggggcaaggaaagaggaagcgtgcggatatatgttatttgtgatattggttgtttttgggaggaggatgtgtgaacatggtaattggggaagaagtgctttggagatgctgcatgttttgagcaacgggagagatgaccaggtcagttggtaaactagagctggccaccgattgctttgtgttgcccacttctagtggctgggcccaggccagggtgggtgagggcagtacatgccggtggctgcagttacccctttcccttcttgctgtgcaaacctttgagtcttcgtgtatttttctggagggaggaagtggtctcatcacagctggaatgactgtttgagcaaagttcccctgttggtctcatcctgctgacggacaggactctgggtacctgtcctgcctagcccagccccccattctactcatccccagccccattccctctgcattccccaggtaagatggggaagcttctatgataggatatttttttctttagccccaacttaccctttagaaaaaaaaaaaaaagcttaagtcttgacaaaccacacggagtatgaggaaggccagaggtgaaggtgggcatgctcactgggaagacttctcttcctgtgtctttcccctacctgtgtactatcctccctgttttcccaagccagtgccccaacagtgatgacacacaattcagtctgaccatcatggaccttttaaaaatgtttttctttgtgggtgtgggggcctgggcacactgcctgttttccagattggcgatcaggaccagttgttcagcatagtttgacaaaagtaccaaacatttgaaaatggggccatgatggaaaatctgagagttgcatagtcactgtagggccagagatggtggccttggccacttgcagccagttttcagtgctgaccagcagaccaccctcagagccttttccggcctttttgtttggccggagacctaagggactgattccctgcagaatttcagttgaacacgtggtcctgacggtccacaccaggccaggcaccatgctgcttgacagtcccgtgcagggatagtgggttacgttcccagggcctagcccagctccacacatggagcttactcaggtgccaaggtcactggagacagtgagggccaggactttcctgcctgtggtcatggagtctaggtagaaacttttgggctggaggctgagagattccagtttggagggttttcagcttcatcccgcccctcctcctcattatattagatggctctttgagaaactgtcctccacccccatgcccagctgtccttccacatgttgctctgggatctcaatcccaggcaaggcttccttggtctggccacgtccagttttgcataacctaagtatcatctgcacagctggcccatgccactcatggtcagaagctaccctacttgtccctcagctgctcaccctgggccagggtgtcaaatctgttccagtgcatgactccccctgacaaacaactttttgttctttttctttttggagaacagagtctcgccctgtcgcccaagctagagtgcagtggctcgattttggctcgctgcaacctccgcctcccagcttcaagcaattctcctgcctcagcctcccaagtagctgggattacaggcatgtgcaaccatgcccggccaattgttttgtatttttagtagagacggagtttcaccatgttgaccaggctggtcttgaactcctgacctcaagtgatctgatctgcccacttcagcctcccaaagtgctgggattacaggcatgagtcaccgtgcctggagacaaacatgactttttggtctgctgagctccagctctaccctgcttccaaagggtcatctagaatgactgagcagcatggtgtgacccctgttgtggccagaaggttagttttttctttttcttttttccttttttttttgagacagggtctcactctattgcccaggctggagtgcagtggtattatcatgactcactgcagcctcgaactctgggcgcaagtggtcctcctgcctcagcctccctagtagctgggactacagatatgcaccaccataactggctaatttaaaattatttcttttatagagatagggtctcgctagttgaccaggctggttttgaactcctggcctcaagcaatcctactgccttggcttcccaaggtgctgggattacaggcatgagccaccgcacctggccaggttagctttttgaaggggagcttttcttagctgtgactacatggtgagactcagaagaggagtcctatctaaccttgggcactggaaactggggacacagtccccactctgggcactcccagtttaggaggggctatagtccacacctgtgtacactcctgccttgagaatactcgatgtcgggtgggcgcagtggctaatgcctgtaatcccagcactttaggaggctgaggcaggcagatcaccttaggtcaggagttcgagaccagcctgaccaacatggtgaaaccccgtctctactacaaatacaaaattagccaggtgtggtggcacatgcctgtaatcccagctacttgggaggctgaggcaggataatcgcttgaacccgtgaggcggaggtttcagtgagccaagattgcgccattgcactccagcctgggcaacaagagtgaaactcccatctcaaaaaaaaaagaatactcgatgtcagcatgtcaacaacttcaaacacaggataacctactgcattaggtttctgaggctgctttaacaaattacctcaaacttagtggcttaataccacagaaatgtattatttcacagttctggagaccagaagtccaagttctgtttcactgggctgagatcaaggtgttggtagggccattctctcccaggaggctcctggggagagtctgttcctgcacttctagcttctggtggctgctggcactccttggcttgcagccacatcactcgagtctctgcctctgtggtcatatcgctttatcctcttcagtgtgcatacatctaatctccctctgcctctttcttatttaaggacgtttgtaatggtatttagggtccacccagataatcttggataatctcaagatccttaatacatctgcaaaaacgttactatacaaggtaacatttataggttcctcatctttgaggagctgttttttaacctgtcactgcatctcctgacacactctgctccagccacactggcctctttatcattctcaaacatgccaggctcattgccgccacagggcctttgcactggctgttccctctgtctggattactcttacctcagatacgcacatgactcactccctcacttccttcgtgtttttattcagatgttactttttcattgggggcctccctgacatttccaattgtatcccccacccagcattcctatcccttttctttgctgtatttttctccttggcacttatcactgtttaaactgtctccccaataagaacataaactcagacgggacaagtatttgtgttgttttgtacatggttgtatggccagtgcctgaaacagtaccgggcacacagtgtacattcagccactatttgttgattgcacgaatgctgtacactcagagcccatctgcaaggaggagacacagagcagaagagcagtcagcctgaggcagacaagttaggaaaggctccctgacaagaagaatgggaatagttggccgggcaggccgtcttagatcgggagaccaggcttggaggttgggggtaaggtaagaaaaaggagagggagatgggtttgcttgggaggacagagagccaaggatggagagcccgtgggatgaagggtcagatggtgaattctatggccaggggttgggtgttgacacaaagaaatggccttagtagtatagtttacacagagaaggcagtggttggtggaagacgttgctgagcggagagaggtggggtcacttggattgagagaggagatgaccctagctgctatgattttcacatccctttctttttcttttcttttttttcttttttctttctttctttttttttttttttttcttgagactgtcttgctctgtcgcccaggcttggagtgcagtggtgcaatctcagctcactgcaacctctacctcttgagttcaagcaattctcgtgcctcagctacctgaatagctgggattacaggcgcccagttaatttttctatttttagtagagacggggtttcaccatgtttgccaggctggtcttgaactcttgacctcaagtgatccacccgcctcagtctcccaaagtgttgggattacaggcatgagccaccacccccagcctcacatcctttttaagtcctgtgctagcctgcatttctctttccatcctctcgcatatcccagaagaaagaggtacttgaagagtttgcaagagatattagtagtacccgtggcggcctgaatgtggctgttttttcctctctgttaccacccacctgtgagtacagtatcttccctgaggaagggaaatgggcagaacggtccctttagcttttgtcatccctctatagcctctgccaccttccagggacaacaggtttgcgtggggggtgcggggcccagcttcgattagcagaggtagtcatctttagagttggtcctggagccttgaggagaggatcctttgtgtgtctgctgggtcgaggtggctgggagagatgggcttcctcctcacttttcagtgcatgcaccagccttttctgaggctttgtctggtagaaccctggtttagagagacatgggcatttggaagtagctttccatatactgacagagccagtatatggctttagggtttgtgctgaagatttgggcctgaaggatgtgctgtctgcccttttcctaaagaagggaattgtggggaaatggatctctggatgctttatttagcatttgtagactcctctgttacctacttactcgtgatgctcatcagaacaagaaagttagggtagttgtctcaccctggctatgttgcgtggcccagtaaaggtgctgatccatgagcagctgggagaaggaagagccagggagccccaatccccagtggcccctctccactgcagctgtcacatacggccgtctgctctcacaagcttgctcagactcccccgccgagctcctcttagcagctgttgggtggcgagtagttgggtttttttccccgtcctcccccttttctgtttgcaacaacctctcgggggaggtcagcagatctcttggaggagacagttcccaggccctcatgtttttggcagcctgtgcttgtgcacagaagttagagagaaactggttccactggagcgttcccccttgggcccctcccttggaatggaagtagggatactggtggtggggagggttctgggcctctttggcttcatgcttagagccaacagcttcctcccttgggtcggggctcaggaagtagtcctgcagctctccctgcctccatcttggacactctgtcttcggtgcagcaagggagagaagatgcacactgagggccctgtttttatgagggctgggcaggcccgggaggaaaaggagtgataaggccaagagggatcaggaatcagggctggattcagaactgtggctctctcctttctgaaaatgtctccttcctgcttatttgcagcgggggcaggggttgggggagtaacacttattccatgtgcagggaaaaatgaagcactgcaccatacaggagtcccctgctttggtcaggggacctatgttgacattttttcctgttttaccagttaataatcccttaatgcactcctatatattaacttgtttttattaggctcccaggagcctgggcctgtgctacacatgtagagggcgagagaataaagagtgccagtgattcccggagcctgagcctatattctcttggagctggttgggataggagtggcaatacttgtcctcaccactgaggatcagctggaataactgggatatcatatatgtatagcactcagaaaagagtaaagaggaggttggccctgttgggtcatcagggaatgtttgctggaggacatgaactgggaaggagggagtgcaggtggagaagcctgaagaagaacaccgactgggagtgttcagaggttgatgagcagagagaagggctcaaagggccatcacctctacccagaaaacagtgtgcctgttccccagtgcctgccaaagaagctgctgtgtctcactgtgtttctctccctgcagacgcccctgtcctggcaagagctagaaggtgagcgtgccagttcctgtgcacacaagcgctcagcatcctggggcagcacagaccaccgaaaagaggtagctacccactttgactccctgcctagggtagcggcttcttctcgatcccctagtaccatgcaatgcatctgctccatggtggcgtcacactgctcacctctcctatcttgacctggccttttcctgatgagatggctccttcctagctgactcccactctccaagtggccaggtcttaggagcccagaccctcctgctaggcaggggcttggccagaggctgctagtgcctttcagcagcaagcacagggctggagccaccattgttctttgggattggatccagataagcagctcagagactggaggaagacagggagggagttcctgggaattaggagctcccagcctcatttacttcttaactactcatctagttttttgtttgtttgtttgtttttggaaacagagtctctactggccaggctggagtacagtggcacgatctcggctcactgcaacttccgcctcctgggttcaagcgattctcctgcctcagcctcctaagtagcttagattacaggcacccaccaccacagccacctaatttttgaatttttttttttttttagtagagatgggtttcaccgtgttggccagggtggtcctgaactcctgacctcaggtgatctgcaagcctcagcatcccaaagtgctgggattacaggcgtgagccaccacgcccagccctagccttattttcaagagaagagaaaaataacgaaatgctcccaaacactttttcctggccctccctctccctcaggagtgctcaagtcattgaggttaaggggagaaagccgtaggctggaatattccagggctccccatcagctcctcctgacatgctgtgtggcagcttctgagagggtcaactcgataggactcaccctgcacgcctttacaagaggaagttgcttctgccctctattgctgagaacaatgagaaaatatgaagtgaatacgttgagagcttaagacaagggggaaataaaaaatatttaaacttttcaatggtcagagtaagcaagttattcacactaagaatggggagatgtggtatgagtgacccacaatagcaaattggaaagctctttcttcttggctctagtcataaatcttatggctgtgggcagcagatctactctctgaattccatttaatttaggcttatatttaaatagctcttcatcccctgagcattttccagttgagggcaagaaggtccagaattgcacatgtgatgggataatattcaaaactgttgatgataatctgtagtagtctcaggatatgaaagtcaagatgaaatccaatatccccttcttgagtgtctatccctgttcctagtgtagtctactttaaacaagggagaatatccccatccttcctggtctcagggcctctaagatcgttgtgaatgtactctgaatgtccttagcattcagaaacatcatcttccattgctatttatagaggggtagggccagacgcaatgcctcatgcctgtaatcccaggactttgggaggctgaggcgggtggatcacgaggtaaggagttcaagaccagcctggccaacatggtgaaaccccatctctattaaaaatacaaaaattagctgggggtgatggtgggtgcctgtaatcccagctactcaggaggctgaggcagagaactgcttgaacctggtggaggttgcagtgagccgagatcgcaccattgcactccagcctgggtgagagagcgagactcagtctcaaaaaaaaaagaggggtagtccatgcctttggaatctgtaaaagacaaaatggtttccatgttgtatatttttaattatttggaatccaatccatctagttaagtgaggtatccaactcgtctgaggaacagatcatcacagttttaacaccattgagctattttgagatggaagattaacttccatcctccttgtatatatcttcatgggcctctgccaggagccactctttggaagagggacccagtgcactttggctttccttaatctgcctctgtcgtcttctctctgggctgctagatttccaagttgaagcaacaactgcagaggacgaagctgagccgcagtgggaaagagaaggagcgaggttcaccactcctaggggaccacgcagtgcggggagcactgagggtatgttttctcccccagccctctcccctctgttctcctccatgcaggcccccctatatgggcagaggtttcctgggtcttggaactgccgagccccctaccacactgcatgctttgtgaagttttagtccaaacttggtcttgctgtgtgatattggaagggcttcttgccgttctgaatctccctctcttctacccccatccccatataattgaggcaatgactctacagcacacagtagactctgcaaagctcaaacttttggagaaaactgccctgagtggacctattgcaatctgtaactgtccccaaatcacccttcattcactcagttctgctgtgtggacatgaccattacccctggtcagaatgaaagactgtctaggcctggtggggctgtgtgtgattttgtcatttgcctcttcctcaggcgtcccctcccagcttcccctcagggtcccctgtcttgcgactcagcccctgcctgcacaggagcctggaagggctcaaccaagagctggaggaggtatttgtgaaggagcagggagaagaggagctgctgagggtgagtggcggctgcaccctgagtgcacccacagtccgtgcctcacttggcctgggcgaggggaactgggagtcctgctctctggggcctcacaggctatggctacgcaaacagcagcatacaaacaccagcctgcaaaaggaatgcaaatggagtttattagtctcaaatggccttaacccatgtcactagggcaggctttgtggtggtgagtacaaagacagggggcaaggattggcagagaggaggcccccccgctgggaggaacagacaggggtcatcttcagccaaactgccagttctcactgttccccgtgtgctcggcaccggcatgggcgcctcagtgcctgctgctccctgccccttctccatctctacctggtaacacgcatgcctccttcatgccaagctgctcctatgcagccttctccccgactccactcccaggcagaatatgtgctacctttgctgaagtctcaggcacttttttttttttttgagatggagtttcactcttgttgcccaggctggggtgcagtggcgcgatctcagctcaccgcaacctccgcctcccgggttcaagcagttctctgcctcagcctccccagtagctgggattacaggcgcttgccaccacgcctgactaatttttgtatttttaatagagatggggtttcaccatctttgccaggctggtcttgaactcctgacctcatgatccacccgcctcggcctccctaagtgctgggattacaggcgtgagccaccggccttttttttttttttggagagtctcgctctggtcgccaggctggagtgcggtggcgccatcttggctcactgcaatctccgcctcccgggttcaagcaattccccttccatagcctccccagtagctgggactacaggcatgcgccaccatgcccaggtaattttttgtattttagtagggggtttcaccatgttggccaggatggcctcgatctcctgacctcatgatccacccaccttggcctcccaaagtgctgggattacaggcgtgagccaccgtgctggtctcaggcacatttttttttcttttttttttttgagacagaatctcgctctgtcgcccaggctggagtgcagtggcgtgatctgggcttactgtaagctccgcctcctgggttcacgccattctcctgcctcagcctcccgagtagctgggactacaggtgcccgccacaatgcctggctaattttttttgtatctttgagtagagacggggtttcactttgttagccagaatggtctctatatcccgacctcgtgatccgcccgcctcagcctcccaaagtgctgggattacaggcgtgagccactgcgcccagctggcctcaggcacaattttatattgacacagtttaattggggaatgccagttggccaatattaatatgattctaatgggcacacttctcagtttatgatttacctactagttggttttgaatttgcatgtatgcaggattttacatatacccaaacacatgcacataatttggtgagctacaggttcaagtaccattgagtgtttttaaaagggggtgaggaggtatgtaacacatgctaatcatcagcatacttgttctgcaatggttacagcacttataggctcctggtggtttgccgctattgtgccctccagcatacgttatcatctttgtgttcctagagcccagggcacagaaggtccctgccctcatgaggcttatagtcttatggggacaacacattgatcaagccctacaggtgaatatgtaattatacattggactgtgagtgctattagggataagagcaaagtgctatggaagaaacaggagggagtttcttctagattgaagggtggccagggaaataaatcgctggaggaaatggtgttctgtggttgtgtgtcatggatagagaatgacagcagcaagggaaatacccttggggtcactgtgctgctgcaggcctgaaatactcagggctgacagtctttaccgtccttccccgttagatccttgatatccctgatgggcaccgggccccagctcctccccagagtggcagctgtgatcatcccctcctcctcctggagcctggcaaccttgccagctctccttccatgtccttggcatctccccagccttgtggcctggccagtcatgaggaacatcggggtgccgccgaggagctggcatccacccccaacgacaaaggtaagccgcgaaggctgaggcagcagggctgactctggggcacatgagtggctccactcccttttccacctctagtcaattcaggcctagcattctcagtaccctactagaatatctttatgagtcatctttcttctgcacattataccaatgataataatggtcccatacatcctgttctgattgataatttatgaagtcactgcatttatacttctatttaatcctcactgggatccaaagaagcaatccctgccatccccatttttgggctgaggttcagcaagctgtaggggaaagcagcaagtcttcattcaggtgtccactgtactcattcccaacaatggtttcaaagtggttgtgagtgatacaaagtaagagaatgtggttgcttgcccagggttgcatagtttgacccagaccaaaactcattttttttttttactccaaatctctattttctacaatgccctagctacttctctgagaaaatgagatgaaattcctacctcctaataataatccttacattataaagcactgtgcctatgttgtctgatttgattgtcacatcaaccccatgaggtaggctggtcaagggcatgatctaacaatacacatgggtaaacagagcatagaataaggaggaataaatgtgagataaatacagataaagtcaatatttgcaacctaggcaaagtacattcactgtgtggaaagggagaggaattttatcctacaagtggggttgagtaaagattgcttctctgagtcggagaagagttcttggaagaaaggatagattttcaagactgtggacaggaagaagctgtggtatgttggcagggagggtgtgacagtcttggaagaaggcagagagagacacagttagtattccttcaagtctgagatctggagttccggtcccagtctacctcctgggaatatagaattggtatgagatcttaactttccatacattcaactccgtttttctgttctgttatacactgtgtatttttgtaagctgcctcaaaggtttttaaggtagagtataatcacactggataagcacacccgctaccctcttccttaccatgtgtccccagccttgccactttacacctcagtcctggacccagaaaagtggaggccttcccttcatctccactagacttagccttgctctgttcacagcctcctctccaggacacccagcctttcttgaagatggcagcccatctccagtccttgcctttgctgcctcccctcgacctaatcatagctacatcttcaaacgggagcccccagaaggctgtgagaaagtgcgtgtgtttgaagaagccacgtgagtacaccaagtggacagggtgtgggaggggagggtgggcctacattctcccaccttcttcagtcttggactctctcttgtcatagaggtgttgtcaactttagatgataagtattgccagctttccatgatcaaacgtgttgacattacctactctgagcacttaaatctttgcttatcattatctccatagaaacctgctctctgcccacatgccagccacaagcgcagcaggagctggaaagaaaatatatctgaaacctaagccctttgtttcttctatttttttccatctccggggaaggtgtgagaatttgctagaccataatcagagagagagagcgagagcgagagatggggggtgtggggagaacatattagtatttctcttcagtcagagattagaagtgtttcagccccactggagtagaatggggggcctaaacagcttaacagtttgagcttcggagtcaagtcttcatcctgtggctgcagtggttcaagtgtcatgaactcccagacagaaatttccagtccttgcaagtaaggactatggaaaatttccaaaccagattggatcgttcagaagccattcttctgttgattctttacactttcctcccattagccgaaagaattgagagccaacctttccaaatgcccctgtccccgttagcaggcaccaaagagctcatttcatttcctgctgccagcttaatactcaccagggcagattcacaccaagttggggtttcagtggcagtcaggaagtttagtcatggtgtgtgagtgaagatgtagctgggactggatttgggtcattgagagcaccatttgtatctcaaataagggagcaataacccatggtggcagccgaaggtacatacagaagccacagtaggagttacagagaaaaccattgccactagaggttttgttactgttattattgttgcctgggatcccttcaagactcctaggtcctctgagaagctgtggagggaagaggccagatctcttagcttcagcaggctctagactcttgtaccctccctcaatccacattatggtggagtaattacaacctggaaatgtgggtggaaattaagctgtagctcatcttgattttttcatagactcagtgccagaagaggccttaaagtcagctcatttatcttcctgcccctgcattaaccctttaagagaggtggtgggctcggtgcagtggctcatgcctctaatcccagcactttgggaggctgaggtgcgtgtttatcacctgaggtcaggagtttgagaccagcctggtccaacatggcaagaccctgtctctactaaaaatacaaaattagacaggtgtggtggcaggcacctgttatcccagctactcaggaggctgaggcaggagaatcgcttgaacctgggaggcagaggttgcagtgagccgagatcacgccaccgcactccagcctgggcaacagagtgagtctccatctcaaaaaaaaaaaaaaggaagtggtgatcagctgggtgcagtggctcacgcctgtaatgccagcactttgggagactgaggtgggcagatcacttgaggccaggagttcgagaccagcctgggcaacatggcaaaacccagcctctactaaaaatacaaaaagtagccgggtgtgttagtgcatgcctgtaatcccagctcctcaggaggctgaggcacgagaattgcttgaacccaggaggtggagattgcagtgagctgagatcgcaccactacacttcagtagtcagggcaacagactgagactctgtctccaaaaaaaaaaaaaaaaagagtggtggtgatccatcagtgattttctaagatatgccgggatttaaattctgtagttcactgaggtttctttatttaatcaactttcctattgggaagtttgtgtgtttagccattcttctgccacatttcccccttcttagctgttgtcccctccaagatcatctggattttccaggcaaggagtcaaggtattcagggtcatgctggttgccatcatattctctgagtgttgctgggtctccccttggtcaccttcccaacacgtacatgcacacacctagaacgttctctctcttgcccattccccatccctccgtaaattgggactcttttaaacccttctccatcagggaagcccttgccactgtggagtctctaggacgccaggccttcccaaacacacccaccacgtgggcctttaccctccacctctcctgactctgtgccaggtctctgctcttctcttcacaccttgctcttcctgggctctagaattattggaattccggaattaagatggtaattggctgggtgcagtggctgatacctataattccagcactttgggaagccaagggaggattgcttgagtccaggagttcaagaccagcctgggcaacatagggagacaccctctctacaaaaaatgttaaaatattatccaggtgtggtggtgggtgcctgtaatcctagctactgaggaggcttaggtgggagaattgcttgagcccaggaggtggaggttgcagtgagccaagattgcaccactgcactccagcgtggacaacagagtgagaccctgtccaaaaaaaaagatggtaaccaatttatcagtctgtatactgagtgcatttttctctgagtgtatatattatacttcaataaaaagtaaaaaagaaaaaggtgattggtgagaaccattggtggcagagcttcaccgtcttcccatacctttgtcttctcacctgggattttcaaaccgtcagcttcttagggctgtttcaccctctaggcttggccatacagtaaggaatcagggctattccttactcaggaactctctgacctgaccttttatcatcccatcttcctaaacaatcaaaagaggaaggatgattcctctcacattataaaggtgagacaggctgggtgcggtggctcatgcctgtcatcccagtgctctgggaggccaaggcaggaggatcacttgagcccaggagttcaagaccagcctggtcaacatagtgagactcccatctctactaaaaaaataataataataataaaattagcctagaatggtggcaggcatctgtaatcccagctccttgggaagctgagcaggaggattacttgcacctaggagtttgaggctgcagtgagctatgatcacaccactgtattccagcttgggtgagagagcaagaccctgtctctaaaaacaattaaaaaattaaaattaaaaaggagggtgagacagatatgacaaggaccacatggtgagttagaacccagatcttccgataaggtctagctgcctttctcacagttgttaccatcctttcctctcaaagttttgaaaatcacacctttctggaggccagcctgggtagcatacagagaccccttctctacaaaataaaagtaaagcaattagctgggcatggtggttcatgcctgtagtcccagctactcaggaggatgaggtgggaggattgcttggaccggggaggtcgaggctgcagtaagccatgatcctgccacaccgcactccagcctgggccacagagtgagactctgtctcaaaaacaaaacaacaacaataaagaaccccatacctttcaaatgtgcccaacaattagattctttaggccagtagatttcaactagggaacatttggcaatatcaagagacatttttagttgtcacaactagaggggaggagtcgtggtactactggggtctagtaagtagaggccagggacactgttaagcatcttacaatgcacaggacaatgcctccatccccaccccgcaacaaagaatcatccagcccaaaatgtcagtggtgccaaggctgagaaaccccactttagtcacttggctttgatctctgctttcaggcatgtggtctgtccccaaaaacaccattcactaaggaaatatttcttttcttttctttttgagatggagtcttgctctgttgcccaggctggagtgcaatggcacgatcttggcttactgcaacctccgcctcccaggttcaagtgattctcctgcctcagccttctgaatagctaggattacaggagcatgctgccacacccggctaattttttgtatttttactggagacagggtttcaccatgtcggccaggctggtctcgaactcctgacctcaagtgatccatccaccttggccttccaaagtgctgggattataggcgtgagccaccgtgcccggccactgatgaaatctttcgaatgaaaagatttcttggtctccacttcttgaatcacattgtcaggaagttctccttcctgtctagcttcaatccctcctttttttagctgaagagcatttcccgttgtttagccatatttttttaaaaatagagagatgaggggcttggttttcggtcaagttccaattctgtttgaacagagacccagctctcctgctgccttgatgctgtgacatctcaccctctctcgctgtctgtttctctctgtgtgtacgtatgtgtcttgtgtgtctctcttcatcctccaggtctccaggtcctgacctggccttcctgacttcctgtcctgacaagaacaaagtccatttcaacccgactggctcagccttctgccccgtcaacctgatgaagcccctcttccccggcatgggcttcatcttccgtaactgcccctcaaacccgggatctccccttcccccggccagccccaggccaccacctcggaaggatccggaagcctccaaggcctccccactgccattcgagccatggcagcgcaccccaccatcagaagagcctgtgcttttccagagctccctgatggtctgagggtcccacccctgccccactttaccatagagaccagtgccttggtggcaggtccctccccaggtcccctgagatggggtatggaggggcccttccctctcggccttcgagcactttctttcacttactgtgtcaaagccctgggtcctctttttgatgggcaccggcccctctgaacgtgatgggacctgccttctccactagtagctgggcagctcacaattcacacctgtgtacctgccacatccctcacttggtggaaaacacccagaaggtcttgagtcccccacccctgggtgtcagtccaaatgactgtataggaggcccttatttttgtcacagagcaagctggccatgaacgaaggagagaagacgccacagatttccttccctctcctccaggagaccataagatagatcccccatcctctcagccctattcccatgcctccctctcattggaggagctgaccaaagcagccctaacgggccataacacttgaccaattcagctgctggcagagggaggaaacaagtgttttcccaagtggcattttcatctcgctttcaccctgactaaagattgtcttaagtagcagcccagcccgcccagccccaggtgggtagtggggaggagagctggcattcctccaggtggcaaatggcgactctatactctccgcccgccccagggctggatggattagaaaaatgcctatttttcttgtatcgatgtagagactctattttctcccaaagacactatttttgcagctgtttgaagtttgtatattttccgtactgcagagcttacacaaaattgaagaatgttaatgttcgagttttcttatcttgtgtttagaggttgttttttgcagatcttggtgttaatagaccaaataaataaataaatattcccagcagcttgaagttctgttaaatatttggggaaggaggagtggggtagagattaagggtatatactgatcatttcatctttgtcttcaagagaaggagcctcaattcccacatctgggtgttgttatggctgtacacagagttcctgtcctctggacaccatgcttgcatactttacatggacatataaacaacagacccatgaaaaggctgtccagaatgaagagggtggtttgtcctagaggtggggtgagggagtcactggggaagttacccattcttgtatgagtctgaaaaagctccctaaggagaatggatttcagaaaggaaaagcaggtgaccaagggaagacagtttgacattgtgggtgttctttgcactggttggatctcttgacagttttggggaagctttggttcatctcagggagtacccacaacatagtgtgcagccttgaagggaacaaagaaactatacaaagacactactcttatcctttcgcagcctttataatgctgcacctgtaagagctcttaggcttttggggaaaatgggaataaccatctcaatatttcaatgatgctttggaatttccgaagcattttcacaaaagacacatccccattgtatgggtgaacagttgactaccccaagggcagtcataataagtacaattgtatctgcctcataagacctgacaacaaactcctaaaccaggctatcccaaccaccattcattgggctggtaagaaccagctaccatgttaagtgctttacataaagtgttattgaaatatgacaaccacccagtaagagaaatatggtaagtcccactgtataatcaggaaaggacaaatagatcgaataactttccccaaaagacacagatatgaagtgggagagctaggattggaaacctgatcatttgaatccagtgcccatgtttctaaccacagcgctctcctgcttgttattatattcccattaatttcacgtgaggaaactcgactcaggacaagcgaattgtttgaggtcccagctggtaaagaagtagagctggcaggtctctcttcccagctatttggtgccctggcatcgcgggctgagccagtagagtaagctagtgagcaagagagcaaatgtatggggctttcccatgccactaatatcgaggagacagtgggctggggacaccctatcttctatcccttactcctccctctaaaagacttctggctcccccgcaaagccttattgagtcaggcccggagcgatgggtgtggtgctgcccagtatttccttcctttgcctgaggctgtgccaaaagagcaggctgctagaagaggagcctcgacctagagagcagcccagagtccaccaggtggccggagatttgggccaattaagtagggggttggaggtagtagtaggaagacctgaggtcagtcttgccctggcaattcgtgccagcaagtgaagacccaacacttgcatgaggaagggatccaacgaggagctcattaatgggaaatattcaggagcgcggccgaagggtttgcgccattgttggtgagttgttaagacttggaagaaaactgacttcagtaagcttccatttccacccctcgatgtgaggaaataagatcagggctgacaaacagtgatgactaataataccttaagcttgcacagcatactttacagtttacaaaacactcttatttgatcctcacaacagccaagaggcgacaaggtggctattactaattatccctagtttccagacctggaaaactctggctcagaacttgggtgacacgggtaggttaccccgcctttaagtgaccaagccgagacttactgtgccgctctcccccttggaagcctagtgatgtgcctaggtaatgagcaggtaaagtcgctgacgctgggcagcagctagacggcgctgaagctccagtaaggaatttggcattaggacccagcagaagcctggccgcccgccgcggaaaagactattggatttgctctgccgaccacacctcctcccgccccgcctacctgtccgtcttcgcacagcgcagccaattggtggcctccacatccttatacgtcattattctacgcccaggtggctctaggacaccctgtggtgctctgggtcgcagttgtcctcagagttgcctgattggaaaaatctccagggcgagggatcagtctcgaggctgccggttcccctggccctcagggatggagccaaggtcccagggcgggttttctttcctaggaagtggttgctgggttctgaggagtttcccccttggcagccatgagccggcagttctggtagtgactgctgggccctgctggacagcggtcgcatgcagctcctatgaggcccctgccgccggtcggcgatgtccggctggagctgtcgcctccgccgccgctgctgccggtgccggttgtgagcgggtctccagtcggctcctctgggcgtctcatggcctctagcagctccctggtgcccgaccggctgcgcctgccgctctgcttcctgggtgtctttgtctgctatttttactatgggatcctgcaggaaaagatgtgagcgaccccgggggcgggccgacattctctccccagcctgtgacagggatcccgggccttctgcctctggacccgggctttcctcttgtcctcctgcccggctgtcgccctcttagcaccctactacttttgcagctatggctgagcctacccagaattccagaactccaggattattttctggattcttcggacttggttattttcttttcttagctgtttttccccgcttggttctaagggcctgcgttttacaggctgagacttctattcctcaaacaggacccgagtcggcccccttttggtactcccagatgcttgcaaacaacctattcgtcctcggccttggtgccatagccgaaataccgtctcctcctgcctggggtacctgatttcactatctcgttctgcatgtttcctctccgtctttttcgggtattcttttcttaggctttggaatcagtaggctgggatgtctagtttctagatccagtaaaatcagccccttttgcaaatgagcctagtggtccttaacaaactctgcctacatccagagaggcaagataattttaaagttttcagtggctcgggatatattagatgacagtgagtgaaatacactaatttctccctcttttctcatgcatttcatttctagaacaagaggaaagtatggggaaggagccaagcaggagacgttcacctttgccttaactttggtcttcattcaatgtgtgatcaatgctgtgtttgccaagatctgtgagtacccagatagtaatttgttgggtaccccaccaccccaagttccctcagtatgctgggcattaagcattgattcaaccttaaaggctaactcatgatctccaccccattttgtacttacacagcctctctgtgaagtctgtaaaactaatgactttgaagtggagtaaaatattatttccccaatttttatcagcttctgagttagaaatgttcagagaatgggtcttctatattccaaatccccattgaaaatacttaaaacatttttttctttccctttgagtttcttttgtgtgtcagcttcaagcatgctttgagcattctctctttgttccctggggactagcagcagagctgactggtcccttgaactgaatgaggcccccacctccaccctgcatgtggtcttttgttgggcttaggtagaattggaaagatgaataattttcagagatttcccagtgtaacaggacagaaatagcttgtgtcttgtttgacagacaagttcctttcatgtggcttcagctttgcttagtggtccatcctagccccaccaggtttctcttgtttttttttttttttcttttcttttctttttttttttttttttttgtcttctcccagtgatccagttttttgacactgccagggtggatcgtacccggagctggctctatgctgcctgttctatctcctatctgggtgccatggtctccagcaattcagcactacagtttgtcaactacccaactcaggtgaaacctcagggtgggatgatggttggctcagatatcatttgaaaaggactaagagttcttccctcaggtctgtgagttaaaaaaaaaaaaaaaaaaaagataacggtcctgtaagacattgggagtgtatagaaccatagaacttacgtttagtggtggtgggttgggccatgatagggctgctttctgaggctgaggtctctggtgcaggccctgtgcttactcatcttaatcagtgcggtacctagcatagtacctgacacatcacagatgctcagaaattatttgctggatttaatttcaggtccttggtaaatcctgcaagccaatcccaggtaagcaaagaagatggtcttcctcttctgtcgtcactcttcctatagtaagctctctctctgctacaactgtgtccctctcggcttcatcatcccatcatggctgtctccagggactttcccccagctctccctgctgcccatcctgtcatctgtgtcacttcttgtgatgttcataggctggtaatccttaataggagctaaaggctgacctagcctgcttcacttggtcagccatttctgtgttgcatgtgtttatattgtcattagacaacttaattcccattttgatcatcagtttctttatctcaacttcttttccttctccactgttccctacccttgtcctgtcccttcctggacttttcacctttgttctctacctcctccctgtcttatacttaaccctgttgctcaatccttatctaggtgccagcctggcaccctccttttgtcctctctaagccttccttctcagtcattcttttctccctgagtcttttcttggttcctgggagggagggcattggggtcatcaataccttatggatgcctgaattttccactctgttttttccctgtagtcatgctccttggggtgaccctcttgaagaagaagtacccgttggccaagtacctgtgtgtgctgttaattgtggctggagtggcccttttcatgtacaaacccaagaaagttgttgggatagaagaacacacagtcggctatggagagctactcttggtatgagatcctgttggggaaggcacccttttccagcaaacttaaccaaaggatagtctcacctaggcaggtagaaggccagttctgtgtcaagggaggttgtggtgctccttgtccccatatctgctctttgctgcaggcccctgactctattaatgccatagtgggaaacctgaaatatttaactacaactcagctctcattctggagaagagataactctgagggttgtggctgaatcctggtgtgaggtcacagagacctgagagcaaagagggaaggaataatgtctctcactgtggctttccaagaaacctggaagccagagtttaaaataatatgatagtagctggtatgtatgcattaggcactgttccgagtgttttacatgttaattgactaatttttacaacaataatctcatatgtagtattatctccattttacagatgaagaaactaggcacagagaagttaactcgcttgcccatggtcacttggctatttgaagtggtagagtcaggattccaatccaggcagcctaagcacaggatccggtctctggagcactatactccaagctaggaagctaacctgctgggactacctttcccctcccagtatgttgggaagtgagcttcctgctctactctgattacaaaatcactacgtagctcagttagcctgtcagtccagtgcgtgggccggggggcgggggtggggggtagtgagcatggtctctccccaccttccacctgtgaccaaatggcaacgttttgttctgaggactttaaaggcagtggctttccaaggagcctgagagtgagaatcctgtgtcctgggtttggaaagggccctgttggccacttcactgcaggctgcaccctttctttcccagctattatcgctgaccctggatggactgactggtgtttcccaggaccacatgcgggctcattaccaaacaggctccaaccacatgatgctgaacatcaacctttggtcgacattgctgctgggaatgggtgagagccagttctgctgttcttcccatgtatcaccagagggcaggctgccctcatccttttgatccctctagctgttagttgcccagaccaagggcctgaattagttccaagatgcccttttgttcaagcccttgagaaaccttcctggaaaaacctgcaccagcaggatttgtttgctacttgttactggcacaatgaaggagagtcgtgtgtcagttgtcatgggaagacactcagtagtaaaacacagggaggtacctgggaactttccctttcatgagggaaatgagacacacgtagtgctcacaggaaacagagttagctgtacactgaagacagttcaaatgtgaatgatttgctttgaaatcagtgcttcctaacttttcaaatttgggcacatgtagaaagtattttttatacagcacactggggttaatggtggaggctgctgatggctgaaggtgactaatgcgaggggcttccttgagctaaggatgtgtgggtcagcatctctacagcatctgaggatttctgcttgtaatcactttggtagaagtaactcattaactttcaagcctttctcacaaaattctctttagtttctctaatcagagaaaaatatgagaagaatcaatgatgagacgatgcaaacccacaccatacactttcccgcgtcccacctcccttgcagttctttaacaggccatgtgcaggagtgtctgtgtgtgtgtgtgtgtgtgtgtgtgcgcacattttgtgtgcacaaaatgcgccgtacatttgttgacatgtcttctcaggaatcctgttcactggggagctctgggagttcttgagctttgctgaaaggtaccctgccatcatctataacatcctgctctttgggctgaccagtgccctgggtcaggtgagtgcttgaaaggggatggcttggcttccctactctggcagctggttccctaagaaagactggcctggctggaagaagagggtggcaagattagccctgaggtctgtttatagactttagaccaatggcagatacccagaagcccaccggacctcacctttatctttctctagagcttcatctttatgacggttgtgtattttggtcccctgacctgctccatcatcactacaactcgaaagttcttcacaattttggcctctgtgatcctcttcgccaatcccatcagccccatgcagtgggtgggcactgtgcttgtgttcctgggtaagtggccacacagagacacagtgacagctgaattttttctcctaaaatttacttgtatatttatgaaatttgtttaaatattttagagaaaacttttctcttttttttgagacggagtttcgctcttgttgcccaggctggagtgagtgcagtggtacgatctcagctcaccaatcgggtgagcctcctcctcctcctgggttcaagcaattctcctgcctcagcatccggagtagctaggattacaggcatgcaccaccatgcccggatgattttgtatttttagtagagatggggtttctccgtgttggtcaggctggtctcgaactcccaacctcaggtgattccccccgcctcagcctcccagagtgctgggattacaggcatgagccaccgcgctcagcccagagaaaacttttttaaaagagaaaagaggctgagtgtggtggctcacgcctgtaattctaacactttgggaggctgaggcaggagtatcgcttgagtttaggagttcgagaccagcctgggcaacatgatgagacccttgtctctgcaaaaaaatacaaaaattagctgagcatggtggcagacgcctgtggtcccagctactcggggctgaggtgggaggatcgtttgagcccaggaggtggaggctgaggtgagctgtgatcacaccactgcactcccacctgggtgacagagtgaaaatctgtatccaaagaaaataaaaggagaaaaggaagctttatttctaatccagccttcctagggtctccctctgttgctcaggctggagtgtagtggcatgatcatagtccactgcaaccttgatctcctggactcaagtgatccacccaccacagcctcccgagtagttgcgattataggcatgtaccacaatacctgaccaatttttttttttttttttgtagcgatggggtcttgctgtgttgcctaggctggccttaaactcctgggctcaaatgatcctcctgcctcagtctcccaaaatgctgggattgcaggtgtgagtcaccacattcagccatagcctagaagttttgactcttaaatttcttttagtcttgctgtattatatatgtatctatatctatctgtatctctatatagatatatttatatagatacagatatctgtaataactagtatcctggtgccattctcttgtctctgaggaagttacataaaaccagtgttctgacatgtattttatttaaagcccccattttggagatacaaggccgactaccccaccccaccacaatcattggtaagtttcatttccccccataaggctaagcccattttcttccttttcataggtcttggtcttgatgccaagtttgggaaaggagctaagaagacatcccactaggaagagagagactacctccacatcaagaatatttaagttattatctcaaacagtgacatctcttgggaaaatggacttaataggaatatgggactgagttccagtcttttttaataaaataaaatcaagcaaaatcacatattctaaaaaatgcacttggattttaacaagacagagtggtggtttttgttcttcatgccctggagcagtctatggtaaataaaagagggagggaagaggcagagctggatgttcattacccaggctgctcctctcacgggtgtggttagcatggttgagtgggcgattcctccaagaacctgaggattatagggaggaactctgtgagatcgcagaattgtgctaatggcttctgttccgatgggtgaggcttgtcccgttagagctggtcccattagaggacgggtggctgtccattagagccagagaatgtaaaagtcacttcctctcctaaagctcctgtgggcaaatatttcattaaaaaaacaaagttgtgttctgtctttttcttaggcctggtgcagtggctcacacctgtaatcccagcactctgggaggctaaggcagcaggatcacttgagttcaggagtttgagaccagcctagacaacatagttagaccttgtctccactaaaaatcaaaaacagaaaagaaatattcattgaggctggggtaaaacgaacccagagtttcagaatctactgttttgccatttccccactgcctccccttcagccacagctctatcaagaccagagtggagacccagtgcatacatcatgatcagctttggaaggtctgtgatgtacttttcctgatattccccctccatctgtctgtctgttctcagtctacctggtcccctccagggaggctgggttaatccctcctattcccctgcctcctccagctgctgaagcattgcagtcctctgccatcctttgctgtgccaaggtgtcaccatgccagcttctgcctgttgaaagggatgctggcggaagtcatggtggctgagtcctggcacagccactgtcgagttgtctgagtggcagcagagggaaaaggcggagtatggagcagagccacctgcccactgctgcctttagagttgg

SEQ ID NO: 2951 - DNA, 2130 bp, Homo sapiens
ctgggagcccacaacacagctgtttgatcagcctagccagcgtcccatgctcggtggccccagaaaagtcagtgtgtaggcctcagccacttcaggtccggcgtacattctccctggacaccatcctcagctcctaccttctgggccagtggccacgagatgctgatggggccttcacctgctgcaccaatgacaaggccacccagacgcccctgtcctggcaagagctagaaggtgagcgtgccagttcctgtgcacacaagcgctcagcatcctggggcagcacagaccaccgaaaagagatttccaagttgaagcaacaactgcagaggacgaagctgagccgcagtgggaaagagaaggagcgaggttcaccactcctaggggaccacgcagtgcggggagcactgagggcgtcccctcccagcttcccctcagggtcccctgtcttgcgactcagcccctgcctgcacaggagcctggaagggctcaaccaagagctggaggaggtatttgtgaaggagcagggagaagaggagctgctgaggatccttgatatccctgatgggcaccgggccccagctcctccccagagtggcagctgtgatcatcccctcctcctcctggagcctggcaaccttgccagctctccttccatgtccttggcatctccccagccttgtggcctggccagtcatgaggaacatcggggtgccgccgaggagctggcatccacccccaacgacaaagcctcctctccaggacacccagcctttcttgaagatggcagcccatctccagtccttgcctttgctgcctcccctcgacctaatcatagctacatcttcaaacgggagcccccagaaggctgtgagaaagtgcgtgtgtttgaagaagccacgtctccaggtcctgacctggccttcctgacttcctgtcctgacaagaacaaagtccatttcaacccgactggctcagccttctgccccgtcaacctgatgaagcccctcttccccggcatgggcttcatcttccgtaactgcccctcaaacccgggatctccccttcccccggccagccccaggccaccacctcggaaggatccggaagcctccaaggcctccccactgccattcgagccatggcagcgcaccccaccatcagaagagcctgtgcttttccagagctccctgatggtctgagggtcccacccctgccccactttaccatagagaccagtgccttggtggcaggtccctccccaggtcccctgagatggggtatggaggggcccttccctctcggccttcgagcactttctttcacttactgtgtcaaagccctgggtcctctttttgatgggcaccggcccctctgaacgtgatgggacctgccttctccactagtagctgggcagctcacaattcacacctgtgtacctgccacatccctcacttggtggaaaacacccagaaggtcttgagtcccccacccctgggtgtcagtccaaatgactgtataggaggcccttatttttgtcacagagcaagctggccatgaacgaaggagagaagacgccacagatttccttccctctcctccaggagaccataagatagatcccccatcctctcagccctattcccatgcctccctctcattggaggagctgaccaaagcagccctaacgggccataacacttgaccaattcagctgctggcagagggaggaaacaagtgttttcccaagtggcattttcatctcgctttcaccctgactaaagattgtcttaagtagcagcccagcccgcccagccccaggtgggtagtggggaggagagctggcattcctccaggtggcaaatggcgactctatactctccgcccgccccagggctggatggattagaaaaatgcctatttttcttgtatcgatgtagagactctattttctcccaaagacactatttttgcagctgtttgaagtttgtatattttccgtactgcagagcttacacaaaattgaagaatgttaatgttcgagttttcttatcttgtgtttagaggttgttttttgcagatcttggtgttaatagaccaaataaataaataaatattcccagcagcttg

SEQ ID NO: 2952 - protein, 387 aa, Homo sapiens
GSPQHSCLISLASVPCSVAPEKSVCRPQPLQVRRTFSLDTILSSYLLGQWPRDADGAFTCCTNDKATQTPLSWQELEGERASSCAHKRSASWGSTDHRKEISKLKQQLQRTKLSRSGKEKERGSPLLGDHAVRGALRDPSFPSGSPVLRLSPCLHRSLEQQELEEVFVKEQGEEELLRILDIPDGHRAPAPPQSGSCDHPLLLLEPGNLASSPSMSLDQPCGLASHEEHRGAAEELASTPNDKASSPGHPAFLEDGSPSPVLAFADRPNHSYIFKREPPEGCEKVRVFEEATSPGPDLAFLTSCPDKNKVHFNPTGSAFCPVNLMKPLFPGMGFIFRNCPSNPGSPLPPDRPPPRKDPEASKDLPFEPWQRTPPSEEPVLFQSSLMV

SEQ ID NO: 2953 - DNA, 2367 bp, Homo sapiens
cagataagcagcggcctcgggggttggggggctgtgtgagtctcgcagtggggctgaggcaggcagccgggagagccatggcgggggccgcagcgggcggcagaggcggaggtgcctgggggccggggcgcggaggggccggggggctccggcggggctgctctcccccagcccccgccggctccccccgggctgggctgcagccgctcagggccacgatccccttccagctgcagcagccgcaccagcgccgggacgggggtggccgtgcagccagcgtcccatgctcggtggccccagaaaagtcagtgtgtaggcctcagccacttcaggtccggcgtacattctccctggacaccatcctcagctcctaccttctgggccagtggccacgagatgctgatggggccttcacctgctgcaccaatgacaaggccacccagacgcccctgtcctggcaagagctagaaggtgagcgtgccagttcctgtgcacacaagcgctcagcatcctggggcagcacagaccaccgaaaagagatttccaagttgaagcaacaactgcagaggacgaagctgagccgcagtgggaaagagaaggagcgaggttcaccactcctaggggaccacgcagtgcggggagcactgagggcgtcccctcccagcttcccctcagggtcccctgtcttgcgactcagcccctgcctgcacaggagcctggaagggctcaaccaagagctggaggaggtatttgtgaaggagcagggagaagaggagctgctgaggatccttgatatccctgatgggcaccgggccccagctcctccccagagtggcagctgtgatcatcccctcctcctcctggagcctggcaaccttgccagctctccttccatgtccttggcatctccccagccttgtggcctggccagtcatgaggaacatcggggtgccgccgaggagctggcatccacccccaacgacaaagcctcctctccaggacacccagcctttcttgaagatggcagcccatctccagtccttgcctttgctgcctcccctcgacctaatcatagctacatcttcaaacgggagcccccagaaggctgtgagaaagtgcgtgtgtttgaagaagccacgtctccaggtcctgacctggccttcctgacttcctgtcctgacaagaacaaagtccatttcaacccgactggctcagccttctgccccgtcaacctgatgaagcccctcttccccggcatgggcttcatcttccgtaactgcccctcaaacccgggatctccccttcccccggccagccccaggccaccacctcggaaggatccggaagcctccaaggcctccccactgccattcgagccatggcagcgcaccccaccatcagaagagcctgtgcttttccagagctccctgatggtctgagggtcccacccctgccccactttaccatagagaccagtgccttggtggcaggtccctccccaggtcccctgagatggggtatggaggggcccttccctctcggccttcgagcactttctttcacttactgtgtcaaagccctgggtcctctttttgatgggcaccggcccctctgaacgtgatgggacctgccttctccactagtagctgggcagctcacaattcacacctgtgtacctgccacatccctcacttggtggaaaacacccagaaggtcttgagtcccccacccctgggtgtcagtccaaatgactgtataggaggcccttatttttgtcacagagcaagctggccatgaacgaaggagagaagacgccacagatttccttccctctcctccaggagaccataagatagatcccccatcctctcagccctattcccatgcctccctctcattggaggagctgaccaaagcagccctaacgggccataacacttgaccaattcagctgctggcagagggaggaaacaagtgttttcccaagtggcattttcatctcgctttcaccctgactaaagattgtcttaagtagcagcccagcccgcccagccccaggtgggtagtggggaggagagctggcattcctccaggtggcaaatggcgactctatactctccgcccgccccagggctggatggattagaaaaatgcctatttttcttgtatcgatgtagagactctattttctcccaaagacactatttttgcagctgtttgaagtttgtatattttccgtactgcagagcttacacaaaattgaagaatgttaatgttcgagttttcttatcttgtgtttagaggttgttttttgcagatcttggtgttaatagaccaaataaataaataaatattcccagcagcttg

SEQ ID NO: 2954 - protein, 441 aa, Homo sapiens
MAGAAAGGRGGGAWGPGRGGAGGLRRGCSPPAPAGSPRAGLQPLRATIPFQLQQPHQRRDGGGRAASVPCSVAPEKSVCRPQPLQVRRTFSLDTILSSYLLGQWPRDADGAFTCCTNDKATQTPLSWQELEGERASSCAHKRSASWGSTDHRKEISKLKQQLQRTKLSRSGKEKERGSPLLGDHAVRGALRDPSFPSGSPVLRLSPCLHRSLEQQELEEVFVKEQGEEELLRILDIPDGHRAPAPPQSGSCDHPLLLLEPGNLASSPSMSLDQPCGLASHEEHRGAAEELASTPNDKASSPGHPAFLEDGSPSPVLAFADRPNHSYIFKREPPEGCEKVRVFEEATSPGPDLAFLTSCPDKNKVHFNPTGSAFCPVNLMKPLFPGMGFIFRNCPSNPGSPLPPDRPPPRKDPEASKDLPFEPWQRTPPSEEPVLFQSSLMV

SEQ ID NO: 2955 - DNA, 2271 bp, Homo sapiens
cagataagcagcggcctcgggggttggggggctgtgtgagtctcgcagtggggctgaggcaggcagccgggagagccatggcgggggccgcagcgggcggcagaggcggaggtgcctgggggccggggcgcggaggggccggggggctccggcggggctgctctcccccagcccccgccggctccccccgggctgggctgcagccgctcagggccacgatccccttccagctgcagcagccgcaccagcgccgggacgggggtggccgtgcagccagcgtcccatgctcggtggccccagaaaagtcagtgtgtaggcctcagccacttcaggtccggcgtacattctccctggacaccatcctcagctcctaccttctgggccagtggccacgagatgctgatggggccttcacctgctgcaccaatgacaaggccacccagatttccaagttgaagcaacaactgcagaggacgaagctgagccgcagtgggaaagagaaggagcgaggttcaccactcctaggggaccacgcagtgcggggagcactgagggcgtcccctcccagcttcccctcagggtcccctgtcttgcgactcagcccctgcctgcacaggagcctggaagggctcaaccaagagctggaggaggtatttgtgaaggagcagggagaagaggagctgctgaggatccttgatatccctgatgggcaccgggccccagctcctccccagagtggcagctgtgatcatcccctcctcctcctggagcctggcaaccttgccagctctccttccatgtccttggcatctccccagccttgtggcctggccagtcatgaggaacatcggggtgccgccgaggagctggcatccacccccaacgacaaagcctcctctccaggacacccagcctttcttgaagatggcagcccatctccagtccttgcctttgctgcctcccctcgacctaatcatagctacatcttcaaacgggagcccccagaaggctgtgagaaagtgcgtgtgtttgaagaagccacgtctccaggtcctgacctggccttcctgacttcctgtcctgacaagaacaaagtccatttcaacccgactggctcagccttctgccccgtcaacctgatgaagcccctcttccccggcatgggcttcatcttccgtaactgcccctcaaacccgggatctccccttcccccggccagccccaggccaccacctcggaaggatccggaagcctccaaggcctccccactgccattcgagccatggcagcgcaccccaccatcagaagagcctgtgcttttccagagctccctgatggtctgagggtcccacccctgccccactttaccatagagaccagtgccttggtggcaggtccctccccaggtcccctgagatggggtatggaggggcccttccctctcggccttcgagcactttctttcacttactgtgtcaaagccctgggtcctctttttgatgggcaccggcccctctgaacgtgatgggacctgccttctccactagtagctgggcagctcacaattcacacctgtgtacctgccacatccctcacttggtggaaaacacccagaaggtcttgagtcccccacccctgggtgtcagtccaaatgactgtataggaggcccttatttttgtcacagagcaagctggccatgaacgaaggagagaagacgccacagatttccttccctctcctccaggagaccataagatagatcccccatcctctcagccctattcccatgcctccctctcattggaggagctgaccaaagcagccctaacgggccataacacttgaccaattcagctgctggcagagggaggaaacaagtgttttcccaagtggcattttcatctcgctttcaccctgactaaagattgtcttaagtagcagcccagcccgcccagccccaggtgggtagtggggaggagagctggcattcctccaggtggcaaatggcgactctatactctccgcccgccccagggctggatggattagaaaaatgcctatttttcttgtatcgatgtagagactctattttctcccaaagacactatttttgcagctgtttgaagtttgtatattttccgtactgcagagcttacacaaaattgaagaatgttaatgttcgagttttcttatcttgtgtttagaggttgttttttgcagatcttggtgttaatagaccaaataaataaataaatattcccagcagcttg

SEQ ID NO: 2956 - protein, 409 aa, Homo sapiens
MAGAAAGGRGGGAWGPGRGGAGGLRRGCSPPAPAGSPRAGLQPLRATIPFQLQQPHQRRDGGGRAASVPCSVAPEKSVCRPQPLQVRRTFSLDTILSSYLLGQWPRDADGAFTCCTNDKATQISKLKQQLQRTKLSRSGKEKERGSPLLGDHAVRGALRDPSFPSGSPVLRLSPCLHRSLEQQELEEVFVKEQGEEELLRILDIPDGHRAPAPPQSGSCDHPLLLLEPGNLASSPSMSLDQPCGLASHEEHRGAAEELASTPNDKASSPGHPAFLEDGSPSPVLAFADRPNHSYIFKREPPEGCEKVRVFEEATSPGPDLAFLTSCPDKNKVHFNPTGSAFCPVNLMKPLFPGMGFIFRNCPSNPGSPLPPDRPPPRKDPEASKDLPFEPWQRTPPSEEPVLFQSSLMV

SEQ ID NO: 2957 - DNA, 30507 bp, Mus musculus
cagctgccatttgtcagtgattgggatggagtagggcacagagattaagaggaagagtgtaggggaatctctgggagagtgtgtggggagattttggggcaggagtttgggggtggatgaaggggtggtttgagtgggttgggtgagttggagagcagggtgggttgggggtgcatggcgggtgggggatgggaggtggagaggagggtggcagaggatatctgtacctgtggcatcactgctcactcatcatccaagaagggagcatcctgggtgctttcctctgtctgtcctttcctctattccctacccccacaccattctttcttctaaccacatctggaaggatggctgaattatactgctgctctcagggtggccctgaaagtcctttccacttccttggaagttttaagggttctggccaggtggtcaaagtcatggagcatgactaaggagctgaagacaaagagatgtaggcagatgttgagactagacacttagggggggcaggtgaatccagagactgaaaacagtaggcagttctctagtgacaggtcacagagagaactgcagattgtccctactgaagtaggcagtgacttgggagttagtgttgcattctccaatatctgtgaaccatggagtatcttctagacagccgaaatgtcttagaccatgttgtctttaaccaaaaaaaacttcgcagaaaaaaaaaaagacagaaaaaggaaggcaatagactcaagacaaatcctagagcagaaaaatcacaagagtgaaaacctggagaaatccaaagtcttgagtttaataaatagtgttgtactgatgctaatgtcttgcttttgtctgttcattgtgtgtgtgtgtgtgtgtgtgtgtgtgtgtgtgtgtgtgtgtgtgtgtatccatccactcatgtgcacacactcaatagctcaggccctctctgtgatgtcagagcaaactctcaaggtttgatcctcttcttctaccttgtggagatcccactgaggctgccaaccttggcagcagccatcttttctcagtgacatatttctccagccccactgttgcttgctcctttgaggcagtgtctcattgtgcagccctggctggcccgaaactcacaatgtagaactttctggcatcatgcttgttggtaattctcctgcctcttttacccacgtgattggggtttcaggcttgcaccaccatgcccatttcttaatttctttattttaataaaggtcatggtcatacaagaggttaccattgggcagcttgggaaagggcataggggaattgttttattttgcaattctgcaatttttctgtaaatctaaaaatagctcaaaataaaaccactgagcagggtagggactgggtggaatggagcagtgggggaagtttcagtcaggatgtcttaaaaacaagacaagctaggcagtggtggcacacacctttaatcctagcacttgggaggcagaggcaggtgaatttctgagtttgaggccagcctggtctacagagtgagttccaggacagccagggctatacagagaaaccttgccttgaaaaaccaaaaaccaaccaaccaaccaaccaaacaaacaaacaaacaaacaaaaacaaaaacaaaccaaaaaaagacaaaacaaaaaactaaataaaacaaaacaaacaaataaataaaaccacagaacgaaaaaattcaaaaagccaagaagctaatggtggtagggtttgatggcctcgtggtgtgtgatcagaatctgccaggagtggcttttgtagtgtggcgggcagatttgggaaagacccagtgtagtgtcccagccttgctgggtgacaccactgtgcccaggctgggtgccgttggaagaaccgcctggtgtgctctgaggaaccaatggtacccacctctcagggttcaaaccctcagagatggaatttacaaatgtttattactctgcccagcttcctgcctttctctctctctctctctctctgtgtctttgagacaggttctcagtataacaccctggttgtcctgaaactcaatatgtaggccagactggccttcaaagttacagagatccccctgcttctgcctccttagtgctggaatcaaaggtgtgtgccaacatgctgccacaggccgcctgccttttttaaaaacgtgtctttgtacttgcaaggacaagcacttactgacaagccatctcaccatcccctgcttctgtccttttaacctactcgaatgaggcttgggcacaagaggaaagacacagcgccacaattccattaagaggaagatgtgctctgtgctcaattagctggcattgtttatggtgctagggaaacagaagttgtgtgcacacttgtatagtgtgtacactttagtcaattccacattcaagaagctggggcaggaggatctggtggttaagcgtagcccgagctactgtattggctggttttgtgtgtcaacttgacacaagctggagttatcacagagaaaagagcctcccttgaggaaatgcctccatgagatctagatgtaaggcattttctcaattagtgatcaagggtgggagggcccattgtgggtggtgccatccctgggctggttctgggttctataagaaagcaagttgaggctgggtgtggtggcacacgcctttagtctcagcacttgggaggcaaaggcaggcgaatttctgagttcgaggccagcctggtgtacagagtgagttccaggacagccagggctacacagagaaaccctgtctccaaaaaaaccaaaacaaacaaaaccaaaacaaaacaaaaaacaactggctgctctccagagaacttccgagtcttcccaggatgaggcatccagctttgtggaccaaggagctacaacgttaccagcctctctagcatacagatggacacttttggaattcccagcccttattctataagcaagctaacaaattccctttgtacacaatctattagatcagtccctttagctcactctcactaacacagctgtcattcatgaatatatgctttcctctccaccaatcagatgtcaagatctgtaaactttactttccaaggaaactcttcaagccgtcccggaaactacctacggcctttgctgtttatcttgtgtctcccccaagaactatcagttctttcttagtttcctccccaaccttctctttccacttgcaatcttgtcaagagcaaattcccactagttatggtggttcacacctgtcattcagcactggggaggtgaaggcaaaagtgttgttgtgagtttaaggtcagcctgagggactgtatgagattctattgcaaatatgcaagcaagcaagcaagcaagcaagcaagcaagcaagcaagcaagcaagcaagcaagcaagcaagcaagcaaacaaacaggaacatcagtaactgacattcccagcagataaagatgtgtagcccaacaatcaagacccttttgaccatccagtccacctctaggagtatcctaagggcctaggacttcctcttgacattcaattccaacctgaatgctcttccatttaaaagaagagcattggggttggagagatggtgcagcagataaaagcattgattgcttttctggaggactcagtttggttcccagaacaaatacggtggctcacaaccatctgaaactccagttccagggaatggtatgccctcttctgacctctgagggaaataggcatttgagtggcacatgcgtgcatacatacacacatgcaagcaaaatacttatttacataaaaccaataaatctcaaaaagcaaaacgttaaaatacaacacaagctgggcatgcagacgcacacttttagtcccaactctcaggcatctaaatagcaagttccaggctatctagagctacatagagagttcctatctcaaaagaaaggaaaataacaataacaaaacaagtttgagaatagctgcataggctcatacatttgaatgcttagtcaccagagagttgaacagattagaaggattaggaggtgtggcctcattggagaagatgtggcctcattggaggaaatgtggcactaggggtgggctttaaggtttcaaaagtctacatcaggccgtgatgcctgtgctctctgcctgctgcctgtggatcgtggtataaagttcccagctattgctccagcaccacgtatacagccatgctcccaccatgctgataatggctaactctaaagcataagcagccaccaactaaatgctttcttttattggccatggtgccttttcacagcaaaagaacagtgactaagacgatatatataacaagagttccactaggtacactaggtatcccaagctagcctcaaaacaaactgtcaatttccccaatgctggaattgcatgctatgatggtttgtatatgcttggcccaggaagtggcactattaggaggtgtggagtaggtgtgtcactgtgggcctgggctttatgaccctagtcctagctgccaggaatcgagtcttccactagcagccttcaggtgataataaagaactctcagctctgcccgcaccatgcctgcttggatgctaccatgttcttgccttgatgataatggactgaacccctgaatatataagccagccccgattaaatgttgtcctgataagagttgccttggccatggtgtctgttcatagcagtaaaactctaactaagacacctgccatcatgccagacaccatggttcttcttcctctcctttctgtgactctgggtgcaatgttcttttccccacaagtatcatctctcatctattcacaacacaagccttctatgctcagttctccaaggaattcttcttctctcccaggactcagtgtgacctttcagctggtctcggtagccctcctaggagtccctgtaacatcccacagacctctctgatatttcagggagcactctgtagtatggatgcttgtctgtggttccttcagaccataactcctggctgacaaagcttcggagctgtgtctgtgattatagcctcagccctgagcaggacctgactcatctattagccgagccaggtcctttggctgcttaaagacctcagtcagcttctgtttacccttaaggtaaagaagtaaatccctctttttagacagggtgtccctggagtagaccaggctatcctggaacacactatgtagcccatgctggtcttgaatttgtcatcttcttccctctttctccctagtcttggcattatagtcatggcatgttctactatgcccaaattataaaaacaattctttaaaatttgtaatttatatttttcttatttatttttaattgtgtgtgtgtgtatgtgtgcacacatgcacgttcacatgtgaacatgaatgcatgcatactcttggagaccagatatgtcagatcccctgaaactagggctacacgtggttgtgagcttcccagtgtggatgctgggaactaaactgggtcctgcaaaagcagcagcactcgttcttaaccactgatctctctctccagccgctcatgaagaaaatttataattgatgtcccagaatgtcccttcaagatttttcctggctctccctctacgcttcaccccccttccacttctttacactgggcccttttgctggtctcgattgccttgaccttgttgttcattgccctacagtgcatctgttgtgtgcttcttcaccacccttgactctcccagactgtggcgtgactattgacttcactgcaaattcttttaggttttctctaccaaattccatgaaaataagaaccagctagtttttctcatgcttctggatatattgccctatgcataacagacactcaatacattatataaaccataaacaatgtaattctaaccctacagactctctctctctctctctctctctctctccttccctccctcttgtcttcaggccatcccatctatggcaattttttttttattttccttcctattttgtttcattttatagaaacagggtcttacatagccagggtgttggtatcaaatttcctatgtacttctgagcttcctgtctctagctctccagtgctggcacttcaggtaagagccaccatccccagcttatgtggtgctgggaatggaaccctgggtcttctgcatgccaggcaagcacattactaactgagctcccacccctccattgtgctgaataactaggaagtggctatcaggatagggcatgaagcaggacagccctcatcctagcctctagctcaggctacatagatatggtgggagaagaaaagatgggtgtggggcaactctaggaggagtgagtgcttgcaaggactgccctctggggccttggggcattggaggcacttctagaagacatttgccacctgctcagtgtccaactctctctatgccttcatttctacattcttccctgccacacacccccaggggaggtccctcactggttaacacttccttcctgtatccctcccatggcagtaccataggcaaaggcaggcggatggaggaagacaatggagaccatgattgagaatccactccgaggttgttgctttttctcagcatctttatttgtgtctaagaggaagaaaacattggtccttaggtatcccagtacacttgggcgtggctgaggagggacagagagggtgatggtggtgagggtgggccatcagcttagcacacaagtgcctttctccttgaagggattcttgtcttctgggatgcctttgagaagagggtctgtccctgcttgggcctctacataatccttgatttcctttcctgtcttggaaatctgtaagatgacaaaacatggtcatagctcttgttcgttttatagaatccatgacttggcaatcggaggaagatgggcagggtagagatgaggtcaaagaggaaggagggaggagaaagaggcaggcaggaggctgagttccttggaccaaccctcaaacacttgatgggatcatgccagcccagcctggtgggatcatgccagcccagcctggtgggatcatgccagcccagcctggtgggatcatgccagcccagcctggagacacagctctcagagtctcccctgtgcccaccccaccccagcccagtaatacatcctgtgcctagtgtctcctcaatttcgaacagaaagagatacagaagcccaaaagagggactgcaggctcaccagatcacgtgggttcttcacttccttcttcagctgctccacctccatcctcaacagctccttctcactgaggtcctgggccatcctgccctagagggagacctgggtcctgacgggatcccacaaccatgagcgcttcccttccaattctacactcttcctggccttagggcccaaccaaagaccctcattggttaatatttccacaatgtatccctcccccgcaatgtaccctccactccttgctctgtcatgagcaaaggcttagaaggactagaagtgacctgttagctatgggtggcgcaatctctgtccttgaataagagcctctttacggaggaaatagaaaaggaaggggaaatagagttgaagctggaaaacttgggacaaagagtgactgctctgtgtgatgactcgggggcatgtttttgtctctaggtcctgtccggggacaatattaagactaggagctttggaggcagccagagtccagcagtgacccccaactctgctgcttcctcctgtatggactgagacaagtcacacagcttctttgggtcttagtttccccattagcaaatgagtataacgacagtagcagtgtttgttttttgagacagcgtctcctgtagcccaggctagcctcagactgtatgctgctgagcatgaacttctgatccttctgcctcctctaagatctggaacgacaggcatgtacctagttgatatgctacggggggggggggggtgaaacccaggacactgaggatgctgggcaagcattctgtcaactgatcgacatccctaatcccactattattgtgaaaactaaagaaaaaaaaataatgcttagggtagctggagaggtggcttttagagcacttattgctctcgcagaggataaggatttgattcccagcatcctcctcgtggctcacaaccacctataaccccagttccagggggttcaatgccctctcctgacctcttctgtgagaaccagggatacacgtggtacagtgtatccatgcaagccaaacattcatacatatgaaataaaaaaagacaataacgcacggaaaacattcgtactgcctggagcctagtgaccagggcacatttcttcgtcttcttatttccgacaataacattattaccatcaaaactccaggcaaccatgagagagccagcctggtgcttaaactgagtcatgctaaaactagatcccagcccagtgccccaaggcctccttacctgttagagctctctccagatcaccggtccaggacccagacacaatggtgtttgaacttcctagcgcctcatcagctgagaaatcttcagatgaaacagatggttggcaaagccaaatctctgctgcctaagctgatcatgagctcagggtgctaagtcctgattctagctgagcctcccagtcagtcctccgctcatccacagcagacactaacgttctaaaacaggccatctccattgtgggcccccggagcaaactccatcagcctctctcctttagtgaccacaccccttctccccgccccacagcttccctctagcctactgccccactagcctgtctctctccatcacaaagcctgctccaagcctgctcctccccatgccaacagctcctagctttctccctcctgaagccccctgtgctttccattagtgggttccataatttcactgcacaagggtcttcaggctcactctgcattcactccataaagacacaccctcagttccaatgctcaacagttagtatccagtggccgtgtccaccctaatgccatgtcttttgcttcttggcctccgtgtcctccctggagtgtggaactcccttctcttcagtccccgacactccccttacagcctgctccttcccttcgcctctcccaggaccacctgacaccactatgacatttagcagagctctggctgacatttgtccaatagcaagggacattcttgaggaaatgttaaggaaccagtgtggttagagaggttcctcttctgccaggaggatgacagactgggagggggaggggctctgtaaagccatcccagatgcagaatcaaatcccccccactcacatctgggacctccttgaactcaagcttaagacagaaccattggactttccaactcctggttaacgcactcagcgctctgttcaccagcgctgcctccagcccacacatccatctggaccagtgttgtctcacatccaaggccttcctgttgctgatccgagtccctgtactagttatttggtcaatttcaccttctcctaccatcattaggcacaaatactggtcacaggacttcctacctgacccttcacaggcttgcccacagttattcagcaactctagctgtgtcttcctggtgtctaaccctgattcttcttgctgctgcgggagctgtttaccactggagctgtactgccagcccagccccacccccccccccagtatgacttatctccatatcctatccaccctccactccccaatcccgtggtgactcatcccaagcttcccaaggaagcccccaccctctgccctttcctcccctcttccatgagtggaaaatccacccccatagcaggccagccccttcctcctgtctctactaccccatccccccatcaactagcttcctctccatgaccagggagcaatcacagatgccccgaccttggcttcctttgcttggtgagattgagagaccgagcccccaacaggcccctggcttcccccttctcctgagcagggtacagagaggcccaggcccagggcccagggtctgacttcctcttgtcccggaatgagcatgcctacccctttacaggcaggtttgggtctctcacgcagaggaaaccaaaagcagagggagggaaggcagagcggccaatcaggggcagggtgaggctcaaaacccagcaggctccccagggaaccccaccgaggccaagccatggcggagctgcagcagttacagcagctgcaggagtttgatatccccacgggccgggaggctctgcggggcaaccacagcgccctgctacgggtggccaactactgcgaggataactacttgcaggtaagtggagatggctcaggtcaggatacacctcacagggacctgcagcatagtccctctggtagggtcatctgacaggtatctgttcctgccttggctgagcaatcttcaggcttcaacgcaatccccaagcttcctaaaagccatagcccttgttctcgggccatagcctcagaggtagagggtatgtgtataacgctgtatctataatcgattctcacaccttacctctcacaggtgccgggactgtctttaagctggctctaggggaaccagaacacttcccactcacgggaaaggggtttgtcccttgatgtttgagggggaacagaggagagtcggagcagaccctgaggaaagaacgcggtgtggtgcagaggcaggggactcccagtctggctgctgggaaatgagaggcactgtagagcagccgcagacctttccacaatgtgtggattttgagacagcgtctcactgtgtggcctccgctgccttagagttcactgtagtccaggctgaccttgagttcactgttgcccaggctgcccttgagttcattgtagcccaggctggcctcagatttacaatcctcctgtctcagccttccctcagtgctgggactacaggctcccaccacctcacctggccattgtttgtgtcaagtcgttttgtttcagtttctaaggcattgggaggggagcccagggctgtctgggaaaacctcttctgctgagctaagctccactccaccctggagtagtcttgctcatataacattgactcctggggaaggaagatgggcagagaggactttatgattgcccaccctcacagccaccatgtgaaacaaagactataattcctgtagatgaatgcgaaaacagcagtgtgtgtgtgtgtgtgtgtgtgtgtgtgtgtgtcacccagctctggatagcagagccaagcatggcttccctgccttctcatctgagccccttcctctccatccttctatctgtctgatatagtgtatggcgctggacagtttatctgtacccctggtccttggtttcctctgctctaagagtgacagaccaagtctgcaacctcttactgagcaaagcaaagcaaaatcctagccagactgtgagacagcaccaggggcctcctcctgtagctggggagaaaaaagacccgaaggcctatgggaaatggcagagcaaagaggcaatgataggcaagttctctctgcacccacagcctctatttgtcccttccccagtcctacctggtgcgcactatgcacacttcacaatgagaaagctgccctttggaaagggactgtatttcctgattcctccaaggtagtcaccaagacaggattcgaactcggaactatagatggttgtggtggcccatacctgtaatcccagtacttgggaggctatggcagagggatcttagaaagttctacctgttttctagtctgcataagtgagtccaagccagtcaggattaaatagcaagatgctacctccaataaaccaaactcagcaaagcaaaatcccaaatcaaagagcagctaggattctgactcctgtgcccagtgctaccttgagtgtcattccagtgtgtgtgtgtgtgtatgtgtgtgtgtgtgacactgagtgaccagcctgatgatctgacatgtggtttattaccagtcctgcctgccctgcacttaggcattctccttccctggcagggatggaaataggcctttccgttccatcggtgtcttcccacacctcaaagtgctgctagtgggtgcaatcccacatgtgtaatttgtgtgcacgcaggatctgaagtcacaaagctgagtcaccaggtctgccacctatttacgtagaaatgtgtagtatgtttcccattgaggggtctttctctctctctcttccttccttcctttcttccttccttccttccttcctttctttctttctttctttctttctctctctctctctttctctctttctttctgtctttctctctctctctttctttctttccttctttcttttttccatccttccttccaatattgccactctgtagctcaggctggccttgaatttatgacctgcccagcttccccccaaatccccccaaagactattccaggcctgtgctaccatttgggggtgggatggggttccaattaaactctataccttctctaggctggttacaagtactaattggaacagtgtgttaaaccatttgcccagggcccatcatcctttaagaagggcagaataaataagtgtatctgctgtggcttctattaccatttcagaaggataaaaggcacgtgctagtgataaagtcccattctatccaggtgacagcctttgcaaacacactcagggtatcggaagccccgagacccaggttggaatccctggattcttttgtgtagagttctggcccctagccatccctgactgtctacagaggaaaattttggggtgatgtctttaataaagtctctgtcccatctttccccaactaagtgtcagaagcccatgcaggaggcagatgggtcagcgtaggtcagggttgactgagcgtaaaaacagggtcatttgcatgacagcttaggtgaaggatctcaggcccttgctcctccagacctgactttgggacaagtttaaagctagaggttagttagaaacatctgggctagaggaacccagagctgggcccaaacaggcacctttcttgtttgggttgcaaagtccatgtgccaggctgggtaccaggcagagggagcctgttttcttacctatgaaacaaagacctagagcgaagcctgcagccctctctagcttctctgcttagccaatattttgggtggcatatgctgatgagatgtaaattttattgcatatgcagatgacatgtaaatcagcacacaaatgaacatcggtttcctgctgtcagaacagaaaagcagggaagggaaggaccatggcgcgggtttttccagaaggttctctctagttcaggttgcatgaggggaacccagaggaatctcacagaggatacaactcttatagcaccagtggtggggcccatggagcacacaaaatcccaagcaaggaggccacaggggtgcagccttgcctgtcagtacactgccccttctaatttgccttggtctcacctctacctccccacaccacccaaaaggacaggcttccgtgctcatggttgacgggaaaggaggaagctgtttggtgaagcaagagacccaggcctgaaggtctggtctgggaccaaaaaaagccctcttttgtctttagccactctctggtcatccctttcccagtgactggcagtgtggccctggccagtgtctggcatgccgtaggaagctgcccacctcgtgttgggttctcctttggcctgtcaaccagccaacaaatgcacatgtattaagtatcttctgtgtgctgaggactatgccagcataggatgcaaaacggaatggaccagctctgttttcagggtgttgatatttggatgagggaggggtgaaaagaaaaagaaagaacagggcaaatatgatacgtcataaatgcgagctgggtaaaagcttagggcactgagagaagtggagacgctggaaccatctagtgagaagagctctaagaagtgtaggcgccaaggccctgaggtaggaacacaatctctccttctagggattagaacgccaggagctagtgtggctagagagaagcaagggatgtgtgtgtaaggcagaagatagtatcttaaagccaactgtgcatgggcgggtggagatgtcacacacctttgatcccagcattcagggggcagaagcaggtggatctctgagtttaaggccagcctggtctacagagtgagttccaggagagccaaggctactctgtctcaaaaaacatagtagtagtagtagtagtagtagtagtaccagcaacagcagtaatgccaactgtgccatggcacacacctctaatcctagcacataggagatggaggcagaaggatatcaggagttcaaggccaaccagctttggctacacagagaatgtgagcctatactacatgaaaccctgtttcaaaaaaaaaaaaagaaagaaagaaaagaaaagaaaagaaggaaggaaaagaagcgaagcatgttagaaagctgtcagcggcaatgagaggatgaagtcatttggctctgggacacgctgcccatctctcggttcctatacaccttcctgagggttggggctaaggaagtgcaaggtcagtagggggctgtctctcctggccttactttggtttgaggactttggtttataggtaagagcctgctattggctggttgagttttaagtggctgaatgtctcccctagccagcatcgccttccccttcctgtcaccagccagcctgccaggagacacttgctgagggaggcagtagggtcctctcaactctggcctcacctcaactactggaggacaggattcctgccccgactctcacagccagttctctcaggctgcgatctgctttcccaatgttccttgcactctcctcccatgccccacttactccaacaccatccttctggaaagctacctcaggcatctaaggaccgcagctttctccaagttcagctctggccttccttagattctcttctggctccatccgactctgccaaggaagcagtggaatgtgctggcctcgggccaaggctgtgtgtatttcaggccacagacaagcggaaggcgctggaagagacgatggctttcaccacccaggccctagccagtgtggcctaccaagtgggtaacctggccgggcatactcttcgaatgctggatctacagggtgctgccctgcggcaggtagaagccaagatgagcacactgggccaggtaaggatgtgggaaggcatccctctttctgtcctggctcttcagtcccactcaaatagccctacatttctccatgcccacctggccaaccggactgcagaaagttggcacattccagactttggagacatctatcatggctgtgtctcagtgttgttcttgctaccccattagatacaaagtttctctctctctctctctccctctctctctctctctctctctctctctcctctaaaagctttctttgtttgctcttcatagtacctgcagagagcaggagagaccaaaggccaccctgtcttcattggaacacatccaatgattaataaatgccctccacgcaggccaggcaagcccatcgtcagccccacaggaatccgtgccaacaccatacagagtccccacccttggctcataaatacctacccttggctcataaatactctcagccgtccttcctggatccttgaccccacaaaacatgtgggagttcttttggtctgaccataggtccctgaggggtcagtgtatagggtgtgttttcctcttcttcctgaagacccaaggtcccgtccctcaaggcctgagggaacatttggagaggaagctaattcccgtacttgttccctgaaggggacagctgatttagttacagttctctgccacctccacggaatgcccatctgcaccaaagcctgccctgtcctttggttgctgtccagcaaccccagggattttttttccctcccttttcttctggttcctgcacagctaataataaccttcattctcttctacccggaagtcgctccaaagtggctccatcctctgctgctcttctttctccaatggctgcatggccatgggactctctctggtccccccatgacccccattctttcctcctcccctgctttgagatgggggttctcactatgtagccctggatagcctagaactcatcatatagaccaggttggcttcaaactcacagagctctacctgcctccctctgcctcccgttagttagctttctccctcttttaaagggaatggtgttgtacaggctgtttctcacggtctcctcccacctcccgaccctgtcgtgcagatggtaaacatgcatatggagaaggtagctagaagggagatcggcactttggccactgttgtgcggctgccctctaaccagaaagtcatccctcctgagagcctgccttccctcactccctaccacagaaaacccctcaactttgcctgcttggatgacattggccacggagtcaaggtaagggaaaccctgctgaccccccactgcccaccctgtcctgccgtacagctagctccctctcgtctcgcctttccccaagcttttgtacgacctcacatccccttcttcctctccacactccaggacacgtggcctaaactccactctccctaggtccttaacttccctctactcagacactgctcctggaagatcataagctgtcccggccccaccccccactcccaccccacagtgggtcgtgtgtgtggtgtgtgtgtgtgtgtgtgtgtgtgtgtgtgtgtgtgtgtgtgtgtgtgtgagaaggggaagagggggaggagggggaagggtgtcagggcacgcatgagaacctctcctcagccacatgagaatagcgacttcctctgtctgggggtttgaggtcattgctctaagaagtcactccagaatgctgctgatagggacaggaggcagcaacaaaaagagttggcggaggggaccttatcacactgtgcccaactgcttcatgtcagattagattagaagctttcctgggtcttaaccccttgatactatgccagacccccaggagagaaaatacctctttccttcagttcccagctctctctatccgttcctttttcctgtccagccttcttatcttttgtttttcttttgatggtgccctgggtggaacccaggccttctataaactcagcagaagctccatcctgagctatgtacccagcctccaacttatcctttatcctgtaattcccctgtcttgcctctagtggggcagggtgacagagaacatgacctcccccacaccatcccctcccctgctcacgctgggggaagtcccagtttcagaggtgtctcttggctttgggattgcaccccatcattgagactctcctaagtgtcttggcttctgccatccctctgccttgaatttggggacggtcacttccataggtttctgggaaacaaggagttcccccccccccccctatgtgaggctccttagctcgcgctggagtacaagctaaatcagagctaaggaccaccaagccacccagatccctgagaatttgagatagtgtggggttgcaaagggcaactcagtcactgtggctgtgcagaggaagtggccttcagacggcgtctgtgctgcgggttgttttctgtgggacggctttgggggacctgctgcaggcctaaggggtgggggtagggttaggacgggaggagggctgagaagtggaagtaggaacttgctgagtctggctagccctcccagttctcgccctccgctcccctcccccatttcctctcagggatgtgggtaagaatgcctccccgtgtcccagatgtcaatcaaccctatcgttctcccttcaggacttgagcacgcagctgtcacggaccgggaccctgtctcgcaagagcataaaggcgcctgctacacctgtttccgccacgctggggtgaggcctcaaggccatgccaaccagccctacccagccactcgtggttctcaactgcttcttccacccctcaccctcagcacctggcgccttgacgctgctgcgcctggcacccagcttcaccctccgccagtcgcccttcctcaaccctaaactctgctcagcagagaaccctccctcctcacaccaccctactccactccctaggagaccaccccggatccctgagccggtgcagctcccagccgtgccagacggcaagctctccgctgcctcctctgcctcttccttggcctcggcagggtgagcacttgagtctagtgggtgggtagacagcaggtggattttgagaggtggcctccaggcagtcttgtggttgagaaaacgaaaaaccactagctgggggaaaaattaatgcagatcttactatgaggtctggggacccctctgggacgctgggctagaaggcgtccgtccctaatcagcatataatctggtcttttagcagtgcggaaggtgccagtgggatcccccagtccaagggacaggtagcgcctgcaaccccgcctcctccacctgtagcacctgtaaccccgcctcctccaccgttgtctgccgaggtcttcttgccgccccctccgctggaggtgtcccagccccctctgggtaagatgggtcctgccttctcagtattcactttgagtctctctcattcagccctgtgctcctcagggaccccagagaagcagtagatagactattttacactagccctgtttttgaagcttctcacttaacggaacctttatagcttaagccagctgcctaggtgttgtcccgtaggatctgtctaccctgtgctgagtctggctagaggcattatgagtgatgacaggaactggttagagcttgaggatgctgcagggttggcccactttcctttacacgaacccttttgtcttccttcccagaagcagagttgcccctgcctcctcccccagctctagagggggatgaactggggctgctgcctccgcccccaccaggttttggaccagatgagcccagctgggtccctgctagctacttggagaaaggtacctttgcaactcttgggactgaaaggcagcagaatccgttggcaggtttctctggcttctgttgctttggccttcactctccaagccggaagcatttgctttccctaccaaggtgcgggcgaccctatcttttttctccatctccttccttttggatgagctgagttctgaaccctgctgggaaagagcagctggcctgctattgagtagtacctgactgttccaaagcccctctacgcacgacctagtattacagctcctgtatcaccgtgggcgggtgcgtgcatgaccgaggggacacctcacaaggttctcttcttgccccacagtggtgaccctgtacccatacacccggcaaaaggacaatgagctctccttctctgaaggcaccgtcatctgtgtcactcgccgctactcggatggctggtgtgagggtgtcagttcagagggcactggattcttcccagggaactatgtggagcccagctgctgacagcccaggatctatccctgcaccaaccctgcactgcctcggtgggcctctcgagccccaggaagccagcttccacagtcaaagctggactaaggacctgtctacctcttgggctgtgaactgtgttcagtccctgctccatacagcagtgggaagagggtgggctagagaggggtggtactcaggggggactgctgcagatggcataaagaatacaaaaacaaacaaacctagaaggcaaggagtttaagcaccttgcccagaggacccccagctcatgctcagaagatcgccagctttgaataaaactgctgacctcctggtagttgctccaaagggctagaaggccagacagggagtgatggaaagggaacacggaagccctgaactctgccccagaaggactctcaatctcaaccctctttactcttcccattaggcccctgacgtcacaagcagccattcgctgggctcttcacgccctcactacttaaataggactccctgagagcagagagcacctctctttcatccccccttctcactgtggcacaagagaacaagtccctttgtcccccttcacctcctttattggtctgaaactccagagaggggaagggcttgggtttccctggctctgcttaaaaacatggctttctgttccataagggcaaaggggaatgcaaggggggaggggtgcggggggggaggggacgactttggtgaagtccctggtctcttgctggagtgctaggatttttcacactctccgaggtcagtggtcggttcttctacctcgttctaccagcaggaggcggtagttccttctgactttttcttcctttgggtgggtggggggtgtctggtgggcgggggtggggtgggggtggagagggggaaggaagcaaggcgcagccagcgcagcggtagtgtagggttgcgttggctgaagcaagatcaagacctagagctgtcttctgagagcatcataggtctgccgcgaggaatctggtactggcatgcggattgggggatcctgagtccgtttgaaagactgggcagaggaggttatgcagccggtacagcagctaaagtaagtgggagatgttccttctcccaacttccaggaacccgttcctctcagttcgaggggcactgcctgccttccaaggggtgctcacctccctggagggaaggcagcagagctgtgttaactgcatagatagggacggctctgaacccctgctcccagcccacaagcagactgaattccagatatgcccggaggagcatagcaaagcgaaaggaaagaggagggtagtaaaactaggtgatcctaaccaatccccagtcccgtccctcctccgtcggttgtcccgagcacccctggcaggcgatggtcttcaacacatcttcagcacctgttgcagatgttggcgcacatcggcggctgtttcccagggcaccacgtgggcgcggaaggagctgggctcagctttctgtgcctcctggatgaggcggtgcatggggtagccgcggcgcgggaaggccacgtccccgcccgccagcagccccatggggcaaaagtcatttgcaccatcacccacgtagaagaggcgctcgaagtgcacgccgtcgcgggcccgctcacgcaggtattcgctgagcaccttgtgcttgcacatgttggccgggcagcgcgagcagctgtgcgtgtggaagggccgcagcgtcagcagtccccgcgcgtcgggccccgacgggttgctgaggatgcggcggaataaactgtggtggccagcggcacgcagggcactctccacaccgaaggtgttggcatccgaaatgagaataacctcgaagcaggagccctgtttggctatgaactgcaacaaatcgcccatgcctggcgacagggggatggtctcgtagacagcgcgcaggtcccggggccgtacaccctgctcacccaggtacttaaagactcgttgcatgtactcattgtagtagccctcgcgataggtggcacgcaggctctcgggcagttgctggcctggcgcggcacgcacgatcgagtcgtcgctgttctcgtccacgatggtctcatcgaagtcgaaggtgaggaggaagcgaggcgcgcccggcgcagccatcctgccgtcctgggagcagggggaagaggagcaggaggaggaggcaagcgagaggcggcgcggcgggagccggccagggagaagctgattagcgggccacagccagggtcgctggcacatccaagacctgaggaggacccaaggctggttaagcaggagatggaaccaatgtgctgcccacaccccgccgtcccttgcctgtctctcagttaatcgtgctggggtcgacgcaagggggccatactagtcttgaagccaaaagcttccttggcttcggtttctgctgctctcataggatcccttaagagaggggatgactcgtcaaggatcactccttgagactcctcaactgggttggaggtttctggtgtcagagcagagtagacagcagattcatgtacccagggggagcagcctccttttcccgtgatccccctgggatcaagaataaatggaggagccaggctcctggaaaagccattgacatcaccaaggccgggtgggcaatgagtctcaggtctttcctgggcctggatgccaataagtgccaggcctggaaagccaagttcctgagcctccctgggcctggccagagagctaggttttagcccttgaaattaccaggtaggtatgcaaaccacacaagaccctgggagtctctttgggagctgctgggccctgtgctaatgtgctgcccatgctaatcacttgccaattccctgggaagcacgtgccagcaggtggggtttctgccagagtccgaagcaagcaggcaacaggagaagcaatggggcttaaggaggtgggagcccccctcaccaggccacggcatacctgggagacaggtaggggaggggagagagagcggcagtggctaaaaaggcagagggaggcaggggtgggcagctatgtgagggggtgttagggagagggtgtctgggatgaagtcaggcagggaggatagagtaggctcctggaacatagtgggagctctaggtagtcatgagactttgggtcagtcatcttttgggaagttggcaaagggaaaacagctggggatgcaaagggagtgagtattggggcacaatgaaaagcaagcatgcggacacagcaggtaagccacccaacttaagcatgtccctgtcacctttgtttgccagcagctataaggagggagacagagagatcctgtcctagaatatccctcccttggcttgcctttctaccttcctgcatgcacttcccacccagtgcggtaaagaccaaaacagaacctggtttcccaccacacatccacacaccccaacttctttctttctttttaaagaaggggttccctatagctcaggctgacctcaggcgtgctttgtagataagcatgaactcgaattcctgagcctcctggttcaccttcttagggctggcattaacagagttctaccaaccaagtgacagcatcctaagcctcacccactcttattacttctgggcctggcacacctcatttcagagttggtattggagcttggccacctctctccctcagagaactgtcttctccactttatccctccaggagtcacccctggggttttaccagcctgtggaatctctggcttggatccctgttatatgagacaccaggatccacagaagagaaaattttcagggatccatagagctccagtggagaggacaaatctgaagggggctgaagagggctcctcctatcccagggtggaaaagtaggggcttaaggcctcattctgaagggctccacttaccctagataggcatcgtagtccaacagctggaaaacacccgctcattgtcagtatattatcttaaccaccacctttagaaactgttggtctccagctgtcatccagagctcctgcgggcgggagggaatccacaaaaagtccatacctgtttatttggagtatggtggtgcaagcctttagtcccagcacttgggaggcagaggcaagtggatctctgtgagtctgaggccaacctggtctacttagtacattctaggacagccaggatacatagaaagattctgtctccaaaacaaagtgcctgcccactggcttccctttcgctactgatcccatcagactatttcttccatcaagcccacgagcaaaagcaaactcttacatgtacaccgaggccacgccccttgctaacagcacccttggctagttccctagcttaccggagggtttacagaggacactgttggagttgtagacagattaagtaggagattcacccaaaggtcactcactcaaagtggctgagatttttcaaaaccagatctcagaggctggtctggcgtgaccttttgcccacacatgagtcgtggggtgcatcacggtttaccagtcacctttattcctgatctcatgcatggttcatcacagccaggaagacagagagcagagcaatcaactcacttcccacaggctgcattgcttcagcagggtggtagctggttcataaacacttcactactgtctagaggctgagagccctgggcctgcaggagatatgagactcacctctggcactaatttgttcagggatctcaccaacagggcaagctgaaatttccacgggagtttcagtgactgggtggtgatcttttggttaggaccttcattagagcatctatacagataccatttacagcttttggtgcctccctactcccctacccctccacccctaggctatgagaccagaggccagccccttagaattggaaagatacagcttggaattggaaagatactagagcaaagattaaaaaaaaaaaaaagaaaagaaaaaaaaactaggtggctgctgccctctagtggtagcaatgggtggcaccgtaaactcttgactctcaaggtgacacactccctgactatcccaaggcagcagaagccactgcctccagagtagactagggaaggatcaagaggacacagcttctggaaccctctttatagagctgaccaccctcgctttctcagagcaaagcttttcagtagagacaggaagtagctctcagtgttctctatcccctcaaagaacctatagctagtaactggaaagaggttaaagctcactagcaaaaactagcagtgctctgggagacaacattattgagatagtgagagagaaaggggcagggatggtagacgagggaaccgcatgcaagggacattggggaaactgtcaccattggaatcccggctgatataacctttgtcccaagacaagagttagaggtgataggtcagagggtgccacacccattgtaaaagcaatcacaaagagaggaactaagtgtcaggcagggagggaagcaagggtcagatacaaagatacaaaccaaacgggtcaccagcagccacacagaacaaccttctcttctcttcctgcttcactcccctcgtcccacagtcaggaccaaccccagggctttgcagatactatacagcatgcccttaacccattatctttgtatttaattttgagacagggtcgaccaacctggacagcctcctgagttcagagattccaggcatgtaataaaaatactcttgataagattaattttcatctcttggagggggttaactacttgcctgtcttcctttgaaagaattataccagtcccaatgctgacagctgacaggctctcactacctaaccttggctggcttgcaattctctctgtagactaggctggctttgaacttagatcctcctgcctttgcctcctaaacactgggattaaagtccagcgccaccactctggtaatcttgtctttttctctgcagagcagaaggccaggtattccgggtttcttcccaaaaattgacacagcctcacagacacttggtccttgccccattcacccctagttattttctggcttcatagcatagaccagttggcagctggtgatgcaggagataggggcagagaatctgagtttgaggccaccctgaactacatgaaaattcctgtttcaaaacaactgccattaaaaaaaaaagtcactcacttctgacaggtgataagcgataagtcctgggcagtgcagggcattgcctttaatcacagcagaggcagaggcagaggcagaggcagaggcagaggcagaggcagaggcagaggcagaggcagaggcagaggcagaggcagaggcagaggcagaggcagaggcagaggcagaggcagaggcagagaggcagagaggcagaggcagagaggcagaggcagagaggcagaggcagaagcagagaggcagaggcagaggcagaggcagaggcagaagcagagaggcagaggcagaggcagagaggcagaggcagaagcagagaggcagaggcagagaggcagagaggcagagaggcagagaggcagagaggcagagaggcagagaggcagagaggcagaggcagaggcagaggcagaggcagaggcagaggcagaggcagaggcagaggcagaggcaggtgaaactaagttagaggtcagcttggtctacagagtgagttccaggacagccggtactacacagagaaaccctgtctagaaaaacaaagcaacaaaaaattctgtgtgaccaccagagtccccatggagaacaggacaggacctttgagtttctcccacatgctagagcagccaggaggcaaacttttgggggctgagggaagtccttttctagtctcatctaagatcaatgtttgcagccctgattccctatcacagcccctgcctgctcctttgatacaaatacttttaggttagatctgtgggaagtcggggtaggggtgtgtgtgtgtgtgtgtgtgtgtgcactaacttaagtctaagcttgaaattctcctaatgggggagagggtagagcccataggaaagtttggggagttttccacaagaaacatgcagactgagagtgggggtgagcacttaaaaactgtcaagccctctctgcttcaagaataagtatgcccatcactagaaattagatctgacaattaagctaggattcctgcccccaacactcgcaacttcacaaactcctttcttgttcattaacccgtaatgggcaagggagggggtgcagagaggtccagcttacatcacacagcatcagaaataggattaaaactcagggatctctactgcctcttgaagaaattacctgaactccggaggctctgtatgttccctgtcctagctagtctgcgccccggtgccagtgaggaatctgggactaggcgtcacctctggggtcccctgcctggggtggacaagcagaggtgattcttactgggtaggggcagggagatggcagctgccggtggggtagcaggagagatatttttagaggtgactggaaagcaggcactctggcacacccccagctggcgggcgcttcgctctaatgcgggcggggggtgcgtagctcggggagaaggaaggacttgtgggtggcggggagctatgacagtccccggagatgaagggacactgggtaccattaacctgggaaaggagggggttcagttctctgcccctgggactaccccaccaccaagcacatgaaacacactcaaactacacacagcccccaccccaacatttagatcgcggtcctcccggagcccaagactcatgcggggcagcagcggtcacgctgtctgtcccagctgagtttggagtggaagtagtgggaagggggctacttaagggatttagggacaggatggagcaaggggtgcttacgggatttggggggtacgcggtcttatccacccccggatttctgagctccggctcacgaatccctccagccccgagggactgtggatgatgtgcttctgctccgtcccttccacctgccccccatcctcggggccgccgccgcgtcccctttaaatgccggggagccagagcccgagccgcggcgggcgctgcggcagccgcagcacccgggcccaccgcagtccccgcacgtcacaagcgcccagccaatcaccgtggcgccggcgcacatcaaaggggcgggctgcccgcgagccacgcctccgggctgtcccggaggccgcgcgagcggccgtgagactgggcgggcgggacgggtggagcgtggcgcgtcccgtccgaggagcgtgggtgcggggcaccctctgcgtgcgcgtgggcacgtgcgtgagtcagtgtcacactgcccgcctcctgctgggctcggcgccaggactctgcaggcagcccttccaccgcccggcttccctccttgtcgcgggacagccgggtgaccggcccgccaagcagccctccctccatgtgctccgagctcgccctctgcccttccgggaggagtcgcggcatcctgccgagtcctcggaaccctgtccccaaattaccgggtactcgggcttgccgatggaaaagctctcccaatccagcaccgcctaaactcggagttggagaaccgacacttgagcactgtggtgcaaataaaacccgctttctcccaagttcccgctcttcctctctggcgagctttcccttccttcccacccctcagaacactagattacgattaaaagagaggaggtgaaacctgcactttctgaaccggtgcgacgaacccaggagaaaagacttgtccaagagttcgaacacaaggacacctcacttcagtcacagaacaggatctgtgggtgaggaggtgcaccctggcctgggtctaccttcaactctcctatcatcctctagctttgaataccagagctccgtgcttccaccagcagaaggcagattggcagaaaagttgccgatacgatggaccacccgcccaaatctttgagggcgacgtctccattgcccctgctccctctctaacacgccagcgccccttcacctctttcctgaagtccaagggctaccggtgtttattctacctagctctacctagcggtgctcaggccctgggccttttatcttgagtcggggtgggagggtgggtctcttataatttgttgctacctattctaggcccgaccctgagctcctaaatctcctgcttccatgtccaatttgatggattaaaggcccgagtccccacaccctgcaatccctcctcttaaagaagcagtttcatctccacacccttctcaaagacaggctcacacagccttcatcatctgtgttgtatctgttctcggccctccaatgccccccagaccccccccccctttgagacagtttcctgtcgcccaggctagtaatgggccttgctgtatagtccagaatgacggtctactcccgagttcctgcctctaccttctgagcgctgggattaaaggcatgtgtgccactatgccctttcttaaaccagccctaggtgtacttgaggggagtgggtagatggctggaaagatttgaatgtctggatccatgctcccatccttgttctccttccaaaatgatgccactgaggctctgaagaaatcgaactgggaagagctaacccagcttgcttgggctatccagttgatgaaccgtagcgttggagttccaacccagtttgcttacccatgacctcatactgcgcctctcccttgtcacttttactcttttttaagtaaattgagggcagagaccatgtttgcctttgttgttgtcttccaaaagggcagggtttctctgtggagctctggctgtctaagacctcgctctgtagatgaggctggctttgaactccgaaatcagcctgcctctgcctccccagttttgaagttaaagaattgggccaccaccacccgatcgatccatgtctgttttactcaacactgtgacccagaccccaggatttaatctggacactgacacctctaggccttagatgtttgttttttgctggctctggtggtggcactcacctttaatctcagcacttgggaggcagaggtaagtggatcaaggttagtctgagtgagttccaggatagtcagagctaatccctgtcttggaagaaaaaaaaatctgattctcttgcaaaatttcagcctcctttccaaattcactgatacagtcagagagtgctggtagatgacttttggcccccactaatgatctcgagtttttcctgccctggtctaccttctagctccatcatggggatgatcccccgtgccgtgcctccaactctgtgaaataagtgtatcagtgttggagggcatgctagacagctgccctacctctgacgtagtctcaggcctaaacatagacactcttagtgttttttaaagatttgtttgactttcaactgtgtgtgtatggtgtatatgtgcacaagcctgcagggacccacggaagccgtgggctttatatcccccagagttggagatataggcagtgactgtaatagaggttagctgccttatgtgagtgctggaaactgaactctggtactctgggggctcagtacaagccctctcaactgctgaggcgtatgtccaccccagcatctcttctccctgggataaaactttcaggatactcctgtctgtctttccactttttttctctttt

SEQ ID NO: 2958 - DNA, 2175 bp, Mus musculus
aatcacagatgccccgaccttggcttcctttgcttggtgagattgagagaccgagcccccaacaggcccctggcttcccccttctcctgagcagggtacagagaggcccaggcccagggcccagggtctgacttcctcttgtcccggaatgagcatgcctacccctttacaggcaggtttgggtctctcacgcagaggaaaccaaaagcagagggagggaaggcagagcggccaatcaggggcagggtgaggctcaaaacccagcaggctccccagggaaccccaccgaggccaagccatggcggagctgcagcagttacagcagctgcaggagtttgatatccccacgggccgggaggctctgcggggcaaccacagcgccctgctacgggtggccaactactgcgaggataactacttgcaggccacagacaagcggaaggcgctggaagagacgatggctttcaccacccaggccctagccagtgtggcctaccaagtgggtaacctggccgggcatactcttcgaatgctggatctacagggtgctgccctgcggcaggtagaagccaagatgagcacactgggccagatggtaaacatgcatatggagaaggtagctagaagggagatcggcactttggccactgttgtgcggctgccctctaaccagaaagtcatccctcctgagagcctgccttccctcactccctaccacagaaaacccctcaactttgcctgcttggatgacattggccacggagtcaaggacttgagcacgcagctgtcacggaccgggaccctgtctcgcaagagcataaaggcgcctgctacacctgtttccgccacgctggggagaccaccccggatccctgagccggtgcagctcccagccgtgccagacggcaagctctccgctgcctcctctgcctcttccttggcctcggcaggcagtgcggaaggtgccagtgggatcccccagtccaagggacaggtagcgcctgcaaccccgcctcctccacctgtagcacctgtaaccccgcctcctccaccgttgtctgccgaggtcttcttgccgccccctccgctggaggtgtcccagccccctctggaagcagagttgcccctgcctcctcccccagctctagagggggatgaactggggctgctgcctccgcccccaccaggttttggaccagatgagcccagctgggtccctgctagctacttggagaaagtggtgaccctgtacccatacacccggcaaaaggacaatgagctctccttctctgaaggcaccgtcatctgtgtcactcgccgctactcggatggctggtgtgagggtgtcagttcagagggcactggattcttcccagggaactatgtggagcccagctgctgacagcccaggatctatccctgcaccaaccctgcactgcctcggtgggcctctcgagccccaggaagccagcttccacagtcaaagctggactaaggacctgtctacctcttgggctgtgaactgtgttcagtccctgctccatacagcagtgggaagagggtgggctagagaggggtggtactcaggggggactgctgcagatggcataaagaatacaaaaacaaacaaacctagaaggcaaggagtttaagcaccttgcccagaggacccccagctcatgctcagaagatcgccagctttgaataaaactgctgacctcctggtagttgctccaaagggctagaaggccagacagggagtgatggaaagggaacacggaagccctgaactctgccccagaaggactctcaatctcaaccctctttactcttcccattaggcccctgacgtcacaagcagccattcgctgggctcttcacgccctcactacttaaataggactccctgagagcagagagcacctctctttcatccccccttctcactgtggcacaagagaacaagtccctttgtcccccttcacctcctttattggtctgaaactccagagaggggaagggcttgggtttccctggctctgcttaaaaacatggctttctgttccataagggcaaaggggaatgcaaggggggaggggtgcggggggggaggggacgactttggtgaagtccctggtctcttgctggagtgctaggatttttcacactctccga

SEQ ID NO: 2959 - protein, 365 aa, Mus musculus
MAELQQLQQLQEFDIPTGREALRGNHSALLRVANYCEDNYLQATDKRKALEETMAFTTQASVAYQVGNLAGHTLRMLDLQGAALRQVEAKMSTLGQMVNMHMEKVARREIGTLATVVRLPSNQKVIPPESLPSLTPYHRKPLNFACLDDIGHGVKDLSTQLSRTGTLSRKSIKAPATPVSATLGRPPRIPEPVQLPAVPDGKLSAASSASSLASAGSAEGASGIPQSKGQVAPATPPPPPVAPVTPPPPPLSAEVFLPPPPLEVSQPPLEAELPLPPPPALEGDELGLLPPPPPGFGPDEPSWVPASYLEKVVTLYPYTRQKDNELSFSEGTVICVTRRYSDGWCEGVSSEGTGFFPGNYVEPSC

SEQ ID NO: 2960 - DNA, 32998 bp, Homo sapiens
gaaaccagggagagaaaaggaggaagagactgttcactgtatacccttttacacctcttgaattttgaaccccctaatttttcattacttcttcattcagtcacaaagtctctaggaactcaagaagccagagaaagcttgaagtaatgtttaaacctagttgtgacttactatccagattagctagatgaagaagcggcagcaggctaggggtgtttcaagccctgcatgaactagtcaaggaataaaagaagctccatattgatgcgtggagcctagggggccagggtaggggttgggggtgaataggaggcagagctgaggccccagaggtaataagggcccctcatgcggaagggccttggtggctttggtgcccaggagtctagatttggtctcacaggaagtggccagtgaagaagggtattaagcaagggagctacagagaacccactagcagccgagagcagagtgggctgcagccgggctaggaaggtggggagttctgcaggagactgtggaatcatcagggtaaaaggtgaccaagctttaactgaggactaggcagagggagtaaagcgataaacagatgaacatgtgagagctttagagggtggctccatcaggaattagcttgcttaggaattagcgtgattagatgggctgctgcgggggagcaggggagcggcaaggccgtgtgtgcatggttcttcttccttctctatcctctcccggcttccctggtccctgcttcctcagctctgatactacaggcgatgagtcccccacctctcccatttctgtggtctggtagagaataagaaaatcagaggggccaaggggacgttgagtaactactccaaagtcacctctctgcccctctcctacctcagcttctgtgggaaatgagggagaagggagaggagggcagggagcgagatccttttggtgcttaattcaaaccctgcctgcaactctgcgcctgcatgaatatcctgcctcctccatcagaccagggcctctgtctccctacacaggatcagccatggaatgcgtggagcgcagtgtaaaatgaaaatgtgtaggtcttgttcaaaaattattaagaatttcaagatgaggacagcagagtgttaaacctagcatgcacccttctaagcaggggaccctgtgtgacagcagaggtcgaaggcccataaagctggttctgtccccaggccttaaggtcaagtaggtaattgggtggggttgggaggcaagaggctgtgacttacttttccagaggtgctgaggtcatggtggggtaatccctgtccccatctcactccttgctggcttcatgggtaagatccggaaggcccaagggtgggcggggctgggctgtctaacctactaggaaggatttctagctgctaccagctccaggagctgaggccacattagccagtcagctgttccccctccctgccttctaaggccgaggaatcccgtcctggaagtctctggtgcagtgtggaaggagagtgatacagaactggaaacttagaatgattcagttccatgttacttgaccaggaaatcaaggcgttcaagagcattcccttccgcttactcccttttcctggcttggcatccttttactgctcaggaccattagaatctcacttatgtggtttctaccggcagtctcacacgtctgaccctctgtgcttggtcttcttcacactcctcttcccccaccccagcctgagtttctggagttactccaaactctattcttggccctcctttcaatccacacagtcctcttggtcaatctcacccacttttgttgtatcagctactacctctcagtgatcctcaacaggtgtgcaaagggaggaggaaaagcctgtggagtcacgtgggatcacctggtggggaaggctttccaactggtgacaccgccattcacctagtcatccatggaggaaaccagaagtcatccttgataatttcttctccatccttccaacattcaatcaatctctaggccctgaaaattctacttcttcactacctctccagttcatctgctctccattcttacccttcctccccaattcagttcctaatcacgttgggtggctggatcatagtgattctcctttctctggaaactgaccttctgagggtggccctgaaagtcagcagagaaaggaatttcttcctctctgattcttgggaagcaattaaggtttgagtcaggtgatcaaggtcttgaagcataagtgaattgaaaacaaggagatctggggagagctttgtggctggacctctttgggtgagcctggaaactgaaaatacatgtcacaaacaggtttaccagaaggctccctgcaaaagaggcttttcacaagccatagacaggatgaccaaggggctgtctagagctcatgaaacaaagcaaacagagaagcaggaatagaggctatgcctggatggaacagcatggacttctcttcatcaaggccagtgtaggtccactactgcccaatgagcttgcaatggtgaaaccctgagcccctcatacagtaccagacctcaaggcaaccatccagttctctggtggcaggtcaatggaagggacacagaattgtcctcactggaataggcacttattcaggaattgagtttgtattccctgccaacaccaccatctatggattcatgcgatgtcttctaggcagctacggtgtcctagaccaggttagctccaaccaagaagctcttcccagcaaaagaagtaaggcgttaaatgtgggtcctggaacagaaaaatggcattagtgaaaaagctaggaaaatccaaataaagtctggagttccgttaacagtgttatacaaatgttaattttttaattttaaaagtaccatggttatgaagatgttaacattaggggaagccaggttaagggtatatgggaactctctgtactaactttgcaatgcctctgtaaatctaaaattcttcaaaataaaactaccaaagaaacacaaagaaataaggttggggctactgtccacaggatttgctgatctcaccatgtgtctgttatctagaagcaagtggctgagtgataggctgtcctagtaaagacccagggtggtgccaggtaggtggacaccactttgcaaagactaagtgatgtcaggaaggttgctggctgtgctatgaatggaaccagaaacaacttacagtgttttcccttcatggctaaaaaactcaaggatctataggctagaggagggaaaggatggctcagatggcatcaatgacccactctcagaattatcattcttgtcctcctaatcaacagtgtgaaggtctgggcatgcaagaaaggaatgctgcccgctgggcacggtggctcacacctgtaatcccagcaatttgggaggccaaggcagtcggatcacctgaagtcgggagttcgagactagcctgaccaacatgcagaaaccccatctttactaaaaatataaaattagctgggcgtgatggtgcatgcctgttatcccagctacttgggaagactgaggcaggagaatcacttgaacccaggaggcagaggttgcagtgagccaagatcaggccattgtacaccagcctgggcaacaagagcaaaactgtgtctcagaaaaaaagaagaaagaaaggaaggaaagaaggaaggaaggaaggaaggaaggaaggaaggaaggaaggaaggaaagaaggaaagaaaggagggaaggaagccacagggcacaatgtcataatccctttagaagctgagatttctaccgtgccatttgaggctccctgtggcattaggaagagacagaaaagggggtcagaatgtcaggctgatgaccgaccctgagactcagggtgtcctgtgattgttaccacaccctggtgtggccaggaaaggtacaggaggaaccagagaacacctggggcacaatgccccgcggaacggtgggctgaagaagctgctactctaatcagagtcccaccaagggttgaagagcctcaggaacagaggttagagttgccgctctggatccagaaccccaaccagtgagagcctgcctgaagacaggagaataaggactgggcaggtggaagaaggaagctgtagccacatggccgatggctgcatgactggcctcccatcttttttcccttccttactgccagagccctatggaatatttacctttccccattttttgaaggaagaattactgtctttaatgtttttcctttctcattcctcatcttttccttctcttgagcagagtatatggagggtggttgaattgacaccagcttgcagaatggtgagatggagtcaggatggaattgggaagtggagatcctggattttgaccacagaggccctgtgacctcacccttggcatttgggctgtgaccagctggggaagggaggctgcagctgtagtatgtaggatgactattagattaggtttgttttcagagacttgctttcatttctatctagtaaaccctacaagccagaaacttggatgccatccttgacaactcattctccctcactcataactcaaagaagtgtcaagatctgaaaactttatttcccaaagaactcatcagcttacctaccgcccccgagacttatggccactgccctaattcaggccttcctcacctaacccctgatggaaaaatcacctccttaactgccactctgcctttactctttccctgttcaatcttgtaaaaagcaaatttccagccaggcttggtagctcatgcctataatcccagcaatttgggagaccgaggcaggaggattgcttgaggccaggagttcgagatcagcctgtgcaatgtagtgagaccctgtctctacaaaaaaatttaaaaattagctaagcatggtggcacacacctgtagttccagctacttgggaggctgaggtgggaggattgcttgagcccaggaggcagagggtgcagtgagccatgattgcacccctgcactccaacctgggcgacagagcaagactttgtcaccctctcccccaaaaaagcaaatttccttctaacattaccaagtcattcccagcaaataagtttgtttagttcagcaaacaagacccctctaatcacctccaagccctctctagcagcagatcctaaggatctagagcttttgacattcccactccaacctgattggtgctcccattcaaaccatggtcctttctcatatcatgcctttgtttatactggcccaccagaagtgccatccatccacccactgacaacttaaccctttagaactcagctctggatatcacctccttctaaaggcctttcctgtcttccttcccaggactcaacgcaccccttcagcaagattaggtagccctcctatgggattccatcatagccctcgcagacctctccgctgttgcactgagcgtattgtattgtgagtgctggtttgtctgcggctctttcagtcctttccttgctgacaaggcccaggaattggtctgatccatcactacattcccagtccttagcaggatccagcctcccttctgctaaccagaatctgcttaaataccgtcctaggcttcctattgcccttaggataaagaagaaagttcctaactgagttcaccgaaaggtccttcaagacttgaccccaatctccctctctagcctcatgcttttccagcccccattctgcacccctcgacggcatttacattgacattgttcattgccctgaatgtctctcggctgtgtgttcctacactgcccttgactctccccattgtagcatttatggacttaattgtaaattgtttcatgtcttctccactaaattccatgaaaataggagccatgttcgtcttgcacactcttccatccatagtgcccagcactaacagactacttgacaatattaaagaaatcatgaaatcataacttcacaaactcttgttgtcatcaggccatctggggtgatctaaatgactaggaacaggaccatagggtaggacatgatatggagggacaggaccacccaaccctggcccccagcccaaactactctggcgtggaaatgctttattcctaggatgagagtagagggaaaagacggaggggttcccaggtggtgtaagtgcttcctaaggactgccctctggggtcttggggtattgcaggcttctcacaccccaccacccatggggccaaccgctcggccagccacactgtcctcagagtgttcccagcaaggtcagcagagacccagcaggtggaggaaataatgggagaaaagagttgaaggtgggagtggggaatgggttcacaatgcatttgttcagggatctttactcattctgtgatgaagagaaggtgacagttcactggctccctgggggtctaggagacttgggcttggctgaagagggacagacactcagggcagggctccatgccatcagcttatcagacagccacctttctccttgaagggattcttgtcctcagggatgcctttgagaaaaggatcgtttcctgcttgggcctccacgtactccttgatttcctttcccgctttggaaatctgcgagaacacaaaaaatgttttaggtccttgttactgtctctgggtccatgatttggtcagtgccagaaaaacaggcttctgggcagggcagagacaggggccaaagaggagaaagacacagaggacagacaggtgttcgggggtgtgagttccttgatctgacccacaacactgaccctgaccttcatgggctgcttggccagagccagcccagacacagggctggacacgctgagctctccaaggccctgaagctctctcctgtgctcagggaggctggcaccttcacagggtcaaccccagcctttctctgcatcctaccccatcccagaggtacctcctgctgcttctgcagccctggaacagtcccaccaccctttctggtcacttcctccttcccggggctcatcaggaacaggaagggaagagcagggacggggcgaggaggctcaccggaattcttgtgtttttcacttctttcttcagctgctccacctccatcttcaacaggtccttctcgctgagatcctgggccatcctgccctagacagacctgatcctggaaaggattcagcagccaggatcataaatctcatcagctcttccagctccctccacacctcgacttctagcatcttccctgccatatccctcagttcaggcccctcatcattcaacagatattcactccatccttgcatgccctgcttcttcaagagtctgggctcaggaggggaggaagctcccagtctgatgggggaggcaccatttttgcctttggattgtctgtctatggaggaaatttggattgtctgtctatagaggcatctgtctgtctgtctacagaggaaacagagaagaaagaaaaaggagtttctttcagagaggaagatctgggaagcaacgttattgtttcatatagtgactcagagttttcctctttctctccaggtccagcaagggagagtatacaataatggtcaagagaagggggtcttggctgggcgcggtggctcacccctataatcccagcactttgggaggccaaagtgggaggatcgcttgagcccaggagttcaagatcagcctggccaacatggcgaaacctcgtctctacaaaagatagaaaaattagccggggtgatggtgagtgcctataatcccagctactcgggaggctgagatatgagaattgcttgaacctgggaggcgaaggttgcagtgagctgagatcatgccactgcactccagcctgggtaacagagaacaactgtttcaaaaaataaaaaaagatcccaggcactgtggctcatgcctgtaatcccagcactttgggaggctgagacaggcagatcacctgaggttgagggttcgagactagcctcgccaacatggtgaaaccccatctctactaaaaatacaaaaattaggcaggcgtggtggcgggcacctgtaatcccagctactcagcgggctgaggcaggagaatcacttgaacccagaagacggaggttgcagtgagccgagatcacaccactgcactccagcttaggcgacaagagtgagactccatctcaaaaaaaaaaaaaagagagagagagagacaagggggtctggagcttaccagactccaactctgatctgctgcttccttactgctttctcagtgtggccttagggaagtcactcaacctctttgagtattagtttccccagctgcaaatgggtattaaaaaaacctaccacatgcaattattgtgggtactaagaaaataatgtctataaaatattataatatactacctggcacataatgaacacttaatacacttattattatcactaataatgctattgttattattatcactgcagggttatcaggaaggccttcctggtgcctagccccagtgatactaagagtagatcccagcccagtgcaacctcagcccctctcacctgccacagaagagcacactctccaagtcacttgtcctggactcaggtaagatagtgtttgagcctcctagttcttcatcagctgaaaatcttcagataaagcagatggcctggaaaccaaaatctctgatgcctaagctgatcataggctcaaagttctaagcccatcacccgcttgagccttcaagccctcactacagcagagcagagagacagacattctccccacaaaaacaaacgcgaaaacagaagccaccttttcaccaccttgccttgcgttagcctcacacttttggtgacctcactagcttagagcccgcagcgcttctatttctccacctccaccctgcagccccacttaccccgcttcgcctgctttctcctccttcccttcccacctctgagcatgctctgaggctgtccttcctcctgaggcaagtcctagaccggcccctaacctccttaaccaagatgctttgtgttgcccattggatccccacagtttcaccttacgaagttctcctagctcactcttcatccactcattcaataaaaatgtccttgctcaccaagctgtgccacttagtacttggggcgtggccacctctaatgcctctgttcaagcttctttgctgccatgcctccctctgagccctgaatgtgggttcctgagcacagaacccacatcctggtttttttcttgctgtccccccaggaccacccaagggctatgccatttaacagacattgagctcctgctctggttgacacccatccaatgacaagggacccgctggaggagcaaaagttaagggaccaatatggtcaatgggaggtcctcttattctcctgtctctaggatgacaggcttggtggtgggaggggcagagaggaggcccgccgtccatcctaacttccgtgctccaggacccagtccaactctcagctgggagctctaagaatttgaaatcagaacaggatcctggaggttgtctggtacaactgtcctgttaatgcgtgaaccacagcccatacctcctaggcaggctcagtgctctgtccaccgctgcttcctaaaaccgcaagttgatctgaaatttgaacctggtgcttctcaaatccaagtccttcctgttgtctaatctgagtccctcacattacgcttggtcaatttcatcttgtcctgccttcatctgcacagagcgtgtagggcagatcttcatcacacacaacccttcgcaggcttgctaacacccctctggcaacctctctggtcatgtcttcccggtgtccaaccctgacccctcttgctgccgcatcggctgttttctatttttgctgtgctgctgccccacagtcctctggtatgacggatctccatatcctatccaccctccactcccctgtcccttggtgactcatccctgagcttcccaaggaagcccccaccctctgccctttcctcccgccttccatgagtggaaaatccacctccgccccctatagcaggccagcccccttcctccccagtctccgaccccatcccccagccgaccagtttcctctccaggaccagggagcaatcacagctgccccgaccttggcttcctctgctgggtgggattgggggctgggcccccaaatgggcccctggcttcccccttcctctgggcaggggacagagagacacaggctcggggagcaggactgacttcctcttgtcccggaatgagcatgcctgccctttgcaagcaggtttgggtctcacgcagaggaaaccaaaagcaataagagggagggaaggcagagcaaccaatcaagggcagggtgagactcaaaacgagcgggctccctggggagccagacagaggctgggggtgatggcggagctacagcagctgcaggagtttgagatccccactggccgggaggctctgaggggcaaccacagtgccctgctgcgggtcgctgactactgcgaggacaactatgtgcaggtaggtagagcgggcggaagcctgacaccccagcccccggaggggggaccctgagccctgccccaagtggggccctgggacccatcctgacagtgcttgtcctgggccttggctgagaaatcctcccattccaggcttcggcttcatcccagaccccaatacttaaccctgaccccatactacccaagcccccactgtgccccttctgtctctcagagcctcagagatgcctgggacagacagtgcgattccatcctgttctcaggtgtcacctcaggttcatccttctgagttcccacgggtcaatccagagacccaaagcctccgtcctcacacagatgctggcgatcattctatttccaggccggctctgggtgaggcttcagaagaacttcccaaacagcacagtgaacctgagatggacaagggaaaggggctctttccctgagtttgggaaagggagagtggggataaggcagagtaggctgggctaaagagaggggatctcatgcagaggcagggggatggcccacataactgctgggagcaggcttctagcaacagatagggaggtggcattgtagaacaggttttaaattgtgtggttgtcctggggctgagaacatagattcctggattcagggaggagaggcaaggcaactgagccatgatggaaatcacttctgttatttcattaatctgtacaactaccttgtgagacatgtattataattcctattttacagatgtggaaacagtagctcagggaggtgaggtgacttgtctaaggccacacagctccaaacagcagagccaggcattccttttttttcgctcttgttgtccaggctggagtgcaatggctcgatcttggctcactacaacctccgccttccgggttcaagaaattctcctgcctcagcctcctgagtagctggaattacaggcatgcaccaccatgcccgactaattttatatttttagtagagacagggtttcgccatgttggtaaggctggtctcgaactcctgacacctcaggtgatccacccgccttggcctcccaaagttctgggattacaggagtgagccactgtgcccagccagcctttttttttttttgacggggtctcctctgtcacccaggctggagtgctgtggcatgatcatagctcacgtagcttcactgaagccttgaactcctaggttcaagcaatcctcccacctcagccttctgagtagctggggctacaggtgcatgccaccatgcctggctaattttttaaatttttttgtaaagacagggtctccatatgtagcccaggctggtcttgaactcctggcctcaagtgatctgcccaccttggcctcccaaagtgctgggattacaggcataagccaccacatttgggcttccctgaatcctgatgccaagctctttcctctccatctttctgcctccctacacgctatgtgactttacgacagtttattagcactctctgtccccggtttcctctgctccctgaagagctgcagactaaccttgttaccccttgggcaaaactttatttttctaacctgtactaaccaaactatgagaacaggcacagggaccttgtagcatagtaagaatgttgaaaaaagaagtaaatgagtaacaagtgctcatgggaaatggcagattaaagacagtcagtaatgacagcagttaaaatgctctggacccttcttttgggccaggcatgttaccagcatggcctcccttcatcctcatctgaagtccggtgaggcgagtcccatgcccacttcacagtgaggaagctgaggtttggaaaggttaagtcactttcccagaagtctcctagctagtgtcagagcctgaattcaaacgcagaaatctgattccagagcccactccctatgccactaactgaaaatgctactctgggtatcatttcggtctgtgtagatgttgagtgaccacctgcagatgagacagaatgaggcttgcaaaccagctcattctcctagcatggaaaggcatgtttcctctatggacaaggatccaagcagtcctttccattccttccataacttctgcacacctcaaagagcttccacagggctctcatttgcacacacagtgtgcacacacaatttggggtcgcaaagacctaagtcaaatttccagttctgccacctaccaactacaggaactgtggcaagtttctcctctgattctcatgcctgccttcagtggtggctccatggattcaatataaaaatgtatcaaagcattcagcctagtgccagccccttcagaagagcaggataaatggcagctcttacaatgaccatcactaccattcattggaaggatggataataagaatcagttctagggaggagaagctgtccttgcaaaaatatgcagggcatgagaagccctgacccaagttggaatccttggactcctgcttccttcgtgcagagtactaactactagaacacacaacttgttacctttcctggcctttctgaggatctttatctaggcaaatgcctaggaaggttctggatctcagaactgctgttacctaaggcctgattcccctaccctccaaccccacctgcagcccctctctccccacaccacccagatgctaggaaacccatggggtattagggaaggcagaccagggtcacctgcagagttctcagccagggttgactgagtttacagacacggtaatttgcatgatgaacaagcactcagccgcagagatggatctcagacacctgtccctgcggacctaactttgggctaagagcaaagccaggggtcggtaggtgttcaggctgcagatgcccagagctgggcccaagcagacacttttcctgtttgggccaacaattccacatgttcgtttggggaggaaactgtacagaagaaggcaggcaagctaagaaatctgggtggagatgaaggagcagtcactgctcagttctgggcctgtttcctcatttagtaaaggaaggtcctgaactaaatcaaaatctgctctcctgtctggtgttaatatcctgggttgatttctttgcctattcaatcttcttggtgacctatgctgaggagatgtaagttttggtgcatatgctaatgagatgtaaatgacatgcaaatgagcatctctttcctgctgttggaaaagaaagacaaggaggagagagccatcgcatgggctgcccagaaggttctggctcaggctccattagaggctcccaggtgtctcagaccttgctctgagagtttgtaggtctgttctccattgacaggccctgaggggcacccgagggctcaagcaaggggaccccagtgtgcagccttgcctgttggcccactggccctactccacattcaccctggacttgccccctacctgccttagaaaggtacaggctagagtatggcaactccatgacccgaccagagatgaggaagctgcccggggaaccaaaagaccggagaagttttgccctagcccccactgcctgatctgggaccaacaaaaaaaaatttcttggccaggcgcggtggctcacgcctgtaatcccagcactttgggaggccaaggcaggcagatcacctgaggtcaggagttgaagatcagcctgaccagcatggagaaaccgcatctctactaaaaatacaaaaaattagctgggcgtggtggtgcatgcctgtaatcccagctactcggaaggctgaggcaggagaatcgcttgaacccaggaggcggaggttggggtgagctgagattgtgccattgcactccagcctgggcaacaagagcaaaactctgtctcgaaaaacaaacaaaaaaaacttcttgccttcagccactgcctgcttactcctcctgcactgactggcagtgtgaccctggccagtgcctggcacagtgcctagaatacagtgggaatgtgcccagagaatgtttgggttcccattcgacctgctaattaactcacgagtgcatatttatgaagaatcttttgcgtgttgggtgtgattccatgacgggatacaggatgaaacagacaagctccctgctctcatgacacttccatttaaggcaagggggcgtagataacgaaaaaaatacatagagaatgtttgatactgctaaataccatgaagaaaagagaacaaggtaaatatgataaagaggcagtgaaggcgtgggctgggggaaatcttagtgtggtgaaggaaggtgtctctgagaagctgaggcctgctaataaggattctgaaaataagtacagcacatgccaaggccccgaggcagaaacagttcagcttgttcaggaacagaagcccaatggccaatgtggctgaaggggagtgtgtgagagggggagtggtgaagttggattaaaggggatgaaggtgaagagaaaggcaggagccagacctggaggggctgtacgtaggccacggttagaagcttgaattttatcctcagggtattggaaagctattagagggaatgaatgaataaagtccctctgttctgggcctcagtttccttatttgagttcccagacaccaatctgcagactggagctaaacagtcacatggaaagcttttttttttggtttgattttgagacagggtctcactctgtcacgcaggctggagtgcagtgatgtgattttggctcactgcaacctccgcctcccgggttcaagtgattctcatgcctcagcctcctgagtagctgggattacaggcaggcaccaccatgcctggctaatttttgtatttttagtagagacgaggttttgccattgtagccaggctggtctcaaactcccgacctcaagtgatttgcccgcctgggcctcccaaagtagtgggattacaggtgtaagccaccgtgcctgacatggtttgttgtgtttaaaaatgtcggctgggcacggtggctcacgcctgtaatcccagcagtttgggaggctgaggcaggcaaatcacctgaggtcgggagtttgagaccagcctgactaacatggagaaaccctgtctctactaaaaaaaaaaaattacaaaataagctgggcgtggtggcacatgcttgtaatcccaactacttgggaggctgaggcaggagaatcgcttgaactcggaaggcggaggttgtggtgagccgagatcgcaccactgcactccagcctgggcaacaagagtgaaactccatctcagaaaaaaaaaaaaaaaagaatgtctgctctagccagtgttgccttcctctttcctttctactattcacccccactccaacccctaaaaggacagcctgttactgaagtcttcaggagggttgtactatcatctgtactcagtcctcagcttaactatttgagaatgggtatctttccctccctttgcatccattccccaaggctgcagattcacttttttaaagtgaatttaaagtgatgttgtagcaagttcctcttgctacatcattctgctgggagccacctcaaacatctaagggttgctgctctctcccaatccagcccctactttccctatatcctctcccatcccaccccagccagccaaggacccagtggaagatgctggcccttaggccagggctgtgtgtatttcaggccacagacaagcggaaggcgctggaggagaccatggccttcactacccaggcactggccagcgtggcctaccaggtgggcaacctggccgggcacactctgcgcatgttggacctgcagggggccgccctgcggcaggtggaagcccgtgtaagcacgctgggccaggtaaggggcgtggggcgtgggaaggcatcttgtgtcaggcctcaactcttcagcccgactcagacattttctacatcaaaagttccttcctgctttcctccatgtccaaatgcccaactctacagcagaaggttggcacttcccaagctttttggacctccttatctctgtggctacgctacaaattccccgaaggcagagctttttctttctcggaattatatcctggacatgagaaagtgttatctaccaatcacagcagcgccctatacaggaaagaagcaaatgaaccctgtttgcatctaaatacaagcagtgccctcataaatatcccagacccagggtgctagcttgacaaggtcatcttcagccctggaagcacagccaccactatacagtatacaccctccaccccgccacagtgttctagcgcacacaccctcctccttccttcctggatccttgaccgaggaattgccccataaagcacatgcacagacccagccacacatttggcctggcctgtacatcacccacatgttcagtgggtggggtgtgtcttttcctcccccgccgcagaccagagttcccaccctttcgaactgtaggctttctccatggaacattctgagaggaagtcaatttacttatttgtcccccaaaggggagagctgatccagccaccattctctgccacctccatattctccccctctgctccgaagtcagccgggtgcttgtctcctcccagcatccctagggatgttgtgttttctcttttcctcctgttcctgcacagctaataataacccatactctctttccaccaggaagttgctccaaagtggctccatcctttcctgctacttttcccaattgctatgtagcctggtggggggcggggggcggggggcagggccctctttttctagacctggctgcctcccccccccagcccagtctttatcttcttcctccttagggggaagggtgctggacacagaccacccctctctgtcaccttgaaccctgtcatgcagatggtgaacatgcatatggagaaggtggcccgaagggagatcggcaccttagccactgtccagcggctgccccccggccagaaggtcatcgccccagagaacctaccccctctcacgccctactgcaggagacccctcaactttggctgcctggacgacattggccatgggatcaaggtagagagaggggccctcctctttccctccaacccaccctctcgtgccttgtggcccctttccctccagaaccccagttctgcaagttttgtccccacttgccactcctttctttccccgctccctgaaaccaccactctgagctcttctccctctccctagattttgtaatccctccctccaaaactggtctgtaccatcctcggaggatctgctgagtgtgagatcctgagcacccctcgcccccccgccctgcccctgtgggcaccgggcgtgtgggaaggggaagagggggaagggaggatgtcagggtgtgcatgagaatggctcccagccacatgagaacagcaacttcctctgtctgggggtttgaggtcactgcactgagcagtcaccccagagctgctgttggtgagaagaagcggggatacagccacacaaaggggacttggtgaagggaggggagcatggcgctggcgtcttctcagcctatgtccttctgcgaggtcagaaagggcacgcactcacacccgtcccaccttcaattcctgtctccacaccttaacatttctgtatcaaaatgagccccttgatatccttaacttatcagccccccttaaaggggaaacgacattctccccttcaaccaccaggcctccttcccaccagtagttctctgttgtccaacttatattttttttttttgagatggagtttcgctcttgttgtccaggttggagtgcaatggcacgatcttggctcactgcaacttccgcctcccaggttcaagtgattctcctgcctcagcctcccaagtagctgggattacaggcgcccgccaccatgcccggctaatttttttttttttttttttgtatttttagtagagatagggtttctccatggtggccaggctggtcttgaactcctgaactcaggtgatcctcttgcctgagccacccaaagttctgggattacaggtgtgagccaccactcgcggcccaacttatattctttgtgcttcagctcaaatctcttttgtcttgcccctggtgaagcccatgaggtaacactgtacccaccccttggggaagtcccattggtaacagcagttccctctttcatgtaggcgtgcaccctgtcatttgcgcatcccctctaagtggcctgggtcttgctcctctctgccctaactccccaaagccagttccacaaatcttcgaaaatgaaaggtgggacacttctaagtgtgatgtgtcctctcctttctccgccccctcctcagcccgatcaaagttagggaccaccaagccagggccccagcttcctgggctctgagatggtctgggggagggacaggggtgctgggcccactcaacccgctgtggctgtgcagaggaagtggctgtgggctttggtagaactgagtcccagaacccaggcaatgacaagggggtggggtgggggaagtgtaggagaggggcctgagaagtggaagtgggaactggctatgccgggctctccctcccggttcccgtccgcccctcctccatttcctcttggggatgagggtggagggaggcccctcaccccaaatgtaagccctacctcccgctccctcgcaggacctcagcacgcagctgtcaagaacaggcaccctgtctcgaaagagcatcaaggcccctgccacacccgcctccgccaccttggggtgaggcctcgccgcgacgccaactagcctagccctgccccgcgcgaccctgaaactctcctcccccagcctcgccacccacccctggcgcccccgggtgctcaggccgtcatgctggatgcctggcgccaaacctccccctcggccacctgcccttcctgctcgcacccgacccctgctggccagaagccttcctccttcctcctaatacccactccctgccccccgccaggagaccaccccggattcccgagccagtgcacctgccggtggtgcccgacggcagactctccgccgcctcctctgcgtcttccctggcctcggccgggtgagacctacaagcccacgtgggtgggtggggggtgggaagtggcttttgagaggggccacctgccagtggtcatagtgactcctgggcttgaaaggacccagttactcctgggtcacacgtgcagggctggggtcaggattggaggggtggggccagttggggatgctgcattagggaaggcgtgtccgccaaccgggctctctggtgttcagcagcgccgaaggtgtcggtggggcccccacgcccaaggggcaggcagcacctccagccccacctctccccagctccttggacccacctcctccaccagcagccgtcgaggtgttccagcggcctcccacgctggaggagttgtccccacccccaccgggtaaggaggtccaccctcttcttcccaaccgtggggtcgcttttctgcctcctgccactccccagcccacctctcttggatctgccccggccagcctcagtgaatgcctcctccaaggagcgcagcacaggggcgaaaggagacagaggaagtgaactaacataacttagcgcctgctgtataccagaccctgtgttcgaagattctcatccattttctcatttgaacttaatcctggccgggcgcggtggctcacccctgtaatcccagcagtttgggtggccgaggcgcgcggatcacctgaggtcgggagttcgagaccagcctgaccaaaatggagaaatccggtctctactaaaaatacaaaattgaccgggcgtggtggcgcaagcctgtaataccagctactcggaaggctgaggcaggagaatcgcttgaacctgggaggcggagtttgcagtgagccgagatcgcgccattgcactccagcctgggcaacaagagcgaaactccatctcaaaataataataataataataataataataataataataataataataaacttaatcctaagggccaggcggggtggctcacggccgtaatcccggcactttggggggctgtggagggcggatcacttgaggtcaggagtttgagaccaacctggccaacatgactaaaaatacaaaaattagcctggcgtggtggtgcgtgcctgtaattccagctactcaggaggctgaggcaggaggatcacttgaacccaggaggcagaggctgcagtgagccgagatcaccacactgcactccagcctgggtgacagagggagattccctctcaaaaaaataaaataaaggccgggtgtggtggctcacgcctgtaatcccagcactttgggaggctgaggtgggcggatcacgaggtcaggagatcgagaccatcctggctgacacagtgaaaccctgtctctactaaaaatacaaaaaaattagccgggtgtggtggcgggcgcctgtagtcccagctactcgggaggctgaggcaggagaatggcgtgaacccgggaggtggggcttgcagtgagccgagatcgtgccactgcaatccagtctgggcgacacagcgagactcggtctcaaaaaaaaataaaacaaaataaacttaatcctgagagggtctttaccactctccgttaacagatgaagccactgacgctgaggttcagtgacttgcccaagagccacccagctaataagaggcagagtctgaccgtcctctactgctggatctttcagggtttactgagcacttaactatgtgctagcagcactgtgggaagaccaggacaggagagggctggaggaagattgcatgaaatgggtgcattctttttttcttttgagatggagtctcactctgtcatccaggctggatggagtgtgttggcaagatctcagctcactgcaacctccacctcctgggttaagccattctcctgcctcagtctcccgagtagctggaattacaggcgtgtgccaccatgcccggctaatttttgtatttttagtagagacagggtttcaccatgttggccaggctggtctcgaactcctggcctcaggtgatctgcccgccttggcctcccaacgtgcctcgctgagatgggtggattctggggtccagctcttgagcagttccctgacacactgaaggagcttcctgtgccacacttacagcctttctgcttttcccccaagacgaagagctgcccctgccactggacctgcctcctcctccacccctggatggagatgaattggggctgcctccacccccaccaggatttgggcctgatgagcccagctgggtgcctgcctcatacttggagaaaggtacctgacttctgggactgaggggcaccggatcccacttcctctgttgccctgatccccattctcctccctctgcaaaggtgtgaatctatcccccgggccccccacacaatttttctgacgaactgacagaactggggagagggcagctggcctggtattaaatattaactaagctggggaggggtcctgaaggcttgcaagaaggcccccaagatggcccctagagtctagtacttgagaccgtgcatccccatggtggtggggggtgagggggagagggcaagaggcattatctcacggcaccctcttctcttgccctgcagtggtgacactgtacccatacaccagccagaaggacaatgagctctccttctctgagggcactgtcatctgtgtcactcgccgctactccgatggctggtgcgagggcgtcagctcagaggggactggattcttccctgggaactatgtggagcccagctgctgacagcccagggctctctgggcagctgatgtctgcactgagtgggtttcatgagccccaagccaaaaccagctccagtcacagctggactgggtctgcccacctcttgggctgtgagctgtgttctgtccttcctcccatcggagggagaaggggtcctggggagagagaatttatccagaggcctgctgcagatggggaagagctggaaaccaagaagtttgtcaacagaggacccctactccatgcaggacagggtctcctgctgcaagtcccaactttgaataaaacagatgatgtcctgtgactgccccacagagataaggggccaggagggattgaaaggcatcccagttctaaggctgctgctaattacagcccccaacctccaacccaccagctgacctagaagcagcatcttcccatttcctcagtacccacaaagtgcagcccacattggaccccagacacccctctgcagccattgactgcaacttgttcttttgcccattgcttgctgtgtgtgtggtgtgttcatatgtggctgggcacttgcccaagagtgggaacgatctccatgacttaagcggggctctccgagagcacctcactgtcaactctgagactgtcgcgagagagatctcagtcatttcttcccccttcacctcctttatagttgtaaaacaccagaggaaggaggggcttgggtttcgctggttctgcttaaaaacatggctttctgttccatggggggtgggggggatgcgtggaaggcccagcccgcgagggtgactttggtgaagtccctggtctcttgctgcatagacgaggctgggatgcaaggagacaccgtcactctctgcgaggttactggctgtccggacccgagccggacggtgcgctacctcgtaccaccaccaggaggcgattgttcctctggcttttcctttgggggtgctagaagggagtgcgggggtcgggaggcaagagagtgtggacagcacagaaatagtgtggggtcgcggtgggtgaagcaagatcgcaaaggcctggggccataggtggagaccctcttctgcctctgtggggagttcttgcggccaggagaatttcaggatcctgggttccctccacagtagactggaggaggggcggtcacgcagcccgaggcaacaagttacagcggcgggagatgttccttctctcacctgccgggggggccccttcctcccagttgggaggaccaggaaatactgctgccttccaaggtttgcgcgccaccccgcgatgggtcagactccagaactcaaccgtgcacagtggagtgggggaggcagccgaggtgggttaactgaatagatagggacggctctgagcccccttccccaagcccccaaatacgagattccagaaattcccagagggacataacaaagccaaagggaaaagggagtagtaaagctgtctttgccgaatctcccttccccgccccctccgccgttggcccgggtacccccctgcaggcggccagactcagcacgacttcagcacctgttgcaggtggaggcgcacatctgcagccgtttcccagggcaccacgctggcgcggaacgagctgggctcggccttctgggcctcctgaatgaggcggtgcatggggtagccgcggcgcgggaaggccacgtcgccgcccgccagcagccccatggggcagaagtcgttggcgccgtcgcccacgtagaagaggcgctcgaagtgcacgccgtcgtgggcccgctcgcgcaggtagtcgctgagcaccttgtgcttgcacatgttggcggggcagcgcgcgcagctgtgtgtgtggaacggccgcagagccagcagtccccgcgcatccggccccgacgggttgctgaggatgcggcggaacaggctgtggtggccggcggcgcgcagcgagctctccacgccaaaggtgttggcatcggagatgagaatcacctcgaagcaggcgccctgttttgccacaaactgcagcaggtcgctcatgcctggcgacaaagggatggcttcgtagatggcgctcaggtcccgcggccgcacgccctgctcgcccaggtacttgaagacgcgctgcatgtactcgttgtagaagccctcgcggtaggtggctcgcaggctctccgggagccgctggcccggcgcggcgcgcacgatcgaatcgtcgctgttttcgtccacgatagtctcgtcgaagtcgaaggtcaggaggaagcgcggcgcgccctgcgcggccatcctgccgtcctgggagcaggggggagagcagcaggaggaggaggaggagggggcaagcgagagggggcgcggcaggagcccgcccgggagaggctggttagcgggccacggccagaggcgctggcacatccaacacctgaggaggacccaagtctggttaagctgggaggagtacccaatgccaccacctctatccccagccttccctgactactccagtggcacctcttagttaactgcagtggggtttatgcccagagggcttctcggcacctgtttcccctactctcatcgagggccaatggggcttaacaagggtcaaaagaagggaagagcagcttccaaggatcaccactttggggaggtttctggactggactgttttggagacttccagtggcccctgttgttggtgtggatcaagaaagggtggtgggaactctcccctccctcattccctgaggtagagtcaagggaaaccaaccacccatccacccaactggaccagtttcctcattctccttttgggccatggggaatctatggctctctgggagctgcttctagcccaatggcactgaacaggggtctagggatggggcacagcttcttcggggagttttagggccctgtgctgacagctcatcactaatcacttgccaattccccaggaggaacgtgtcagcaggtggggtttctgccagagtccgaagcaagcgggcagcaggagaagcagtggggcttggggaggtaagagcctcccgcaccaggccatgacacacctgggagacaggtaagggagaagagaagagagcagcagtggctgaaaaggcagaggagtgggaggggccaggtagtggggacttggggggtgtggaggagagggctgagaggaggtcattctaggggatcttggagacagactgctggacaggaagacagagtaggggtagggataagggagttccaggaagcggagaccttgggccagattcttgttggaggggagggtggtaggcagcatgggagaggacagaggacaagaggggacatgtctgggcacaaggaaaggcaagcaatggaggcagcaagagcccttggcagcaagtttccatcacctttgcctgccagtgtgtgagaggcgcagaggggcagtgagcaggtgacatgcagcttccagatacccacacactgcttttctcccgcccagctcccaccccagttaattgagatgggattgtttctctttctggtttcttcctaagcccctctctcatattcctggtgtgcttatggcctggcacaccttgtgaaacagaaacccaagctcctcatttcggagctgggatttcgattggctatctgcctccctaaccaagctgtcccttccacctcatccctagagtcaccctctggtctcatcaacatccagtgggcatttcagtggcccaggatccttcaaattgcagatataaagcatcaggaccccacacctgggatggaagcttctaggaattaatgaagccccagtagaggtgagggtaaacctaaaacgggctggatagggcctctcccaaggccctatggaaaggtgatgggaaactgggggctgaggcctcatcctaggagacccctggagggacccacttaccctagataggcagcggaggccagaaactggaaaacagccactcattgtcggtgcattaccgtgagcaccacctgtagggactctgttggcctccagccgtcgtcacacgttcctgacaaccacaaaagttcatttgagggtgcccagtcagctgactttgcttccaccaggaatacccacctggccctggtccttctgctgagctacaggaggcattcccagggtcttagcaaaaacaacccctcaaataggcccagtgcctacaactctagagaggtttcagatggtattggagacccagagaagttaactgactttcccaaaagtcacccactgtaaatggcagacagatctcaaacccacatctgagcctgagtccagtgttttttctctagtatcatcattgtcccttaaatgtgtttgacacatcatagtttacaaatcaccttcactcatattctctcactactcatcagtcatgaattcagccaatgagaagggctcagagaggttaactaaccagccacgctgtttacatggggcatagactgcttcatgaacgcttgactgcagctttgccttcctcatgccctcaaaaaggaaggagctgaccaaagcttactataccatagctggggtctgggacccccagccaggtctcacagatgatctgggaatggcctccctgttgctctcaggggtccggcagtcacacagaagagtcaggttgaaatcttggcaagactttggtgtggctttgggaactgggtttaacctcttggggacttcaccaagacagtggcaaaggacaccacctacagcttccagtgcctctctactctcccacctgtgctcctggggttgaatgagaccagaagcagctgggacaagatttggaaagataaagagagccaggagacaagaccttgagagaagcagaggtctggctggctgctgccctctggtggtgacaatggtgacactgtaaacccctctgtcaaggtgacactctcccctgactattcaggagggagaagcaatcgccccaggacagagacggggacatcccaggagcagggtacaggctctagcaatatccatcttgcggtactccctccctcacaacaaccagaccacacatgtgttaaatccttctgcagggatggaatgcggctctcagttttttccaagaacttctaatctaggaattaggagaggtggtcaaagctgaatgaagcagtgggcaaagagagggtgagggatgggagagaagacaggtcaaggaggaggtgggagagaaggggagggttgcatgagggacaaggaaatggcatgggttggagctgtccccagtccctatctggagggacttccaaccttccagattcccagctgatatcacatgtccaacctcagccaggcgatttataagagaaaggtcagggatgccactccccttgtaaaagcaaacatgcagcatctggagaagcaaggggtagatacaaagattccaaggggtcaccaacagctacccagagaccagctttcatcctatagagaagggtctcattactttgcccttccttccttcctgtctctctccttccttccttccttccttccttccttccttccttcctttccttcctccttccttccttccttccttccttccttttttctattctattgatcattaattatggtcaaaacttctcattttttcagccaggcagggtggcttaagcctgtaatcccaacactttgggaggcgaggcaggcagatcacttaagtctaggagtttgagaccagactgggtgacatggcaaaaccctgtctctttaaaaacaaaaattaaggccgggcgtggtggctcatgcctgtaatcccagcactttgggaggccgaggcaggcgaatcacgaggtcagaagatcgagaccatcctggctaacatggtgaaaccctgtctctactaaaaatacaaaaaattagctgggtgtggtggcgggcgcctgtagtcccagctactcgggaggctgaggcaggagaatggcgtgaacccgggaggcggaacttgcagtgagccgagattgcgccattgcattccagcctgggcgacagcgagactccgtctcaaaaaaaaaaaaaaaaaaaaaaattagctgggtatggtagcttgtgcccatagtcccagctacttgggaggctgaggcacgaggatcacttaaacccaggagacagaggttgcagtgagctgtaatggtaccactgcactccagcctgggtgacagagggagtaaccccatccccaacacacacacacacacacacacacacacaactcctcatttctcatcataaaatacagttacatttttctgctaataatagtatctaggggattcagttaaacacttattgtttggtgagttgcccttgtttctttcagtctccaaggcagaaagtcaggcatcttgggtttcttccccagaaaactgagaaggccatgctgtgacacctcgtccccaccccacaggagtcagaggaaccccttccccagttggaatttggctcctgtgatgctccaaaaggtctctcacctctgacacctttgttctgagtcatcaaatccttttgtggtcaccaaacagagtccctcagagtagggggcaggatctgagcttctctcacaggccagagcagggagaagggcttctggggggttgcagggagtccatattctagtcccacctaaaagcagtgcctgcctccttaattctgcaccgggtcacagatccctgcctgcttctcccgcctttcacacaaatgctcttagattaaatctgtgggaagggggtgggagggaaacaggcccctctctgatacaggccctaagtttcaaattcccctcttactgggcagatggagttcctagaaaagttttgggatagttttccaaaggaaatgtgcagaatgaggatggggaggcgaggactccagaaagaccacagtaacaagccctctctgtccaaaaacaagtctccttgtatcaatcactagaaatcagatccaacaactaagctagaattccctccctttcccagacagtgctcccaaacatgaccatcttccttgctcaccacgcccgagcagcagataggaaaaacagaggcccagagaggtcaggctaacatcctaggggtcacacagcatcggaaccgcgattagaactcaggagtctctggcgcctcttgggaaaattgcagctggagctccccccttggccctggagactccagtgggcagggagcttgcggtcctgaccagctggcggtggtggccctgcgccctggtgccagtgaggcgtctgggtctagcagtcacctctgggcactccctgggtgggaggacaagctgggaggggatcctaggggcaggggcaggggcagggaggtggcagctgccggtagggttgggggagagatatttttagaggtgactaggaagccagcactctggcgcacccccggctggcgggcgctgggctccaatgcgggcggggggtgcgcggctcggggaggggtattgtgggtggcagggagcaaggggacaccaattccttggctttgtcagagtcggggacggagggataccccagcactatgttcctgggtaggagagagaaggggactcactcctgagctccagaactcccccagtgccacgcgcgtgaaggagcgccttcaaactccacagcccccaccccgcgccgggaccccagccctcccctatctcccggagcccaggactcacgtgggggcggcggcagcagaggtctgtcccggctgagtttggagtgtaagaagtggggaagggggctagctgaggtattggggcgcaggatggagcaaggggtgcttacgggaattggaggggacgcggtgtcttatccacccccggatttctgggctccggctcacgagtccctccagtcccgagggactgaggatgatgtgcgtctgagccgtcccctccacttgcccctcatcccccccgggcagccgccgcgtcccctttaaatgcccgggagccggagccggagccggagccgcggccggcgctgcggctgctgcagcagcggagcccaccgcagtccccaacgtcacaagcgactgtccaatcgcagcggtgccggcgcacatcaaaggggcgggccgcccgaggccacgcctccctcctgccccggaggctccgggagcgccagctaaggtgggattaggctctcggggaaagggtagcagggtggggatggagcgctgcccttccgaggaacgtgggtgggggcaccctcactagagcggctgtggacatacgctaaatccctgcctacacacccaaaattgctagggctgtggactttctcatccgccgcctccagggcttcggttcttgagatttgcagaagtgcacctccacctcctgcccattccgctgtcgcgtcctaaacccagtgggaggcacgggatgacccagccctcgggacccttttccccagattataggttactgaggattgcgggggttggcgggaggaatgactccctacccccacccccgcccgtaaagttggtggagcgggtggtgacagacagtttgccccttttgcagatggccctataaataaaaaacgcactttctcccctgcttcctaagagtgtgtttctcccccaccctaatctcctccttttggccctcaaagcctgctagtgaagagaaggagagaagatagtgtttcgagaggaaagacgtgaaactagtatttactgagaacatactatgaaccgggcattcgagctaggtcgctgcgtttatggctgaatgttcacaacactcgagaaattatttgcctagccgttcaaacccggacacacctgactccattgggtcacaaaggggtgtgtaggtggggagaatgcactttgggaggccaaggtgggaggatcgcttgagccccggagttcgagaccagcctggacaacatagggagaccccatctctacaaaaaattaagaaattagctaggcattgtggcatgtacctgtagtcccagctctactcgggaggctgaggtgggaggatagcttgagcctgggaggtgaaggctgcagtaaactgtgatcacaccaccacactctagcctaggcgaaagagtgagaccctgtctcaaaacaaaacaaaataaaacaacaacaaaaaagagtgagcttgtctggggtcacccagctggtagggctggggtatcatactgtccctctcattgtctgtcatccctcctctcctgtaagcaacatgaggaccatgtttgtcttattgatgtacccccatcccctagcataggcagcctggctggtgcacagtgggccttatagatgtttgttgagtgaggccaggtgcagtggctcatgcctgtaatctcagcactttgggaggctgaggcgggtggatcattagaggtcaggagtttgagaccagcctggccaacatggtgaaaccccatcactactaaaaatagaaaaaaaaaaaaaatagccaggcatggtggcatgcactggtaatcccagctactcgggaggctgaggcaggagaatcacttgaacccgggaggcagaggttgcagtgagccaagatcatgctgcactccagcctgggcgacagagcaacactccatctcaaaaaaaaaaaaaaaaaaaaaaaaaaagatgttgaatgaaacaagtcccctgctgtgtttagctctaggttagtgctccatttgtgttccttcactttgtcttcacaataacagattgttccagtgttatccccatgttattttattttatttatttttgagacagagtctcgctgtgtctcccaggctggagtgcagtggcgtgatctcggctcactgcaacctctgcctcttgggttcaagcgattctcctgcctcagtctcccaagtagctgggattacgggcacctgctcccatgcccagctaatttttgtgtttttagtagagacggggttttaccatgttggccaggctggtcttgaactcctgacctcaggtgttcaacactccttggcctaccaaaatgttgggatgttgggattacaggtgtgagccactgtgtccagcctatccatcccctccccctcctctttttttttttttttttttttgagatggagttttgctcttgttgcccaggctggagtgcaatggcgcgatctccggctcaccacaacctcggcctccctggttcaaatgattctcctgcctcggcctccggaatagctgggattacaggcatgtgccaccacacccagttaattttgtatttttagtacatgttggtcaggttggtttcaaactcacagcctcaggtgatccacccaccttggcctcccaaagtgctgggattacaggcgtgagccaccacacccagtttatccatccccattttataaagaaattgagactcagagataaaaggacttgttcaaggtcacacaagtgccctggaggcaactg

SEQ ID NO: 2961 - DNA, 2108 bp, Homo sapiens
tcctatccaccctccactcccctgtcccttggtgactcatccctgagcttcccaaggaagcccccaccctctgccctttcctcccgccttccatgagtggaaaatccacctccgccccctatagcaggccagcccccttcctccccagtctccgaccccatcccccagccgaccagtttcctctccaggaccagggagcaatcacagctgccccgaccttggcttcctctgctgggtgggattgggggctgggcccccaaatgggcccctggcttcccccttcctctgggcaggggacagagagacacaggctcggggagcaggactgacttcctcttgtcccggaatgagcatgcctgccctttgcaagcaggtttgggtctcacgcagaggaaaccaaaagcaataagagggagggaaggcagagcaaccaatcaagggcagggtgagactcaaaacgagcgggctccctggggagccagacagaggctgggggtgatggcggagctacagcagctgcaggagtttgagatccccactggccgggaggctctgaggggcaaccacagtgccctgctgcgggtcgctgactactgcgaggacaactatgtgcaggccacagacaagcggaaggcgctggaggagaccatggccttcactacccaggcactggccagcgtggcctaccaggtgggcaacctggccgggcacactctgcgcatgttggacctgcagggggccgccctgcggcaggtggaagcccgtgtaagcacgctgggccagatggtgaacatgcatatggagaaggtggcccgaagggagatcggcaccttagccactgtccagcggctgccccccggccagaaggtcatcgccccagagaacctaccccctctcacgccctactgcaggagacccctcaactttggctgcctggacgacattggccatgggatcaaggacctcagcacgcagctgtcaagaacaggcaccctgtctcgaaagagcatcaaggcccctgccacacccgcctccgccaccttggggagaccaccccggattcccgagccagtgcacctgccggtggtgcccgacggcagactctccgccgcctcctctgcgtcttccctggcctcggccggcagcgccgaaggtgtcggtggggcccccacgcccaaggggcaggcagcacctccagccccacctctccccagctccttggacccacctcctccaccagcagccgtcgaggtgttccagcggcctcccacgctggaggagttgtccccacccccaccggacgaagagctgcccctgccactggacctgcctcctcctccacccctggatggagatgaattggggctgcctccacccccaccaggatttgggcctgatgagcccagctgggtgcctgcctcatacttggagaaagtggtgacactgtacccatacaccagccagaaggacaatgagctctccttctctgagggcactgtcatctgtgtcactcgccgctactccgatggctggtgcgagggcgtcagctcagaggggactggattcttccctgggaactatgtggagcccagctgctgacagcccagggctctctgggcagctgatgtctgcactgagtgggtttcatgagccccaagccaaaaccagctccagtcacagctggactgggtctgcccacctcttgggctgtgagctgtgttctgtccttcctcccatcggagggagaaggggtcctggggagagagaatttatccagaggcctgctgcagatggggaagagctggaaaccaagaagtttgtcaacagaggacccctactccatgcaggacagggtctcctgctgcaagtcccaactttgaataaaacagatgatgtcctgtgactgccccacagagataaggggccaggagggattgaaaggcatcccagttctaaggctgctgctaattacagcccccaacctccaacccaccagctgacctagaagcagcatcttcccatttcctcagtacccacaaagtgcagcccacattggaccccagacacccctctgcagccattgactgcaacttgttcttttgcccatt

SEQ ID NO: 2962 - protein, 364 aa, Homo sapiens
MAELQQLQEFEIPTGREALRGNHSALLRVADYCEDNYVQATDKRKALEETMAFTTQASVAYQVGNLAGHTLRMLDLQGAALRQVEARVSTLGQMVNMHMEKVARREIGTLATVQRLPPGQKVIAPENLPPLTPYCRRPLNFGCLDDIGHGIKDLSTQLSRTGTLSRKSIKAPATPASATLGRPPRIPEPVHLPVVPDGRLSAASSASSLASAGSAEGVGGAPTPKGQAAPPAPPLPSSLDPPPPPAAVEVFQRPPTLEELSPPPPDEELPLPLDLPPPPPLDGDELGLPPPPPGFGPDEPSWVPASYLEKVVTLYPYTSQKDNELSFSEGTVICVTRRYSDGWCEGVSSEGTGFFPGNYVEPSC

SEQ ID NO: 2963 - DNA, 48851 bp, Mus musculus
  misc_feature (1)...(48851): n = A, C, G or T/U
ccaagcggaagagacatcctacccccttgccaccctcttccctcctgcctgagactggggctcagacaggctccaggccttcccagtgtgggcctttagagccagctcctgtggcctgtctaagggctcaggggatcccccgcctctccccccagcagaagagacagctagttctaccctgttttgcatggactctcaggactgcaggggaagcttgccccttaaatacacatctggagacaagaagatgtctcaagtgttagctcgggaggtcctttggaagttgcacagtttagctgccttcacttgaaaagtccccgaggaacctctctgggctgtcctggcttgggtccacccagagcaaggggcaaggaggttgtgatgtcctagctgtgaaagccctgacccctgggtgcttccttctaatgcttgatgctccttagcatcaagtggagggatctctgcgataaatgttaatttcccctccactttctccctgaacttcataaacctgctcctggctctttctggggaagggtgaattcctggatagctggagaggagccctagtgggagccatgccttccctcagctgcagaagagcatcccgggctccacgggcacttctggctccctcctctaccctgcacccatctgcataggtcctccatgctgtctcttatccaggcttaccccagatctctagagtcgggggaggagattccattctgccttatggaaagaatgggtccctcaggctccaaggtcagaggtcagaaggcacccaaagggcaggaaaaaagaagaggtcagagaaggggcagatctgtacctgtcagcggctttgaggctggacacttggagtctttaagagattccccagagattctcggggatttggctcctaggatcagactacccggttccctgactcactgtggccagacccagactggaacctgctcaacgtgcctctttgtctttcctatttaagtgactttgggtcatccctgggccagggaggatcttcaccaatatgacaagcttcccctccctggtgttttattcatccctccctccttcccccatcccttcctccatccctctctcttctctttttctccctcccctgatgtttgtcccttgtcccaacacagaggcccgtgcctaggagaagggggtgacttttaatcctaagtcagatgtcccaagcagtttcttttttggataatgtcatcatttgagggtaaccaacggcattctcacacctcccctctctaggcaccatttatagtctcctctgaggagctctcccagaagtaaacagcttggcttctccctcaagcactcagctctgttgctgtctgccctattctggtctcccagatgatgaatcagagaggatgtttgctctctctcctcagactgagggatctctgtggtcaagaaccacactccctgtatctggctgggtctctgtaaggatctcctccgcagaccatcaaagagttcgaggccaggatccggcctggtggctgggaagccaacgggaagcatagtcacctctccactcaaggttgttacctgcaaagatgactccaaaagcatgccgcgtaaggccagcccaggcgacttggcgagcctgatgtaaagtaaaagcccaaaaggtagctccgttgaccaagtgcaaacgtggagacctacagttcaatcctgagaacctagtacaggggaggcggggtcaggggatccctgacgctcactgctcagtcatccggctcaactgctgagctccaggtttgatgagagagcctgtctcaggaaaaaaaaaaggtagaggatgattgagggagacgctattgttgacctctgacctccgcatccatgtctggtggctcagtggtaagagagcttcctttgtaagcagggagacctgagtctgaattctcagaaccctggtaaagcaaagaacccacgttcctgtgcgccaagggtcggtagtggatggcgagggacaggaaggctgtaattatagctcaatgtaaagcatttgcctaacatgtatgacatcttgggtttaatcctcaggataataataatgataataataattattatagagagtcagatctcgttatggatggttgtgagccaccatgtggttgctgggatttgaactcctgaccttcagaagagcagtcgggtgctcttacccactgagccatctcaccagccctaattattatattattaataatatagaaaagataggccacaaccgggtggtggtgctgcatgcctttaatcccaatacttgggagacagaggcaggaggatttctatgagttcaaggccagcctggtctacagtgagagttacaagacattcagcactacacagagaaatcctgtctcaaaaaaataaaaattagtcacttgatgtccaactttcctaatctcatttgtcttttttccccctaagacctagggtggacaaaggatactgccccatctttatttttttaatgtatcctggccactgccttctcctctcacctgcttgtcaggctgcctgaggaccctggctccatgccaagtgtcatctgttgagccctactttgtccttattcagggctgaactggctggaaaggcgataactctcctcccactcagcagcctccaggctccagccacagccacctcccccccccccacctaggggagacgatggcatttgaactggtgagtggactcctctgaacctaaccatgtctatacgtgttagggaaggtgggtgtctgcttagcccaggtgcacttttacttccttatcccttgccctccttcagctaactttggaatccacactctgggacagatcatgacctccacagacctgcctgtgtcccaacacctacaacaaagtggataagcacatcaccctagaagaactgtcctttggtgttctgaaactcaaaaccacttggcctgctcagctctgttaaatcaaagtctactcacactgcaagcccaggaggaatcctgggctgctcacagcatcccttggaactgatagactcgatctagccccagggttctcaaccacagacctgctcagagcctccaggttggctagaaccccctatgttgccatctgctaggtctgctgggatcttcagtcatggttgccaagatccagaaatcctggtttccctcatggtgcccctactcacaaaatgaacaagagatctcccgaggactgcgcaaaggaaggttcatcctctcagggttcacaaattcagatgaaatatcactacattcactaagggggagatgggagctctgacaggccacggctgcccgtcccaaccaggatgtgggctcttaaggccacacagtccatggaccagataagtgactcactgtggacaaagctctgccctgcacaactgagagaaagggaagaaggcaagtgaggcacagccctttttatttttttcctaagattttattttatgtgtgtgagtgttttgcccgcatacctgtatgtgcaccaaatgagtgtctggtatctgtagaggtgagataaggtcaggtcccctagaactggagatatggatggtagtgagccaccaagggagttctgggaacccaacccaggtcctctgcaagagcaacaaatgctcttaccagattggccatctcaccagcccctagccctctcctaaaaagacactttctctttttctttctttctttctttctttctttctttctttctttctttctttctttctttcctttctttcctcttcctctttctctctctctctctctctctctctctctctctctctctctctctcttcctctctttgttgttgttgactttgtttgttttgagacagggtttcactgtgtagccctggcattctggagctctctttggagaccaggttagcctcacactcacagcgatctgcctgcctctgcttcacaagtgttggcattaaaggtgtgtattaccaccgcctggcttagaggcctctttatctaaatgagtttagctgtcccagccctatcctgaaaagaaattgagatgattcctcttcctgggttacaaaagacaagaggaaccctggacactgcaggactcttgttacagactgtatctgcaaaggcctatgggcctccggaacccagctttctcccagagaccttcttgcagatctcacctgggctgcccagcccggaagcaggcaagtggctgggacgaacttaaaggtatcttggaattccatcctatcccatttcctcttgttcctcccagccaagctctgaaggattatgacagcgtgggcaataaaaagtgcctaattggttgttgtccagccgaggctgctccccatttccctgggcgggggtggaaaccggctgagtcagcttcacttttgctgttgcccagtccctggtggttgctgggcactagcggtagcacagaagcagcccggatgctgagagcacagctttgacaggcttctcaatggcgggccatccctactggctgctgtcggaggtgaggagaggtgcaggggaaccccctttccagagtcttgctaggcgaactccttgcaacagaaggcagaaaccggactgtggggaccccgactcctgtcattcagcttcatccagtcacgtgatccctacgtaaactcaccacacgctcaggtgtgtgaaccgagggactgaggggaaaaaaaaatagacacacgtggagtcttttggagtagtgtcgcacatgcagtagtgtcttaataatcaatggcagacactggtaccacggacctacgcagcctcggccctcaccggcactgacttgagcatcagtaggagtaaagcaacaggatgtagatcagctgatcggaaacggcagacaggagtggtgaggtgccctgtgagatgacttccggctcagacgggacgcggggggtggggtgggggtggggcgggtgtcccagcatcctctcctctgtcagggagatctctataaaccatgtggttcgtgagcccctggggccgtatcccctccagccctttcaccacagagctctctttcgcccagccttcagcatgaaaaccacacctgattctaggaagggtagagctgggcaccaacctcttaccgtctagtctccctcacctcctcgcctcccctgtccaggctgcattttcttcccaggaacattttgaacacactgttcccagccctggagccgcccaggtcctattgctcccctcgctccttccgccttccccagcaggacgctggggcacaacctcatttctcttccgtcccggccctgggatcaacccagcacatgctacctgtctcatccagggtgaggatctgttctttcccatcagacctggatgttaagaactgtgctttgggcctggcggtgctggcattcgcctttgatatcaggactccggtggcaaaggcaggtggatctctgagttcgaggccagcctgctgtatgtaggaagttctaggacagccagggctacagagaaaccctgtcttaacacaaacaaacaaacaaataaaaacaaacacaacaaaacacaaaataaaatagccttggacgggtgtgacggtatacacgcgtaacctagcacgtgggagaggctaagccaggattgccacaagattgctgccagcctgggctacataaaaaagaccatctcaaaacacaaactgcttcatccctgactctctcagagccggcatcagtgtgagccaccgttactgtctttcccactctttggcttccctacttagatccggtaaaacagcatagtctgtgggccgcctgccaccctcaactgctgcacccgggggcttggcaggtggaacgccacctgtctcaggaggctcaggtggatgctggcacctcgccactagagacccccggaaggccttccaacgctggcggttggaaacagaccattcaccggctctgcgagcggtgtggcagtgactgacgccaaaggagctggtcagagagggtcccttcttccttcgcaaaggtcttgggcctctgttccctgccactgttctgtaggctcttgtgtgtgtgtgtgtggggggggggagacacagaggttcgctggtagagtatggagtgggaggaactaagcttgagcccccagaggggcagtgaagatttatggggctggatttttactggctggggagaggccccgggcaggagccacagaggctgccagaagcaacacatgcataaaacctccctgacatgaaagtctgaggtagcagctcagcgccacccccacccacccccccagcctgtgggtggtgagagatttacagatcttgcacaaggcctggaggggccaagagtcagaacagctccccaccaaggccttcacctttctcctctagggaaaaaaaaaaaaaaacttactcacctaatagaacaggttggagctgccagggtgatggctatcactctatttgggatcccgccccctggagactaggtggctcccaacttcctccattccttgggctctcttctctgcccccaggtcagggagaggtgctgagggcagggtggacgatgagagaacagagggacaactttcaaaggggtcttccaggtagtagcctggcaggctaaacatagcatctgggctgatgtttaccaagcagttatggccctgtcccccatacacccagattatgtgtgaggtgctacgcacgggactcgaacatcctagaaaaatcctaacctgtaagcaacactttcagtgtgtgggtgggtgggtgggggatgtcagttatttctctaggagggagaagggtacagatggcaagatagggacatgaaaatatacaaaatctctggcttggtggtgtcccacacttcaaccagagtctaaaaaacgctcaaagtgactctgccccatggaaggtgtgagcccagatccctcgcctttagttcctattcagctaaacatggctgtcaggcttctcctgagacagaccccctactctttccacatcaaaggaggctgtccaggggagtccttgtctttacttggggggcagctgaactcttaagagagttttgccatctcctacattccatccccacctgcatggagaagcccaggaccttcagctggggatgggggatgcacactgctaaccacttaaaagggcaggtgagagagcatctctccagcagatgcggacccagagtctttgaacagaagagggtggggcctctgtctgaggatgctaggggaccttaagccagggcttacagcctgaaccactgggttgtggaggcaccagaaagctggtcccttccttttcccagctgaactttttcctccccacctgagtccagacttctaagagagtccttctggtgtggggacagcgatctgagtaatgtctcaagtgcctacccagctgggtggacttgcccacggtcaggccctacctggtgtggttagtagccactccccagggacaggccagggaaattgtagggaaaggactgaagttgagcggtaacctagtccagcggggtgctatgaagaaaaacccagtgtggggagaaggcgctaacctttcctcctgctgggattggggtccacactctgaaggccagggaagttagggaggaaaggtggctttgcttccatgacccctccccctgccaccagcttctcactagagtgggccgggctggtcaggacctgcctcctgccttcctcctcaacaggtcgagggaaaattgctccccgtgttactgctcttgattttttgaagccagatcaaaggtgggacccagctgggagccctagtaaaatctcagcaatgtggagccttggagtttcagaggtgaaaccaggaaccaggggaggaaccagcccaggctgggactgcaggggtcagaggccaggggcagagtgggaagggacctggggcaggagcaagctagagcagcaacttaaaggctccaagccagagcgctttggttggcgctgttgtcctttcaatacagtgacacccccccccaacctcagtggccaagacaagaactcctctccagcccagagtcccacccttccaccaccatctgttctgtcaccagtacttttcataacagtgaattctcagcttaggggaccctattgctctcagcggtaaacagcaggatggtctgcttcctgggcctgggtgcagagtaaaaaatatctttatttctcatttttatggagttggaggttaaaccctcacaatgcaggtaaacacgagttctttccttttttcaatttttttgtattggtctccttatgtggtacaggctagcccgaaactcatgatggtcctcttgcctgagtactcggatgttgggtgggcactgccacaggagactttcctctttcttttttatactttccaaatggaaacttaaagctaagatgcagtcctgtgtcccaggcctgcccacacattcttcctagtggtgtcagatcccttccaggtgagccacgagactgctcttatccttcaaaaggtcaaatatgtagtatgtatgtatgtatgtagatattggtgtcttgcctgcacatgcatctgtttgtcagatgtgtgagctacagatggttgtgagccatcctgtgggttgctgggaattgaatctgggtcctctggaggagcagtcagcgcttgtaacctctaagccgtctctccagccccctccagaactcttcttgcttcccctgccttctccttcttctccttaacctgtctctctccttgctaggaactgccttgctgtcttctagtactgtggcatggaagaggttaactgttgggtgtatagctgttctgaagatatattcttcagggggctggaagatgagtgttgatagagtacttgcggcccaagcatgaagacctgagttcagatctccagtacccatgtcaaaaacagtgtgcacattcataacccaggttcggggaaggtggagacagaagggtttactggccccagtttagctgaatctgcaggttctggttcaatgagagactgaggacaactatcgccttcttatgaccatatgcacacacatgtgcttgtaccagaactcacacaccacacacacatccacacaaaaggcatgccccgtgccttttgtagggagatgctgtagggtggaacagctgagtgtgtgtgtgtgtgtgtggggggggcatcccaaggccctaccttccttttctcaacagtcttgactaggaccatgaaagactgggagccatgcccatcagaaatgaccatgtctttggcgctcagcgcttacactgtcccctggctaagccttccttaactaaggcctctgtcctcagaactgcaggtggtttggaccaagtcctgagtcttccctgcattgaggtgatggctgccaggcagagcgggatgggcagtaagtatgtgggtctgggtacagaggaaaggacaggagtgcggtcctacaaattatgctatcatcaattcactgtgacctcagccaactccagcaccttctcgggcctcggtttcccctggtcataaaatatggggttaattgtccctcctagggaagctgggagggttaattgggcaatggctctgaagagaaggagatctataaatacaagggatcattagagggtatttcacagccgttttgtggccccgatggtattattaatatgattattgttattgttatcgccaccatcacccacttcccgagtctctgccagctgggtcctgcttccaggtgaaggagctctgccaacagcctctgtgaccctccaccctcaggagtgtcggggacccctcaggaggttatttcattgtggcattacagagggggtcaagagctttaaggggagggggtgaggggacgtgccatgcttgcttagtgagggctaaaggcttttagtccagggatgaccctggtctgctgtgggaagcctggactcgagaagcctgatggctccatggaaatgtgctcatggtgaggagagggccagcaggagtttgaggtggatggtgttttctgggacgctgagggacgggcagatggggatgtgctctcttgaggaggcaaatggctcttcttaaaggaatctctttgtaggggtcctaggattcttaaggcccagggatgaaggacggcctaggctggccaataataggcccagaatatccaccaggttatctgtgtttcctcctttgggcatgtaaaaccacggtcaggggcttctgaaatgccttgggtgccctctggcggcaacacgtgagtgctacagaggaccaacacctgcccagagagcacttcctcctgccctcggcgagaaggaagaacctaccaggagggatggctggaatgtccttgctgggagattctgtggcagttggccagcagccatccacctggccaggaaggccaagggtagagggagctgtggggtcacagcaagggacggaagtggtatccctgggtttgcaacacgggcagttggtggctgtatgtgtgcaccaggatgcacactgtggggagctagaacatacgagggaatccacctttggcgttcctggatggttcacccaaaccaagggttttcccatcaagccactgtcggggtttatgcatcagggcatcagggatgtatgggagggtcttctccataggtggagagagaatgaagaaagaaaaccagaggaggaaaaggaagaggcagaggccatggggagatcctaaggcaaaagtgagcatcctcagaaggctgagggggctgtaatggtttgaagaattagcctgtcaaacttgggccataggagggagtgtgacccggtgtggaggccaaggctgcctgcccttagacaaaggcagtcaggacatgcttctagaccaagagcaatgttgagccttgtggatctttctatatcttcctggggacagagaccatgactccgtgtgtctccttcagtgtgctcagcacccttggggactctggatagacaagggcagccacatgcagaagagaacagagagggctgggaagcagggagagcccagaagggcttcacaggaagctgaagccagggaagcaatagagcggacatggagcaagctgagcccgagtgagaagtgctcaaaggaccgccaacagctgtgcgcctgccagcggcactgtgccggtagtggagggcgcgcggtggaggtcaaggtaaacatggaccatacgtggtggagaacgagtaactttgcacactagaaatggggacagagtggaaacgtggactaggaggaggctcaaagcagctggaggcagcaccgacagaacttgcttccagacccaccagggacaagatggcgctgtgacgtgggtgatgtgggcagacacagctggaaccgcctagccacctttgctcttcaaacaccactgcaggtagggtggaacaaggagctcttcagggatggagaggcaggagtgggttggctcagggcctttggtgaaggaatgctttgtttacatctgccttgcttacacatggattacctgagggtcttcttcatataggtgctcggctccatcctagggactgacatcctgggatgagacaggagcccaacttcagaactggtgaaaggccgtctgctgagtctgacgtatagtcaggactctgatgtggttagagcacttgctttttgtgcacgaggctctgggttcaatccccagtataggaatcaggcatagtggaacctgctgcctagtctcttggaaatggagacctgtgagaaaaaaacagttgtgcggtggtctgagggggcttatgaatgaacttgaaagactcatcggtagggtagggaatgtggttcagtggaccctggttcagcaagcatgaggccccagattcaatgcccagtacaaggggcaaacaagcaaacacaaagggtccctgtttttgtctgtgcctttaataacctaaaaacaaaacaaacgtacacccctttaatcccagcactcagaaggcagaggcaggtggatttctgtgactatgagaccagcttggtgtacagagtgagtctacagggctacacagagaaaccctgcctggagaaacgaaaaaaaaaaccagatagccaaaacccaaaaacaaacaaacaaactgacaggctttaaaagggctgaaccattcattttaaaactattggtaccagttgggtctggtggcccatgcctgagagcctagcacttgggaggtagaggcaggaagatcatgagttctgggcaagcctgggctatttgagaccctgtcctaaaaacaactaaccacccaatcactactactggtgaatcctaggttttctcactgtcccccacccacacttttcatgtgttcttcatgagagggcctctgggaaggacagagttagctacctccagctttgtcctagaagaggtttccacccagcaggatagtcagccccacctccccaccaaaacccctgcaccctaatgtacctgagtcactgaatccgggcggagcccttggctacacagcaaagcaagccaaactggaaactggccctgggaacagaatgtatgggctaaacaagtcttatgcagatgtaggagtatgcaaagtcattcttgaactccgaatccatttcctgatcatctcggatagaaggcccagttcttccactgtagctcagtcccttagggcagccatgagggagaatggggctcagtggtagagactgcctccgatgtgggaggtcctggccttgattccctagccctgaaacaaacagaagtgaaagagtgggagaagggagtccttcatgtaagccagtgacagaccagggcagccagcacaagcaaggcgaagcttgactgggcaggagtgaagagaacagattttgtaggacaaaggaaaggcttacctaagaagaaagggaactcctatgtgtttagggactgtgacacctttccttgagagaaaagactagggaagcaaagaaaggtggggaaaggcatgaaagacaagagcatggagggtatgtgtgcgtgtgtgtgtgtgtgtgtgtgtgtgtgtgtttgtgtgtgtaagggtgaaggacccagtttaagcagaaagctttgattttataaaggacatagagtcccaatgaaggaacggtgcgtgggcacacatgtgcacacggacgccagagcaggacatacactgggtcctgctctgttgctgtgtctcacaaagcctggagctaggttggccactggcagactccagccatcctccggtctccgccctgacctcacatgtgagaggtggggttacagaggctgaactccagcttttcacacgggctctgaactcaggcctcttgtgtttgaacagcaagtgacatcttcccagccccaagtgaaggattctagctccagaactgatagcatctgatgtttggtgtttcaaaacctaaccagagagaggtagactggtaattccaaattactacactctaagcatttggctctttattgtttatttatttatttttttgtttgtggtttgtggtgtgtgtgtgtgtgtgtgtgtgtggtttttgttttagacagggtttctctgtgtagtcctggctgtcctggaactttcactgtagaccaggctggactcaaagtcagagatctgccagcctctgcctccctgctgctgggattgaaggcctgggccactgccacccagcttggctctatattttgttatcactttatctcagcaaccttttcttcgaagtgacaggaagaaggaggaggaagatagaagaggcgaagagaaaatgtaatgagagctggggaacagctcgacgatacagttcatgcttagtgtttatacagttcatgcttagtgttggggacttgatcctcagcaaataagaccccagcagggatgtatgtgtctcatctacctgcgatcaatgtctctcaaatgttgatttgggaagctttgttacatgttcttataagttaatttactggatgtaaaacatttttttctcactgtgggttaaaacaacaaaacaaaaccaaccaggaagggtggtactatgaggtggatgtgtgagtgctctggcttcaacaagagtctaagggtccactgcagatggggtgtggggtttcctacccacgcaggtctcaagccagcgtgaattccctctgagtgctacgtacagcttgcctaagttagtcgttcgcagagggcctggaagagaaagctaaacctacctgtggtgcctgtcaagcacggcccctcatacaggaggagatgaagcagagaccaagcagggtcgctaggatgccagcgtgcaattctgcccacctgaggcgcaggctaaaatgcagattctaggcacacacaccccgccccccgggaaatagcaaatgtaactagggacgaccctagggatctgcttttgataaaggctcaaacacgcctgtctgaagctgagaggatcagggaagctctgcgaaacattggtgaagattagcaggggcttgagatgacataatgacaattccctctaggaagtgccaggtaacccaactcctgccaggtcgtcgactctcgagaggcgatggatggcgggcgagggcctgaggtgaaggcgatgcgctcactgggggccgggcaccgcgtatccgacagctacacttgagactcaccatgccagactgtattgagagatgtataagctctttacggggcatttcacagtagcacttctgattggctttagggcagatctatcacttatctgctgggttagaggtgggtggaaggtcaattacgaccaatacaaaaacacttctcggctaagcccctcctcacccagcttcctgttgctgtccatcaacctcctagcaggcgggactttgcctcccgccagttggctaaaggatacgtcgttcattcccccgttgatttccggttggcgactcctaccgtctatcaatgacacttcacagttctattggccagaccaacgtcactctagatgcttcccaatgattggttgaaaatgctgtcggtccccaatgtaccaagcgttcattggtaaaagctgccgtcgctcgggcggtggcgggctccgggattggcgggtgctaggcgggcggtgtcaggctctcggtggcggcggaggcggcggaggccagggaggaagatgtcgtaatgagcggtgggtcctggcgtctgccggcggcgtcttcccggccctcaagggtcgggaagacggacagaggcctcggggaggggaggccggaaccgggggtgcccccctgggactgggactggcgccggggcccggctacgggaggggcgggggaggaaggattcccgcccggaggaggagcgcggctggccggccgggcggaggcacccggaagggggcgttagactccccgcccctcggagccccgggcgggagggcggcgcttccggggctggcaggcggcgcgggcagcagggcgagcctgataacccccttcgccccctcagcttgggtcgcgccgggccttcagcctgcgcccgagtttgctccacgcaggcggccgacgccccctcgggctcgtcctgtgggcagcccaggcttgggacccaggtggtgccagtcagatgggccctgctggtctgaactgcagcctgctggccgggccaccgcagtcccagagggtggcaggattggagggaacgccctaggcagatgactgctgaacgaaaaaccgacttttaatgtttatacctggatccttgagcctgcggctagtatctgcaagctcttggaattttagaagtttggagaacttgtggacagagctcccaggctatggcccgatgccccttgcggggggtgggggggttgggcaaaaatgcactggaattccaaaaaagcgtaggcgctatcgctcgtaacagatgacctaagaaataaaatagatgcttttcttcatccgcgttgctggcttaagggtgctcagaatcttcccttccttcttaggtttctttcccagtgccttattctagttttagtagaaaaggaactgtcttttgcgctgggcgactgagaaacctgtcctctctacattccttggttttgattctaatagcctgtcatgtttaatcgtttcataactaacatgatccagggggactctgtttggttttttctcctgaactttccccatttttaggaggttacaggattattacatatcaaaataaaagtttgggcctgtagaggcctgtcaacgaggagagaggcagaccatagccagtggtctgtgagccaggaattggcccaagggtcccctttatacagatttcattgtagaaaggcgattaacttttcagtgtgtactggcaggaacaggctacagctgttccatgctgtgccctagaaggcccttggcattacagaggacaaaaccctgagttgagaccccccccccaccccccgtggtgatgaaggttgaatccacaaatgttggacaagcacctctacggctgagctgtcttggagggctagaaaggttagggtgagccagctcacagtgaactggcacaggggatgacaagagcccagaccacacagtagcattttccattattgacacaaagaagtccattgtctgtagcgatgagtataactgcagtgtcttgttttcttttaaattcttaaggacaatgaacagcgcggatctcagaacctcccaatagggcttatgtcagtgttgcagtggtttcttatttaggtggtagggtgttggagcctggtcttgctgtgaagccctggctggcgtgtgtttgtcctgtgatctgtgtaggccttgaacttgagatctctatgctccagcctcagcctcccaagtgccgaggttatgggtgtgtaccaatttgcttggtttctagtgaccaggcagacgtcaatcaataccagtgaccatgagttatctttggctgaagtgacggatgagctgtctagttccagtcctcctacttgcctctttgagtaaaatcaacagccattgggaaaaataagctgctctgacaccattgtgagctccgcaagctaggctgctaaagacacaggctctttgccaaagaaaactaactaggatttgtccataaccggatcttcccctgggcacccagctgctctgaggggaagagtttgacatccctgctgatactacatagatgacctctacttagatttgatttaaacattgggccaggatcactgagaaggcccagtgggtaaagacacttgttgccaagtctgattacctgaggccttgtgtctcacctggaaggaaagaaacaacttcaatactgttgcacacaaagacacatacacacagagggagggagggagcacaaaaccaatacatgaattagaagatatcaaaaaatgtgggcctgtggaggcctgttaaagagaagagaagcagtaaaaagattatacggcagatgtttggttaaaaagcccatccatgctgggcgtggtggcgcacgcctttaatcccaggaggcagaggcaggtggatttctgagttggaggccagcctggtctataaagtgagttccaggacagctagggctacagagaaaccctgtctcaaaacaaacaaacaaaaaaaaaaaaagcctatccattccagcaggtagagaagttagtattttggtcttgactatcttagttcttctaagtggttaagtgttttggagaagttataatcccttgtagcaagcagtgtcaagtctgaccgttgacgcatatgtggcaatccccaagctttctttaagcaagtgttgcccaaccatggcccttagaacgacttttaaagtttcttgcagccagctagtagactctagcagttttctagaccctgagcactccactgctgtaaaaatgggactttttttttctaagtttccttcagtccgtctcttctttgttctatctacactccaactggaagctttgcttgcagatattgaaagtatcagtcattattttggaacaagtggataatgggcacagagagaaagaggcagagagaccttattgtgaaggtgttgtggagtgttgtgagagcctctgggttgacagcattatgtagcctcattttaagccttgtgggctgtgaatttggagtaatctgttaggagatcatatacttccttatatgtttactgggtggcatgtctggactgtacttttgggtgatttaaagggtgtgtaaacttcttcccaggatgttctaaaccaggggcccaggctggggatggttgatgcacgtaatcctaacatattcaaggttaaggcaggaagattgagagtttgagtctaccctaggttacttatcgagttgcaggctagcctgggcatagcaagaccttgtctcaaatgaacaaacacaaggaaattatacccacaggatggcccaaatgagtggttctgctgggagcttcagtcacccgagccgttggtgcttctctgtactgctgtgcagactcaggcatggcccatctccctcctgtccttctttctcctttccttccacagccaactctcaggtctttgtttctgaaatgtagatgcagttctgtctcttagggagctttcttcattaccaaccaatgttttcatgagcagcttttccgaagaccccagggcagaaggttcttttggagcctggtgggaaggtaaaagtggttgaaagtatggggcacgccaggctaagcaagaatgaggctggaggaggggctggaggagggggtgggggtgtcactctcgagaagctccctggtgtcagtggtggacttgttccagttgacaaatggtgaagtagaaaactttttctactgcttcatgggactctgaaggtaaaaacaaaacacaggcgcaagttcagaattggcaccagcagccagacctctcagtatgcttctggactgctctctgtccctggcacaagcatcactgtgcctttcctcggggtgcactccagactggcatgctctaagctgagacattgcccagtacagggctgagggtgggcagagtatcccatcttgctgtttctctgtgtgcccagagggagctcctggcagcatggagacatgaagctgtcacatcactgtacaagctagctgaagcccagctgttggagtcggatgatgggcatctcatccctcagctacctctctttctgcatcaagactgcttgctgggaccggccagcagctgctgagttacagtgcagagatttagcttgggtggcgaaggctaagtcctttgagaggccagtttccctctgtgtggtgatttaggcccttcaggtgccattcatgtcagccacagggcaaaattgggaagaattagcagtcattgcacgtttctaaatgtctctctagaacttgtttgttggggttgtcatctctcctgtgggatttggtaaaaatcacaaagtggctcttgagactgggaacgggaattaggaaatagctagtaggtcatgcgattagaagtgaaataattctgcctctggtttatgtttaattggaaattggaggaggaaaacaaccaagaaacagacaaaggcttttcccgggttttagaagagtaaatggaagccagccttcctctcttctccagggaaatgaagtcactattcatttcagaagctgatcctagcctgggggagctcaaagagtgactcacgaagacattgcctaagcaaaaaaggcagcatgtttgtgtagaaggagattcttgggggggactcctgcttttctctatgacggaattctgagttccagtgttcttttttttttttcttttttaagatttatttatttattttacatatatgagtactctagctgtcttcagatacaccagaagagggcattgaatctcatcacagatggttgttcctaattggaaaggccttgcatggtttcctggggctggtcccatcatgcttaagagttcccatcatcccggggcccccacattgatgccctgtgactcaggccacaagcaaactaggactgacagcagtcatgcttggacgaaaatagtccagaatgagacagaccaagtgttcacatttagacgctctagtgtatggtctgacctaatgtcccccattctcgtgctaactggaaatggtaagagtgtagcctggagctgtagtgccgtctgtgggttgacgtgcttgcaatgaagtgtctgccctgctacagctcacaggcatggccacacttaatggattgggtactggggatgggacccgggcttggtgctcgataggaaagcatgccagcaattgagccacaccccagccctccttggtctctaaactccatttagcatcactccctctttgttccttcaggattcatttattcacaagtgtattaagcaaatatagaaggctccaactgtgtgctaagttctagaggtacaagagaaacccttgcctttaggaaatttgcattcttaataagacagtaattaagtaactaatgagtacttgctgggaagtggtaagtgctaaggataaaaatagggagggagggaggggaaatgtgtgggagaggcagttacacagggtgttcagggacatagtgagatggggacttcatggaaccctgaaagtgacgggcattgaaccagttctgtctagagtgaggggaggaggctgaaccatgcagatgtgggagcaacagaaggacctggcacaagagcccagaagctctggggaggacaggaagtcagatcacataggcctgtgcgtgatggttggagcgtcggctgtctgatgggatgctattgacccctcaacagagtgatgatgtggcttcatttatgtttgatgtgttgagaataaactgacagatcagtgcctgtctcagctgcccaggaacagacatggattaggtgatggcgtcagggtgaacgcctcatgtttggaatgtgttttgaagttagagctagaagtgtttgcttccacatgtggaaaaaaaaaaaaaacaaaaatcaaagacaattccaaggtcttagggccgagcagctgggtggatgtggttagccttcgcagtggggaatacctgaaaaagcatggaatcaggagccatcggaaacgtgattcagggctgcttacattcaaggtgcccactgctgtaaaagagaagatgccggcaggaggtggtctggagatagaaactcaggtcctctttattcagtatctgtgaagcattggctttgaaagccatgagagctggcaaaatcaccagaaagcagagaagacagaaatgtaggtcctgaaatggattctggagcttagagtttaactgcctagaatttgacaagaggggaaaaaccaccagagatttagaagaaacctgcagagcaggaggctgtcttgggcacataaaataactgtttccaggaccaagaacagtcagctctcagatcacaagacaagggctcaggtctcggagttagcagttagattcagaaacatgaggcctggtagcattggcagtttggggaggatgaatgacgtgtacagcctgattggagccacgctcaggaatgattgtggagagtaatgaggagcagcaagtgcacagcctgctgggcttagggtagagctgtcctttgcacaattgtttgtttgtttgtttgttgtgtttttcaagaaaggatttcctagctgtcctggacttgctttgtaggccaggctggcctccaactcatagaaatctgcctgcctctgcctcctgagtgctgggattaaaggcgtgcgccaccactgctcagcaaactgctcagcaaacatgcattttaatatacctagccttcccaatattacagcaaatgttacactggtttaaaaaacaggtgtagtgatgcacatctgtattcacagcactccagaggtggaggctggaggaccaggagttaaaggccatgcttggatccatagtgaatttgaggccagcttgaactccatgagaccctatctcagaaaccaaagactacttaggtttgctgagagtcagacaaagtcatttgccacaacgtgttttataacaaagtgtatatcatgtaacttactggatactgtactaaacttagaaaacataattatgagtgtgctttcatgtactatgacattgaaaaatgaagttggaagcctgccgggtagctcagtgcttcaaggtgttagcctgtcatgtcaggctgagtctgacaccacggattcaaccccagcacccacatgggggaaggggagaaacaacttgtaaaagttgtcctctgacctcatgttggccatggcatgtgtgtagccatacacagatgtccacacatatacacacaaataaaatatgtttaaggtgagaaaaaaagaaagttaagttgaaccagaggagtaaggagtctccttggtgactgaggagttagagaggttaggaatcccggctcagaaaggaagggtaactgcttgataaagtcctgtgtgtatctcagggtcatggcggagcggtggggtcaggcttgggctggagaggggatctgctctctcctcttggcctgtggcgttagcagcctctgctcaagagttctgcaatgaaaggcatgaactaaatcttcctgtgtgtggttgctgggttcagttttcgggacagtttggagcctgtcccagctcagcttgctccctccaccctccatccaggctgattcattcactagtttccctagaggtccagttttgttctttaaaaccagctgtagcttgctttttcctcaccagctctgagttcttccaggctaggcaactgggaaagcctggccttagaaactgctttactggcttctggcccagccagactgaccaaaatagccaccagaaggactgtttgtgcagagtgaaattcctgctggggaaataccatagtggagggctaaggaagccatagttgggaagggtttaaaaaaaaaaaaaagcccagtagcctagggtctaagtgtggactttgagccccgttccatcctaggataacctgataatcagggctcagggtccttcctattatgttctcccaacccaatcggccagagaaagcccaccccctccagcgtagagccatctatgctccctgctctgtggtgaggccagcattgccaagggtgctacaggagtgtgcactggcacccaacaaggtcatctgcttctggagagtaagtgagaaacaacctctagggattataagtggccaaaggagagcgctggcttcaggctcccaggagagagaatggcaggcgaggagggaggaggctgggtgcttggtccctctaagcttatcagaagagcttccgaagaaaactatgggggaggtgtggtcaggggagagggtagaagggttctgggtttgcaaagatagtcttccaaaagtgaactggctggataaagggaagtgggccagaggctgaaagctgccctggaggctgtggatgggagctctgcctgagcctgaggggtcatttaagcaatgccttgggattactgaacagcaaggagagaaacttgtaccaagaatgaggaggacccagttacccaccaggagggtgatgctcagggtcctgctgagattgcaactacatattccaaagactctattctccccactcttgcggaactgtaccaggaaccagtgaagaccaagcagcagcacagcttactcaaagagcaggcccttactcccatcccttaggctgctctcactgtaatgggcactggatgctagcaaaagtcctgacttcatctcagtccagaaaggacccaaggagacgatatacctgttacaaaatggctgtcaataaattttgctagggaggaaaatgaaaagtggcctaaaggtgcaagcatcagctggaaaagtcagaagagccctaagcaagggaagggtaacagagataagctcctgggatccaaagggagggctgcggaggctggggaggggaaagaacaaacaggccaggagggaatgctctgggttgggagtgtctggctgacccagtgaagggccacagagggctgggctgaacacagccctgggagcgagcctgtggaagcagtctgaagccacgtgaacagacacagtcccccaaggaaagaggtcttgggtgagaagggtcgtttgttgaagaatatcagtatttcagtgatggagtgaatttggagggggcggcagcctcgagagaggtctggtgacctggtagaagcagccctctgagtgtggagggaggtgtggaggggacggcagcgtgaggcaggaggagaaggctgtactggagggcaagagatggaggcggatgctcttaagagtctggacattaggtgcttttctctctgtcttgggttctgttcggccctcagttacctgatactccttcctccctgctgccttgttcacaccctcaggacttttccttaggacagagatgtgccggtcattattgcttgtatcaaagatcactgccacacttcagcttagagacttggggacgttttagctgaaatgaatgataaaatccagattctacaactgagagacacgcacttttttctttcaagaatatttagtaagtgtgtgtgatatggctcagcagataaggtgattgctgccaaacttgataaccagggttcagtccctacagaacccacgtggtggaaagaactggttccaaattgttctgtgactttcatatgtgttcaaacacacacaaaataaataaatgtaaaaaaggagaaaaatgcagtaatccttattacccatattgctaagttgtaggtttcagtgaccacatactacggtactattaaaatttggtggctgtgctggagatggctcaggggtatagcatttgctgtgcgtgtgtgaggccctgagtcaaacccctagaacaggaagaagaccgtgtagcatagtggaagtggtgtgaagtgattacagaatcagagctgagcccctctgtggctttctatcccactctgcagtgctctcagtagcgtggaggagcatcaagcatgacttacatcacattacacacgctaaacacagggttccaggtggagtgaggctgctcggagaatctgtgggtacgtgtctgcctctccttatccacatccactgcctcacaccagccagaagtgcttctctctttcttcttctttctctttccagagtagaattctgcagtggcagggaaatgtttctcccatttttgcccaggggccacacaaagctctcagtgacaataggagacagccatagtggttttagactaaagaagtatttcatgagccagctggggaagaaaatgaaactaggatgaggtgtgcagccggaagcagcagcccgcagcctccgcagtaggctctgctttaccctctgacccagtggctctcaaccttcctaccactgcgaccagctgatacagttcctcgtggagtgaccgccaaccataaaattattttgttgccacttcataattgtaattttgctattatgactcgcaatacaaatatctgatatgcagaatatctcatatgtggctcctacaaaagggccgactgacatcccttcaggggtcatgactcacaggcttaaactctggagttcaaccaggtttccacaccgatcgatccagggctacagagggagagcgaagcggttaggaagtgctggtctgtctttgttccacttccttttactctgcccactgcaagtctctgtgtttcgtaatacaggaaggacatcattcactaagttttgttaagtaaacttgaatccttgagagcctcctaagagacctttgtggggcttttgttttgtttttaaagatttatttattttattgtatgtgagtacactgtagctgtcttcagacacaccagaagagggcatcagatctcattacggatagttgagccaccatgtggttgctgggaattgaactcaggacctctggaagagcaggcagtgctcttaaccgctgagccatctctccagccccaacctttgtgttttcatcagcacaacctggactgaaaattttttgtttgttttgttttactgtgctaggtatgtaaccagggaccttgcacatgtgaggcagggtctctcccacctgatccacacccttgcgcctcaggataaacatttgaaagaaaatgtagtccaacttttcaccccacctctatcccatctccaacaatatacatcttgtctctggttaaacaattttagagaaagggagacatcaccccctctgagacaactggttcagtctttcaaaggtatctttgagttaaacagaaacctggcttcttgaacatctacacgggtggcttgcttttgtcctttgaacttacagagtgtggtcagaagcttgaaagtctctcgttggaaataccccttagaatgggcccaagactgaatataacccagtgtggggagtaatatatagggaatattatttttcttgtcttataattgtattttttagtttttttaaaaatagtttttgttagccaaacatggtggtgcatgacttaaattccagcagtcggaggcaaaggctagactaatgtgatattcagtgagtaaatagttaattaattaaaatgacaattaccataaggaaaaaaatgtcagtcaaaagacccaagatgcctggccatggtggtgcacgcctttaatcccagcacttgggaggcagaggcaggcggatttctgagttcgagccagcctggtctacaaagtgagttccaggacagccagggctacacagagaaaccctgtctcaaaaaaccaaaaacaaacaaacaaaaaaagacccaagatgcctgtggcccctggtcctgagccaaatctgagttggataccttggctcgtacccaccaacccttagccccaaatgatatgatcaccttcatttcctcctccttgttcacaaaaatactataagcactacaatgtcaggtgaaacagaatgtgtggtgcatgtcttttacagatgggcccatccagaacctttaaaagcaaatggctgtgcttacaggactagtttttgcaattgcatgcttttttctgtagttgttccttcataactgcaatgattttacagggatccgtgtctgtaatatcctagaatctatgtgtccactgcgcagaaccatccactggcctcccagttggcagcatcgcaggatcacccttgttctgctgcatctcatggcttggggcctggtgaccactgaaggcactgtgttgcttcctggccagccagcctgcctgtttctctttctttaccttctacctttcaggggcctgaaaaaagccatgaatggtggtacttctgtcctcaccaaactatagttctgtttctgcctgagctctgtcctcatagactcctgacttggggtcagttcctgagcttctgtcccttgagtcttccccatctctctgtttcctggaatttgctttcttaatgtctaagataccagcctgacttcccagttgctttgccttagtgatttatgactcttaccatggcagagtcttcacccagagctcttagggcttcattttcctttctttcttctttttctttctttttttgtttgtttgttttttgttttttggattttttttaatgggctcactatgtagaccaggctggcttcaaactcctagagatccagtttcccctgcctcccatgtgctgagattaaaggcgtgtgccaccacatccagcctcttgcttgccctttatttgtttaaaatgctatgtgtatgggttttcccctgcatgtacgttttacaccacttgcatatgtgcatcctgcactggaggctagaggaggccagcccttggaactggagttacagaggattgtgatgaccatgtgggtgctgggacttgaacatgggtcttctggaagaatagccagtactcttagtttctctcttatcaaaagtaagcggctgggcctggtggcacacacctgtaatcccagcccttgagagactagtaaacgagtcccaggccaacctgggatatggtgcaagattcctgtctcaaataaagtaaaattaaagtttaaaaattataggaggatacagtgatcctttggtacccacaggagctcctggagattccagaacccgtagatgctcaagacttatatataatgtatagaagttacctgtaagttgcacatctgccgcataccttaagtcatctgcagattatgtagcaccaacatttcttgatgcatggttggttgaatctgtggctacagaacctgttgatatggaggtcaactatccagttgtggggaaatgagaagagaaaaattctgccagctattactgcatatacacaaaagtggaaagtgttcattcttccatgtagttgttagccctgctgagtctatgacctacacagtcagatcagttgtcctgggtaaaggggttagtccacttaaggcagcgcttctcagccttccttacgcagcaaccctttagtgcagtccctcatgttgtggtgacccccaaacataacattattttttctgccacttcacagccatacttttgctactcttacgaagtgtcatgtaaatacttttggagaggtttgccaaatgggtcacgacccataggctgagaactgctggcttaaaggagttgccgtcttctggttcctggaggcccttgtgtctctgtgtgaaggttgatgaaggttgagcagacagacagcctttagagtaggacagctatgtcctgctgctcaggaatgctggccttgcctttcttctttcccagactggcttgcatctagctcccgctggattgagctggtagcctgccttagcacaagcctagaggctctgccccaatgaagagattcagatttagagggctaccagtgtccaccagggggcactctggactcagcacagccggaccgacacacgagtctcccagttctcctcatcttagatggtgtggggagtgtggtgaaggcaggcctggcctgaatcgatgagtgtaagcaaaggaaaagctcaccctggcaagcccggggctgggatgctcgagcggggccttgcaggaaaagctcttaacctgttggaaaagcagcaacagaggcaaaaaaaaaaaaaaaaattaatttaatttaaaaagcggaggcaaggggccttgggttctcctgtggtgtgtttcttacatcattccatctttctcccagcagatccacagatgagcatggccgccactgctgctgtcagtcccagtgactacctgcagcctgctgctgctactacccaggcaagtgcacggtgctctctgagggcagggccagagcccggcgggttgatggagtgggttttctgccttactcagacccgctcgctctcactgcagacacccagggagattcacttgttctcatttctgaactaagacatagacacctgtctaagatgtcaaagttgggtcaggcaaaaagagttgtgttacccgtgacctctggggctggggccatggctcttagtaaagttgctgcacatgcatgagttcttgagttcaattccaagttcccgtgtaaaccgctgggctgggcttggtagtacacacctataatcctggcattcgagaggcagacagaggggctccactgggcttactggccaactagtcttgcccagtcagtgagtttcagattcagtaagagaccctgtctcaaaaatgacggcaaaggaggtggagagagccaggcgtggtggcgcatgtctttaatcccagcactcgggaggcagaggctggcggattcctgagttcgaggccagcctgttctacaaagtgagttccagggctacacagagaaaccctgtcttgaaaagccaaaaagaaaaaaagaggtagagaggtgctcagtggcttaagagcgctggctgctcctccagaggcctgggtttgatatgatagctcatactccaggatcaagtgatctgacaccctctctggcctctgaaagcaccaagtacaagtacttgagtaaggcatagacatacatgtgggaaaaacacccacatacattaaataaataacaatttaataaacaagggagagtcaaagagtgagacttcattaacatatctggcctctacctactccacctatgctgattcggctatacccacacaccctccacatgaacacatacatgtatataatacacactcctgaacaaaaccagaaaccttttaccgagagcaagttcatgtcatcttccctccccatcagctctcctctcctccttgtactgagttggtagaattccaactgatacctgggtgtgttgttatccctgccgacactaggccagcagggcgggtggaggggggggagaacagcctgtgttgttgctgtgtggtgtccaaggctgcttctggggggttttacactgagttccttcacttcatggagaaaccagcaggagccaatgagccaatgcaggacacacgcacgtgtgtgtgtgtgtgtgtgtgtgtgtgtgtgtgtgtgtgtgtgtgtgtgagtgatagcttgccacaggggtggggaagctgctgagaagagaggctcgtgagggcagagtgtctggctagtcagcccatctcactcctttcttctgttgatttttgcaggactcccagccatctcccttggccctgcttgctgcgacatgtagcaaaattggccccccagctgttgaagctgcagtgacacctcctgctcccccccagcctaccccaaggaaactggtccctatcaaacccgctcctctccctctcagtccctgcaagaatagctttagcatcttatcatctaaaggaaatatacttcagattcagggctcccagctgagtacctcctaccctggagggcagtttgtgtttgcaatccagaaccccaccctgatcaacaaagggagccgatcaaatgcaagtatccagtaccaagtccctcagatccaagggaacagttcccagaccatccaggtgcagcccagtctcaccaaccagatccaggtcatcccaggcaccaaccaagccatcatcaccccgtcaacatctggtcataagcctgtccccatcaagccagctcctgtccagaagtcaagtacgactaccacccctgtgcagagcggggccaacgtggtgaagctgacaggcgggggtagcaacatgacgctcaccctgccgctcaacaacctggtgaacaccagcgatattgggggccctgctcagctcctcactgagagcccccccaccccactgtctaagactaacaagaaagctaggaagaagagcctccctgtgtcacagccatccgtagctgtggctgagcaggtggagacggtgctgatagagaccacggcagacaacatcatccaggcaggaaacaacctgctgatcgtccagagccctggcgggggccagccagctgtggtccagcaagtccaggtggtgccacccaaggctgagcagcagcaggtggtccagatcccccagcaggcactgcgggtggtgcaagctgcctctgccaccctccccaccgtcccccagaagccctctcagaactttcagatccagacaactgaaccaacaccaacccaggtaccatagtccctctgccctgcctcccctcctctgctcacccttttggcttgcttttgaaactgaggcagatcatcgtcagatcttacgggaagctggagtcaccatcatttggggtgggcaggaaatggcttctcccctggagtctcttcaggtcttaggccaagtagtcctgacctgtagaaatcagatggaacagggatatctggtctgttttattctttccttatggggtagctctgggggcataatggggtagatctgtatactgtcataataaagtatttttaatgtaagagtatatataacagcaagaatgagaattcgaactagaaccatagaatctgctgtaaagtaggaaagttcaagagaaaaaaatgctggcctctgctaaagacaagagcaatagcagtggggcagccaggccttttcctttctgagacaggtctccctgtgggtcccaggtgggcctttacctcgctgcacagcccaagctggcttcactcgctgcacagcccaagctggcttcagacatgggaccctcctgctccagcctcagtgcagtgctggggtcgcatgtgtgagctgtagccttgcttctttgcacccctgtttatcctccccgagagggggttgtccttctgcttccttcactgtgtgtgcatgtggccactgagcgtgtgttttcccctctagtctagatccctcctaagggagaagacattcgtcttcctgagcctgccatgttccactcaccatgatgacctctgggttctggagtgtgctcacggctgcttttgcttctgctgctgtcagggcagctggccattctgccagctgtcaactcttgtctttttagctgccctgtggccgccatcttgctgctttggtagcctgccctgccggctgcttagctctctggtcactttgcagtctctgctgctgcttttttcttccttccctttttttttttctgtagcccaggctggcctgagactcagaaatctgcctacctctgcctcctgagggctgggattaaaggcgtcatcaccgccactcagctgttgctcctttatgttaccagctcagcccactctaaaagcagacaagaacagacagagcccagtgttgctcaagacagacggggcagtaaaggagactccagcagccatgggagtcaaactgctccattccccagtgtctctgctgatttacagggaaatggccatgagaaggagtgctcaaaatgatcgtttaaaacttgagtcaggtgctctggtgcacatctgtaaacatgcattcagggggctgaggcaggactgacatgcgttgtcaccaggcccagcaatggggcttgagcgatgggttgtggttgactcgccgctttttccagaggttccaaggttgattcccagcactcacgtggctctcaaccagctgtaactccactcccagaggattccgagtcctcctgtagtctccatctgcacatgataaacaaatgtgataaagacattagacaaagcacccccacacagtcaggtaataataaaacaaacagtgcttaacacccactcagtacccaccaagggagcagtgggccctcgcctgactcagggtgtctgaggctagcagaagagaagacagaaggggcaggtcctctccttcctgcgccccagttactcagccagccatttactacctcagagaaaaaacaagtacaacatggtaaggtttttaaatggggtacatatacagaactggaaagggacctgaggcttctatatgtattaagggatggcaggttcagatgttatcctttaactaaaagtcttcagtatccaggaattaaatataaccccagttaaaatcagtcttacaaaggatttttttctccctggatcatttaaacataaactgccaccatgatccccctcccacttgcaaatgctttaattctcccacacaggcacagcccctgcgcacaccgcagccttcaagcctgaaactcactagtgaactgctggtgtctatcggggaggtaccattcaggtctcaccacatgcttcggatagtaattccaacgctgcctaaggactctgtccaccttacatgtagttgtcgcatctctctggtcagatctctctttcagaaagaattcctcgcatcccccacctccatggagctggaaattaaaccagggcttcgtggatcctaggcacttaagtgtcctaccctgaactacatcctcagccccacttcctctttaatgtggcagtcaaccttgctgctgttgaaggccacaggctagttgttttgtagaatgtcctttagtttgtttatgtgatgtcccatgagtggattgcatttgccatcccagtgctcatacagagagaggtgagagcagaaacaggaggaccagacaggaaccagccagcctggcatatgcagtagcgaacaagaagccctacttacaggaaggcaaggttgtcctgtgacttccacaagtgtgctgtagcacatgcgtacccatactctcacacataaacacatacacacacacacatacacacacaacataaaattttttcctccttgtatttcattagtattttgaagagagacattttgggataagataaatatcgagttcctcttaaacaatttcttagattattttattatatatatatatgtatatatatatatatatatatacacacacatacacatataagaggttcgcttgcatatatatgtacgtgtactatgcctaaacatagtatgtgaacatgcctcatgcctgagaaggtcggcagagggcatcagctcccctagaactggagttagggatgactgtaagctactgtgtggatgctgggaaatctgggtcctctggaagagcagccagtactcgtaacctcaggcccatctctctagcccctgctgtttaaagatagtttactgtgtggttaagctggctccacatcactttgtagcccatgctggtggtgtgcttttttattcatcttccagttttgagatttagcagttaatatttttccatgctaagcagattaaaagtttggttgcaggtcagtaagcagctcatgccgattgagtgcagggcagcatcggccctgttaaacatgagtagtgcacaagtgtgttcttgggctggatgagatgacagaggtgtcccagttctccctcggacaaggaaggtcatgctgccatctgtcttagagcactctcttttctctggcccctcaggtttatatccgtacaccttctggtgaggtacagacagtccttgtccaggacagccccccagcaacagctgcaaccacatcaaccgtcacctgtaacagccctgcactccgagctccccatctgagtggcaccagcaaaaaacattcagctgccattctccgaaaagagcggcccctgccaaagattgcacctgctgggagcatcatcagcctgaacgccgcacagctggcagcagctgctcaggccatgcagaccatcaacatcaatggtgtccaagtccagggtgtgcctgtcaccatcaccaacactggcggtgagggaaaggcctgaagccaggagggtactgggagcagggctttgcattcagcatatgggaatcctgagccgggcccctggggtttccagggtcagccaggaggatgctcagcttgctcctggtccctgccagcctcaggtcatatctgtcttcacacttggtccttacagtaatactgtgagataggaagtcacatgaccacatgataactgcagatgttgaatagagactgagaaaatagatgtgtccaagtaatatacaaattcacattaatttggctggtcacttgcccaggtcaggtagctaagggctgtacctaatgtaaaggaagtcaaggcttcttttgggggtcaggggtagtgtttcgagacagtgattctgtatagtcctggctttcctggaccactgtagaccagaacagcgtctgcctcctgagcgctattattaaaggcatgtgccaccaccgtccagctaaggacggctgctgttgagagtgggaggcaggggagggcgtcctgggcagcaggaccagcttacactgcaccagagctgatgatgatacattctgcgagtgcagctttgagaaaaagggaaagcgacttgggagatggctcagtgctcagcaacaccggctgctcttccagagcctgtgtttcattcccagcacccacatggcagctcacaacagtctagtcccataggatctaatgccctttcctggtatgtagacatacacacagacaaaacatccatatacataaaatacataaaaaaatctttaaaaaaataaaaaaatgaagagagagggaaggagggagggagggagagctgaggctgcctagcgaagcaggctgcatctgcacctgggagtctgcagcgcccccggcggcggcgagagctcacggctttccacatccctaataaacgtcgagcatcttaggcatttgcttggtccacagaacaaaaattcttaggcgagtttcctgctagcaggggcagaatctcagggaggcctctggccctcactgccctccagtgtattaggctccatgagtcttcctcagccagagagagggagagggagggagagagggatagcctgggcttcctttcctgaaccacacccttttctctcccacagggcagcagcagctgaccgtgcagaacgtttctggaaacaacctgactatcagtgggctgagccccacccagatccagctgcagatggagcaggctctagccggagaggcccagcctggggagaaacggcggcgcatggcctgcacgtgtcccaactgcaaggatggggagaagaggtaatatgcccgaccctggccatacccacacccctgttccacaggtcactcggggacaagtcttggcctgacctcccgtgcttctctcccttccctcttcccaactcctccccctactctgaacccaacccctcaggtctggggagcagggcaagaagaagcacgtgtgccacatcccggactgcgggaagactttccggaagacatccttgctccgggcccacgtccgcctgcacactggcgagcggccctttgtctgcaactggttcttctgtggaaagagattcactcggagcgatgaactccagcgacatgctcgaacccacacaggtcagttcccccatgcccttgtctgtcctttgtacactgtcacccatgcctgttcggggcttcaccatccacactacccagacccaaaatcaaaaccaaaccaaacccaagcagtgataagaaatgccaaatgctgtgtgtagcattttcagataagttagtcccaggaaggccttggagggttacctcagtgccagccacctggctgaggtttggataagtggctagtggtgggcaagctgggctcctacccaagccctgggctctcaaggccacatactttgtaaatgctttgttttaggacttaaggtccctctgtctccacctctgtaaagccctgtgaactaagccaccaagctggcctccagtattggttttggagagagagcgataacaagattgagccaagtgttcaggctgcccttgcagcagtcctgcctcagactccagctgttgggattacaggtgtgagtcaccacacccaactctttttgtttgttttaagacaacattttgctgtacagcccaggtttaccttaaactcgtggcacttctcctatctccttaatgctgagattacaggcctgctccgacatgcatggcctactgcaggcctgcctccatggcagcctaagtttactattaaggttgctatcactattatgtgctttaatgcacccgatagaaggtgccttaaagatgtcctgggcatgcccagtggtccactggcagatgctgttgtagggaatgatgccctgctgagcagacactgaggtgggggacatgcctcagctcctggtgagtcacacccatcgcaagcagaagcatacacaccctgatacagggtgggtcgctgtggtccagactcaggggctcagggctgagatgtcttcctgtaaggaggaaggtgtaaagtccctgggacacagtccagaatgaagcaggtatgcagaggctcaaggacaagcagcctgggcaaagaccagagtgtacccaagaacggagtgtagagaggtagattagacggggcagctggggcagagaggtgcgaccaatagacgacaggaggaggctgttagtggagtgcagagacaaggccaagttggcctttccaggggctctcactttctggagcttctcctttctgggactggggcagtgatactgcatgccctctttggtaaaagatatttcttcttcccaggggacaagcgctttgagtgtgcccaatgtcagaagcgcttcatgaggagtgaccacctcaccaagcattacaagacccacctaggcacgaagggcttgtaaggccaactgaggcaggaggccctgaagatggaacacctcccatctgattggccctgggtccatgatggacaggtgcccacgactgccctgggcagccctcaccccactcctgttctgtggctgtgtccctgcagagagggactctgttcctgtgttctcctccttccaaaggctctgcccctctcaccgtgagctcctggcctgcccaggccatggacactggccatgcccaatgagacgttctaacccaggacgcgtggggacccttatttccaaaggaaaaacatacatttcactccgtcgaggagcaaagtgagcccccatccccaccccatccccttcctcaacactgccggagtcccattgtgccatgccccctcccccaccgtgcctccttgtccccctcaattaagtcctcctgggccgctagggacacccaggggccctgtacccagcctcccactgacaccccccaccggggaggtgggaggctgcctccactccactgcccagccctgccacggctctcctccagacattccaacttcctatgaaaggtcagacgccgaggacctgccctccctcttttctacggagaacgttgccttatactcacttcagatgatgacactgtggacgtgtgtgctttaaccacattttatttaattgctcccttcctttctttgctagacgcctccccctcgcctgcattcagtttagggttttgggggcaatgnnnnnnnnnnnnnnnnnnnncccaccccatccccttcctcaacactgccggagtcccattgtgccatgccccctcccccaccgtgcctccttgtccccctcaattaactcctcctgggccgctagggacacccaggggccctgtacccagcctcccactgacaccccccaccggggaggtgggaggctgcctccactccactgcccagccctgccacggctctcctccagacattccaacttcctatgaaaggtcagacgccgaggacctgccctccctcttttctacggagaacgttgccttatactcacttcagatgatgacactgtggacgtgtgtgctttaaccacattttatttaattgctcccttcctttctttgctagacgcctccccctcgcctgcattcagtttagggttttgggggcaatgctgagcataggagggtcttttttttttttttgctattttttttctcactttaacaattcttttctaaatgacacatttcaactcaaatctggactcacctgagaacaccttccatcctgaccccgccacgccctcatctccccctgcccaagctccactgtgtacagtgtatattgtataatagacgattgtgtctaagacatgttttaaaaacatattgcttgttatttttgaggcttttaaattaaacagaaatccaactttattttcgttgtaactgcttgaggatgttttattaattaagtgaagatgttatcctttattaacgatgtattttgttggtcagtactgggctgacaaaaagtttcttgctaataaatttagttgcccaaggcaaagtctgcgtttggcagttgggcttcctttgtctgtgatgtcagaggtcttacagaaggattccctgaggcgggaactgtggactcaatttaccctcctggtcctggtcccaaaggagaccggctctcagagcacctgggggcctctggagccagagcccagtgcagtctctgcttttttctcccactcccagtcttgcttcagccacagaggcgaaccctagaagaactttcctgagcggccgactgttgtacctcccaccccagnnnnnnnnnnnnnnnnnnnnttatttttgaggcttttaaattaaaccagaaatcccacctttattttcgttgtaactgcttgaggatgttttattaattaagtgaagatttgttatcctttattaacgatgtattttgttggtcagtactgggctgacaaaaaagtttcttgctaataaatttagttgcccaaggcaaagtctgcgtttggcagttgggcttcctttgtctgtgatgtcagaggtcttacagaaggattcctgaggcgggaactgtggactcaatttaccctcctggtcctggtcccaaaggagaccggctctcagagcacctgggggcctctggagccagagcccagtgcagtctctgcttttttctcccactcccagtcttgcttcagccacagaggcgaaccctagaagaacttcctgagctggccgactgttgtacctcccaccccagccccgaggaaggcactgcctcccagtctgtgagaagctagaggagtcaaaagccttagcccacaaggttgggtttgcagaaaatactgttcccacagggtgggagggaagtctgggaccaagcaggttcctcagggtcggctctgggtttgagtagagttgcagagtggaaactgtattggggggcaccttttcattttggcagaactacagagaaagaagtcagggattgtgacttactcagatttaaagccacaagcgttgggggcctgaaaagcagcagccaggctggaggaagaggccagtgtgcctcagacacgcaggaaaccagacactttctacttaccctcagagcagccaggaccgcagctctgctgagtgcggaggcttctgtgctgcctgccatcctgtctcgaggcctcacactccatccttgtcgccagccacctgcactgccaacagctcgtccccagagccagccaactcccacatagctgaaaagtaaaaaggatacagatctcagttggatccgggctctctgccctccctccacttcagcagcggcagagggtgacccttactgcctaattgcgttagaccaacagctggatcaaccctggcacaggagcctccttagcccaccaacctacatctcagtgtagccctggcagctgggggaagccttgctgggtagtgcaaaggggtacattggtcagccgacctttttctgccattccctgcctcgggctccagggttactcttccctggggcctgactccaagtctctacgttgactcctttgcttttgtaaacaaaatggtgtcagtcaccagctatgcaggagcagagactggnnnnnnnnnnnnnnnnnnnntgacttattcagatttaaagccacaagccttgggggcctgaaaagtagcagccaggctggaggaagaggccagtgtgcctcagacacgcaggaaaccagacactttctacttaccctcagagcagccaggaccgcagctctgctgagtgcggaggcttctgtgctgcctgccatcctgtctcgaggcctcacactccatccttgtcgccagccacctgcactgccaacagctcgtccccagagccagccaactcccacatagctgaaaagtaaaaaggatacagatctcagttggatccgggctctctgccctccctccacttcagcagcggcagagggtgacccttactgcctaattgcgttagaccaacagctggatcaaccctggcacaggagcctccttagcccaccaacctacatctcagtgtagccctggcagctgggggaagccttgctgggtagtgcaaaggggtacattggtcagccgacctttttctgccattccctgcctcgggctccagggttactcttccctggggcctgactccaagtctctacgttgactcctttgcttttgtaaacaaaatggtgtcagtcaccagctatgcaggagcagagactggcatgtgggagctcccttctcagggagacatgtagctataccagctatgggattctacctgtctgtggcaggatgcatgcctcaggtgttttgtttgttccagatttattatttttgattatgtttaggtgtgtgtttgatgtgggtgtgtgcacgtgagtgcaggcgtcctcagaggtcagaggcatcagatcccctgcagctggaggtgcagacagctgtgagcctgtggacggaacccaggtcctctggaagagcagcgtgagctccaaaccactggaccatctctccggctcccagatgcctgtgttttactaggagaacatgttccatctagcaacgatgaggtcaaggggcagaaagacgtccacctgggaagatggcttcatgggtaaaatgttcgctgtgtaagcttgaggacctgagctcagtcccacatcaaaagccaggctggtgacatgcgtttgtgattccagtcctgggaggcagagagaggcggatccccgggacagaaatcagccaggctaccccaatctgcaagtcaggtcccagtgagagagcagctgtctcaaaaaccaaggtggacgtctcctaaataaaaacatccaagttgacccccggcctgtatattttttgcagttgtgcaagcacacaagtacacacacgcacacacatacacacacacacaaagattcaatggcaaatgggctcttgtctggctttaacccatcctatatcaaagagccccagtggcccaggctacttgagcctaccctcccccgagcaagaggcctccaccagatatttgctgggacccttgatgacagcctaggtgcaagccatacccagaagtgtaaggggccccctacaagtcatggtggctcctgtgcctggttcctttcttaagtcatctgtctcaaagctcctgctcctgtcctcatctctcacactcgacactgaagctctttaaccgagatagcaggatcacttcctggagaagggtaggaaaggcctacttcctgaaggcaaacccaagtgctatactcctttgttttgtttccttttgacttgaaacaattttactgtatggagttcaagggccctgaacttaagatgtgtcccacctcagatatttgccaccatataaagcttttggttttgcttttaaataagcatttgtctgcatatacgcatctgcaccacatgcatgcagtgcccacaaaggccagaagagggcattggatccccctggaactggagttccaagtgggtgctgggaactaaactggtccagtgtaagagcagccagtacttttgactgtggaggcatctctccagcacctccttttttttttaaattagcaaactagcctgtctatctttacaatgacctttttggtgcctttactattgttgctgcaacaaatgacccgagcttaaggaaggatttattggctcagggtttgagggactagagttctcatggtcaggagccatggggatgggtgtgtggggcactggtcacattgagtttatagttaggaagcagaaagagataaacaccagtgctcagctggtcagttatggaccatattccaggatggtcttcttcagttatatctctacaggaaccctgcctgatcctaaatttacccaagttagcagagattagtcatcagctcttatcaccttgatacccaaacacatccctttagaacatcctacctctggctctgataatataaaatgcatctaagccgcctctaaaagtctccaaagtcttaacagttctaacatcaaaagtctatgtcggggctggtgagatggctcagtgggtaagagcacccgactgctcttccgaaggtccagagttcaaatcccagcaaccacatggtggctcacaaccatccgtaacgagatctgactccctcttctggagtgtctgaagacatctacagtgtacttacatataataaataaatctttaaaaaaaaaagtctacgtcacctccattgaaactcaagaagttatgagacagacaagaaatgagccatgtatttccaacatacaaggtacaactctctcattccaaaagggaggcatgaagggagcaccgggaacggtcaagccaaaacaagaggaacatctagcacagaaaacctgaagcttgccctgcagccgtggtggcgcacacctttaattccagcacttgggaggcagagacaggtgcatctcttgagttcaagcctagtctacagaatgagttctaggacagccagggctacacagagatacagtgtcttgagggtcggtagggagagaggaataagaaaagaaggaggctgaggacaaggaagaagaaaagaggaaaagggggaagagaaagaagaaaaaaaaaaaaaagaaagaaaccccatagcgccatatctggcacctgggactcttggtgacatcatctaggctccaactctggcctccagctctgctgcctaaagaacacatagcctctcttttgtgcccactnnnnnnnnnnnnnnnnnnnngagatacagtgtcttgagggtcggtagggagagaggaataagaaaagaaggaggctgaggacaaggaagaagaaaagaggaaaagggggaagagaaagaagaaaaaaaaaaaaaaagaaagaaagaaaccccacagcgccatatctggcacctgggactcttggtgacatcatctaggctccaacagtcttaggcagccctggcctccagctctgctgcctaaagaacacatagcctctcttttgtgcccactccacttcatgcctgcagatttcctcattcagtgtcacatggccctaggatctccatcaccccagggtctccactgtaacttaggcctcgcctccacagcttcatacagtggcctcttagagcctccttgtagggatcagtacctggcctgcggagctttcgggaacactggtgcaagtctcctcgaccttgtaactcctgcattttgcatgcctgtgaagccacacaacagtgctggttccaggtatggtcttgccctcttctgccacagctgccgttggcctccgtgtatcctggtggtctggggaaacccttcccaagcaacatactcaattcaagcttctcctttcaaataaatatgcagttcctaacttggaatctttgggggttaggcctttgccctaagggcgcctgtcctatggcagagtaaggtttctctagttaatgtaacaggctgagttactgttctattcctgtgaagagaaacctggcctgggatgcgggtctataaccccagctactggggaggctggggatcaggaagattggaggcttaaggccagcctgggctacaaaacgagctcaggttagtcttgacaacttatcaagccctaacatcagaacctaacataaagccaaacccaagtaccaacacaaaaccaacattaccactagctaggtgtgacggtcatgcctgtgttctcacatttgggaggctgagtcaggagactgccacgagttcgagactagctgtgtctatacagtgagttctaggtcagcaaggctacagagcaacacagcgtttcaacctgcctccacctctgcccccacaaatcaccccaccaacttcacaattagagtagaccacccagcaatggcctatgaaggaaagctgagtaacatcaactagctaactaggccctgcagagtctaaaagcctaaggcaaaggctctggctcaggcagaactcactagccaccacctgcctttatccaccccactcccacccccaccccacacccctgtttactttgcatgaagccagctacttgcaaaattcttggtcaatggaatagagattgtggtgatctcacctcaggtctgagactatgtgtgaggtgaccaaagtgtgtgtatgtgtgtgtgtgtgtgtgtgtgtttgtgtccacatgccctggggcgtatggaagctagaggacataggcattagtctgttctcctatcacatgggtcctggagactgaactcagtttgttaggcttagaggtaagtgccttcggctacctagctatccctctaacccttgcgtgaaatctttggggtcaaggtgacatcattaaaggaactgtagcagtcacaggaggtggcagttgcactcagaggtcagaggacgtcaggttccacttctattgctctccaccttattcccttgagacagacggacggtgtctcccactaaacccagacatgactttagtcattacagatgagcccttcctgagcatgcttgctggctaggattttgagactgagccacagaaagtaagacgagtgtcatctcctcagcccacctcagagaagctcccaggctcatggataataccggccacattgaatggacaccacagaccaagtctgggaagctatctaggtctatcaggaagggcttaaccacaaagccccacaagggaggacactgataaggtctggccttcccaagtcccaccctagcaaggcctgaaactaggggccctgataagctatggggccgggaaaggggagcagccacctgccagcaggaagtcaaccttcatcctgtcatgggacttgtctctctaagctgaattcactaaggccaaggcttcctgaatctttagagtcccagtctacgtcattgctcagacacacagcctcatccggcaccctcctggaaagcaggagggtgtatcacaccagtatcattaccaccttggcctcctcaacatcctccctccccaattccaagccactcctctcatagaacctcaacatccatggcttcaagcgccattttggaagctcatgacacgaactggtatcaccagccgaaggctttccctcagattccaacttccactttccagcccaaccaaacatgggtgtcccataaaacttcaacagttaatgaattcatcttttcccaaaatttcttcaactggtaagtagcagcagccagccagcctaaagtcagtcccggtgagccgctctctccctatagtccctctcaatacttatacattagccacacccccgcccccgcccccagcttccacttggacaacactatagctatccccagcagcttctggccactagcctcaccctccctcccttgtcatccactgggtcaccagagtgtggaggcagaggcaggtggatctctgtgagttctaggacagccaaggctacacagagcatccctgtctcaaaaagccaaaaatagatagatagatagatagatagatagatagatagatagatagatgtgtgtgcccggcatggtggtgcatgactgtaatctcagtactaaggaggcagaggcagggggatgtctgtgagtttatggtcaacttggtctacacagcaagttccagaaaaggcagagctacatggaaataaatggtcctgtataaaaaaataaataaataaataaataaaaagaaaaagaaaaaagaaacaaaaaaagaaaggaaaaaaagaaagaaaactttagaaacaaacagttaagacaaaagacatagcccctgaaccctgaacttctctgtttcatcccgagaaagcgagaaagcgagaaagcggtgtagctctgtgaaatgccattgtgcaagacactgcttactgagttgggcctgtctccagaaaagaacactactacaaagtcggaggatggcgaacgaagccccaggaagaaaatgcagagccagttcggaaaaacaacaaaaggaagcgaagtgtctccagggctcggtccttatgcatggaaggctcgctttgtggtttagccaccaaatcccacttagcagaaaagcaaaacacaagcctacttgttaacttccagacaaaaggaaaatacagagaaggagtcaacagcaaacttccctagactgttgcctgggaagagagcggcagttggactccggctctttttccttccccatctggtttggcttagtttctatggagctgcggctggagtccagtgcctggtgcacgggatgccagcgctctgccactgggccaccccccccaccccacccccagcccttaataaagcctttctttggagataaattcttgctcagctgcccaggctggcctcaaactcataatcctcctgcctcagcctcttaggtagctgactagcagacacattccaccacacctgccactcccccccccccccaaggtcttaaacaaacagaaacacccaccaggaatgtagatttgtagctacacaatgtcacaatataaagaattggaaacactgtgtctaaaagatgggccctcactaccttcaggggtggggcaggtgcatcaggttgctgtttgagcatctcatcgatttctagctacttggcttcagcagcatctcaccgctccaagggcccagatgcatcagctgttactggccaccttccctcttcctaaacacctgttccactgcccatctggcaaataccctttaagacaatcttcaagggctggagagatggctcaggggttaagagcactgcctgctcttccagaggtcctgagttcaattcccagcaaccacatgg

SEQ ID NO: 2964 - DNA, 2364 bp, Mus musculus
tgcttgcttagtgagggctaaaggcttttagtccagggatgaccctggtctgctgtgggaagcctggactcgagaagcctgatggctccatggaaatgtgctcatgcttgggtcgcgccgggccttcagcctgcgcccgagtttgctccacgcaggcggccgacgccccctcgggctcgtcctgtgggcagcccaggcttgggacccaggactcccagccatctcccttggccctgcttgctgcgacatgtagcaaaattggccccccagctgttgaagctgcagtgacacctcctgctcccccccagcctaccccaaggaaactggtccctatcaaacccgctcctctccctctcagtccctgcaagaatagctttagcatcttatcatctaaaggaaatatacttcagattcagggctcccagctgagtacctcctaccctggagggcagtttgtgtttgcaatccagaaccccaccctgatcaacaaagggagccgatcaaatgcaagtatccagtaccaagtccctcagatccaagggaacagttcccagaccatccaggtgcagcccagtctcaccaaccagatccaggtcatcccaggcaccaaccaagccatcatcaccccgtcaacatctggtcataagcctgtccccatcaagccagctcctgtccagaagtcaagtacgactaccacccctgtgcagagcggggccaacgtggtgaagctgacaggcgggggtagcaacatgacgctcaccctgccgctcaacaacctggtgaacaccagcgatattgggggccctgctcagctcctcactgagagcccccccaccccactgtctaagactaacaagaaagctaggaagaagagcctccctgtgtcacagccatccgtagctgtggctgagcaggtggagacggtgctgatagagaccacggcagacaacatcatccaggcaggaaacaacctgctgatcgtccagagccctggcgggggccagccagctgtggtccagcaagtccaggtggtgccacccaaggctgagcagcagcaggtggtccagatcccccagcaggcactgcgggtggtgcaagctgcctctgccaccctccccaccgtcccccagaagccctctcagaactttcagatccagacaactgaaccaacaccaacccaggtttatatccgtacaccttctggtgaggtacagacagtccttgtccaggacagccccccagcaacagctgcaaccacatcaaccgtcacctgtaacagccctgcactccgagctccccatctgagtggcaccagcaaaaaacattcagctgccattctccgaaaagagcggcccctgccaaagattgcacctgctgggagcatcatcagcctgaacgccgcacagctggcagcagctgctcaggccatgcagaccatcaacatcaatggtgtccaagtccagggtgtgcctgtcaccatcaccaacactggcgggcagcagcagctgaccgtgcagaacgtttctggaaacaacctgactatcagtgggctgagccccacccagatccagctgcagatggagcaggctctagccggagaggcccagcctggggagaaacggcggcgcatggcctgcacgtgtcccaactgcaaggatggggagaagaggtctggggagcagggcaagaagaagcacgtgtgccacatcccggactgcgggaagactttccggaagacatccttgctccgggcccacgtccgcctgcacactggcgagcggccctttgtctgcaactggttcttctgtggaaagagattcactcggagcgatgaactccagcgacatgctcgaacccacacaggggacaagcgctttgagtgtgcccaatgtcagaagcgcttcatgaggagtgaccacctcaccaagcattacaagacccacctaggcacgaagggcttgtaaggccaactgaggcaggaggccctgaagatggaacacctcccatctgattggccctgggtccatgatggacaggtgcccacgactgccctgggcagccctcaccccactcctgttctgtggctgtgtccctgcagagagggactctgttcctgtgttctcctccttccaaaggctctgcccctctcaccgtgagctcctggcctgcccaggccatggacactggccatgcccaatgagacgttctaacccaggacgcgtggggacccttatttccaaaggaaaaacatacatttcactccgtcgaggagcaaagtgagcccccatccccaccccatccccttcctcaacactgccggagtcccattgtgccatgccccctcccccaccgtgcctccttgtc

SEQ ID NO: 2965 - protein, 647 aa, Mus musculus
GLKAFSPGMTLVCCGKPGLEKPDGSMEMCSCLGRAGPSACARVCSTQAADAPSGSSCGQPRLGTQDSQPSPLALLAATCSKIGPPAVEAAVTPPAPPQPTPRKLVPIKPAPLPLSPCKNSFSILSSKGNILQIQGSQLSTSYPGGQFVFAIQNPTLINKGSRSNASIQYQVPQIQGNSSQTIQVQPSLTNQIQVIPGTNQAIITPSTSGHKPVPIKPAPVQKSSTTTTPVQSGANVVKLTGGGSNMTLTLPLNNLVNTSDIGGPAQLLTESPPTPLSKTNKKARKKSLPVSQPSVAVAEQVETVLIETTADNIIQAGNNLLIVQSPGGGQPAVVQQVQVVPPKAEQQQVVQIPQQALRVVQAASATLPTVPQKPSQNFQIQTTEPTPTQVYIRTPSGEVQTVLVQDSPPATAATTSTVTCNSPALRAPHLSGTSKKHSAAILRKERPLPKIAPAGSIISLNAAQLAAAAQAMQTININGVQVQGVPVTITNTGGQQQLTVQNVSGNNLTISGLSPTQIQLQMEQAGEAQPGEKRRRMACTCPNCKDGEKRSGEQGKKKHVCHIPDCGKTFRKTSLLRAHVRLHTGERPFVCNWFFCGKRFTRSDELQRHARTHTGDKRFECAQCQKRFMRSDHLTKHYKTHLGTKGL

SEQ ID NO: 2966 - DNA, 52722 bp, Homo sapiens
aacctccgcctcctgggttcaagcgattctcttgcttcagcctccggagtagctgggactacaggtgcgtaccacgacgcccagctaattttttgtatttttagtagagacggggttacactgtgttagtcaggatggtcttgatctcctgacctcgtgatccgcctgcctcggcctcccaaagtgctgggattataggcataagacacccgctcaacctttttattttattttattttaatttaatttttatttttattttcagacggagtttcactcttgtcgcccaggctggagttcagtggcacagtctcggctcactgcaacctccacctcccaggttcaagcgattctcctgcctcagcctcccaagtagctgggattacaggcactcaccactatgcccagttaatttttgtaattttagtacagatggggtttcaccatgttagccaggctggtctcgaattcctgaccttaggtgagccgccattctcagcctcccaaagtgctgggattacaagcgtgagccaccactcctggcctgtttttaaattttattattatttttgagacagggtctcattctgtcacccaggctggagtgcagtgaagccatcagtgcttgctgtgacctcgaccccctgagctcaagtgatcctcccacctcagcctcccaagtagctggaacgacagactcatgccaccacacccagctaaatttttttttttccaggagtctcactgctctgtcacccaggctagagtgcagtggtgtgatctcggctcactgcaaccttcgcctcccaggttcaagcaattatcctgcctcagcctcctgagtagctgggattacaggcacatgacaccacacctggcaaacttttgtatttttagtaaagacagggtttcatcatgttggtcaggctggtctcgaactcctgacttcgtgatccacctgccttggcctcccaaagtgctgggattgcagttgtgagccatcgcgcccgacccacccagctaatttttacttttttttttttttgtagaaatggggcatctggctacgttgcctaggctgcataaccttatataacaaggaagttcttagattaggtaactttactccctcctgcttcaaacagagcatattcccactttacatgcccgagttcagattagcaaaaagcacctttggcggagcgaggtggctcacacctgtaatcccagcactttgggaggccgaggtaggtggatcacctgaagtcaggagtttgagaccagcctagccaacatggtgaaaccccatctctactaaaaatacaaaaattagctgggcgtggtggcggacgcttgtaatcccagctactcaggaggctgagacagaagaatcgcttgaacccgggaggcagaggttgccgtgagccgagatcgtgccactgtactccagcctggatgataaaagcaaaactccatctcaaaaaaaaaaaagaaaaaaatgaaaaaagcaccttcttggggctgggcgcaggggctcacgcctgtaatcccagcactttggaaggccgaggccggcagatcacctgaggtcgcgagttcgagaccagcctgaccaatacggagaaactccgtctctactaaaaataccaaaaattagtctggcatggtggcgcatgactgtaatcccagctactcaggaggctgaggtaggataattgcttgaacctgggaggcagaggttgcagtgagccaagatggtgccactgcactccagcctgggtgacagagcaagactccatctcaaaaagaaaaaaaaaaagaaaaagaaaacatttttctttatttatggtagagatttagtagcatttttagtagaggcggggttttatcatgttgtccaggctggtctcaaactcctgacctcaggtgatccgcccaccttggcctcccaaagtgctgggattacaggtatgagccactgggcccagccatttgttttctttgagacaggatcttgctctctctcccaggctggagtgcagtggttcgatctcagctcactgcaacttctgccccccaggctcaagtgatcttcccaccttagcctcctgagtaactgggaacacaggcatgcaccaccatgcccagctaatttttttttgtatttttagtagagacagtgtctcaccatattgcccaggctggtctcaaactcctgagctcgagccatccgcccgcctcagcctcccaaagtgctggtgggactgcaggcatgagtcaccacgcccagcataagtgcatgtggatgtagacaaaaggaacgagagagggctgctccacaaattctgctgtcactaatggactggacgacctcagccaactccatcacattctcagagcctaggtttccccagccataaaatatggggttaattgtcccttctagggaatctaggggggttaattgggcaatggctctgaagtgtctaggagaaggagatctataaatataagggatcattagcgggcatttcacagccattttgtgggccccagtgttattattaatatgattattgttattgttatcgcccccatggcccacttcccgagtctctcccagccaggtcagtgctttcaggtgacaagtgctgctcctgagcccagccctggtccttctgaacccacaccctccacactcagggtctctggggaaccctcaggagactagcaatgggactgagatgtggttttgacataagtgagggcctaggagggagacgggcagagggagagagggcagtgcctcgccagggacattctcagcctccctttgtccctggggacaattctagtctgcagtgggcagctgggacttacgagaagcagactgggcaccacatggagctgtggtcaatggggtcgggaaaggtggggagcaggggagtgcaggggaggggcagaggcagagagaagatgctgctacccggggaggtaagaggagctggttggtaggaaaccaattccttgaagaggcaaatgtgtgtgtttgtttgtttttgttttcagacagggagacagggttttgctttgtcacccagggcagagtgcagtgtcgcaaacacagctcactacagcctcaaattcctaggctcaagggatcctcctgcctcagcctcccaagtagctgggactacagttgagagccaccaagcctggctaatttttaaatttttttgtagagatgggggtctccttaagttgtccaggctagtctctaactcctgggctcaagaagcaatcctcctgccctaggcctccccaagtactgggattacaggcatgagccaccatgcccggcccaaatggctttttttttgttgttttgtcttttttttttttttttttgagatgaagtcccactctgtcgcccaggctggagtgcagtggcaagatcttggctcactgcaacctccgcctcccagattcaagcgattctcctacctcagcctcccaagtagctgggactacaggcatgcaccaccacgactggctaatttttgtatttttagcagagatggggtatcgccatgttggccaggccggtcttgaattcctgacctcaggtgatccacccaccttggcctctcaaattgctgggattacaggggtaagccaccgcacccgggcccaaatggctctttttaaggagtctctttgtagaggctggaacccactctcagtctccgaatgaagcaggccccattcctggggaatagcaggcactcaatagctgcttgttaaactgcatctccctgtccgccctgtgttactgtaaggtgaacgctgggcagctgctttggaaatgccttgggcgccccctggtggtgacacacaaaggctgaggaggcacccctgccttccaccttaaagggctccttttacctggggccctgccctttcttcctgaggctccacagatcccaccccagggagactgggggtagaaagaaggagcaaagaaggaagaaccctgtggggaaggatgagtggaatgtccttgctggaagattccatggcagttggtggggagccatcggcctggacaggggaaccaggggcagaggaagttgacgagttagggcaggggtcaggagtggcatccccggcagtgaagacagagatgtgtctgtatgtgtgcaccaggggtgtggtgtaacagggagatacatcttatagcctctgtcaatgtttcatgttcacagaagactgaggaaacctagatccctgaaatcattgatggaccctaggaggaaaaaaaaaattacccaaattcatccaagctaggtgtttgtcccatcagatatttttgtgggtctgcatatgagagagtccgggttagaagtctgcaactctgggccgggagaagtcgctcacgcctctaatcccagcactttgggaggtcgaggcgggtggatcacctgaggtcaggagttcgagacaagcctggcgaaaatggtgaaaccctgcctctactaaaaatacaaaaattagctgggcttggtgatgcgcacctgtaaacccagctactcaggaggctgaggcaagagaattggttgaacctgggaggcggaggttgcagtgagccgagatcgcatcattgtactccagcctgggcgacagagcaagacactatctcaaaaaaaaaaaaaaaaaagaagaagtctgcaattttgatttccccataagtagaaagggaagagatgagaaaatagaaaatcataggaggggaaaaggggagaagcagaggttactgggaaatccttaaggcaaaacaagcagtctttagaaggctgggtcggctgtaactcttcaaaggtaaacaccaacaataaagcttgggttgtagctatgagtgaggaccaacagagagtcaagggggctggcctgatattcttctagtttctggaccaacagcaccagttatgccacgtggtttcataggaggctccaggagggatctgaagctttttttttttttaattatactttaagttctagggtacacgtgcacaacatgcagatttgttacataggtatacatgtgccatgttggtttgctgcacccatcaacttgtcatttacattaggtatttcccctaatgctatccctcccccagccctccacccccccgacagacagccctggtatgtgatgttccctgcccagatctgagcttcttgagagcagaggctgtagttccacatccttccctccaggaccctccctcagcatcctgggggagagatgttcactgtctggtactgacggattagatgaggacaaccctgtgcaaaaaaggacaaagagaatgtcaggaagcaggaaaagcacaggaaagtgaagaaagaaggggattcagaggtagacatggaaggagaagtaaagtggaagtggaagaagctgggcctgaaagagaaggggtaagtccctgagaagtgttaaaaggatatagtcattcggtcagtcagtaaacatttactgtgcacctactataatcaagcagtgtgctgggaatggaaggtgccatggtagacaagacaagcatggggtttttagtggtggagaatgtgtagctttgcaagttagaaatggagagaaagtgacaatgtagagtagaaagaaactgaaagcagttggagacaaaagggaaatatcactgagagaacctgcctccagacacaccagggaggagatgtcgcccctggttaaggttgacagacacagccagaaccacccactggccctggctctgcgaagatggcagcaggtagggtaggaagaggagaaattcagaaaggcgagggacaggagtgggtgggggtggagggcacagacttttccttgtttttacttgggcacccccagtgggaaggtatctttgggctaaggagtccttctccacatttggctgcccattggaatcacctgaggaactccttaatgctgatgccccccagagattctaatttcctaggatgggacccagacttcagaatttactaaaagctcttttagtgagtctcacgtgtggccatggccgggtgcagtggctcacgcctgtaaccctagcactttgggaggctgaggtgggaggatcgctagagctcaggagtttgagactagcctgggcaacatagggagaccccagctctacaaaaaatttaaaaattagctgggcatggtggcgcgcacctgtagtcccagctacttgagaggctgaggcgggaggatcacttgggcccaggaggttgaggctgcagagaccctgtctcaaaaataataataaaaataaaggcggggcacagtggctcacacctgtaatcccagcacttcgggaggccgaggcgggcagatcgtgaggtcaggagtttgagaccagccagaccaacacagtgaaaccccgtctctactaaaaatacaaaaaatagccgggcgtagtggcgcgcgtctgtaatcccagctactcaggaaactgaggcaggagaatcgcttgaacccgggaggaagaggttgcagtgagctgagatagtgcccctgtactccagcctgggcgacggagcaagtctccgtctctaaataaataaataaataaagtgtggccgggagagcacaagcatttccaagccgctgcctgaccttctccgtctctgttgaagacaggggccatcttgaaagaaaaaatctctgaggagttgtgtggtcactgggggagcgggggtgtttgtgaaggaagctctaagactccaatgggcctgacaaaagtataacggggtcttcttcttagaaagtgtccccttcctccgggtgcagtggctcacacctgcaatcccagcactttaggagactgaggtgggtggatcacttgaggtcaggagtttcagaccagcctggccaacatggtgaaaccctgtctctactaaaaatacaaaaattagccgggagtggtggtgcgtgtctgtaatcccagctactcaggaggctgaggcatgagaatcgcttgaacctgggaggcggaggttgcagtgagccgagatcacgccacagcactgcagcctgggtgacagagcaagactccatctcggggaaaaaaaaaaaaaagaaagaaagaaacaaaaaaaaacaacaaaaaaaaacaaagggttcccttctttggctgtgtctctagtaagaagagtcagacagcctagaaacaaacaaaacaaggataaggtgacctttaaaagggcaaaaccaatcaaataattcaaaactactgcagaattcttccaagtattcacaccctgtcctccgccccgtgtgcgcacactttttttttttcacctctgcggtcttcatgatggggcctccaggataggagaagcatagctaccccgtttttctcccagaagaggtttgacagtggcccagcaggatattcaaccccacctacctccccccaaaacccctgcaccctaatacaggtgagtcatggaacccgggtggagtccttggtttgacagtgaagcaatctaaacttgaaaaatggcctgggaacagaatgtatggactatacaaacaagtcatgcaggtgtcattgtatgcaaatattcattctttaactcaccttacatttcctgctgatcctcctctgtgctggcctcaatccttctaccacagctcagtctagcaggagagtaagaagtgagaataaaagtgtggaaatagtgtgtgagagagaagctcttttgcatgtgccagggcagcacagaggaggaagaagctatggctgggcaggagtgaggtatgcagactttgagcagggtcttgaaggatgcataggagtttatttatttttctgagagacagggtctcgctctgtcacccaggctggagtgcagtggtgtgatcatagctcattttaagttcaaactcccaggctcaagtgatccacccacctcagcttcccaggtagctagaactaaaagtgcgcaccaccacatgcagctaattttttttgtagagatggggttttgccatgttgcccaagctgggtctcgaaatcctgggctcaagtgatccgcctgcctctggcttcccaaagcactaggaatacaggtgtgagccaacacatccggccatggatgcataggggtttaccagaagggaagggtcacataggaagtcaactagtggaaaaaagcgtaagtgtttaggaacctggaatctttcctggagggaaaagggtaggatttgtaggaagggaacgggggtagagggaggagataaagcatgaaagatacaccagtaagagtgtgtcctctggtggatgctgaggttaagaagaaaaaagagtgggaggactttgcctagaaaggagtttgggctttatctaggagatacggatcccatgaaggatctttactagaggagtattattgtctaaagtcttgtttttcaaaggctaacactgagaggagaagactggaagaggctattaacatttattcagcaattactgtgtacccggtattctgctctgcattttgtattatcacaccaaccttttctagcagtgtttttcaaactgccagtcatgatcaacaagaaggagaataagataggataggatacgcatagaaactatcagtgcgtcacaagtagtaagcattgttttcggaaactttatgacactctcatacaaatagcagtgtactggtctgtatgcaaaatgtatttctcttgatggactatgtttttttttgtttgtttgtttgtttttttttttaagccatcgcgctaaggtgtaggtgtgattaacctcgttttactgatgaggacatgaagctcagggagtttcggtaccctgcctaagttagtgggatgtgtaggtttcaaacccagactggtctgaagccagaatggattccctcactaagctaggcagccttcccaagttctcggaagagacttgggagcaaagataaacctacccgcctagtgcctaccaagtgctttacctcatctcaagaaggtaagggtaagtggggcagaggccaagcagtacttctcaaactcaagcgtgcaattctgtccacgcgaggcccttgctaaaatgcagattctaggcacgccccgtgaagtaccgagtcggattaggagaggcggccaggggagcctgcctttagaaagagcttcggatgattcagatgcacacgtttgggaccgtgggctatgggggtcgccgcaataaccatgtgaggattaacgggggcttaaccgattgtgaaaatccccttagaagtgtcgcgtaaacaaccccaactcccactatggtgccggaccccagtgcctcactgtacaaagtcgcccctccccaggcgacaacgagagagggactaaataaaaggttgatggctttccactcaccaggcatggggttgagtggcagccggctactgccgaagagcaggtaaaagctcctgccacacctgggcgagactggacttagggcgcaatgtatatgctatttctggggcatttgtgggcctcaccctaaggacttctgattggcttcagggcagatctatcattcatcctctgggttagaggtgggtggaaggtcaacctcgaccaatacaaaagcactcttcggctaagcccctccccttccagcttcctgttgctgtacatcaaccacccagcgggcgggactttgcctccctccaattggctgatgcacatgtcactcattattcaattggctttcggttggtgcgctctaccgtccatcagtgacattgcacagacctattggtcaaatcaacgtcgctctagacgcctctggttgattggttaatagtgctgtcggtccccaatgttccaagcgcttattggtgaaggctgccgtcgctcgggcggtggcgggctccgggattggcggttgcttggcgggcggtgtcaggctctcggtggcggcggaggcggcggaggccagggaggaagatgtcgtaatgagcggtgggtcccggccgctgccggcggggtcttcccggcccccaagggtcaggaagacgggcagaggccgcggggagagggagccgaggccgggggttcccccctggggctgggtctggcgtcggggcccggcttcaggaggggcgggggagggaggattcccgcccggaggaggagcggggctggccagccgggcggaggcacccggaagggggcgttcgactccccgccccctcggagcccgccgggcgggagggcggcgcttccgggggccggcgagaggagcgggcaccggggtggcctggcacccctcggacgggtgccgacccacttcaacgccgctctcccgcctgggcgaactatgcctgggtcggctctgaggaggcagccaacagcccttgtgttcgccccgtgtctgagaggccttcctgcactcttaactgtagatgcccaccagcgattcagggctccccggagaacagagaggggcgagggaacgcttgagacccggacgctgccaaccagatgggcactgctcggcatcgacgacagcccggttactgatatatccccagtcgggcgatggtgtcaggatacgagagcactccctgggcagatgacctctcactggggagtgggcaaaaaccttcctttaatgtttttacttggatccttgatcttccagctagatatctgcaagctcttagcagaattgtgagaagtttgagaacttcttgccagagctcccagcctgttacttgacgccccgtaggggagactactgcagtcccaaagctcaggcgcaaacaatcttaaggaattacagaagaaataaaacaaaatagatactcgctctcttcctgtacccacctccatccccattgctgacttacggttttcagcctcttatccatgcttcttatgtttccttgccagcggctttctaattttagttcagaaggaactatgttttctcctctgggcaactgagaaacctgtcctcactgcattccttggttttgattgcaatatcctgtcatgtttgtttcttaattaacttcatccaaggggactcagtctggcctttctcagtgcattctcccaaagttctttcttcttctgaggttacttcttgttcacttattgtttcctagagaaaggtatgagccagtagatctgctttaaacaatgaattggcccaagtttcccgtttacagatttcattacagatggacactgtttcaaggtgcactggcatgcactgtctaaaacggtttcatgctgtaccccagaaggcattcagtttcacagtggagggctgtattgagttggtattctggatgatacaatttttagggctagaaagtttagagtgttggctggctcacaggctgcaaaggaaataatggtggagtccagaccacagcagtaatttcaattactaacacaaagaaacccattgtctgcaataatgaatataactgcagtgtcttgttttgttttaaattcttgtgtgcgatgaagggggcgaatctatcagacaacctatcaattgggctgatgatgtcagtgttccagtggcttctaacaggcgttaatacctgttggaaatggattatcattggctgggacgattggtaagttttctaattctagttcttcctcttggttgtacagaggcttaacctctttggttaaaagcaactacaagaaaaaaagcgagtctgacataattatgaacccccctgagctaggctgctgaagccagaaactctttgccaaggagacccaagtagagtttgttaataatcggatcctcacctgactgcccaacggggagaactggctccgggagaaagagtttggcatcactctggacagcagatagactggccacttttttctctcagattctattaaagtttgggcctctggagaggcctgtcagagaggagaaaagaaattataagatttgggcaaatgtctggggtaaagaagctttatggcatttcagcaagtagagtggttggttcatttggatattttggccttgaacttcttatttcttctggtggttaataccagctttttggagaagttgaacagtcctttgctataggtctgtggcagatcccaagtactgtcagcaagtatagtattgcccaaccagggcccttatgaagacattttaaacttgttgcagccaaccagtagaccttagtattggcttggtttcagccatcttctaaaccttgcccactcatttctgtgatagatatgtataacatgttttttttctaatacttattttttcacacacaccccccttttctgtatacacaaaaattggaaaccctgcttccaaacactgaaaaacttaggatattttggatcaggtggacaatggctatggaatgaaagatgcagagaaacactgctttaaagagtatgtagagagttacagagtttagggatgcagtagcgtgaacacttctgagtttacaagatttaacctcatggccccatcttaaatcttgcgggctgcaaacctggagtaaaatctgttcagggaagctcatatgctttcttacaagttcattgggtgatatgtctggagttttccctttttgcaactgacttggatttgtcggaatttcttcccagcacctacaggctgaactaaaccagtatccagtacatttctgggctgataaatggacatcattttggaatgcatttgttgcttttttgcttgtttttgccttgcttttgttttggatatgcgtgcaactccttgtatgacgttgtctagacctgttgtaggaggaaaaaaagttctttctctttatttcttcccttgtagagccaacacttagatctttatgtttctgaaatgtagttgagtgtctttttaaagatgctcttcctcaattatcagcagatctttttttggctagcagcattctcttaggagaccttggggtggaggaggtctcacttttctgtcagcaatctattggagcaaggtggaaagatgagtgaagagggtaaaaatatgtgacatttctttttttaaaataatagaggcatagtctctctatgtcaggctggtctcaaaactcctggcctcaagcaatcctcccacctcagcctcccaaagtgctgggattacaggcatgagccactgtgcctagccaacatgggacatttctaactcgagggtattgtcaggccatgtaggaaagggagcagagattgcccttgaggagatgctcccaggtggcagatttgtcctacttgatagattccaaaatggaaaacggatttttctgctgcctctggggacactgaaaaaagaacctccacatgagttcagaggcagcaccggcagcttaggggaagtcatggcttccactgcgtgtctaggaagcgctctttcaggatgctctgaggctgccactggcacaggggaatactgtgcttctcatcagactgggctgcgggctgatgtgctcttgggagatgagctctgctcaggagcaagaggttgtgaaagggctgatgtttcttaggctcccccaatgagcagctccaagcagtgctgagatgtctaggccgtttgtgtcacaggacaagcacacttgcagacccaactgttggaatccttcattggcatatcattcccattgctgctgtttgtctccacatcagaattgcttgctatacttagccagaagccctgccacattgcagtgcagaggcttagctttcttgtttttgttgctgagtgctctgagataccagtttgtccctttgtggtgatttaggcagttaggtggcctttgatctcattcacagagtaaaaatggctcaggaggagccagcagacactagcgtacacatttccaaatgtcatctttctagagccttctctttggggttgtcacctctcctatagaatttggtagaatcacaaagtggtctccaagagagtgtgaataggaagtaagagtgagcaggcaggccatgtaattggaagtggaatatctctgctctcaattgataattaggaatcttcttagatcagcctagaagaaaacagaccaagacatttcccagcctccaaaaaagtaaatggtaagccagccctgtcttctcaggggaaatgaaatcaccactcatttcagaagctgattctggcctggggccgggctgggtgatcacgcctgtaatcccagcactttgggaggctgaggcaggcagatcacttaaggtcaggagttcgagaccagcctggctaacatggcaaaaccccatctctactaaaaatacaaaaattagccatgtgtggtggcacacgcctgtagtcccagctactgcagaggctgaggcacgggaatcacttgaacccaggaggcggagattgcagtgagccgagagcgcaccactgcaccccagcctgggtaacagagcaagactccatctcaaacaaaaacaaaacactgatcatggcccaggataaatgtggggagtgactcacaaataaatgtgccaaagcacataaagagattctttaggggaaaaagtatatcttgcttcttttttttctcctgttctctaaaattctgaggcccagtattctttgacaaaaaaacttgatgctgtttcttgggcctgctttgatcaggttctcttcaccctatgctgcccccacccccacacacttccagagtcccttccagtacaatgggatgtgacgcagtcaggatgcaaactagcaaatgacagtcacgttttggaaagaagaattaagggtggagacagataggcggtattcaaattcaagtgccttcgttatcttttttttttttttcttgagacggagtctcgctctgtcaccaggctgaagtgcaatggcgcaatcttggctcactgcaacctctgcctcccgggttcaagcgattctcctgtctcagcctccagagtagctgggactacaggcacgtgccaccacacccagctaattttgtatttttagaagagacggggtttcactgtgttggccaggatggtctccaactcttgacctcgtgatccatccgcctcagcctcccaaagtgctaggattacaggcgtgagccaccgtgcctggctttgttttttttgttttttgttttggttttttttgagacagagtctcgctctgtcaccaggctggagtgcagtggtgctatcccggctctgccaatgcatgtcaatggagagaagcattaataatgcatatcagttgagagaagcattgaaatgcagtagtacctggtgtgtggtgatgagaggcgtgcgctttgaagtttttggccaggagcaggactggactgcactggcccacatgtgaggtgactggtggggttgagggttccaccagggtctgggtcagctaaacccagctgtggagtggatcctgacctagtgccaggatatgcaaatctgcagcttttctcctttggttcctaaactcgctttaggccctcctgctctaaagcctccaggatttattcattcacttattcaacaaatatagattattaagcacctaccatgtgccagggactgggatacatcagtgagtaaggcagagaagtccctgcctttaggaagcttacatcttagtgggagacaattaataactaatagatatttgttagacagtgagaagtgctaaggaggcaaaatgaggataaggtaaaaaaaggggggtggcaatttacatagggtgatcagggaaggtctcaatgataaggtgacatccgagtaaaaccctgaaggagtggggaggagattgagcctttttctatctggggtgaggggaggagggtgagaactcagcagagagaagagcaatgcaaagaccctcagcaggggccatacttggtatgttcaggaacagcagggagccagcatggctaaagcagtgagagagggagagtgacagggcaggtgaaagaggttaggtcacacaggggccttttgtgtcacaatggagattttggcttttactttgagtgggagatgggatggtattgggggcctctgagcagagaaataacatggtttcatttaagtgtgatgggtcttactctggatgtgttgagaatagactgatggggtcaaggtcagaagcacagctaggaggttaatccgtgggagacatgatagaaacctggacctaggtgatgacagaggaggtggtagaagcagtcagattgggcatatattttgaagatagagtgtttgctgtcaagtgtagggtgtggaaaaaagataaggataactcccaaggttttaaggctgaggagctggaaagatgaagttactattcattcactgcagtggcgaattttgaaggagtcacaggattaggacaatatcgggagcactgtttggggctagttagatttttgttttgttttgttttgttttttgagatgttgttttgctcctgtcacgcaggctggagtgcagtggcacaatcttggctcactgcaacctccacctcccgggttcaagcgattctccttcctcagcctcccaaggagctgggattacaggcgggcaccaccacgcccggctaatttttgtatttttagtagagacgaggtttcgccatgttggccaggctggtctccaactcctgacctcaggtgatccacctgcctcggccgcccaaagtgctgggattacaggcgtgagccacagcgcccagctggggctagttagatttacgatgcctattaatacatccaagtggagctatcagtaggcagttggatataccagtcgagatagaaatgtgagagttaaaattatatagaatctgtatcttactggtttctaaacccacgagactagacaaaatcagctaggaaacaggtgtagacagaagaaaggtcctgagacagagtcctggggcaacccaatcatttagaatttgagaggagaggaagaaccagcaaaggagatatgggagaagttagccagagactagcaagtgtgtcctagaggccaagtaaagaaagtgtttcaaggaagaagaggccaggcgcggtggctcacgcctgtaatcccagcactttgggaggccgaggcgggcagatcacttgaggttaggagttcgagaccagcctggcgaacatggtgaaaccccaactctattaaaaatacaaaaaattagccgggcgtggtgtcaggcccgtgtaatcccagctacctgggaggctgaggcagcagaatcacttgaaccggggggcggaggttgcagcgagccaagaccaaaaggaagagcaatcaactgtcagagcaacacggatgacgtggtttaagaagtagccatggccggcgcggtggctcacgcctgtaatcccagcactttgggaggccgaggtggtcggatcacgaagtcaggagattgagaccatcctggccaacatggtgaaaccctgtctgtctctactaaaatacaaaaaatcagtcgggcgtggtggcacacgcctgtattcccagctactcaggaggctaaggcaggggaatcacttgaacccgggagacggaggttgcagtgagccgagattgtgccactgcactccagcctggcaacagagcgagactttgtctcaaaaaaaaaaaagaagtaggccaggtgcagtggctcatgcctgtaatcctagcactttgggaggctgagactggcggatcacgaggtcaggagatcgagaccatcctggctaacacagtgaaaccctgtctctactaaaaatacaaaaataaattagccaggtgtggtggcgggcacctgtagtcccagctactcgggaggctgaggtaggagaatggcgtgaacccgggaggcggagcttgcagtgagctgagattgtggcactgcactccagcctgggtgacagtgagactctgtcccaaaaaaaaaaaaaaaaaagaagtagaagtagccattaggtttttagcaacatggaggtgtctggtggtgtgaacagttttcgtggcatgcatgaggagggtgcagcctggttggagcaggtttaagaaaagctagcgggagagaaattaaggacagtaagtataggtaactcctgcaaggagttttgcttgaagagaaggggagacataatggatcttagctgatgagggaaattttaacttcttgatgaaattgtagacatacctaagggtcattgcctgaggctgggggtctgagatggcggagtggggggagatgggaggctcagtaaagggttaatgtggagacaagatctccattccttactcaccttcttgcttacttcggcctgtggcattagcaagccacggcccagagttgttctcattgaaatgaaagccattgaaatttgttttactgttaatgggctcttttaccatggttttaatttatttgtttatttaaaatttttattattattttttaaagacagggtctcactctgtcattcaggccagagcacagtggtgcaatcatggctcactgcagcctcgacttcctggactcaagcaatcctctcgccttggcctcctaaggagctgggactgcaggcacacaccaccacacccagctagtttgtaaacattttttgtagagatggcatcttgctgtattgcccaggctagtcttgaacccctggcctcaagtgatcctcctgtctcggcctcccaaagtgctggtattacaggcatgagccaccgtgcccaccttataatagttattatgattgctgaggtttgcctctcattgaaatattcagcacaatttggagtctttcactaccaaggttgctgctttcttcatccaaatggattctcataccccatttgtgagctttctttgaggtccaactttgttctctaaaaccagccagggcatgcttttccctcaccagctctgaattcttccaggctaggcaactggaaaagcctgggcttagaaactgctttgttggcttacggcccagctgagctgaccaaaatagccaagagaaagactgtttgcacagtgtgaaattcctccaggggaaataccatagcaaaaagccaagaaagccagacccacgatggcaggaacccacaggcaaaaaaagccgagttacccccaaggcctgggttgtggagatggagcctagttctctccagaagaaaaagcttcctaaagcctactgttgtggtatttctgtaggcgcgttttctcatttgctgggtctcaagagtagcattctcagtgaaaggaacagtcgaacagcctgcagcctggtggccagggctcagaggtctctcttcctgttacgtgctctccccaagtcaggcctagaaagaccgtgggacagggacacactcccagctctgtgttgatgggacagtgccgaagggtgcctggagtatgcactggcaggtagcagggtcacctgccccagatttgaggtgggaggaggtcaggaaaggctttcgctgagtgagagtataaatgagctctaaaggacaggagctggccgggcaaatgggagagagtgtgcttcaggctccaagtgagacagggtggcgtgttttaattccagaaatgaaaaactgaagtgtgtgttgggagagttggaagggaaagaggtcaggagggaggaccagggagggacaggttgttctggcctttataagtttatcacaagagcatcagggaacaattgagggggttaattaggagagtagctggatgggatttgcactttaaaaagagccttctaaccaaattgtggaggctgactaagggggaggccagaggccaggaagcagttttagaggccgtaggcagtatctcaggtggatcatggtgatgaggatggggagcctgggtacactatagggagatttgtctatgaggtggaatcatgaggacttgatgattggttggcagtgagggggatactcaggttttgtcctgattggagataccagaagagaggctgctttaacccaggatattcatacagcccataggcactgaaggtgtccgtgagccatgtgccaggccttggtgtctgcagttcagtggtgtaaacagacatggcccaccctggggagccctcgcatacattgggctcatgattagttaatgagtggtgagtgttcccaaaggagttagcctcatctcaggggtccagaaaggcctctctgaggaaatggcatgcctgttacataatggctcttaaattatgctgggaaagtcaaacagccagagacctgaagggtgaggtcttagctagtgaagagaacagaaagagctgtaagcaaggaaagacagctgcagacactgaagtttttcaaggatctggaagaaggcctgtggtggctgagggtgagaaggctggacaaagaatgggcaaagctgtcgctcagtgccccaggtgtctgtggccagccctaatggaagacccacagagggctggatgtacaggtctaacacgtggagcagagatctgggccagacacaggcctatgagttggcagcctgtggaaggtatgtaaagccgtgcgagtaggcatggtcacccagggaaagggtgctgggtgaggagaaaggacagatgttggggaacatcagtatttaagggtggcaaaggaagaggagcccacaaggggaagaggtggcaggagaggtgggagaaaatccatgggaattttgaggaagaggcactggtcagaggggctattggattgagcagcaaggaggtcgctggtgacctgggcaggtgcagcatgagcgcagtgccagggtggatgtcctaatgctgccgggaaatgagtgagtagggaaggagggaggggacggcagggtgccagcagtttttctaccaagtttggccaaaggggtaggaagagaaggctgtgctggaggggacaggaggtagaggcggatgatcagtagtacatcaagagtctagaaactcaggggatgcttttctgctggttttggaattaaattggtttccaatatgggaaaggaatgttgtgtgtggtcccatcgggcacctgcaaccccatccctatgccatgctgccttcaaactttgtttgatgcccctggagttttccatggaacctaagagaggtactattgcttgtatagtaaataattgtaaaacttcaccagcttggggactgttgggaaagttttagccaacctaacttaatgaaaagtctgaatgatataactttgaaagcaatgcagctttttctttcaagaatatgcactaatcccacttacctatgttgttaagtgttggtttcagtgaccggatgtaaactactgttaaaaccaagtggcactattaaaatggcggaagtggtataaaacaattattctgactaagggtccctttgcaatcttcgaacaccatttaggctcgctttaaatagtatgaaagaaaagttaagcataatttatgtccaaattgtatattttaaatataaagttccaaattaatgaggttctaaagtgcctttgatcatagtcttacagttaggtatctatgctacctcttcttaaccacttttcatttccaaacatcagtgggaaatgcctctcttttccttttcgtggttaattctgtagtggcagggagatcggtctctcttttggttgcccaggtctgcagcctgtggccataaagctctgagtgacgctaggaaagatacttgcaaacattggtttgagatctataggagtatttcaggaaccagctggggaggaaaatgaaaccaagctgaaatggtgcaacgtccagcactagcagtctgcagcttgcttcagtagattctgctttaacctcctaactgaagagtcactcagaacccagcccagtgtccaaacagtttgagtccagggtaataaggactgcagagagggagatgatgaagaaacgctaggccagtttttatttcgtctcatttcatttacactctgcgcggatcctatgtctcttgttttataatagaggatgtctaagagagtcattcactaattttagctaagcaaacctgagccctgggggagcctcctgggagagccattgccttcctttgcagttctgccagcaacaaactcatcttgtatttttatcagcaacatggtctgagaagtataaaaatcttttttttaacttattttaaatcactgcactttcttccagtgaataaaaatcttttttttttgagatggagtcttgctcttgtcgcccaggctggagtacagtggcacgatcttggctcattgcaaaatccgcctcccgggttcaagcgattctcctgcctcagcctcctgagtagttgggattacaggtgcgcaccaccacacccagctaatttttgtagttttagtagagatggggtttccccatgttggccaggctggtctcgaattcctgagctcaagtgatctgcccgcctcggcctcccaaagtgctgggattataggtgtgatccaccgcgcccggccatgaataaaaatcttaaagatcatttggtccaacttcccaccccatctcaacatcctgactccagcagggacacatgtcctgcctctggttaagtgattccagagaagggagaacatagtacctcagaaggcaactgattttcatcttttcaaagttctctcttgtgttaactaaaatctgcctcaaaatgtccacacaggagtcttggttctaccctttgaacccatgtccccactctggcaccctgaccacaaccattgctgctgtcttctgaacaagctccagctgaaaatcccccttttaaaatgtccctcagaacagaacctgatgctccagatgtggcccaagtgtgtaaactacaggaggatattatttttttgttctatgactgaacttttagaaatgcaatccaaaattgcagtagcctttttggcagccatatctagattgtgctggcccccattcagcttaaagtcaaaacctctggggcttttccacatggcactattaggctctttctgccctatatgcatgtgattggttttttaacctaagtggaggacttattttttttaatatacagacaaggtttcaccatgttgcccaggctgggctcaaacacctgagctcaagtgatctgctcacattgcccttccaaagtgctgggattacaggcttgagccactgcacctggccaggacttattaaactttaaagccatatatgcctttaaaccctcgatgcagtgatataaattattagagcctcacagaaatcctagaaggatgacattacctttgttttacagagggcactaggaggaggctaagagggaccatcccactaatgaaccacacagtcagaatctcatttaggtatggagcctgatgttcttaaacattgtacctaccagttttttaagatgtccttgaactctaatactaatacccattgtgtttccaatccttctcacttttgtgacatctgcaaggtttttttgtttgttttttgataccgagtcttgctctgttacccaggctggagtgcagtggcaccatctcggctcactgcaagctctgcctccaaagttcaaacaattctcctgcttcagcctcccaagtagctgggagtacaggcatgcgccaccacacccggctaatttttttgtatttttagtagagacaggatttcaccatgttggccaggctggtatgaactcctgatacacctgcctcaacctcccaaagtgctgggattacaggcgtgagccaccacgcctggccaacatctgcaagttttacttgtcgtctagatctttgccaaacttgggtggtgaataccattctaaagcctaagttttccagcctgtagggcacaaaaccaatttagtgggtcacagccagcatttaaaaaaacaaaacagaatagaaaaatatcacggtccgtcacatgtaataagggagttttgtttcaggaaactttcattgcatgagcatgggacagaaatgtgtggtgtatgtatgcatatggtgggtcttgatgcaaattgtttctgtaactgtggttcgtggtctgatagtttgaacactaccactctaaaggaaaaatggtttgggttggcttagattattttcattataatattacaacttaattttatatgaacatgaatctgtgtgtcagctcattgatctagctcctataaagttcacacatgtaactacaaaaaaagccagtaaaattcaaattatcagcatcattctgagagggtgatgtttgactgaacccaaatcattgcttttccttgtaagcatggcacagacttgacacttaggctccttgagttctgcacacccatcctgtagcgtgtcagtcagagtaatacagtctttccactgcttctaaagttatgtcatctttcactttgcacagatgtatcgtgaactaaatgtgcagaatgaagttgtcctaattagcccacacagtgcacttgtaaacacacacacaggccctgaaatgtgcaggacttggttatgcagcagttacctggtgatctatggtatatgttcatttttaaaaagatgattgggctgggtgtggtggttcatgcctgtaatcccagcacttttggaggtggaagcaatgggattgcttgagcccaggagttcgagaaaaggcagggtaacatggcgaaaccccgtctctagaaaatacataaaaattagccgggtgtggtggtgtgcaccagtggtcccagctacttggggggctgaggtgggaggatcacatgagcccaggaggcagaggttgcggtgagccgagatcacgccactgctctccagccagggtgatagagcaagaccttgtttctaaataaataaacaaacaaataaatctttgttttggctggtcatggtgattcatgcctgtaatcccagcgctttgggaggccaaggtgggtggatcacttgaggtcaggagtttgagaccagcctggttaacaaggcaaaaccccgtctctactaaaaatacaaaaaaaattagccggatgtagtggtgggtgcctgtaatcccagctacttgggaggcagaggttgcagtgaaccaagatcatgcaccccagcctgggcaacagagtgagactacatctcaaaaaaaaaaaaaaaagattggccgggcacagtggctcacgcctgtaatcccagcactttgggaggccaaggcaggcggatcacgaggtcaggagctcgagaccattctggctaacatgaaaccccctctcttactaaaaatacaaaaaattagccgggcgtggtggcgggcatctgtagtcccactacttgggaggctgaggcaggagaatggcgtgaacccgggaggcggagcttgcagtgagcagagatcgtgtcaccgcactccaacctgggcgacagagcgagactccgtctcaaaaaaaaaaaaaaaaatcacagtgaaaacacacaagaaaagaataaaaaggcctctgcggagatgcctgtgaaccctggtcctgagacccaccccagttcgagacactttgcagcagcagacttctcagcacttaggtggaggcatgctcagcttagccccagacaaactagactatcatattgcccaagtttcctccttgtttgttcacaagaatattatgaaaatgtcagccagatgcctgttgaaataaaatacctggtgtataccatgctcttgatgtatccatccaaaaccctacaaaaaagaaacagatttgttcagcatgacctgttcttctatattataatgctattccttgtggtcactccttcctttcctcagtagttaacagtactattcaatcatttgtcctaggattttgccaagaatcagtgcctgtaatattacgggatctgcatatataattttgcccagagctgccctccagctccatacacatttgcaggtgtgtctgcaaagtctcccctcctctggagtatagtttgtgtggacttcaggcctggtaaccatttaaggcactggtgtgctttcttaccagctcatcacctatccagggcttcagtttccacttcacctttttttttttttttttatggagatgggatcttgctccatcacccaggctggagtgcagtggtgtgatcacgactcactgtagccttgacctctcaggttcaagcgatcctcccacctcagccttccaagtaactgggaccataggcatgtgccaccatgtccagctaatttttaaattttttgtacagatggggtctccctatgttgcccaggctggtctcaaattcctggcctcaagcaatcctcccacttcaccttcccgaagtgttggaattataggcacgagtcactgcatcccgtgccttcaccttttctttacttttccccatttaagaattgttcttccaaacagagaagcctgaggccagccaaaatgtgaacggttctgctttcccaatatgtatccttttgtttgtttgtttgtttgtttgtttttgagacacagtctcactcttgcccaggctggagtgcagtggtacgatctcagctcactgcaacctccacctcctgggttcaaatgattctcctgcctcagcctcctgtgtagctgggattacgggcacctgccaccacgccctgctaattttttgtctttttagtagagatggggtttcaccatgttgcccaggctggtctctaactcctgagctcaggcaatctgcctgcctcagcctcccaaagtgctaggattacaggcgtgaaccaccacacccagcccaatatctatcctctttttgccaaattccttacaaggactcaacccctgcgcctttttgtttgttttttttttaagagatggggtcttgctatgttgcccaggcaggagtgttttggctattcacaggtgtgataatagggcactgcagcctcaaattcctggcctcaagtgatccttccatctcagccttccaagcagaatgcatcctgagcctttttgtctcttttagtctttaaagtaatacccctcttatttctgtacttactgaaatctgctttccagaggtccaggattgaagtctgactctgcctggtgttcttttccttagtgatttatgcactttaagatggtatagattctttctcctaaaattctcatgactttcgttttcctgatactgtgtttctttctttttaaaaaatttttattagggacggggtctaactgtgttgcttaggctggtcttgaactcctgggttcaagcgatcttcccacctcggcttcccaaagtgttaggattacatgcatgagctactgtacctagcctcttttggatgacttaagtgcacagtagagagtcccttcattacttcctcaaccttatttttctttatttaagaaaaaaagtacagtagaatatatttatcatgggaaaatgaaaaagtacagaaaaccaaggtgcaaaataagtttaagtcaaacaaaactcaaccgctaggagataatggcttaagactttttcctatttgattatattcatatatagaaatatatacacatttaaacaaaaatagaatttactctgttttcattctccttgttatatccagttagtcattagctctactgagtcttggttgatgcctgtggggccgtgcctattgtactatgtaaaagcgtaaattcaagtaaagaattgacccatgaggccagggatggtggctcacgcctgtaatcccaacactttgggagactgaggcaggtggatcacctgaggtcaggagtttgagaacagcctgaccaacatggtgaaaccctgtctctactaaaaatacaaaaattagctgggcatggtggtacatgcctgtaatcctagctactcaggaggctgagacaggagaatcacttgaacctgggaggtggaggttgcaatgagccaggatcgtgccattgcactccagcctgggcaacaagagtgaaactccttctcaaaaaaaaaaaaaaagaattgacccatgtgctgtatatgctgcctggggacaacggcctttgtggtgaaggctgagcataaaacacccaagacttggcagtggagcaggtgtgtcctccttgtcagaaatcttggctgagcgatacttccctcccagttttggcatctgtctacagcaggagtgaacaggaggcttgagtttgagctagaggattagctggggagctcccccctgcccaccatagaggagttccagtttagctatggagagccagcagtgcccagcagagagggcatagctgagttacagaagagagtcctggtataatcttggttatttttgtgttatctcagactctgtggtggctggagggggcagtccaacgacagcaggaccagctgtcctcacagcctcagatggctgagtctgaggagaggagaggagaaagtaatctactgaaatagatgtaaggctatcaacccagggtgggtaagtctggggaaaagtcattaacttcccttggagaagcagcaacaaatagaggcaaaaagaaaatctggctgggtgcaatggcttatgtctgtaatcccagcactttgggaagccaaggcgggtggatcacctgaagacaggaattcgagatcagtctggacaacattgtgaaacctctgtctctactaaaaatacaaaaattagctgggcatggtggcagcgcctgtaatcccagctactcagaaggctgaggcaggagaattgcttgaacttggaagggggaggttgccgtgagcctagatcatgccactacactccagcctgggcaacaagagcaaaaattccgtctcaaaaaaaaaaaaatagaaaaaaagaaaatctgaggcaagtgggcttgcgttctttttgggcattttatacattactccatctcttttcttccaacagatccacagaccagcatggctgccactgctgctgtgagtcccagtgactacctgcagcctgccgcctccaccacccaggcgagtaggcagtgggctccgagggcttggggctgcagcatcctggacagactcaccgaaaacactctctcttcactgtctcactataaataccctaggttatgagactggggaaggttcagttagccacattttctttactgagaaactatggccatttacctaaggtgccgcagttgggccagggggaaaaacaaggattaaactctgtgttccttccaccagacctcactaaaaaaggaaaaggaaaacagaggctttctcattgtctcgaaagtgtagccctccccagtctataaagttacatgttccgagtactaaaaagcactttactgaagtatttattcctcctgttgcccctccattttttcctccctcctttcctcagttgagcaatcagggacccctcagtccctggggtgggctaacaaactccatctgagagccaaacatgcttcactgtccttagaaacaaggccagcggagagtaggaagtcagctcgtgctgttagtttaccctgtctgtggggtgctgccaggggttccttcctgagaaagacattgcccaccttttctccctcacttaatggagaaaccagtagagaaggggagacagcagccaagcaggggagggtactggcaacatgcctgccccggaggtggggaagactggcgtggaatgccgccaggaggagaggatcatggacagaggcggccgggcagcgggccttcctgtctcactccttttctctgctgtttttttgcaggactcccagccatctcccttagccctgcttgctgcaacatgtagcaaaattggccctccagcagttgaagctgctgtgacacctcctgctcccccacagcccacaccgcggaaacttgtccctatcaaacctgcccctctccctctcagccccggcaagaatagctttggaatcttgtcctccaaaggaaatatacttcagattcaggggtcacaactgagcgcctcctatcctggagggcagctggtgttcgctatccagaatcccaccatgatcaacaaagggacccgatcaaatgccaatatccagtaccaggcggtccctcagattcaggcaagcaattcccaaaccatccaagtacagcccaatctcaccaaccagatccagatcatccctggcaccaaccaagccatcatcaccccctcaccgtccagtcacaagcctgtccccatcaagccagcccccatccagaagtcgagtacgaccaccacccccgtgcagagcggggccaatgtggtgaagctgacaggtgggggcggcaatgtgacgctcactctgcccgtcaacaaccttgtgaacgccagtgacaccggggcccctactcagctcctcactgaaagccccccaaccccgctgtctaagactaacaagaaagcaaggaagaagagccttcctgcctcccagccccctgtggctgtggctgagcaggtggagacggtgctgatcgagaccaccgcggacaacatcatccaggcaggaaataacctgctcattgttcagagccctggtgggggccagccagctgtggtccagcaggtccaggtggtgccccccaaggccgagcagcagcaggtggtacagatcccccagcaggctctgcgggtggtgcaggcggcatctgccaccctccccactgtaccccagaagccctcccagaactttcagatccaggcagctgagccgacacctactcaggtaccacactccctgtactgtcctccttctcctcctctggttatctctttttggcttgctttgaagatgatgctggtcatctcccagcttgatctgaccttgagagtcagtatcttttggggtgggcagtaagtggccgtttctacctgacaaatgggctctctttagttcatagggccaagtacttcttatctttagaaattgatgaaacatagggatattttggcaccttttccttataggttgttttttttcaggggatggtgaggggatagatacatacttgttaataacttatttttgattatagaattactcaaaacattagcaagaatgaaaacattccagttcatagaattttatgtaaagtaagaaaattaatgagaaaaatgctgatcattattaatgacaagaaaaaaacaggaagagcagcctagctttatagcaggaatatttaggctagattcatctggaatgtttgtttgttttagggtgtttttttttttttgagatagggtcatactctgttgtccgggctggagtgcagtgatgcggtcactacagtcttaatctcctgggctcaagcaatcctcccacctcagcctgagtagccaggactacaggtgtatgtcaccatgccaggctgagccactgcttcctgccaaactgggatgctgaattcaacaagaatgttcttatttttggcatttattaatgtgctctaatactctggaatctctttggctctgtgaggcaagttttattctttgttcatgcctgctaagtgccagtaattgtgcccatgttgcagatggataacccagaactcagataatttatgaagtatccaagatcaaatagggcataaatgacaggaaccaggagtcaattgagatttgtaacttcagaccccacactcttccatcttccaccttgactcttgtgtcttatgtgtagcaggtgctaccattaaaattgaggagtttttttttttttaatataaaaaacagttcctgccatcgaggaatgtatgacctagttgtctatagaggaagaaccgaatgactgagagtgggaagttgtgtaatttcctgggtggagaagagagcctttgaatttgaactgtggacatagaaatcacacaggaattcacccttctggcatatttaatgttgccaggtattttttataagtcatttatcacaatatctgtgaattcccatgatcagacctaccctacaggtgatattttatgttgccaggtgattttttataagtcatctatcacaaatatctgtgaattcccatgatcagacctaccttacaggtgaagaattgtggcacctgctcaggagcacatcctcggcattgcctcccctcccttccatgaggtcccatttcttgaggttgatggagacaggactaaaacccaggtcttccctaaggaaataatgatacatatgcagaaagatttagctacagtattattttttcatgactacacagctttataacatcccaacatgctgattattatacaactgataccttgttaactgtatatatctaggctgtttccaatcttacagctaaataaatccctgaaagtgggtcaaggacacgtacatttttaaaaaatttgtattctatattagaggtttgcagtctgtgaccaactttgaagccaaatctagcccacctgcctgtttttgtaaataaagtttaattggagtgcagacacgtccatttgtgttgcccttgcactacagtagtagcacagttaagtagcagagacaatatgccccgcaaagctaaaatatttactctccggccctttataaaaaaagcttgctgaaccttcagatgcaaatacacacacacacatgcatgcacgcatacacacacacacacaaaatcagacataaaatatcagtgatttgaaaaaggggcacatatcagaaaactgggaatgagatttgcatatttactaagaaatgggccaggtgaggtagtttatgcctgtaatcccagcactttgggaggctgaggctagagattgcttgagcccaggaattcaagaccagcctgggcaagatagcaagaccccatctctacaaaaaaattaaaaattagtgaggcatggtgctacacacctgtagtcccagctattcaggaggctgaggtgggaggatcacttgaacccatgagttcgagattgcagtgaactatgatcattctactgcattttagcctgggtgacagagaccctgtctctatttaaaaaaaaaaaattttttttaaagagatgagatgtttgttagcttttaagtgagaagaagcacagtcataaataatccaggaattaaaaattacccaaatcaaaatcacaacaggattttttttttacaaagaacttttttccttttgactcatttgagtgtaaattgccaccatgatcccccttgtcatttctgaacgctttaattcctacacacaagaacattctacattaccacaatacaatcgtcaaacccaggaaattagcagtgaaacacactgctaattccaagaccccactgtgttttcaccacttgccccactaattcctttgtggcaaaaggatctgatccaatattacacattacgtttagttgtctccttagtctcttttgatctgaaacactttgtcattccttttttttttttttttttttttctgtttttttgagacagggtctcgttctgtcaccaggctggagtgcagtggcaatcttggctcactgcaacctccaactcctgggttcaagcgattctcctgtttcagcctcccaagttgctgggattacaggcgcgtgccaccacgcccggctaattttttttgtatttttagtagagacagggtttcaccgtgttggccaggatgacttcctcattctttacttgaccatcatgaccttgacacttttgaaggctaaaggtcaactttggccattggcagctctttcaggtcggctctttttttctctttggccattggcagctcttttcaggtcggctctctgcaacctccgcctcccgggttcaagcgattctcctgcctcagcctcccgaatagctgggattacagatacccgcctctgcgccctgctaatttttgaattttttttttttttttggagacgaagtctcactctgtcacccaggctggagtgcagtggcgccatctcggctcactgcaacctctgcctcccgggttcaagcaattctgcctcagcctcccaactagctgagactacaggcgagcgccaccatgcccagctgattttttgtatttttagtagagatggggtttcaccatgttagccagggtagtctcgatctcctgactctgtgatccgcccgcctcagcctcccaaagtgctgggattacaggcatgagccaccgcacccggccaatttttgtatttttttagtagagacggggttttaccatcttggccaggctggtctcgaactcctgaccttatgatccacccgcctcggcctcccaaagtgctgggattacaggctcgagccaccacacccagccttcaggttggctcttatatccctctgacaggctctcattctttttttttataaaatcagctttactgaaacattcacatactatgaaacttacccttttaaagtatacaattcagtgatttttagtatattcacagagttgtgcagccattacctctatataattttagaacattttcatcaccccaaaaagaaactctctaccctttagccatcactccccatttatttcctcctctctgcagcccctgacaactactggtctatttgtaatgttttcaaggttcatccatgttgtagcatgtgtctggtgactggcttccttcacttagcatgtttcaaggttcatcctgttgtagcatgtgtctgaacttcattccttatattttcccaacctcagccttagggtcaaccatttcttctcagattcctggttcctctcattgaaggatgtgattgcctctttttaattctgtcattgtcttcctcccccatttatttatttatgtcattatggactcacggattgctgcttttttgtttttttgagatggagtctcgctctgtcacccaggctggagtgcagtggcacaatctcgactcactgcaacctccacctcccaggttcaagcagttctcctgcctcagcctccccagtagctgggattacaggcgtgcgccatccctcccggctaattttttttgtattttcagtagagacggggtttcaccaagttgaccaagctggtattgaaccactgatctcaagtgatccgcctgccttggcctcccaaagtgctgggattacaggcgtgaactactgcacccagccagattcctgttttattcactgggttataatctgttaagattattttgatgttttcattgacctagatttggccagtgggtgcccctttaagctggcttgtatcttttcaagtccccaccattctgtaagcatttctttactttctggtgcaagtgttccaagctttccttgtaccttccctgccccaaccctggaatcagctatttctccaaggagcctgggttccttttagtggagcatgtgagttacaagctaaggcctgggtgctaggtaagctcattgctactgggcatggctggtcccagcccttctcaatggacacagctaggaagtatatataaatagacatacctatgcaatgtctacgtagatagatgtagataaacttatataaggacacacacacatgtatacacatacacatatacacacatttgaatctatatttctctgtctatatatattgaaacccatgagtttccaccaatgtctctaattcccatctagcaccacagtgttccgtctagccttctccctttccataactcccttctgtgacagtgagagccctcactcctattatccttaacatgcttcctttctggataagtcctcggtatgcagccagtctcccacagccattagctctcccatagagacaccctcctcagcctgccaccgccattccctacccaccacggacaccctcctccccgctacaaatgccctccttgtcctgctcagcctctaatttgcgtatttttaaggtttttgatacatatccccaaatttccttccagcaagtttagcccacatcatacttccactcctaatatacaagtgtctgtttcctgctgtctcaccaacaatgagcatattttattttccatgtttgtcaatctgaattggagaaaagttgtttttcattaatatgtggctcttttttttttttctgataacaaagaccagaaacttttttttttttgagacagcgtattgctctgtcacccaggctaagtgcagtagaggaatcatagcttatgaaaacctggaattcctgggctctaaaatgtggctcttaaaaactaaagtgaacctgtgtcatttgtttgatggtcattcacagtgcactgccttctaaatctccaattctgattcttggcaattactttttccatgctaagtaaattcaacgtttggtttcaaatcaatagtcaacattcgccagcttagtataggatgccagcagccatttgtcgagcattagctgtgtataaatgtaggtttgggtgaattgaagagacttttagtggacaggcgcccccagttctcacttgggcagggacatttgaaggccccaggaacctagtctcttccaggcactgattttttttctctggcccctcccaggtctacatccgcacgccttccggtgaggtgcagacagtccttgtccaggacagccccccagcaacagctgcagccacctctaacaccacctgtagcagccctgcatcccgtgctccccatctgagtgggaccagcaaaaagcactcagctgcaattctccgaaaagagcgtcccctgccaaagattgccccagccgggagcatcatcagcctgaatgcagcccagttggcggcagctgcccaggcaatgcagaccatcaacatcaatggtgtccaggtccagggcgtgcctgtcaccatcaccaacacaggcggtgaggatggcccctgtggccagggtgttggcagtggtacctgctcctagcaggtggaaactatgggctggccccgggatttccagtaacaatagtgaggatgctgtccatcatagcttaagggtacgtccacctgcagcttctcacctagtccttacaatagcactcagagatagtttaaggcacatgtccccatctgacagctgaagacagagaagatagatgtactcggaaaactttccaactgacatccaaacgcaaagacggcttcttgaaggagaaagccttgcgttaaggttggaagaaaagaagggagccctggcagtcagaatagtttgtgctgcacttcagttcagtggtgagatttatgctgtgaaaccagccttgcaaataaccaaaggaaaaattggagcaacctagcaaaaatggctccttatgtagggggagctctctgaatttctcttcatccttaatgaattttttttttgagacagagcctcactctgtcgcccaggctggagtgcagtggtgcgatctctgcttcagcctcccgagtagctgggattatagacgcccaccaccacgcccgactaatttttgtatttttcgtagagatggggtttcaccgtcttggccaggctggtcttgaactcctgacctggtgatccatccgcctcagcctcccaaaatgctgggattacaggtgtgagccaccgtgcccagcccatccttaatgaatgtttagcactttaacacatttgcttttccctcttgaggtgacccccaagaggataaggcatcctagaggatctgatttttcccaaagcccatagaactgtgtcctcttttgtgttttttggtttttttttttttaagacatggcctcagggcctcgctctgtcatccaggctgaagtgcagtggcacgatcatgacaatgcagcctcagcctcctgggctcaagcagtcctcctacttcttcttcctgagtagctgggactacaggcatgtagcaccatgcccggccaattttttagttttttgtagagatgggggtctccctatattgcccaggctggtcttgaactcctgggcccaagcaattgtcctgcctgccagagtgctgggattacagctatgagccactgtacctagcctgtgacctcttgtctttttaacagaaatccctggagactttcctaaaagcagagttggtatctcacaggggcctaaggttggaggagattcaggaagaaatgtcttaagacccttcccagctgaaatcatgttggcaatattctaaagcaaattctgcctacatagtacagtggttcagggcactgactttgaaatgggcttcctgggttcagatctgggttctaccacttactagctgtgtgatcttgatatgttattgagcctcagtttcttcatctgtaaagtgctgatgatagtacctattttatagggtcatggagattaaatgagtccctgtacaaaggtccttaaaatgatatccaacatacagcaggctctcaaaaatagctgctgtgattatcatctttgtcatgtgcagaagggcagaagggttgactcgaggtttcaggcttcctcaccctgaactctgcccctctttgtccccacagggcagcagcagctgacagtgcagaatgtttctgggaacaacctgaccatcagtgggctgagccccacccagatccagctgcaaatggaacaagccctggccggagagacccagcccggggagaagcggcgccgcatggcctgcacgtgtcccaactgcaaggatggggagaagaggtaattcaaggagaaggcccaagccacaaggctggcctgtgttccccaagcccctcctggacagttgtccagagctgcaagctggcacagaccaggcaaggaagagctggcagctctgtgccaccttgccccctgcctccttgtgctctctgacctgaccccacatcctcactgcatcctgttcctgccccatcctctaccgcttttctctcctcttcctattccctccactccaccctcaccccaattctcaggtctggagagcagggcaagaagaagcacgtgtgccacatccccgactgtggcaagacgttccgtaagacgtccttgctgcgtgcccatgtgcgcctgcacactggcgagcggccctttgtctgcaactggttcttctgtgggaagaggttcacacggagtgacgagctccaacggcatgctcgcacccacacaggtcagccccctgccttcgggaccctccacccacagaggtcaaattcctgcctctcctcccacccccactctaccggctttagcaacattgacactcctggaactgccacactgagcaaaagctacagactatctagggacgacataggaaattattttcaagccattctgttatcactgttgtttccccaagtaatgggaaaggaatagttgtcattgcatgacacaacctgataacttttgccatgtcagcatagttatttaacaaacactgacatggtatgccaagcacagtactaagcactttactgattacctcagttgatcctggtaagaactttatgggaagatactttgtttatgccttttttttttttttttttttttttttttggagatggagtttcgttcttttgcccaggctggagtgaagtggtgcgatctcagctcactgcagcctccaccccttgggttcaagcaattctcctgcctcagcttctcaagtagctgggactacaggcacccaccaccacacccagctaatttttgtatttttagtagagacggggtttcaccatgttggccaggctggtctcgaacccctgacctcaggtaatccacccaccttggcctcccaaagtgctaggaatagaggcgtgagccactgcgccggcctgttgatgcccattttactgaggcatggagagctggcccagtcacacagctagtgactggtgcggccaggttcacacccaggccctgccatggctttttgtttttttttttttttaagacagggtctcactctttcacccaggctagagtgcagtggcacaatcttggctcactgtagtgttgaactcctgggctcaagtgattctcccacctcaacctcctgagtagctgggactacaggcatgcaccaccacacctggctaattttaaaatttttttagagacagggtcttactgtgttgcccagcctggtctcaaactcctggactcagatgatcctccctcttctgcctcccaaagtgagatatcacagttatagttttaggtactagcaaatcaatgcaaaactattaaaaatattgatccaagctgggcacagtggctcacacctgtaatcccagctctttgggaggctgaggcaggtgatcacttgagcctaggagttcgagaccagccagggcaatatagcgggagcccatctcttaaaaaaaaaaaaggattatacatctaccacctgaaattgtcctgggtatccacagtggtccacacatacactttggcaaacagtgctatagtgaatgcccacagtgagcagacacctgtcctggggctagagggctgagggaagcgtgacccagagctccggctcctggccagtgtggtgggacaggtcctactccccaaaaggcagaggagtcaacactccacagaaaagcagttggggtcaacatggttccaactgagtgctcagggctggcaaggtcagggtggagggggattttcctgtgatggggaggatgctgatccaggttcaaagtcagagggacaaaagaagaaagcaggcagacagccttgcacaggaagactcttaggtgcagaggctccagggacaaggaatgggaacgaaatagactggagaggtcaaatggggggtcagagagaaatgagaattgataaagagatttagatgagtaggggccaagcatgatggctcgtgcctgtaatcccagcactttggaaggccaaggtgggcggatcacttgaggtcaggagttcgagaccagcctggacaacatggcgaaaccctgtctctacaaaaatacaggaattagctgggtgcagtggcgggcatctgtagtcccagctatttgagaggctgaggcaggagaattgcttgacctgggaggtggaggttgcagtgagtggagattgtgccactgcactccagcctggccagcagagtgagactccatctcaaaaaaaaaaaaaaaaaaagatatagatgagtaagcaccagtgagcaaatgtgagagcaggaggtgggcagaatgtggtgacaaggccatgtcagcttgattgggtgcacctcacacgcaccccacctttttgggcagagacagggtctgtgcacagggtctgtgggtgatgggcatctcctcttcccaggggacaaacgcttcgagtgcgcccagtgtcagaagcgcttcatgaggagtgaccacctcaccaagcattacaagacccacctggtcacgaagaacttgtaaggccaactgcggcgggaggccctgaagatgcagtcccccacctgtgtcctccctgggcccctggtggaaaggagccctgtggctgccttgggcctgccctcagccccactcctgttctgcaactgtccccacaggaaggggctctgttccctgtattgtcctccttctgaagccccttggctctgccttggcccttcccctcaccacgagctcccggcctgcccagactgtggacactggccgtgcccaatgagacgttctaaaccaggacgcgtgggaacccttatttccaaaggaaaaacatgcatttcactccgtcgaggagcaaagtgagcccctaccccccaccccgatccccgctcccaacactgccggagtcgcgtcatgccatgccccctctcctgcacctccctggccctgccggccactgtggacgccctggggcttggcacccacctctggagaaactcggggccacctccactccatgtgcccagccccgccacaacctctcctccagcacattccagctctatttaaaaagtaaagacacccaccgactcctgatccccctctttttctatggagaacgttgccttatactctacttcagatgatgaacactgtgtactgtgtgtgctttaaagaagttttatttaattgctcccttcttcctttccttgttattcacctccctgatgcctgctttcagttgagggttgggggcaatgatgagcatatgaattttttctcactctagcaattcccttttctaaatgacacagcatttaaactcaaatctggattcagataacagcacctgcacatcctgcacctcctccctctcccttcacctcacccctgcccggcccaagctctacttgtgtacagtgtatattgtataatagacaattgtgtctactacatgtttaaaaacacattgcttgttatttttgaggcttttaaattaaacaaaaatccaactttatttttagttgtaactgcttgaggtatgttttatgaattaagtgacagatttgttatcctttattaacgtactttgttggtcagcactgggctgacaaaaattttttcttgctaataaatttagttgcctgaggcaaaatcttcaacttggcagttcggcttcctttgtcttttcccttggagagctcggagaggggactccagaggagggagctgtggtctctcagagcgatccacactgggaccaaggtaggaccttgccctcctgaccctcggcaaacccaagccacatgcccaaaaggggccgcggccacatatacctcatgacactggcacgagcccccagagcacctccaagggccagggcccaatgcaggtgttcctgcctttttcttctgtaagccagttttgcctgtacacaaagcagatacgaagagccaagttacagcagtgacctcagccagcaacttagctcttccacccacctccccaacccctggaggaaggcattggcctcagagcccattaataagaagcttagagaggagagccaatggggccttggctcagtcccctccagaaggctacagtctggcaacaatgcatttccccaagggccaaggtcccttcccaaagtgaagggcgaggcaggttcctgggagggcttggcagctagagaggcctggagcccagctgcacccgatagaggactctggccacagatactggttccttctatatcgcctgcccagtaacccagagaggacaagaagttgattgtgccttttggttttagcagatgctacaaatctgaaattttggtggggatttgttttgctttgttttgcagaactaataggaactcaggggttgcgatgttgtgcagattaagattggagctagctcagtacatgtgtttaagccccacagggccctgaagagcatccggcctgaagagacaggcaagtccgcctcaagcatgtaaaggacagcatgtgctttcactcaccctcgaaaggacacagctgggattgctgttctgttcaggagtggcgaggctcgttttgagctatccattcccctgctctgttccctttgtcaccagccacctgtgtctgccagcaaacagcttttccttagagccagtcaaccctcaaatggctgaaaaagtaaaaagcccacagatctcagatggatccaggttctctgccctttccctcttctttgttaacaagcaggggcctttcctatccctacggaagtcgtttgggcaatactagaccaccagctgaatctaccttgacacagaagcctcttcctcagcccctcagctctgcatctcatcaccgcactggcagcaggtggaagacatgaggtgtatttattcctcatgcgtggactgcatgactagaaaactgccttgctgcattctgaataaggggattggtggagagaaggggaatattaacaaagtgacctctttttgccacgtttcccttggctttgctctcaggcacaaagaatgatcctttcctgggagctgatttcaagccatgtgctttatgcttccagtacagaaactgacctgactccccagcatcatttggaaatgaaggtgccagccccaagttgggcaggatgagcatttcccatgtaggatttcccttctccagtgagatgggggttcaaaagttatgtctgatcatctctgcctcccttgggatggctaagagcgagagaatgtattctgcctagctgagtgatggcacaaggaaagcacagaaagacttgtgggcaaattaaccctcctctggctttaacctatccattatttgagagttgcaggggaactgttgaaggtgtgatgcagtctaagctcaccctaggcaagaggctcccacagacacctgatcctgatgggcccttgatgaaaatctgggtgcagctcaagggtaggggccccacatgtgtagttcctcctctgtcctctactgtccccagcgtcatgtgcaccaaagcccatccctcatgcccttcctctctgtccagctgacacttggcattgtgctcattatcccagagcctaggattccatgcctggaagaaagagggactgggcaggatttccctcccaaaggcaaatccaggcattatatgtacttttttttttttctttaacaaaaccagcaaatgggtcttccttgcccttccttcagaccacccagtccatttttacaatcatctttctggccgggcacagtggctcatgcctgtaatcccagcactttgggaggccgaggcgggtgaatcacttgaggtcaggagttcaaaaccagcctggccaacatagtgaaaccctgtctctactaaaaaatataataattagccgggcgtggtggcgcatgcctgtagtcccagctacttgggaggttgaggcaggcaggagaattggttgaacccagtaggcagaggttgcagtgagccgagatcgtgccactgcactccagcctgggtgacagagcaagactctgtctcaaaaaaaagaaaaaaaatcatctttccagtgcccttgtgaggccccaggcttgtttgatgacagtgctgatgttacagcctgccacacgacatattttgaggaagacaggatggagcaagataagggttcagatctatccccaagcccagggtaggtgtgtaggagccctgagcggatggatgaaagctgtcctggtctgagtgcagagaatggggtgttcgggttctccatttgagtcttccactgcccaaacctgaggcccctttaaggttgccccttaaagttgccacacccagaaattgggccaaagaagttaagctgttgattatttcaattctgaataaaaatgaaggcatcttctctgccttctaaggcctggtctgatcttggctccttcatcactagaaccttcctgagcagtggtctgggacccctcgccttcctccctccacctgtgtttcagagccctcctagtcagcatgggcttcacctcaaaccccactactattctctcttcttcctggggttcacctcaagccccactgctattcaacccccctctttctcttcagcttcaaaatagactcccgcatgtaccttgattaaacacaggcccactgcaaccccagtgccccagggacgaggagggaaactgtttttaaccataaggaaaacaaagcaagtactgtggtcaatgtcagtgaccctctgcttagggcaaatattggagtgtgtgactgcaaaactgggacatccacccccgactacagggggtgcccctattctgcttcggccagttgatggtatgtgagaatgcaaactcttgtgatttttgtaagagaacccagaaatgtggagtttggggtggaatctgatctttccatgtttgctcaattgtttaaaaatacagcaggaccagtttcagtgcttgagctaccagtttttgacttctgcatcatccatcccctcttccctggccagtgacatcctctctaccccctgacagtctccaacctctcagtcttcccttccccaagttacaggatcacaatggccaaaacattttttgtttgttttaagacagggtcttgctctgtcacccaggctggagtgcaatggtgcgatctcagctcactgcaacctctgcctcccgggtatgcaattcttttgttcctagcctcccaagtagccgggattacaggcatccaccaccacgcccagctaatttttttttttttttttttaatagagacgaggtttcaccatgttggccaagctggtttcaaactcctaacctcaagtgatccgccagcctcggcctcccaaagtgctaggattataggtgtgagccaccatgcccagcctcattttttgtatttttagtagagacaaggtttcactatgttggccaggctgctttcgaactcctgacctcaggtgacgcgcctgcctcggcctcccaaagtgctgggattacaggcgtgagccactgcacccagctccccaaacagtttaacctgctgcccaagagattatcaaagtggaaggactcaactgtccaaagcaagtgggacagcccctaggggttagaccactggcctcagtgtccaaaggctcaagcacctgttgcttctgcttcttcccctgcctgtaaggggtgaacagggttctcagttcctctcgtgcaccaggcccctgacacactgacctttcctagaggaccttagaccagcactgacccctccagtgagcaggcaaacggcttttcatggtggcagtgtcagcaagaatgtgttgcccaatagtgaaagaacaggctgcagacccccaggagaagtagtggagcatccattgtgtcatcagcctgggcttttcaggtgacatctgtggcagctctgcagactgcagttgcgtgatgtacacacctgagtttggggtcagctctaccttaggtccactgctgtcctgcaggacagtaagagggcctggtccccagtcattaatcttgacattgtctcagtctcttcctaatttccagtcctagaaaagcttggccatgatgttgactggacacagacccctctgcagagtcagagggggctagatccaccccctacagcaatgcccacaccagggtcccatgaggcgtgtgtcttctacactgtcctcccataggcaggcggtcttattcagcacagcagggccacctaccccatgccagggagcttttagggagacaagcccaaagtttaatagaactgtcatgactgggagtcctcagggggaacaccctgggctccccagctcacggtgagaaagtgggctgtggtcacgcacacagatacaacttcttatcagcagcatcatcctttaccccaggcaaaagggaatatggcagaagtttcctagttcacactgccctaaggaaaactcaccctgcccaaggccaaccctatctcttgtcctgtctccaaaaccaagctgagtggacccatttccccacacaccacacccattcttcttttttttttttttttttttttttttttgagacggagtctcgctctgtcgcccaggctggagtgcagtggcgcgatctcggctcactgcaagctccgcctcccgggttcacgccattctcctgcctcagcctcccgagtagctgcgactacaggcgcccgctaccacgcccggctaattttttgtatttttagtagagacggggtttcaccgtgttagccaggatggtctcgatctcctgacctcgtgatccgcccgcctcggcctcccaaagtgctgggattacaggcgtgagccaccgcgcccggccaccacacccattcttaagttgaggggacctggacgaagcagctgaaagactgagaactgttacggatgagagactaaggggacaggactgctaaatgcaatgtggggtcctggaacagaaaaaggacatgagtgggagaaaaaggggtaaaactcaaaaaagcccatagtttacttttctagtttttatttttttggtagagatggagtctccctatgttgcctaggctggtctcaaactcttggactcaaggatccgctcacctaggcctcccaaagtgttgggatgacaggcgtgagccaccatgcctggcctctgtagtttaattaatagtggtgtgccagtgttaatttcttgatgtagacaattgtgctatggtagtaagatcttaatatttggggaaggtaggtgaagagtgtatgggaaatctttgtactatatttgtaacttttttgtaagtctaaaattactgtaaaaaataaaatggaatggaagacctggaatagagaagtaaaaaatgaagcaaatggaacaagatcacccaagcagcatcagaatcagagtggacagcacatactatggtgactaggaccctgagattctggagattatgagaggtgtgggcacctgctaggcagagcttgccagctatggccccacctccattctgccccttgccacttgcaccacctcaggtccccagacccatcaggggctcatggctgatagaacacagatgccaaggaacctaactcaggatgagatgctgccttgggacagagaacacttgtgattcaaccaaggtctttggggctggggtgagtcactaaagaaactgcggtaataggacaggtggcagttgggtttcctaggagaaggggtcctcagggagtagaagaggcaggaagtgagcctgcaaggatggaataatgaacagggctgtgggtaaaaaaggaagcaaaccatggtggactatggtagtgactcagagcctggaaaagagggtcaaatacctgctcatagggaccttgggcaaaaggaaatgagaactgactccagggcaggccaaatgcaaggaccaagatttctcaaaggaaactaggaagccgctaggccatgtcctttgggcctgcctgaaaacccaccaccaggcctcctcccactcactgcctgtggccgacaccataattaccaaggcaggtagtctggggactgaaactgatttaattcacttggactttgaagctcaacatccctccagtcaacaaacacactcgtggacgggcacagtggctcatgcctataatcccagcattttgggaggctgaggtaggaggactgcttgagcccaggggtttgagaccaagagcaacatagtgagaccccatctctacaaaaataaaaaaattagccagccatggtggtatgtgcctacactcccagctacttaggaggctgaggtgggaggatctcttaagcccaggaggtcaaggctgcagtgagctatgagtgtgccaccgtattccagcctgggcaacagagtaagaccctgtctcaaaaaacaaacaaacaaacaaacaaacaaaaaaaacgaaagaaaagaaaaaaaaccaaaacaacaaaacacacactcagccctgctcccaccatgtgcaaaaatgtcctgcaccctactcaccatacgtaacacccatcatactgaaaagcttaaaaaagtggtttatgcataaacattacagattagcattttttgagcacaccttgtgggctaggattgtgagaagaagccagagaaagttaagagatgtggtccctctcgtgaaggaggtcccattctaacagggaataccagccacccacaatgtatttgggaagccatctataagcacatgcaaggatcgtttagagggttagccacaagcaccaacaggcaggacaccgataagtttcagcctcctctgatctcgtcccaagcctctgaggacccacctcccttgggcctctgataaacccactcagggcttaggcatctgctggcagagcaccaagcacacgcccttctgtaagtcctggtgttgctactcttggggctccaagctgagttcacttcaaggctgggcccaagaattcctgagcttcaggccctccagcacaccccttgctctgctatcagccttcttcctctcacctcttagaaagctggacacaggccgggcatggtggcacacacctgtaatcccagcactttgggaggctgaggcaggcggatcacctgaggtcaggagtttgagaccagcctggccaacatggtgaaaccccgtctctactaaaaatacaaaaattatccgagtgtggtcatgcatgcctgtaatcccagctactcaggaggctgagatagaagagctgcttgaacccaggaggtggagtttgcagtgaaccgagatcatgccactgcactccagcctgggtgacaagagcgaaactccatctcaaaaaataaaaaaaaattaaaaaaaagaaagctggatgctatatttcaccagcatcattaccactcctccttgactctccatttccctaccaccctccctaactctcccaggccctcttcccttctcagacattctcatcctccctcgtggctctaagtgccacctcgaggctcatgctacctaaaccagtatcatcagccctgacctccccacgaagctccagactccattatccaacctggccaaacatgggtgtcccatcaaccctcacactcaaaatgttgctaaggaattcacctttcccccaaacctcctcctccaacaagccccacttcaatgaacagcaccacctgtgtcacctaaagccagccctggtgggtggatccctcctctccacatgccctacgccatactcatgcatcaggatcctgcccccaccttccacttagacaacaccacagcttctcccaacctatccctgccaccagcctgaccctcccttgctcatcacccatttggtcaccagagccaggttccaaaacacaaatccaatcactaaagtaaaactgaaatacataatttagtcagataattagaaaaaaggtggtttaagaaagtaaacgtagctgggtgtggtggctcacgcctataatcccagcactttgggaggccaaggagggtggatcacttgaggccaggagttcgaaaccagcctggccaacacagtgaaaccccctctctactaaaaatacaaaaaattagccaggtatggtggcagacacctgtaatcccagctactcgggaagctgagaaaggagaattgcttgaacctgggaggcggaggttgcagtgagcccagattgcaccactgcactccagcctgggcaacagagtgagactctgtctcaaaaaaaaaaaaaaaaaaaaaaggaaaagcattagaagaaaacaggcaaggcacagtccccaaacccacatgcagaccgttttttttttttttcttttgagactgagtcttgctctgttgccaatgctggagtgcagtggcacaatctcagctcactgcaacctccgcctcccgggttcaagccattctcgtgcctcagcctcccaagtagctgagattacaggggcccgccaccatgcctggctaatttttgtatttttagtacaaacagggtttcaccatgttggccaggctggtctcaaactcctgacctcaagtgatccacccacctcggcctcccaaagtgctgggattataggcataagccaccacacccggccatgcagacttttttgtttcatcttgagaaaccagtgtgcctctctgtacaataaaaatgttactatgtattttctattcatttaagactttctcaagagaagactgaaacagtaaaataattcctttctcccactcagaaagtccctgctcgtggttgcgtcagtagcaaaagtagctagcaggcttgtttcccttctggttgtgcactgaggggctgctttgtgacccagaaaccaaatccaactaagcagaaaaacataacccaagtctacttattatcctcaagacaaagggaaaaatacaaaagggcaatcaactgcacacttctttgctaatcgccaagggaaggagacgctgtcagaatctagcactttttctccccatctggtctttaaaaagcaggaactagacactggttcacaggctaaaaaatatcacaggataaaatatcagaatcattgtgtctaaaagcctgaccctgggcacctgcatgatgactctgcagcaaggagcacctatccctgcctgcttgttcagcttgttttctcatcacctttgctccagcagtattacatgtctccaggttcccccaagtgcaccatgcctttactcacaatgttccctcttgctgggacgcctgttccattgtccatctagcgaaaacttactcattaagacatcaaatgtccactccctttacaaagcctttcctgactgtttgatcctcttctttttgctcctctttactgtacagaaacacccgttaaaatatctcaggaggctgaggcaagagaatctcttgaacccaggaggcggaggttgcagtgagccaacattgtgccactgcactccagactgggtgaaagggtgagactctgtctcaaaaaaaaaaaaaaaaaaaaatctgcaacaactcttaagctcacaaatctgcctccccctatagactacaagcccgggttgtcatcttcatctcaatattctcagacctggttcagtg

SEQ ID NO: 2967 - DNA, 3399 bp, Homo sapiens
cccgtttacagatttcattacagatggacactgtttcaaggtgcactggcatgcactgtctaaaacggtttcatgctgtaccccagaaggcattcagtttcacagtggagggctgtattgagttggtattctggatgatacaatttttagggctagaaagtttagagtgttggctggctcacaggctgcaaaggaaataatggtggagtccagaccacagcagtaatttcaattactaacacaaagaaacccattgtctgcaataatgaatataactgcagtgtcttgttttgttttaaattcttgtgtgcgatgaagggggcgaatctatcagacaacctatcaattgggctgatgatgtcagtgttccagtggcttctaacaggcgttaatacctgttggaaatggattatcattggctgggacgattgatccacagaccagcatggctgccactgctgctgtgagtcccagtgactacctgcagcctgccgcctccaccacccaggactcccagccatctcccttagccctgcttgctgcaacatgtagcaaaattggccctccagcagttgaagctgctgtgacacctcctgctcccccacagcccacaccgcggaaacttgtccctatcaaacctgcccctctccctctcagccccggcaagaatagctttggaatcttgtcctccaaaggaaatatacttcagattcaggggtcacaactgagcgcctcctatcctggagggcagctggtgttcgctatccagaatcccaccatgatcaacaaagggacccgatcaaatgccaatatccagtaccaggcggtccctcagattcaggcaagcaattcccaaaccatccaagtacagcccaatctcaccaaccagatccagatcatccctggcaccaaccaagccatcatcaccccctcaccgtccagtcacaagcctgtccccatcaagccagcccccatccagaagtcgagtacgaccaccacccccgtgcagagcggggccaatgtggtgaagctgacaggtgggggcggcaatgtgacgctcactctgcccgtcaacaaccttgtgaacgccagtgacaccggggcccctactcagctcctcactgaaagccccccaaccccgctgtctaagactaacaagaaagcaaggaagaagagccttcctgcctcccagccccctgtggctgtggctgagcaggtggagacggtgctgatcgagaccaccgcggacaacatcatccaggcaggaaataacctgctcattgttcagagccctggtgggggccagccagctgtggtccagcaggtccaggtggtgccccccaaggccgagcagcagcaggtggtacagatcccccagcaggctctgcgggtggtgcaggcggcatctgccaccctccccactgtaccccagaagccctcccagaactttcagatccaggcagctgagccgacacctactcaggtctacatccgcacgccttccggtgaggtgcagacagtccttgtccaggacagccccccagcaacagctgcagccacctctaacaccacctgtagcagccctgcatcccgtgctccccatctgagtgggaccagcaaaaagcactcagctgcaattctccgaaaagagcgtcccctgccaaagattgccccagccgggagcatcatcagcctgaatgcagcccagttggcggcagctgcccaggcaatgcagaccatcaacatcaatggtgtccaggtccagggcgtgcctgtcaccatcaccaacacaggcgggcagcagcagctgacagtgcagaatgtttctgggaacaacctgaccatcagtgggctgagccccacccagatccagctgcaaatggaacaagccctggccggagagacccagcccggggagaagcggcgccgcatggcctgcacgtgtcccaactgcaaggatggggagaagaggtctggagagcagggcaagaagaagcacgtgtgccacatccccgactgtggcaagacgttccgtaagacgtccttgctgcgtgcccatgtgcgcctgcacactggcgagcggccctttgtctgcaactggttcttctgtgggaagaggttcacacggagtgacgagctccaacggcatgctcgcacccacacaggggacaaacgcttcgagtgcgcccagtgtcagaagcgcttcatgaggagtgaccacctcaccaagcattacaagacccacctggtcacgaagaacttgtaaggccaactgcggcgggaggccctgaagatgcagtcccccacctgtgtcctccctgggcccctggtggaaaggagccctgtggctgccttgggcctgccctcagccccactcctgttctgcaactgtccccacaggaaggggctctgttccctgtattgtcctccttctgaagccccttggctctgccttggcccttcccctcaccacgagctcccggcctgcccagactgtggacactggccgtgcccaatgagacgttctaaaccaggacgcgtgggaacccttatttccaaaggaaaaacatgcatttcactccgtcgaggagcaaagtgagcccctaccccccaccccgatccccgctcccaacactgccggagtcgcgtcatgccatgccccctctcctgcacctccctggccctgccggccactgtggacgccctggggcttggcacccacctctggagaaactcggggccacctccactccatgtgcccagccccgccacaacctctcctccagcacattccagctctatttaaaaagtaaagacacccaccgactcctgatccccctctttttctatggagaacgttgccttatactctacttcagatgatgaacactgtgtactgtgtgtgctttaaagaagttttatttaattgctcccttcttcctttccttgttattcacctccctgatgcctgctttcagttgagggttgggggcaatgatgagcatatgaattttttctcactctagcaattcccttttctaaatgacacagcatttaaactcaaatctggattcagataacagcacctgcacatcctgcacctcctccctctcccttcacctcacccctgcccggcccaagctctacttgtgtacagtgtatattgtataatagacaattgtgtctactacatgtttaaaaacacattgcttgttatttttgaggcttttaaattaaacaaaaatccaactttatttttagttgtaactgcttgaggtatgttttatgaattaagtgacagatttgttatcctttattaacgtactttgttggtcagcactgggctgacaaaaattttttcttgctaataaatttagttgcctgaggcaaaatcttcaa

SEQ ID NO: 2968 - protein, 602 aa, Homo sapiens
MAATAAVSPSDYLQPAASTTQDSQPSPLALLAATCSKIGPPAVEAAVTPPAPPQPTPRKLVPIKPAPLPLSPGKNSFGILSSKGNILQIQGSQLSASYPGGQLVFAIQNPTMINKGTRSNANIQYQAVPQIQNSQTIQVQPNLTNQIQIIPGTNQAIITPSPSSHKPVPIKPAPIQKSSTTTTPVQSGANVVKLTGGGGNVTLTLPVNNLVNASDTGAPTQLLTESPPTPLSKTNKKARKKSLPASQPPVAVAEQVETVLIETTADNIIQAGNNLLIVQSPGGGQPAVVQQVQVVPPKAEQQQVVQIPQQALRVVQAASATLPTVPQKPSQNFQIQAAEPTPTQVYIRTPSGEVQTVLVQDSPPATAAATSNTTCSSPASRAPHLSGTSKKHSAAILRKERPLPKIAPAGSIISLNAAQLAAAAQAMQTININGVQVQGVPVTITNTGGQQQLTVQNVSGNNLTISGLSPTQIQLQMEQAGETQPGEKRRRMACTCPNCKDGEKRSGEQGKKKHVCHIPDCGKTFRKTSLLRAHVRLHTGERPFVCNWFFCGKRFTRSDELQRHARTHTGDKRFECAQCQKRFMRSDHLTKHYKTHLVTKNL

SEQ ID NO: 2969 - DNA, 2719 bp, Homo sapiens
tcaggctctcggtggcggcggaggcggcggaggccagggaggaagatgtcgtaatgagcggtggatccacagaccagcatggctgccactgctgctgtgagtcccagtgactacctgcagcctgccgcctccaccacccaggactcccagccatctcccttagccctgcttgctgcaacatgtagcaaaattggccctccagcagttgaagctgctgtgacacctcctgctcccccacagcccacaccgcggaaacttgtccctatcaaacctgcccctctccctctcagccccggcaagaatagctttggaatcttgtcctccaaaggaaatatacttcagattcaggggtcacaactgagcgcctcctatcctggagggcagctggtgttcgctatccagaatcccaccatgatcaacaaagggacccgatcaaatgccaatatccagtaccaggcggtccctcagattcaggcaagcaattcccaaaccatccaagtacagcccaatctcaccaaccagatccagatcatccctggcaccaaccaagccatcatcaccccctcaccgtccagtcacaagcctgtccccatcaagccagcccccatccagaagtcgagtacgaccaccacccccgtgcagagcggggccaatgtggtgaagctgacaggtgggggcggcaatgtgacgctcactctgcccgtcaacaaccttgtgaacgccagtgacaccggggcccctactcagctcctcactgaaagccccccaaccccgctgtctaagactaacaagaaagcaaggaagaagagccttcctgcctcccagccccctgtggctgtggctgagcaggtggagacggtgctgatcgagaccaccgcggacaacatcatccaggcaggaaataacctgctcattgttcagagccctggtgggggccagccagctgtggtccagcaggtccaggtggtgccccccaaggccgagcagcagcaggtggtacagatcccccagcaggctctgcgggtggtgcaggcggcatctgccaccctccccactgtaccccagaagccctcccagaactttcagatccaggcagctgagccgacacctactcagggcagcagcagctgacagtgcagaatgtttctgggaacaacctgaccatcagtgggctgagccccacccagatccagctgcaaatggaacaagccctggccggagagacccagcccggggagaagcggcgccgcatggcctgcacgtgtcccaactgcaaggatggggagaagaggtctggagagcagggcaagaagaagcacgtgtgccacatccccgactgtggcaagacgttccgtaagacgtccttgctgcgtgcccatgtgcgcctgcacactggcgagcggccctttgtctgcaactggttcttctgtgggaagaggttcacacggagtgacgagctccaacggcatgctcgcacccacacaggggacaaacgcttcgagtgcgcccagtgtcagaagcgcttcatgaggagtgaccacctcaccaagcattacaagacccacctggtcacgaagaacttgtaaggccaactgcggcgggaggccctgaagatgcagtcccccacctgtgtcctccctgggcccctggtggaaaggagccctgtggctgccttgggcctgccctcagccccactcctgttctgcaactgtccccacaggaaggggctctgttccctgtattgtcctccttctgaagccccttggctctgccttggcccttcccctcaccacgagctcccggcctgcccagactgtggacactggccgtgcccaatgagacgttctaaaccaggacgcgtgggaacccttatttccaaaggaaaaacatgcatttcactccgtcgaggagcaaagtgagcccctaccccccaccccgatccccgctcccaacactgccggagtcgcgtcatgccatgccccctctcctgcacctccctggccctgccggccactgtggacgccctggggcttggcacccacctctggagaaactcggggccacctccactccatgtgcccagccccgccacaacctctcctccagcacattccagctctatttaaaaagtaaagacacccaccgactcctgatccccctctttttctatggagaacgttgccttatactctacttcagatgatgaacactgtgtactgtgtgtgctttaaagaagttttatttaattgctcccttcttcctttccttgttattcacctccctgatgcctgctttcagttgagggttgggggcaatgatgagcatatgaattttttctcactctagcaattcccttttctaaatgacacagcatttaaactcaaatctggattcagataacagcacctgcacatcctgcacctcctccctctcccttcacctcacccctgcccggcccaagctctacttgtgtacagtgtatattgtataatagacaattgtgtctactacatgtttaaaaacacattgcttgttatttttgaggcttttaaattaaacaaaaatccaactttatttttagttgtaactgcttgaggtatgttttatgaattaagtgacagatttgttatcctttattaacgtactttgttggtcagcactgggctgacaaaaattttttcttgctaataaatttagttgcctgaggcaaaatcttcaa

SEQ ID NO: 2970 - protein, 348 aa, Homo sapiens
MAATAAVSPSDYLQPAASTTQDSQPSPLALLAATCSKIGPPAVEAAVTPPAPPQPTPRKLVPIKPAPLPLSPGKNSFGILSSKGNILQIQGSQLSASYPGGQLVFAIQNPTMINKGTRSNANIQYQAVPQIQNSQTIQVQPNLTNQIQIIPGTNQAIITPSPSSHKPVPIKPAPIQKSSTTTTPVQSGANVVKLTGGGGNVTLTLPVNNLVNASDTGAPTQLLTESPPTPLSKTNKKARKKSLPASQPPVAVAEQVETVLIETTADNIIQAGNNLLIVQSPGGGQPAVVQQVQVVPPKAEQQQVVQIPQQALRVVQAASATLPTVPQKPSQNFQIQAAEPTPTQGSSS

SEQ ID NO: 2971 - DNA, 3143 bp, Homo sapiens
aggctctcggtggcggcggaggcggcggaggccagggaggaagatgtcgtaatgagcgggggcgaatctatcagacaacctatcaattgggctgatgatgtcagtgttccagtggcttctaacaggcgttaatacctgttggaaatggattatcattggctgggacgattgatccacagaccagcatggctgccactgctgctgtgagtcccagtgactacctgcagcctgccgcctccaccacccaggcgagactcccagccatctcccttagccctgcttgctgcaacatgtagcaaaattggccctccagcagttgaagctgctgtgacacctcctgctcccccacagcccacaccgcggaaacttgtccctatcaaacctgcccctctccctctcagccccggcaagaatagctttggaatcttgtcctccaaaggaaatatacttcagattcaggggtcacaactgagcgcctcctatcctggagggcagctggtgttcgctatccagaatcccaccatgatcaacaaagggacccgatcaaatgccaatatccagtaccaggcggtccctcagattcaggcaagcaattcccaaaccatccaagtacagcccaatctcaccaaccagatccagatcatccctggcaccaaccaagccatcatcaccccctcaccgtccagtcacaagcctgtccccatcaagccagcccccatccagaagtcgagtacgaccaccacccccgtgcagagcggggccaatgtggtgaagctgacaggtgggggcggcaatgtgacgctcactctgcccgtcaacaaccttgtgaacgccagtgacaccggggcccctactcagctcctcactgaaagccccccaaccccgctgtctaagactaacaagaaagcaaggaagaagagccttcctgcctcccagccccctgtggctgtggctgagcaggtggagacggtgctgatcgagaccaccgcggacaacatcatccaggcaggaaataacctgctcattgttcagagccctggtgggggccagccagctgtggtccagcaggtccaggtggtgccccccaaggccgagcagcagcaggtggtacagatcccccagcaggctctgcgggtggtgcaggcggcatctgccaccctccccactgtaccccagaagccctcccagaactttcagatccaggcagctgagccgacacctactcaggtctacatccgcacgccttccggtgaggtgcagacagtccttgtccaggacagccccccagcaacagctgcagccacctctaacaccacctgtagcagccctgcatcccgtgctccccatctgagtgggaccagcaaaaagcactcagctgcaattctccgaaaagagcgtcccctgccaaagattgccccagccgggagcatcatcagcctgaatgcagcccagttggcggcagctgcccaggcaatgcagaccatcaacatcaatggtgtccaggtccagggcgtgcctgtcaccatcaccaacacaggcgggcagcagcagctgacagtgcagaatgtttctgggaacaacctgaccatcagtgggctgagccccacccagatccagctgcaaatggaacaagccctggccggagagacccagcccggggagaagcggcgccgcatggcctgcacgtgtcccaactgcaaggatggggagaagaggtctggagagcagggcaagaagaagcacgtgtgccacatccccgactgtggcaagacgttccgtaagacgtccttgctgcgtgcccatgtgcgcctgcacactggcgagcggccctttgtctgcaactggttcttctgtgggaagaggttcacacggagtgacgagctccaacggcatgctcgcacccacacaggggacaaacgcttcgagtgcgcccagtgtcagaagcgcttcatgaggagtgaccacctcaccaagcattacaagacccacctggtcacgaagaacttgtaaggccaactgcggcgggaggccctgaagatgcagtcccccacctgtgtcctccctgggcccctggtggaaaggagccctgtggctgccttgggcctgccctcagccccactcctgttctgcaactgtccccacaggaaggggctctgttccctgtattgtcctccttctgaagccccttggctctgccttggcccttcccctcaccacgagctcccggcctgcccagactgtggacactggccgtgcccaatgagacgttctaaaccaggacgcgtgggaacccttatttccaaaggaaaaacatgcatttcactccgtcgaggagcaaagtgagcccctaccccccaccccgatccccgctcccaacactgccggagtcgcgtcatgccatgccccctctcctgcacctccctggccctgccggccactgtggacgccctggggcttggcacccacctctggagaaactcggggccacctccactccatgtgcccagccccgccacaacctctcctccagcacattccagctctatttaaaaagtaaagacacccaccgactcctgatccccctctttttctatggagaacgttgccttatactctacttcagatgatgaacactgtgtactgtgtgtgctttaaagaagttttatttaattgctcccttcttcctttccttgttattcacctccctgatgcctgctttcagttgagggttgggggcaatgatgagcatatgaattttttctcactctagcaattcccttttctaaatgacacagcatttaaactcaaatctggattcagataacagcacctgcacatcctgcacctcctccctctcccttcacctcacccctgcccggcccaagctctacttgtgtacagtgtatattgtataatagacaattgtgtctactacatgtttaaaaacacattgcttgttatttttgaggcttttaaattaaacaaaaatccaactttatttttagttgtaactgcttgaggtatgttttatgaattaagtgacagatttgttatcctttattaacgtactttgttggtcagcactgggctgacaaaaattttttcttgctaataaatttagttgcctgaggcaaaatcttcaa

SEQ ID NO: 2972 - protein, 491 aa, Homo sapiens
MINKGTRSNANIQYQAVPQIQNSQTIQVQPNLTNQIQIIPGTNQAIITPSPSSHKPVPIKPAPIQKSSTTTTPVQSGANVVKLTGGGGNVTLTLPVNNLVNASDTGAPTQLLTESPPTPLSKTNKKARKKSLPASQPPVAVAEQVETVLIETTADNIIQAGNNLLIVQSPGGGQPAVVQQVQVVPPKAEQQQVVQIPQQALRVVQAASATLPTVPQKPSQNFQIQAAEPTPTQVYIRTPSGEVQTVLVQDSPPATAAATSNTTCSSPASRAPHLSGTSKKHSAAILRKERPLPKIAPAGSIISLNAAQLAAAAQAMQTININGVQVQGVPVTITNTGGQQQLTVQNVSGNNLTISGLSPTQIQLQMEQAGETQPGEKRRRMACTCPNCKDGEKRSGEQGKKKHVCHIPDCGKTFRKTSLLRAHVRLHTGERPFVCNWFFCGKRFTRSDELQRHARTHTGDKRFECAQCQKRFMRSDHLTKHYKTHLVTKNL

SEQ ID NO: 2973 - DNA, 1832 bp, Homo sapiens
tcaggctctcggtggcggcggaggcggcggaggccagggaggaagatgtcgtaatgagcgatccacagaccagcatggctgccactgctgctgtgagtcccagtgactacctgcagcctgccgcctccaccacccaggactcccagccatctcccttagccctgcttgctgcaacatgtagcaaaattggccctccagcagttgaagctgctgtgacacctcctgctcccccacagcccacaccgcggaaacttgtccctatcaaacctgcccctctccctctcagccccggcaagaatagctttggaatcttgtcctccaaaggaaatatacttcagattcaggggtcacaactgagcgcctcctatcctggagggcagctggtgttcgctatccagaatcccaccatgatcaacaaagggacccgatcaaatgccaatatccagtaccaggcggtccctcagattcaggcaagcaattcccaaaccatccaagtacagcccaatctcaccaaccagatccagatcatccctggcaccaaccaagccatcatcaccccctcaccgtccagtcacaagcctgtccccatcaagccagcccccatccagaagtcgagtacgaccaccacccccgtgcagagcggggccaatgtggtgaagctgacaggtgggggcggcaatgtgacgctcactctgcccgtcaacaaccttgtgaacgccagtgacaccggggcccctactcagctcccactgcttcctgccaaactgggatgctgaattcaacaagaatgttcttatttttggcatttattaatgtgctctaatactctggaatctctttggctctgtgaggcaagttttattctttgttcatgcctgctaagtgccagtaattgtgcccatgttgcagatggataacccagaactcagataatttatgaagtatccaagatcaaatagggcataaatgacaggaaccaggagtcaattgagatttgtaacttcagaccccacactcttccatcttccaccttgactcttgtgtcttatgtgtagcaggtgctaccattaaaattgaggagtttttttttttttaatataaaaaacagttcctgccatcgaggaatgtatgacctagttgtctatagaggaagaaccgaatgactgagagtgggaagttgtgtaatttcctgggtggagaagagagcctttgaatttgaactgtggacatagaaatcacacaggaattcacccttctggcatatttaatgttgccaggtattttttataagtcatttatcacaatatctgtgaattcccatgatcagacctaccctacaggtgatattttatgttgccaggtgattttttataagtcatctatcacaaatatctgtgaattcccatgatcagacctaccttacaggtgaagaattgtggcacctgctcaggagcacatcctcggcattgcctcccctcccttccatgaggtcccatttcttgaggttgatggagacaggactaaaacccaggtcttccctaaggaaataatgatacatatgcagaaagatttagctacagtattattttttcatgactacacagctttataacatcccaacatgctgattattatacaactgataccttgttaactgtatatatctaggctgtttccaatcttacagctaaataaatccctgaaagtgggtcaaggacacgtacatttttaaaaaatttgtattctatattagaggtttgcagtctgtgaccaactttgaagccaaatctagcccacctgcctgtttttgtaaataaagtttaattggagtg

SEQ ID NO: 2974 - protein, 238 aa, Homo sapiens
MSDPQTSMAATAAVSPSDYLQPAASTTQDSQPSPLALLAATCSKIGPPAVEAAVTPPAPPQPTPRKLVPIKPAPLPLSPGKNSFGILSSKGNILQIQGSQLSASYPGGQLVFAIQNPTMINKGTRSNANIQYQAVPQIQNSQTIQVQPNLTNQIQIIPGTNQAIITPSPSSHKPVPIKPAPIQKSSTTTTPVQSGANVVKLTGGGGNVTLTLPVNNLVNASDTGAPTQLPLLPAKLGC

SEQ ID NO: 2975 - DNA, 939 bp, Homo sapiens
aggctctcggtggcggcggaggcggcggaggccagggaggaagatgtcgtaatgagcgggggcgaatctatcagacaacctatcaattgggctgatgatgtcagtgttccagtggcttctaacaggcgttaatacctgttggaaatggattatcattggctgggacgattgatccacagaccagcatggctgccactgctgctgtgagtcccagtgactacctgcagcctgccgcctccaccacccaggcgagactcccagccatctcccttagccctgcttgctgcaacatgtagcaaaattggccctccagcagttgaagctgctgtgacacctcctgctcccccacagcccacaccgcggaaacttgtccctatcaaacctgcccctctccctctcagccccggcaagaatagctttggaatcttgtcctccaaaggaaatatacttcagattcaggggtcacaactgagcgcctcctatcctggagggcagctggtgttcgctatccagaatcccaccatgatcaacaaagggacccgatcaaatgccaatatccagtaccaggcggtccctcagattcaggcaagcaattcccaaaccatccaagtacagcccaatctcaccaaccagatccagatcatccctggcaccaaccaagccatcatcaccccctcaccgtccagtcacaagcctgtccccatcaagccagcccccatccagaagtcgagtacgaccaccacccccgtgcagagcggggccaatgtggtgaagctgacaggtgggggcggcaatgtgacgctcactctgcccgtcaacaaccttgtgaacgccagtgacaccggggcccctactcagctcctcaccactgcttcctgccaaactgggatgctgaattcaacaagaatgttcttatttttggcatttattaatgtgctc

SEQ ID NO: 2976 - protein, 137 aa, Homo sapiens
MINKGTRSNANIQYQAVPQIQNSQTIQVQPNLTNQIQIIPGTNQAIITPSPSSHKPVPIKPAPIQKSSTTTTPVQSGANVVKLTGGGGNVTLTLPVNNLVNASDTGAPTQLLTTASCQTGMLNSTRMFLFLAFINVL

SEQ ID NO: 2977 - DNA, 24229 bp, Mus musculus
  misc_feature (1)...(24229): n = A, C, G or T/U
tagcagagaaaactgtcgctcagttagctcagcttctgtcagatcagctatcagacagatatctggatttttggctgaaagactaggagaagcggggtacaggagtgtgggaagacacgggaatgggggacacacaggacaacatgagttttaaagcccctatataggctcatccatcagagccctaatgaaaaatggggaagtgaatttcacataagggccactgtagggtatagaagcttattctcaataagcatgggacatgtgtccctgcggctgagcactagagaaacagaaggaatatggctggaaaatagcccctgggggcagacgggggaatggtatttaaattctaggccaaagagtaagcttctcttgtcagcaatggggagatagtgaatgttgtgacatgattaagatttgtccaccattaggagaagaattttaactcatccagaggggggaatgatttgacttcttgactgctacccagccagccctttatcccagatcttacttattcaacccttggctgtaataagtttgacaacctggcaggtttcaacctccagttctcaaccagctgggtctgtccctgatagcctctgggtctttccgcctttgtcagtgacgttaacccactaggggagaccagggaagccgcatgcacgcatgcacatcactctctaggtgatagatctctaggtctctaggtttcagaacccccactgtgtcccctgcatctgccccagacttttagaagttagaggctgggagccgggcgtggtggcgcacgcctttaatcccagcccttgggaggcagaggcaggcggatttccgagttcgaggccagcctggtctacaaagtgagttccaggacagccagggctacacagagaaaccctgtctcgaaaaaccaaaaaaaaaaaaaaaaaaaaaagaagttagaggcttttagaagcgtgggtcgcagagagaccttcctctttctcttggccatggcttttccacttccttcacaaagaaaggtcctggaaggaggcctgtgtggtatggagaggtagttcttgccccctccccccccccaggagctggaaccagcaggggaagataaggcactagccctgtggagacatcgtgaggcaatttagctagggaaattccaggggcaggccactgatgttcccgataagagcagattcctagagaagcgggcttggagggcggtgggctttccccagccagggatgggtggcaagaggtagacagactgagtcacagaattaaggccaggtgtgctggagagcatcaatggatccagccaacgagggccattgggttcttataggaaccagaggaaaccgagactggagtttttaaggccagacattagagtctgtggtgtcacagcacaggagagcactggatgggttagctagcaggaagggaatggcatcttaggaggataagtctgtttctttggtttggtttggtttggtttggtttggtttgcaggacagcttaggtagtggacataagaggtggcagaaaacccataggaggggttgggattagtggttgagtgctgatcagaccgggtgttctgtccctgctggcatggagagatgagcgacagagagacacagagagtcagagagagatcccacaggagaccccagaaactcatccagtaacttaagctcctcgggaagttggtatttccctagaatttcctcaggacagtgctcagttcttcttaatttattcatttaacaaataatgaagagataggaaatgccaggcactgttagctttcttcacctctacccatctgagactaggagagaagacaaaggctttccacccacacatacctgggggacttcagcatataccccactgcctccctcccccagataatctagtattccccgccacccccctttggggcaggcatgtggaggaatctcagagacctgcaggcaggagggagtcagctagagagtgggaaagaaggtccccctgaatgcagggagaacctaggattgcaggtcatgggggctggggaacaaggagagagcagagatgagttggatctaggcctctggggctgatgatggggtggagggagggagagagggagggacaaattagagagctggagaaggaagcagagtcttagcaggtggggtggagggagggggacaggaggcaagctcaggggaaatgggcccaggctctggagacaagagtctgggtgtctgagctgcctaggagccacctggaaggtgtaggcagcagaatatcagacttgagatggagggttggctctgggagcgagctggggctggctttagtgggagcttgaaagccaccgaaccgaatctaccatttaccctgctggtcttcagcttcctccagctccttctgcaggtcctcccttaagactgaaagggggctgagggtgagggctgactccagagtattaataatgccccactgtttagctctgagccccatggagcccatcctacctcacccccattggtggtggggaaagcacattgttgggagagaagtggttaaggaggaggggtctcctgacaatcagggtcctggctgggttcattacttccctcctcactaggctcttcacacctctgcccctgctccactggctctgggggaaggtacgatggccctgcaggtccaggtccagagctataatccttatgcctctcaaatcccccagcctcagattctcccatcttctggactggacctgctacctaagcatatggaaccgattgaaagaatttgtatgctcaccttataatttatgcaaatcaactctgtaattaactataatttggaggcatcctttggtatttcagacatttatccatgaggaaatgccctggtgataatactcctgtattaactctatttactccacctgtgtggtctcctgcacgcctccccccaccccactgggattttctaggatggaaggtggggagggacagggaagcccctccttggagccagcttgggtcttgccacacaatcccctctgtgctggccctgtcatcttaattttgcagaggactgaaggtgcagctttgcctcccaagttcccccatcactttattctctcctgcttgatgggtggctttctaccacctcagttttctcatctctgaaatggggagaggaagaacctgccgggaggcctttactcaataattactgaaaagctaatgaacagactgggaatccccagtctggagactgcagggaggagatggagagggaggagctagggtgggggttccctggctcacttctgggagggaggtagcaagcaagccttgagatactgggttcagtgcatgtacgtgtgtgtgtgtgtgtgtgtgtgtgtgtgtgtgtgtgtgtgtgtgtgtgaaggggggtgcactgaagcatctgtcctcagtgtttagggtgcctgtggttgggaatgggacatgtcctatggttaaggcctcaggctgttctcctatgtgggtcagaatgcccagttcagagagcttcagaaagacagccttctgttaatctcctttcttcttcctagtcttgtgtctcactctctgctccaggacatgctccagtcagccagtgaacaccctaaattgggggtggggggcatctggattcccctccaggcccttgctctttccagtctccagtctctttgcttccctgtggatccaagtgggctgctgtctgtaaaagtccacgatgggtttcaactctagtcttaagagacactcggtccatcccaagccactcagtccctgctcagtgaaaaagacgggcttctcattcactcgagaatgaggtaccagactcagaaagttttaccttggcttcttctaggagggttccaagtcgggatttgaacaaaacagacataaaccactacggggggtgggggtggtgagaacagactcctgggagtaagcaagactgctggagtaaccagacctccagttaggagcttttgggaaaagactggcttggagctgtgtgtgtgtgtgtgtgtgtgnnnnnnnnnnnnnnnnnnnnnnnnnnnnnnnnnnnnnnnnnnnnnnnnnnnnnnnnnnnnnnnnnnnnnnnnnnnnnnnnnnnnnnnnnnnnnnnnnnnnnnnnnnnnnnnnnnnnnnnnnnnnnnnnnnnnnnnnnnnnnnnnnnnnnnnnnnnnnnnnnnnnnnnnnnnnnnnnnnnnnnnnnnnnnnnnnnnnnnnnnnnnnnnnnnnnnnnnnnnnnnnnnnnnnnnnnnnnnnnnnnnnnnnnnnnnnnnnnnnnnnnnnnnnnnnnnnnnnnnnnnnnnnnnnnnnnnnnnnnnnnnnnnnnnnnnnnnnnnnnnnnnnnnnnnnnnnnnnnnnnnnnnnnnnnnnnnnnnnnnnnnnnnnnnnnnnnnnnnnnnnnnnnnnnnnnnnnnnnnnnnnnnnnnnnnnnnnnnnnnnnnnnnnnnnnnnnnnnnnnnnnnnnnnnnnnnnnnnnnnnnnnnnnnnnnnnnnnnnnnnnnnnnnnnnnnnnnnnnnnnnnnnnnnnnnnnnnnnnnnnnnnnnnnnctccccccccagcaatgtgctcatttcctacatcccacaagaaccacttggtccgtctcccactgtccactctggactctggagatggaagtcctgtgcagcactctgcccccacccccagctgcctcttccagatgaaagcctcctttcctggcagccaggagaactcagatctcatccactaccactccccccatgagaatcaggccactacttcctggattatcctaaaagcttctgaggccgataggacttggcagcatcctgcctgttctcccacctccctctttggctccaactgtcgcctcctttataaagcctgcctctcctgtcaccccacgtgcctctcactgcttctgccagctctgggctccatggaccggtaagcgaggctatcccttgtctagcacagggacctctgcaaagaagaccaggtcttcactctaaagagatcatagagagagatctggaaagctttgtactttcttagtttaagaagggggataaaagggagatggagggtgggggaggagggtggggaaggaccagaaaggatctccgggaagtctttggagtgggttgggctgagatctgggcaaaatgtggggcagggattcaagactggggacttcaatttgagagagagtatgaataaagatgaatagacatacagggtgtatacatgctctcgcgcgcgtgcgtgcacacacacacacacacacacacaagtctgttctaagaggggctcatcctttagattaaaaacaggtcattactagtgacatttggatttatcagtgaatcagtacagcagtacagtgcttagccctggtagacgttcaatgtcttttagataaatgaaagataaataaaactgtctgatcccatatctggactctgcctggttttccaggaatctgggagagtcaacagtaacagaagaaagagctgggtgtctagggtcaccagtgtaggaaatagtgaggaactaggaatccagaaactaaaagataaggtctagccttctctgcctctaactttctggatgactttgaactatctttctctctctgttgaagggttcagttttcctatcgatacttcaattagatcgtttttattgttagaacaattttgttgtttgttgttgttgttgtagttgagacagggtttcatgtagcccaggctaaccttaaacttactgtataggtgagcatgaccttaagtcgctaagcccctgcctctacctccccagtgctgacattccagtgttcatcaccacacccagttttgttgggtactggggattgaacccaaggcttcatacatgttaagcaagtcccgtgccaactgagctacctctccagcccctcctagtgcacaggcaacatgaggtctggaaaggaacatgtgtgtgaaatgtgattcgtcccagcgatttcaagtagatcgattcaccctgtcagacacaagatgttaggactttgaaccaagggatctattaagactgttgtctcttgctgggcagtggtggtggacgcctttaatcccagcacttgggaggcaaaggcaggcggatttctgagttcaaggccagcctggtctaggacagccagggctacacagagaaactgtctcaaaaaaatctgagttcaaggccagactggtctaggacagccagggctacacaaagaaactgtnnnnnnnnnnnnnnnnnnnntttaggcacagcaaatcgcttacagtaaaaggtatttgaggtgagggctggcaggttataggagacagagacttgggaaaaatctgtctaagactttaacaaaagaaagaaagaaagaaagaaagaaaggaaggaaggaaggaaggaaggaaggaaggaaggaaggaaggaaggaaagaaagaaagaaagaaagaaagaaagaaagaaagaaagaaagaaagaaagaaagaaagaaagaaagaaagaaagaaagagaagtgagccctgtcctgaacacacctccattcagttttgagtcaggatgagaacaggggctagggtggccttggcagtcaagtcaaggttagatcaccagctgtcagtcatttggtaggaaaacaactagtaagtgggggaaatcgaatgagttggaaaccagggaacgaagtctaggatgtctgagagaaagagagacaggcaaggtagagaggtggtatgggtgaatggtataggagcaacctccctacaggaatctcatgccaacaagccacaagcaatggtggggtctttgctccaggatggggcagtgttaaggtgaacctggggtggggtttctaccattctcttcccaggtgttatccaagaaaagatgagcagcacaggggtggggtggggaaaaaggtcatctgacacctttaaatgcatatatggattcgagatgaccttagactggcgttatctcatgcccgcctggcccttagcaccatctttgcctgcctgacccagagagcagtagatcggtggttctcatcctccctaaggctgtgaccctttaatacagtccctcataaaattatttccctttcgctttataactgtaattttgctactgtcatgaatcacaatataaatatctgatatgcagaatatctgatcctccaccctcaaaggggtcgagacctacacaccaccactggttacagtagatgcaacagactacggacaactgggaaggagggactggcatagggagggatctatttagtgttattccagtagtcactcaggtcaggctctgcttcctacatgacgagcctctaactctgctggagggacctatgaactgagaacacaaagcccactaatcaggactgggaggctgggaggaccaaccgtgttgataaaaagtgtgaatttggacacaaggagccaaagggatgcttaagagtctgttatgtgatcctgaaggcagggaagaggaagctcctggctgactaccaatctctccctaatgtcttccatttccaaatggcgatccttcactcccaggtcaattgaagaagctgaggcatagaacaatctaatcctcgagggccaccatattagatacagcactgggttcagagtttaggttcttgaatttctagtccaaagggttttgtgaatatgcttttactctgtacatgtaacacatttattaaaaaaaaaatgattaagggtttattctgttcctagcagggacctcacggaatttgctcttttagatacaattaatttatttaagccccagggaagcctcacagagtgtacccgggttctccaggtgaaggactccggttttagaaaacacacaggtgcccaaatggctagaacactgaccactaggaagacgtgcatactctgggaaaactatacacatacattgatgttcggaagcctcatagactcaggtaagctgtttcaaagtcatacttcagtgcatctcaaacgggaacagagggcaggtaaactattcagagtaaaatgagaacctgtgattctaggagctgggaagttgaggctggaagatctctatgttcgagtatgttcaaggctagcatgagcaactgagtcatgccagcctgggcgagacacacacacacacacacacacacacacacacacacacacacacacacacacacacacagagagagagagagagagagagagagagagagagagagagattaaatcagcctaatttcagaaattttggaaactgactgtaaaatgtgcatagagaaagccaacagcggtaacgaaagaaacaacaacgaaaatcgctttgaaatcccgtgtttgtttaaaaaaggggggtgggttagcagggcagtggtggcaaacgcctttgatcccagcacttgggaggcagaggcagatggatttctgagttcaaggccagcctggtctacagagtgagtttcaggacagccagggctacacagagaaaccctgtctcaaaaaaacaaaacaaaacaaaacaacaacaacaacaaaacaaacaaacaagtcacctcgggagatcaacgcgctctgaaggcggcagggaaggctcctgagctacttccaatctggccatcagggcagagagttagggggactctggtacccacctgagctgggggtggggcagtgtctcaggatttccaccaattcggatcctgagagttctgtgtagctgagtggctgtgtggctgtgctgaaaatgtaccagaatgtgactttgcacgggtgcgcttatttcctccaaaagacctttctctaaacgtatactcagctgagactaggaaagagcccgcgacaaaaagtcttgttcaatccgctgctgaaatgttccttcccaggccctttcagatgcccgcccaaccctctgatcccagtgcgccccagcgagggtgtcaggcgcaggctgagcaacccggaccgggaggaaggcggcgggtttaggaggtggatttctgtggtacccggcttgccggaaactgaggaagacattgagggcatggtgatcacccagaaaggccagtgacgggagagaggggaaggatctctggaaaccaggaggggaaagttcatagtggtggtggaaagggacgggggaacggtgtagccaagatagaactctcatggcttagtgctgggtgtgggccggccagaaacgtagttttcaaacctgtttccttttttttcccactcagttctagcactgcgcggctaggacgggtgggtcaaaagcactggtagccacgtgtgccttaagaaggctcggtagcttctccaggaccctctgtccttcgtcccatccaggatctgaatcttgttccccgcctggaccgggccagctccgggttagatttccatggcatcggacgggtctccgaactcgggggaaaaaactctcgcaactcaagctcttaactcagaagtggtggggacctgggaggagtgagggagagggagggaggtggcctggatagccatccttcttgtctgccccctcctcgcgctgggctgggcttcgcctccagccaagcctgcaagggttaaaggcggccgcaggtgaggtgggcggggccgcgggttcgggggaaaaaggagtgcaggggagaggatgaaggcagagagtgcggtgagtcacgggcggagctggcctcgctcgctcgctcgctcgctcgcttactcgctcaccggcgcccgcccgccctccgccctcccgccggctctcactgcctccaccgtcgcggatcacccagcccggtcgcagccccggcttgccctcggctcctgtcccacgccgctgagagccggccagcgcgcagggcccatgagcgcccgtctgtagcgcgccagcctgcggtgccccaagcccgagcgcagccgccaggtaggagcccgggtccgcgcggtcacgggtgcgcgctgcggagatctggggtcagggggtgggtggggaaaggtgttcggaacaccgcagcctaagctggcttcttggggagggggacgtcctaaaggatccgaagggctgggagccccgacggaggaaaaaccgggaggacgggagggaccaagggagtttgggaactggggaaactggagcaactgggacaaccggaggattgaaacattgaaaaccttgtttgaacggaagtccccaccgcctgagtaccgggaaacgggagaggcagcggatccaatgggacttagggcgtctctgccgtctttctccaattggggagccgatgtgctcgctcctttcttttcgtgcaaccttggtggcaggccattacacgctaggcctgggctcaggctctctgtccagagaggcccctctgcaacctggtcaccctagccttcccatcccccagaccctggggcagttcccagtctccaaaagctcttagggtcccagaatctcactgctcccgccccaaccccttctgggccgccccgcccggcctgaggctccgttcctgctgcttcacccagtccctttcttgtggtaaggcagcccgagcctgagtaggcacccgggtcctcctcttccttgcctctcccagattttcaatgctacttccctggtcccagagtcggaaggtggtagggtcaggtgagtcctgcttggggaaggccctaaatcattggcctcctgcaccccaggccccacacgggcaaggttccaaggctctagggagagatggagagaagactgggaccttctggtcacagatttgtagtagagaaaggggtggaaattgtaagctcttctcttctcttctcttctcttctcttatcttctcttctcttctcttctctcctctcctctcctctcctctcctcttcttttgnnnnnnnnnnnnnnnnnnnnctcttgcattgagtactgggaatatttattagccggttcccaccaggcccagcagcatctcctgttctttttcttatatttccctcttcctccctccttccctctctcccttccttcttttgctgtgtagcctaggctggcctggaactctgcattcttctgcttcaacttcctgagtggctagattaaagacttgcatcaccacacccaggctagatctttaggtttctgctgggccttaggtttctaatgtttaaagaaggagaatagattcccagagggactgcacagagtgtgtgggctgcatagagtgtatttgttgattgaataattaaatgaacattttattctagtcactgatccaaattcagcttgctttaaatgagagcaggctctggacagtagctcggaatacttggctggacattagaggcgcctatacgtgcccccccgcccccccccccctgtgcttgccattgagctctgggttaagggatccttcaagctcgggtgctgtctcccttagggagctgcggttagatttgcctgagtgtctgacaagcatctctgggtgatctccttctgtggtaattccacccctcccagcttcatatggagggaaaaggaggtgggtgagggagtgggccaaccaagctagtcagggagcaggggagtgtgtagcaaggttaaatgcctttccacatcggtggtacagcaggtctgggattggctctaggaaaaaaaaaaaaaaaaaaaaaaagctcaggccttattctgggctttctgaagagcaaaacacctcaaacagccagcagcagacatatcctacctactgtaccccatctgtgtcctgagttagactggagctaagacgactctagatcgtccaaataggttggcagcaagtctgccggggggtgggggtgggaactgcccagactgctgtgtggagatggctccggtggctttgggaccagtccacccccccccccccccgaataagctgagtcttaagggcggggtcacttagtggaaaggccatcctgtgccctgacctggactttcacatccatttcttcctagcattcccaagctctagtcctcacccagagtcacgccccttttcctgataggggctgggaaggagcccgttgctgagaagggatctgggttagaaggggaagtaagttcttgctcacatctcatccttgcctcttctaggttccatctgaggtacccttgaccgtccctgccttcattccaccccggatcccggcaatgctaaccgctgtctgtggctctctgggcagccagcacaccgacgcgcctcacgcttcaccgccgcgcctcgacctgcaacctctccagacataccagggtcacacgagcccggaggctggggactacccctccccgctgcagcctggagagctgcagagcctcccgctgggcccggaggtagacttttcacagggctatgagttgccaggggcctcctcgcgggtaacctgcgaggacctggaaagtgacagtcccttggcaccgggacccttttccaagctcctgcagccggacatgtcacaccactatgaatcgtggttccggccgactcacccaggcacagaggatggctcgtggtgggaccttcatcccggcaccagctggatggacctcccccatactcagggagcgctgacctcacctggccatccgggggcgcttcagcctgctttgggaggatacgtcggagaccatcagctctgtgctccgccgccccacccgcacccgcaccacctcctcccagccgctggtgggcagcaccttctggggccacccgacggggctaaggccttggaagcggccgcacaagagtcccaagggctggattccagtctggatgcagcgtcccgacccaaaggctcccggcgatcagttccccgcagctcagggcagaccgtgtgtcgctgccccaactgcctggaggcggagcgactcggggctccgtgcgggcccgatgggggcaagaagaagcatttgcacaattgccacatcccaggctgcggcaaggcatacgctaagacgtcgcatctgaaggcgcacctgcggtggcacagcggtgaccgacccttcgtgtgcaactggcttttctgcggcaagcgcttcacgcgctccgacgagctgcagcgccaccttcagacccacaccgggaccaagaagttcccctgtgcggtctgcagccgagtcttcatgcgcagcgaccacctggccaaacacatgaaaacccacgaaggcgccaaagaggaggcggcggcggcggcccaaggcgagggcaaggccggtggcgtggtggagccacccgggggcaaaggcaaacgtgaggccgaaggcagctcggcgtcctccaactgagccccatggatgtcacatacctgccgttctttatttggggggggcggggggaatggggcggcctgagtaagaggaaggtggttatttattggtgatgaggggacagggaaagggacgctaggggtttttagtctcgggggctacatgggaggctgcttgaatatttaggctgccaggagctgaacacgcccctcgcttcttccctttctcactatttcaccctcccctgagttgctgaagagttgggatggagcgcccctaccatgtggaggggttcgcatagtagagagatggcatgtcccagaagctgagggaactcgagattgggtcggggcgttgggggaagctgtctggacacgtctttagttcctgggaacccggacataaaagcaccttggagccgcccttcggcctaggtctctttcatcccctcttctagtgctgctccctctaaaatttccggagagaaagcagagatgaggtgtgtgtgtggggaagcctggggtggttccccttaaggggctgtctacctagcttggagggttattagtatagaaagaactcccttcagtgaatttcttctaaacccttctggatggtagagccaggaagagcagctcagctctgcagccagggctctgagctggaggtcagagctggatggcatagaggagggatccagcagaaaaatcctcttacaaagtggaagagctagccgctcctttcaactcgaattcaatccttaactcttagaccttgtaaaagaaagcaaactcagcagtcgacattccccatctattcccctaggtagtttcctaaagtcagctgccagcacttgctccagagttgacaaaacaacccccaccccactcccaggtccccatcccttgctttcctgttgggggtggaagggagagaggttgtcctagcagagggattacagcagaaaaccctgcctggactccccgtccctctctttcttagcttgacccttccgtgttccctccattgttatagagtcctccccagtagaaaatctccttccatgtgaagaaatattgttcccccactggaagggattctgggaagctgtctctctgtccccttctttagagtctagagatacatttgggttttgatcataggatgagagggtagacttctgcctggcagactgcaggaccctggggctgggggcactctcaggtttgaggtagaggccttgagaccctctgaccccactcttgctctcttctctccacccagaaccctctgcagggaatagctgtgtgttgatttttaagttataagcaaagggtattttatttaataattagggtgtgagtgtgtgtatgcgtgtgttgtctgcacctgtatgtgtgcatgtatgtgtttctctactgagcctggggtctcctgagaccccatcttgttcaccccgtccaagacctggggacaagaacctcagcatcttcctccctgggggatgctggagcccagtccaaggactgggacctgtatgggaagtaggggctgggatctgggtaggaatatatgtttgtgtagaaaggcctcctccttgaagggacagggtgactccctgtgggacttaggggcctgagatagtttaagttctttctgtgttctccctctttccccacctcctgtgaacctagccagaggttccctttcttacaaagaaggctgcaggcaagagcgaagttggccatgcctgcaggttgcctagctaggtgcagaggggcctaaaggagggcaccgtgggtgtgggatgccttcttctccacccatcgaaaccagccacctctcactgcgctaccaagacaaccttttttcagtgaccatgcttagggggaactcctacatggagtattagggggcacggagatgctcccccttatagaggccttgaaccctaagatctgcaggtggggctcggataggtttttgtctggcctgctctttatcaaatctaggtttctcagctgcctgtccttccaggcagcccctctagaggaaaatgtaggatttttttttttctttaactgctgtgaacccacttgggggcgaggaggaggcagaaacagcctgtgttttttatgcaacaataaagtcatcaaccaaccacactctcgctttgtttgtcttccagctctgcctcctatttcggactccatccctctgcagtgaggactgggtagggggatctttggtcaagcgtcacttcttttcgattggaaagatctgagatgagatcagagctcagatctgatcctatcctggaaggaataggctctgtagtctcttggtgttcatctgtggagatgagatgtttctagatgattctttccatagaagtcccacgtccccaaaggtccctctccccaccccaccccccatgggagcatgcatgtcagtcggtccctctggctgtgagggaggtggggggtgactgacagtgatttcttcacctagagtgatccctatcagagacaaggcgatgaaaggcagccaagatatctgatgggcagctgcccagctggaaaccgtgaaggaaaggctgctactactactgctcacagcgagaaacctgccagggttactcaaccacagggtgcacagacgcaccctcacgggactcactatcttcagagagactggaaatgcccatccactgttggtgccttattcatgtcagtgagagaaagtctcatgactccagaggaccggtgcgtggaaggtgacagggaattcgttttgttttctcgtctatgtaggataaggttggtcactgcgcactacactacctttaactggcttttctttgaatctattgtttgctcatcttggcgttcctatcccttatgacccctaacccaatttctcctgccaaatctggctctcaggatggcccatcccatcatccgtctgagaaatttgggggcctagagttttcagggaaacttggaaaggggcatcaggatgatttaggggccgtggagaaaacctagactggtaggggtgacgggagagggggagcctgtttccatcggttgctgaatttaacagttcagaatcttgtttacctgtgacggcctgcccgaggctctcctgcagggcgcctcttttgttttcctggttctgggggaattagaccccagaaacctagtgagtcccctccttttcccacatctgcctccggggacaggagggcagctgtagggccggctgggcttgtctgggcagggcccgggccctccctcctccccttgcaactcctccagctgacctgcattcttagcaggggcctttggtggggctctgatgcatgcctgatcctctgcaatgcagcctggctggcctgggcccctgaaggagctcggagacacctctgacccctcagaagtggcaccccagcaggatcccattgtacgggagaggctgggagggaggaaaatcatcatgtttggattgaccctctggacgacttctctgagtcctatccctaccagagaagtaaagtagaatgcctctagggcgggtgaatgaagtcaaaagtggaaacttgacggatagcagcctggggttgcagccaccgcctccttcggctccgcctgctcttccgctgcctccttcctcggcctatcctgccccccagcggacatctgaggaagtgcagaagaggaacctgctttctccgcagggcgcctcagaggatctgtgggtagctacagcttcagctgaggtttgaggtgggatggcatccaatagcacctcgcacccctcctccagaacacaccccgaagcagcacttacgtgaccattaatcctatacagcgttatagatgagcatactagcaatgaaggttttttttttttttttggtttggatttttttcgagacagggtttctctgtatagccctggctgtcctgaaactcactttgtagaccaggctggcctcgaactcagaaatctgcctgcctctgcctcccaagtgctgggattaaaggcgtgcgccaccaaagcccggcgcaatgaaggttttaaaagtatcttacaaaatccaccaaaggaccattagaactaatcagaacagagtcaacaggaaacaataagaaatatttctttaaaaaaattttaatgagtacgaatgtttggcctgcaagtatgcatgtatgtatgttcaccacgagtgtgtagtgcccttagagactagaagagggcatcaaaaccctggaactggagctacaggtgactgtggtgtctgaagattaaggagaacatcagctctatactgattttaactccaaagatgcgaccttagtgaggcagaatgggcagccacaagccgggagccatgtgaataatttaagttacttagctgtgttgtttattttatttttctaaagatttctttttatttagtaatatgtgtacaaggaaactgcaagtgcccactgaggccagaagaaggcgttggatcccctggagatggagttcctggactatgtgaactacctggtcgaggagctgggaacccaacactgctcttctgcacgagcaagcgctcttaactaatgagctgcctctctagctcttgagaaatatttctagccaggcagtggtggcaaaagcctttagtcctagcacttggaaggcaggcagagacactcagatctctgagtaccaagccagtctggtctacagagtgagttcaggatatccagggcttcacagagaaacccagtcttgaaaaacacagagagaggagacatcaaatattaaaaaagagaaatcagaaagcaatgccctttacaacacacacacacacacacacacacacacacagttctaaggactcagagagggaaaacctgtacctgaaaattcaagtttattttggttcagagatgcctgcccaggccagcattgaactccctattaaccaaggctgctcaaggacttctgatccttctgcctcctggaattacaggtgttctccaccacactgtgtttacgcgatgcctaggtttgaatacagcactcaaacgtgttaggcaagcaccccaactgagctacatcctcagaccagattctgaaaaactgattaaagaaatgaaagactctctgaggggtggtggcgcacgcctttgatcccagcacttcggaggcagaagcaggcggatttcataacataaaaaaaaaaattaaattaaaaacattttaaaaagaaatggaaaaatgtgcacacatgtgcacaagagcacatgcacacatgctcgtacacacacacatacacacacactcatgtgcacatggacacacacatatgagcacacatggacacagacaagcacacaggcacacagacatgtacacacacatacatacacacatgcttctgtgcttatacattgcaataattaaaatggtagcggcatcacagattccatgtaatccctacaagtaattcctagaggtcatgggaccataagtgtgtgaggcgcatgctcttcagtgccaatggcagagatgattcatagaggaaaaaaccaaaaccataagaagtctgaatccagctccacacccctgcatgcccctctgagcccaaatctctcctttccgatctcctcctcactgtgcgtagaaggtagaagcagcacagcttggcaattagaaatccctaaatccccttctcaacgttatctttctcagcacctagtgggcagaactgaacttgggtttctggagacaggcgggttttgtgtacgtctccttgtgacatgggagtacacgggggtcagggagatggctcaggcctgccacatgagcacgaaggcctgggttccatgtccaacacgggaactataatgccagccctgtggaggtggagacaggaggctctctgagctcgcaggccggccggccagccaccaaaacagaatcaacaagattcggccttcatccgaggccctgactcagagaagaagatggagcacaaccgaggaagacacccagtgctgacctctagtctgcacaaaggcacacctacatggtgttgtgcacttgcacacatgtatgtatacacacagatagtctctcaaagttgtaaaatatgtacaacaatgacaacaaaacgaggtgcacagctcaaaagatatggcatctaaggttgaaaataaaaaaggggaggctggagagatggctcaacgttaagagcaccaactgttctcccagaggtcctgagttcaaatcccagcaaccatatggtggctcacaaccatctgtaatgagatccgatgtcctcttctgctgtgtctgaagacagctacagtgtactcatatacaataaataaatctttaataaaaaaaataaaaaagggaccagaaggatggttcagaagttcagagtgacgattgatcttgcagaagacctgagtttggttcccaccacccatgccaggcagctcacaaccatctgtgatttcagcttcaagggatagatcaccctcttctggcttctgtgggcacatgccttcccctacatgtaatccccacacacatatttacaaaatttagaaaaaaaaacttattttatgcgttttgatgttttgcctgtatgtgtgcctgcctgagcatcacatgtgtgtctggagtccatggagaccagagagagcatcaggttcactgaaacgaattacaaacagctgtgagctgatactcgaacccatgttctcctcaacggcagctttgaagcacccagttatctctctagcctataaaaatacaaattttaaaaattagtaaaataagtgccaggcggtggtggtgcacgcctttaatcccagcacttgggaggcagaggcaggcggatctctgtgagtttgaggttaagctattctacagagcaagtttcatgacaaccagagctacacaaagaaaccctgtctctaaaaaacaaaacacaaaaacagtaataaaataaacaataccgtaatttatgaaattcaagtcaggaagcaggtagtgaaagttttcccttaatctctagaactcccagcagtgttggctactttatgcattctttcttttcactagggcttcttttctccttcagctccacctcctgttaatgactcttatctgataaggctgtagagaaagcccgggactcttaagcaggatttgaaaggtctctcagctctaagaagtggtgctagctagcgcgcaccctcgtggaagacggtgacattgcaggtgtcctgtgccggtgccggccccgcccccggggacaaaggccttccaggtcacctaccagagaacctgggtccaggggaacagatctgacctgaagaggaggaagtggcgcccggaaccgagcctgggggtcttggatgcagagagggtgagagaccgaggcactgaggacttggaaaggggtggacggaagaggcgcgtgaatgtgggcatgcgcaggagcgtgggattcttggagccagctttagtgcctagaaactaccctgtaagtcagcctggaagggctaggactccaaaacagacgctcttaacttgcagagtttgctctgtcgcctgactccaagccaagtgcattgttagtgcacaccacgctttgacaacagtgctgttgtcccagagcgtcaggcttctcagagtgcacacgtggggaggagagtgccctgcgccccaccggtggccaagactgtggagaggtttgagggacatgaacatctccacttcttcgcagatggcgtcgtcgagccccgatgccccttgttcctgcgactgttttgtctctgtgcccccggcctcagccatcccagctgtaatctttgcaaagaactcagaccggccccgagatgaggtgcaggaggtggtgtttataccagcaggcactcacgtccctgggagccggcttcaggtgggttaggacttagaaggagctggaaggttgagacgttattcccagaccttcgttttcttgctcctgggacgggagcagatggagtggaacgagtacggagttccagtccaccaacctggacccttgagtggagttagcttctgctaactcggtttacttatgtgtgacctgagaataagacctttctcagggccatttaaagtggctgacaaagggtccgggcagtgtaagttctgggtctttttttttttttcactgaattcttcctctctcttctttacctccagtgtacctatatcgaggtggaacaggtggggaagacacacgctgtgattctgagccgcccctcttggctgtggggagctgagatgggggccaacgagcttggtgtctgcattggaaacgaagcagtgtggaccaaagagcctgtggggcagggggaagccctgctgggtatggacctgctcaggtagagagctgctcttcagtgccccacttcctcccacctagcctgagtctattgggcttgtctctgttggccttgcccttgaggcctttctaaggcggctgcagtcttatatcttcctagtctgataaaggacctcccttggcctagagtgctttaatttttttttcagtactttttgttttgagacagggtttctctgtgtagccttggctgtccaggaatttgctctgtagaccaggatggccttgaattcacagagatcctcctgcctgtgtgccaccacacatagttcagtacaacttttgtttgtttgttttttggtttttcaagacagggtttctctgtgtagccctggctgtcctggaactcactctgtagaccaggctggcctcgaactcagaaatccacctgcctctgtctcccaggtgctaggattaaaggcatgcaccaccactgcccagtactacttttgttaattgaaatattacatagttgcggtttataaaaactggtaaatgtgaggcagccccgcctgaggagaggttcaggcggtttttccttggagagagtgttccagacctttccatggaattcacagtccttagcttggcaactatatggtttattattgttttttcatgtttgtttgtttttgttttattttatgttttgagacagggtctcactgcataaccctgactggcttagaattcactatgtagaccaggctagcctcaaactcacagagatctgcccgcctcccaagtgctggggttgaaagtgtgtaccactactccagctgatttttcactttgctttggtatttttgtttgtttgttttaagagatcatgtagtatgtagctgagtccagagatgaacttctgatctccctgcctccactccggaggaatcacaggcctggcctgcatgattgtttaataccatcatggctgctgggtttgctgtgctacgtgggcttttcatcaaacccgtgtggaccgcttctgtactctgattttctatcaggctggctttggaacggagcagcactgcccaggaggctgttcacgtgattgcaggcttgctggaccgctatgggcagggaggcagctgccgggaggatccagagccgttctgctatcacaacacctttttactggctgatcggacagaggcgtgggtgctggagacagctgggagcctgtgggctgctcagcggatccagggtaggagtctagcgtagagcctgcctccaagagggaacctagacctccccaggtactgccctccacttctggaggctaccatttttgttcttcctgacagccttgggcagtgggaaagctgatgggtcataaagggacagggagggacaccctgggagactagaaatgaacacacttagtaactctctccttcacctgaccaaatgtcctcatgcttcagcctgccccttcctctgggaagccttctggatctccctgtgtggttaggaggtcttatacaagcagctaccactttgctgtcaagtctgtcccctatgatttagttctgattgctttgtctcctcattaccacaggcccctcaagggcaggttgtacttgtttaaactgtcatctaagtatgtcacccagggtctagcacatagtaggtgccccataacagataaacaagttcctcttcttatacaggaggtgcccggaatatttccaaccagctgagcattggtacagacatctcagctgaacacccggagctccgcagccatgccaaggctcagggttggtggactgggcagggcctctttgactttgcggaggtcttctccctgacccagcagcctgtgcgcatggaggctgccaaggcccgcttccgggcagggtgtgagatgctgcagcggcatcaaggtctgtgagtggtgggcaggagggccacagcaccccagctggagtccctgtcacactcacgtttgctgagtccctccactccgtcctgggcagggaacatcacagcagaggtgatgatgggcatcctcagggacaaggagagcggcatctgcatggactccggaggcttccgcaccacagccagtatggtatcggtcctgccccaggatcccacaaagccctgtgtccacttcctcactgccaccccagacccatccaggtgaggggtgaaggggacacactgcagtgtcagggacatggcagcacctgttcctggttacttcagtccttcaacctgtgtcttattaggtcggtattcaagcctttcatctttgaagtgggggtgtcccagtccccccaggtgttgtcccccacttttggagcccaggaccctgttcggatcctcccacgattccagactcgggtggaccgtc

SEQ ID NO: 2978 - DNA, 2027 bp, Mus musculus
ccccaagcccgagcgcagccgccaggttccatctgaggtacccttgaccgtccctgccttcattccaccccggatcccggcaatgctaaccgctgtctgtggctctctgggcagccagcacaccgacgcgcctcacgcttcaccgccgcgcctcgacctgcaacctctccagacataccagggtcacacgagcccggaggctggggactacccctccccgctgcagcctggagagctgcagagcctcccgctgggcccggaggtagacttttcacagggctatgagttgccaggggcctcctcgcgggtaacctgcgaggacctggaaagtgacagtcccttggcaccgggacccttttccaagctcctgcagccggacatgtcacaccactatgaatcgtggttccggccgactcacccaggcacagaggatggctcgtggtgggaccttcatcccggcaccagctggatggacctcccccatactcagggagcgctgacctcacctggccatccgggggcgcttcagcctgctttgggaggatacgtcggagaccatcagctctgtgctccgccgccccacccgcacccgcaccacctcctcccagccgctggtgggcagcaccttctggggccacccgacggggctaaggccttggaagcggccgcacaagagtcccaagggctggattccagtctggatgcagcgtcccgacccaaaggctcccggcgatcagttccccgcagctcagggcagaccgtgtgtcgctgccccaactgcctggaggcggagcgactcggggctccgtgcgggcccgatgggggcaagaagaagcatttgcacaattgccacatcccaggctgcggcaaggcatacgctaagacgtcgcatctgaaggcgcacctgcggtggcacagcggtgaccgacccttcgtgtgcaactggcttttctgcggcaagcgcttcacgcgctccgacgagctgcagcgccaccttcagacccacaccgggaccaagaagttcccctgtgcggtctgcagccgagtcttcatgcgcagcgaccacctggccaaacacatgaaaacccacgaaggcgccaaagaggaggcggcggcggcggcccaaggcgagggcaaggccggtggcgtggtggagccacccgggggcaaaggcaaacgtgaggccgaaggcagctcggcgtcctccaactgagccccatggatgtcacatacctgccgttctttatttggggggggcggggggaatggggcggcctgagtaagaggaaggtggttatttattggtgatgaggggacagggaaagggacgctaggggtttttagtctcgggggctacatgggaggctgcttgaatatttaggctgccaggagctgaacacgcccctcgcttcttccctttctcactatttcaccctcccctgagttgctgaagagttgggatggagcgcccctaccatgtggaggggttcgcatagtagagagatggcatgtcccagaagctgagggaactcgagattgggtcggggcgttgggggaagctgtctggacacgtctttagttcctgggaacccggacataaaagcaccttggagccgcccttcggcctaggtctctttcatcccctcttctagtgctgctccctctaaaatttccggagagaaagcagagatgaggtgtgtgtgtggggaagcctggggtggttccccttaaggggctgtctacctagcttggagggttattagtatagaaagaactcccttcagtgaatttcttctaaacccttctggatggtagagccaggaagagcagctcagctctgcagccagggctctgagctggaggtcagagctggatggcatagaggagggatccagcagaaaaatcctcttacaaagtggaagagctagccgctcctttcaactcgaattcaatccttaactcttagaccttgtaaaagaaagcaaactcagcagtcgacattccccatctattcccctaggtagttt

SEQ ID NO: 2979 - protein, 374 aa, Mus musculus
MLTAVCGSLGSQHTDAPHDPRLDLQPLQTYQGHTSPEAGDYPSPLQPGELQSLPLGPEVDFSQGYELPGASSRVTCEDLESDSPLAPGPFSKLLQPDMSHHYESWFRPTHPGTEDGSWWDLHPGTSWMDLPHTQGALTSPGHPGALQPALGGYVGDHQLCAPPPHPHPHHLLPAAGGQHLLGPPDGAKALEAAAQESQGLDSSLDAASRPKGSRRSVPRSSGQTVCRCPNCLEAERLGAPCGPDGGKKKHLHNCHIPGCGKAYAKTSHLKAHLRWHSGDRPFVCNWLFCGKRFTRSDELQRHLQTHTGTKKFPCAVCSRVFMRSDHLAKHMKTHEGAKEEAAAAAQGEGKAGGVVEPPGGKGKREAEGSSASSN

SEQ ID NO: 2980 - DNA, 23863 bp, Homo sapiens
tgagaccggccccctttccagggcactgccctccttccccctacccgcctgattccgcctgccaggtcctgatacccagcctcctctctaattcccctctcgtgggatcctgctggaggttctctggatgaccctggctgcgggttggtggccgtgcccagctgaccaggacacaggatactgggcctcttatggagccttgtctgccacccctgaccttggattcctgacagggcactgggcacagtgtcagggtgaaagaggaagggtcagggcatgtttttgatgcagtgtcttgaaggccatgaggccaactctcagtgatgtgacaaaagggatttatttatttatttatttattttaactttttttttttttttgtagagtcggagtcttactatgttgcccaggctggtttgcaactcctggcctcaagtaatcctcccgcctccgcctcccaaagtgctggggttacaggcatgggccattgcacccagccgacaaggggatttatagagaactcaccaacctctgacctggcagccccttgtcctctgcaaagggtgtaaattcaatccagtgcaacatatatttattgcacactcagtactagttgctgtataagatgctgggggagattcaaagatgaacagaaatttccagtccctcaaggaactcacgatcttacacatgcacacagctaattgtattacccatcagagaatattaaacgctctatattttagaactatgggagcacagaaaagtacaacttgaaaaactggagaaggctttagagagcatggggacataggagttgggatttaaaagatccataggagctcatcaggcagagaaatggggaagagcatttcacacatggaacagtgtggggcgtgaaaatatgtggacggtaaggatggagtagaagcctcctggggagtgggaagggatgtggctggaaagggaggctgaggccagatggggaatggggcttcaatcctaggcctaagagtgtagattttctcctgtaggtaatggggggctattgaatgtttttgagctgaggcacgacatgactgggatctttccacccttgtaagaagtttaaattcctaccgagggactgaggggattctgctttttctgcctctgcctgtctccgtgactgacacccagccagccttttctctcggctccacttaccgcccttgctcctttgccccaaacctccaattccttgttccaagcagggtgacagggtggggagcttcactctccctcagccctcactccaaccctgcatgtcccagatactctgtgggtccttccacttccatcacacaaccagggccagccagggggacagtaggaagctgtgtgtgcttacttcatggatctttgggttttaagttccccgacccaggcttctgccttcactgatgccctccccaagctgaggagcttctggaagcttggattctggggagccctttctctaattcactcagctgtggcttatccatccctttctcaaagaaaggctctggcctgaggaccctgtggcatgaaaggatagagttcttgccctcaaggattcaaccagtagagaagataagaaaacaagcccatggaagcagagcatgaggcaataagtgctgaggaagttcagaggagcatgccagtgatgtgcggataagagaagcctttgcagagaaagccgcctatgtgccagccaggagcttgaaggataatgtgctttccagaggcaagaatggctggcaggggtggaaatgatttcgacaaaggtaggaaggctggacatgtttggtgaacattaaatccattgggctgagctgggctgtagggtttgtatgaggaccagcgggagagaagactgcgtaggtgaagtgggagggtcctggatgacacatttagcactgtggagccactggatgtgttggagatgggaagtgccaagatggagtggcactttaggatgattaggccaggcatcatatctcacgcctgtaatcccagcactttgggaggctgaggcaggtggatcacctgaggccaggagttctagaggagactggtcaacgtggtgaaactccgtctctaccaaaaatacaaaaattagccaggcatgatggtgggtgcctgtaatcccagttacttgggaggttgaggcatgagaatcacttgaacccaggaggctgaggttgcagtgagccaagatggcgccactgcactccagtctgggtgatagagggagactgtctcaaaaaaaaaaaaaaaaaaaaaaaaaagatgcttcatctgtcattaattaggtgcaggaaagcttaggttggtgggtacagaagtggcataggagacctgaaaattaatcgagacaagtagtaatttttgtcagcaagttgacacttccacagaatttccacagaccagtgcccatttccacctcatttgtcaattaaacaaatatttgtaagatacttgctaagtaccagacaccattttaggctctttcttcatcatcttcccctgccctaagataaaaagatgaaggtaaactctcacctgcacacacttgggagatcttacttagcccagcctcccccttgcagcctaagcgaatccagtagtgtctgcctttggagcaggtatattgagaaaaatcagagaactacatgcagtaaggatttgggggacagtgaggtaagcaagcttaggggtgggaggaagagtagcttggaaagcagaaagcagttggtgggtgggaaaagggaagttgacagctgagtgtaggggagccctgggatctttaggggagggaggctgggcaaggaggagaaagatggaaggaagaacagtaggagatgggcctctggggctgaggatgggggccggagggaggaacaaattagagagctgaagaaggaagtagagtcttagcagctaggggcgggaggaggaggtgggagaccgagaggcgagggcagaggaaataggcccaggcactggagacgaaagtctgggagtctgagccgctgaggagccacctggaaggtgcaggcagcggcaacatcaaacctgagatccgagggctggcgctgggagtgagctgctggagttgggggaggtggctcgtgtgggggccagggggcgggtaggggagctgagatcaagagagaggggcttgaattgaatctaccctcagccccactgggtcttcagcttcctcagccccctcccctcttctggctccaaaggccagaagccaggactctgcagtcccgccccccactccaagctacaggccgcatggcacccacccatagctttcccagctcctctctcccgcccatcactggtgttaggaaaacacattgtctggaggtgcgaatagaggaggaaagggggtctcctgccaggtagggtgctggctgtgttcattgctgtccaggcagggtctaaacacacccctgactgatccaaaggccaggggaaggtgtgtgggcctgaaggtccaggttgagggctgggtctttttcctctcccaaactcccccccaaccccaagattctcccatcttttggactggacctgctacctaagcatatggaaccgattgaaagaatttgtatgctcaccttataatttatgcaaatcaactctgtaattaactataatttggaggcatcctttggtatttgagacatttatccatgaggaaatgccctagtgataatgctcccgtattaacattatttactccacctgtgtggtctcctcagcttgtttcccctccccactctgattttctgtgctggaaggtggggagggacagggaagcccctccctggagcctgcctcagtcctgatgcctgggttcccccagggggttgtgctggccctgtcctcccaattttgcctaagattgaagaaagaggtccagctctgcctcctaagccctctaatactctattctctcctgcttgatgggtggctttctgctgagcttttacctcttcagggcctcagtgttctcatctctgaaatggggagaggaaggacctgtcagggcctttatgggataattgctgaaaagttaatgaagagactgggaatccccagtctagaggttgctgagggtataggggaggagcaggagaagagttttgggtaaagactccctggctcatcctgggagggaggtagcatgtaagtcttggggtactgggttctggtgtgtgtagagggggtacaactgctcctgtcctctgccaagggcattgggctgtggtcaaaaacaggatgtcatcccgtgaaaagtccccaggccactctcctatgtgggtcagagttcacagcttcagtgagctttgggaaacaagtcttactcttctgtttcatctccgttctccttcctggtcttttgtccatctctgccctgggacatgtttgtgttagccagtatacctaaacttacaaccaccctaaaattaggctcatataaatagagatctgggggctccccctaaattcaccttcaggccccttctcccttttccaggccaccttcctaccctcttcaccctcctggagttccaggagtcctgaactgtctgtagcagttcttggctggactctgcctctggtctttctggtcttaggtgacctcttgtccatcctaagcttccccactccatccaaagtcagggaaaaggtcctcccttcccatttgacaatgagagatcccaggtccaaaagatagattacactgggtcctcttgggggatccaagttgggaagtgagtatgtaaaaagaggatgaaaagggagcgagagaaattgtggctcagagaggccaacaacactgacatgaagctctgcaaggaggaactgacttgaagacgtgtggtgtgtgtgtgtttgttgggggcatgagcccttcaggtctcaaaaatggaacttctttctctcttaccaagtccatggaggaaaactcaggaagaggggatggaatttggagagttccagctatcccagctctccaccctagcaatgctgtcatttcctccatcctgcaagaaccgctttgtccctctcccactgcccagccaactctgcggaaggaaggaagtgcccccagcccccactcccagctgaaatcctcctttcctggcagacctcacggactcagatctcacctcctaccactcccctaggagagctgggggccactgtttcctggattatcctaaaagcttctgaggccgtgaggacttggcagcatccctgctccctccttcacctccccctttggcactgcctgtcacctcctttataaagcctggctcttttatcaccgccacttggccctcactgccgccgccagctctgggctccatggactggtaagagaggctgttccctgtccagtacaggggacctccacaaagaggatcaggtctccactctaaagtgggggtcatagagaagggtctggttctctctgaattgggaagggggagataagagggagatcttggtggggtttgcatggagaactaaagggatcccttggaggtcttttgactgggctggggtagtcagcccagtggagaagtggggtagggattcatagctgggaactttatttcgagagaaaggaagggcaaataaatgttaatagaaatacagggcacacacactcactgccctgaatgacagaacacctgcaaggatagtaagggagaaaccactatccacatcctatggggaactgcatttacggtggaggagagaagacaccctacactcaagcccacaggtacacacaggcataatatgtacacacatttgtagatatacacacaccgacatacagatgcactatcctcaggtgggttcatcttctagactgaaaagcgatggtggtagctagggattttgaaatttataataaaattagtgtccagcattgtgcttggccttaagtagaccctcgataagtgtttgttgaatgaaataaaggatgaatgaaagaaaactatttgaccccagctttaggctctatctggttttctaagaatcaggagagtatggtggggagaggaggggaaataaggaatatgttggcatccagggtcatcagcttgcaggcttggaagtgcagcccgaaggtgggagtgggaaatggaggagaggagtgagtgagaagaggaaaacaggaccagactctggtctggtcccagctctgcttctaacttgctactaacgtccctgttttggggtttggtttccctaccagtaaaacgagggcttggacgagacaatttggggctagaccagctttgatattctcatagtgcaatctctacaggacagttgaagtttggaagggatcacaagtgtagagtctgacttgtctcagcaattcaagatgggatcagtttgtccattagactcaagataggagatggctttgatctagggattcatttaagaatgctgtttcctccaccttcaggctctaggggagccagacttccagggtcatcaattctgccatattgaggccagatggactagtaggcagaatacaggctttggaacctgagagatctgaactcagtttcttcttctgtcttttaacaactctgtaatcttgggtagatcatttaacttctttgatctttggcttcctcatctgtacaacgggaataataataattactttgctgcatgcccatgagaattagagatatttgtgtaaagcatctggaacatagtaggtgctcagtaaataaatgccgtttgtgataaacacgcagactaatgagatttctccaggtacaaagtggatcactgactatagatgaagcttgagaagaagaggggtggcaggaatgggggttggacacttgcaggggaaatctgactatttatttgagagaatgaggaagagcagcagaaatggcccaagtccaagacagatctcagtttatacaggagatgtgatgggctgtgttgttcaattttgagtagcaataagtatatgggcaatgggctgtggtgaccttgctcattaagttaacatcagaccatgcgccgtcattcggtgggaaaacatttagcaagtgggaaaccaaaagggctggaagcagaggactgcaagtagagggggactggaggaaagatagtgccagtaccctgagtgagcagcagaaacctaggcagagcaggaaatcagaatggctgggagtttccagagacaactgcattgttgttgaatttcctgctgatgagctgcaggcagatggagggtctttgctggtggaattccagatggctacaggtctggttggatcggggcagggctaaagggggcctagagtgaaagtagcagggagtgtctaccatcctcgggctgaatccctgttgctttccagggaaaaggcagaaggggccaggaagagaaggcaatctgatgcctataaatgggaggggaacttggtcccctacccagagtcagacccctgcacaggctttagcaccttaggaacagtagatgcagcaccagcaggcagcttggaggaggaggcaggaatgcccagaggtcaaatcaggaaccagagtcccccactgggggctctgttttggacctgatgagtgtctactccattccagaggtagctgtgaactaggatacaaacccaactggccaggatttgtaggctgaatggatggagacaaagctgcgttgatgaagaggattgattgtcaaattagccatggccacaaagatccagagcagttcctgtgaatccacatccagagccccaagtaacaagaaggcaaaaagcaaaccccgactgatcagaaatctcaatcccccgatgtcaggcggcatctccggcttccaaatacctgtcacttctctagcttggtggctgcttttacagcatttcaccaaggaagaaactgaggcttagaggcacctgacctgccagggtcagtttagcaagtgcagggctggggctagaatttaaatccgtcaacttctagtccacagttctttgtgcatacaccttaatccaaccaatatttacctggaactgacttatttaataattataacaaggatatcttccatttacccggcgcttaccaggggccccttgggctaagcatttttaggcatatcaattcctttaagcccccaggagaccctaccaatgtgtacccaggttgtccggatgagggaaatgagccttagaaaagagggagatgcacagatgaatccgacgtcgattctggataagaacgtgtgcgtgtctgaggggtaccatgcacatacgcatacacacatggattgattttcaccccgcttatgcactcggtttagctatttttgagttacagtttgagtgtgtcccaaacgggcatgcaggacaggtaaaccaatggcgggggggagtaggggctgtagaggcgagattaaatcagcctaaattcaagtatgaaatcgactgtaaagaggaaaacgaaattttaaaaagccgacggcaaagcgcacagaggagacgaatctgaaaaatgaaagaaatagggaaattaatctgcattcccctgtgaaaaaaggggtcacatggagagatcaacactgcggcatgggagtgaagcatggggccacctcagcggccaggcagaagaatgcgtgggtggaggacggaacttccctacccaccggtgctttgcgggtctcggaaatgtcgacccatccagatcttgagggaagtttttgtgagctccgcgagcgcgctgaaattttaccagaatattgcactgggcatgtgaatttttctcaaaggaatccaagacccctccccaaagttaagaaccttgggtttagttattctggtgagaattagaaaggaatggtggcaagggatagctcaattccttccagaagtgtcccttcccagggccattcaggcgcctgcccattcttcagaaccgggtgctcgggggcgagggtgtgcgtaggctgagcatttcccgaaggacaggagggcgaggagaggcgaatttgagaggtggatttcttaggcactggggttgctacctaaggggaggggcagagtgacagctgctgggacctgggaccagagtaggggggaagcagagaccggtggtgggcagaggctgggagaggggaggagaggaggtggtcacccagaaaggtcagagagggataccccggaagggagagggaaaaaaggacggggaagggtggtggtggagagaagcggcgcggggtgcggggggtgaggcagggcaggggacgggggtcgggggtcgggggaatggcgaaggagggcagccaagacaaatttcacacggcctaggcctagaggcgaactggaaacatacttggcgctcaatcttgtttccttctttcctcccagttccggggcagggctgtccgttcagagagggtcaagggccatcgaggcaacctaagggttgctgcctaagggtggctctgtctcacccccaggacctgcccccttatccattccccctgggtcttagtcctgcgtcctctgctagaccgagctagctccagggcagttttccacccggcggggcgggtcttagaacctgggaatcaccccacccgggcccctctccctgggagtggaggggaccagggaggagcgagggagcgggcggcgcacgccctagttatctttcctcccccactcccgcccaccccctcctcgcggccctggctgggcctccggtccagccgagccctcaagggttaaaggcggccgcaggtgaggtgggcggggccgcgagtccgggggaaaaagcagcgctggggagaggatgaaggcagagagcgcgggtgagtcacgggcggagctggccttgttcgctcgctggctcctgcccgccctccgtcctccgccctctcgccagcgctcacctccgccgcctgccgcctgccgccagccgccgggtctggctcgccctgggctcctgccccttaccgctggagagctcgccggcgcacagggcctatgagcgaccgtcagtagcgcaccagccagccgtgcccggagcccgccgcagcctcgaggtaggagcgcgggtcggggtggccaggggtgagcgctacggagattgtctcgaaaaaacgcactccgaacgcgccccagcctcctatggccttgggagcggggtggtcctaaaggatctgagaggttagaaccccgatggagggaaaactgggcggacgggagagactggagggaccgaggaggctggaaaccggggcaactggagcgactgggacaaccagaggaccgggacattgagaactgggagtactagccggtgatccagagaggcagagccgaatggggcataagggtgcaccgacttgccttcccacttcggggagcgagaagcctgcgatgtacgctgtgctctctcctttcctgaactctttctaggcctggaagtgaaccggacacatacttggcactcaatcctgttcccttctttcctctcagctctggggcaggtgggtcaaggaccatagaggcaacctaagggttgccacctaagggtggctccatatcacccccaagacctgccccctcctctattctcctgggtcttagtcttgcatcttctgctagactgagccagctccagggcagttttccacccagtgggactggtcttagaacctgagaatcaccccgctttgggtttctgaaatcttggtagcaggccattgcatcccaggcctgggctctccagctctctgccaggagaagccactctggagcccagattatcctagccttcccatcctccagcccctggggcagttcccaggcaccaaaagctgttagggtccctggcttcacagctcccgctcagccccttctgtgctgccccaccccggcctggggctcctttcctgcaacttcaccctgttttcctcttgtggtgaggcagccggagcctgagtaggtgcccccgtcctcctctccctccctctcccaggctatcagtgccacctccctggtcccagaggcaggagatggtagggtcagctaagccctgctgtaggaaggaaacaatcctgccctaagtcactggtctcctcccccaccagtagagaagacccaggcacacaaacctgcccagctgaggcaccagggcttccaggccttagggagaggtggtgagaaaagagtgaacttcaagccacagatatgtggttgagaaagcgttgggggtctttagcgttctaagggtctacagaaagattggtttacagaaagtaacagactgagagtccaggagttaggagacctggtttattgaatgaataaatgaacatccttgtccaagtcactgtgccaagtcattcagtctgcttccttctcttcaaaataagaagattggcctggagcagtggttctcaacatttgctgcatataagaatcttctggtggtggtggggagcttctgaaaaatgatccatgcctaggatgcacttgcttatgtcatctttttgggcaattcttgctcttaggttctgtggttatgacttctcttgttgccctcctcttcctgcactctgaccttgtatcacttaaaggggtgcaattgtatcttccagagcttgctgtcaagctcttctctggggaagccattccctcccaactttctatctgggcctcccctagcatggagaggaagatgggtagcagtcagagagttgcctggcactggtatgagtcaagagagggatggaaatttggttttctctggtgggggtatctcccagattccaggggtatctggtggccagaaagctgctccccagggaggtgaagtccctgcttgagggaagggggtgggggcatgtgagtcggtttagtgggcccgatgtgaccaggccaggcggggagcagcgtagacggtgaaatgcttttcattactgaacatgctttgggaatggcatgagaactctttcaaagactcaggacccgtttgaggctttatgaggggcaggtcacctgaagctttgggtttcagaaatagaccatcccctctcccatctgtatcctgagttaaactggggaagctgagatgtgtctagatcctccatttgggctgacagcaggtctgcagggggaaaatgccactgccccttgtgttggcctgggcagctggggtggggatggttctagcactgtgctgtaggtgtatctgacctaccatcctgggagtggcccaactctagggatgagctgggtcatacggcagggatcacccagaggaaggtagacctccatcatcctctgtgcttggatgagaacctcacatcttggacccttcctcgcactcccgaattctctaaactcatctctagtcctcgttcagaggtgcatccttcttttacacctggggccagagaggaggacctgggttaggagggaaagtgagctggttatttcccttacttttctgcttcttcgcctcctttaggtcccgtctgaggtgcccctgaccgtccctgccctcaccccaccccggatcccggcaatgctaaccgctgtctgcggctctctgggcagccagcacacggaagcgccgcacgcctccccgccgcgcctcgacctgcagcctctccaaacttaccagggccacacgagccctgaggccggggactacccctccccgctgcagcctggagagctgcagagcctcccgctgggcccggaggtggacttctcgcagggctatgagctgccaggggcctcctcgcgggtaacctgcgaggacctggaaagcgacagtcccttggccccgggccccttttccaagctcctgcagccggacatgtcacaccattatgaatcgtggttcaggccgactcacccaggcgcggaggatggctcgtggtgggaccttcatccgggcaccagctggatggacctcccccacactcagggcgcgctgacctcacctggccacccgggggcgcttcaggcgggcttggggggctacgtcggagaccaccagctttgtgccccgccaccccacccgcatgcgcaccacctccttccagctgccggagggcagcatctcctagggccgcccgacggggctaaggccttggaagtagccgccccggagtctcaagggctggattccagcctggacggggcggcgcgtcccaaaggctcccggcggtcggtgccccgcagctcaggccagaccgtctgtcgctgccccaactgtctggaggcggagcgactgggggctccatgtgggcccgatgggggcaagaagaagcatttgcacaactgccacatcccgggctgcgggaaagcctacgccaagacgtcgcacctgaaggcgcacctgcgctggcacagcggcgaccgtcccttcgtgtgcaactggctcttctgcggcaagcgcttcacgcgctcggacgagctgcagcgccacctccagacccacaccggcaccaagaagttcccctgtgcagtctgcagccgcgtcttcatgcgcagcgaccacctggccaagcacatgaaaacccacgagggcgccaaggaggaggcggctggggcggcctcgggagagggcaaggccggcggcgcagtggagccccccgggggcaaaggcaaacgcgaggccgagggcagcgtggctccctccaactgagctcctcagtgccgcctccctgcgggtatcccggggggcactggatgcgagcccccaggtctgacgtccttgggggtggcttgaggaagaggggaaggtgcgtatttattcagggaggaggaaaagtggtgcagggacagggagatggggcgctaggggttcttagtctctggggctactaggcaggatgaatttgactgggtcggtaggagctgcgcaatgcccctctgttctcccctgcctcacagtttccctcgcccctgggctggggggttggggtgggacacccgtaccgcggctggctggcggggacaggctagaggagacagcaagtcccagtccccggagcagagagaagtggggccggcccggggcgctggtggtggctgtctggacacgtccttagcgcctgggaaccaggacataaaagcgcctccggagccgccctgcggcggggtccctttcatcccacttaaagtgcttctgcccctagggtttccggagggagagccgagatgggatgggggagcctgggggtcccccttggcaggggtgtctctttctggtttggagggttgttgctgtaaaaataactcctttgatgagcttccttattaaccctttcagacccagtctgttggagccatgaaggaagagggaaagagggctgccattcctgacagcctcccagccagggctggcgataaaggaccgagatagatggagggggcgagtagggaagtcctcttctaaaatgagagatagggatttggtggggtatggaaggaactaaccccttccctctccacctctgattcagcccttaattcttggtctatgataaataaagttcagtagtctcacattccccatctattaccctaggtgtgttttcaaggcagccagcggtagaatccatgtagttcccaccagttgccttcccctcagggatggaaggaagagggtttcttgggctggttgagggcagattgggggtgtctcatcagagggacctccactggttcccactcagagtggaggcctgcagcctacctgaccatctctttagctgtcaccaagaaaataaaccccactgtctctctagcttggcccttgtctttcccttgcccctgccatagcatgttcattaggggattccttcctccccctcatctcacaggggaagggagaggaaagagttgttctcccactggaaggggttctgccttctgaggtgacatccaggaagctgtccccattcccttctcctttagatgctagaaacacattttgattctgatcatggggtgggggagagaggaaaggagggaggggagaagcccagcagaagctgagccaggcagaggggaaagaagctgatatgaggaagggtctgacaggccacagcccttgcagccggagggctttcccacactcaagagaggggccttacagtccctctgacacccctcccccttcccctcgctccctttcttcacccggagccctctgcagagattagctgtgtattgatttttaagttataagcaaagggtattttatttaatattaggttatgtgtgtgcatgttgtgtgtacctgtgtgcatgtatgtgtgtttctctactgagcctggggtctctagccagggagaccccatcttattcaccatgtccaagatcctgggatctgggcccagcatctcttcctcctttgtagatgctggagcccagccaaggtctgggagctatatgggaagtgggggctgggatctgggtgggaatatgtgtttgtatacaaaggggccctccttaaaagggacaggatgaccttcccgaggaactcattggcctggggtagtttaagaagtaatgttctttctttctttctcttttccctacctcctgctaacccaaccagagatccccttccttgctgagagggttgggggcaggaggagatttggcagtgcctgcaggttgcctggccaggtggagagggggaaagaggaagggcaccgtgggtgtaagatgcctttctcctccacccatcgaaaccagccaccccttccctgtgccaccaagacagccttttccagtggccatcctaaggggaactcccaaatgggtgttgctggtggacacagatgctccccccaatggaagccccaagctctgaggtatgcgggtagaggctttggataggttttcttctgctcccctcttttatagatctaggctgcttggctgcctgtctttctaggcagtccccctagaggaaaaatgtaggaatttattttttctttaactgctgtgaactcactttgagggggtaggaggagggagaaacagcctgtgttttttatgcaataaagtcatcaactacatcatgcttcctttgtgttccagctctgtttcctttttgactcagtgtccctcagcagtgaggaccaggtctgggccacagagtggggtggatgcttcccagtgatcctgcagccccttggaaagcctcatgtctattgagttgggttggagctggggtctgatcctgccccagaggtggctggtacagaaggagggaggttcttcctctgggttggtacccgggctgtccctccctggtctcatacctgtggttatgagaagtttctagatatctctttcctcttccacatacaagccccttctttcccttcccctgctaagaacactggttccctctttcccaggcactggctccctcactccatccccatagagggtgcatgtcagtccatcccctgcctgtgactgagctgggggtgattggcagtgattacttcacccaggatgatccttatcagggacaaggcgatgaaaggcagccgagctatctgatgggctcctgcccagctggaaagtatgagggaaaggctcctactgtagctcacagctagagacccaccatggttacacaaccacaaggcacacaaacatacccgcactggacccacgtgcacccgcccccagagatatgcagaaatatctatctgtacacatcttcccaggcctcccagtgcttgatacaaagttggtgcctaattcacatcaaatgagtagaaagcctcatgattccagagccccaaagccaggaaggttgacagaagataggttttgggctccaagggggctggggggcgggggttactatgttctttcaccttctcattctacctttttgccaaaagtattattttcccctagtgggatttctagatccaccactctaaccctaacccaatttctcgaagccaaatctggtactcaggctggcccatcccataacttaatttgggatcctggggtcacaacctttatggctaccttaggataggggcatcagaatgaatgatttaggggttgtagaggaaaccagactggtttggggccaattgttttgtttccacctgctgctagatttagaaggctgggaggaggaaggacaggtgtgttttcctaagaccttatgccagccccactcctccaggtgcctcttttgtcttcctggttctaggggagttagaccccaggaacttggtgagtcccctcctcctttacccccatcgctgcccccagggacaggagggcagctgtgcggccggctgggcctgtctgggcagggctggggccacccctcctccccatgcagctcctcccgctgacctgcattcttagcaggggcctttggtggggctctgacacttgcttccttgctggaaatgctgcctggctggcctgccccccatcccccccacgacggaacccaaagccacctctgacccccctcagatggggtgcctggcaggaggatcatggatggcccaggaaagggttagggaaatcagaacatctgggctggctctctgggttcctctcctgggaagtggaagtagaatctactcctaacctctagggtgggtgaatgaaataagaaatgagaaagtgacagagaagaagacagcctggaaactgcaacctgggggtgcgctgtggcctctctctgcctctcctcctgcctgtttccgccccacagtgggaagccgggaaactgcaggagatgaacccgccttcctgcaagctgcttcaggtgcccagatttctcagcacgcagcttcgatgtttgcttctggaatgacattaattggcaacctcacaatccctccccgacactgtatcagaaacagccttcaccttcccattaatcctagcatgactgaccgccagcaccctagcacagtaggcttgaaagaaggccaaactccactaaaacactgttagaattgttttctttctttctttctttcttttttttttttttgagacggagttttgctcttgttgcccaggctggagtgcaatggcgcgatctcagctcaccgcaacctccgcctcccaggttcaatcgattctcctgcctcagtcttcccaagtagctgggattgcaggcatgtgccaccacgcctggctaattttgtatttttagtacagatggggtttctccacgtgagccaggctggtcttgaactcccaacctcaggggatccgcccacctcagcctcccaaagtgctaggattacaggcatgagccaccacacccggcccactgttagaattgttaagcaaatacagtaaagtcagaggatacaaggtcaatgtacaaaagtcaatagtgttcctatacactaataacaaactatacaaaaaagaaatcaagaaaatagtcccatttacaatagctaccaaaataataaaatgtttaggaataaatttaaccaaagaggtgaaagatctgtactctgaaaataagatattgatgaaagaaactgaagaagacacaaagacatggaaagatatttcatgctcacggattggaagaattactattgctaaaatgtgcatactactcaaagccatctatagattcagtgcaacccctagaagcagataacctgcagcatctcccctctctccattctggagggctccacagagcaaaagggtgtaagatgcatttgtcttaatgatggctatggagagatggtttgtagagaaaaatgaactgaaaatcaaaacatttgggatcagagtgtacctccacatgactgtgtgtcacctttggccaagacttctttgtggtttcagtttcactacaggtaaaggcaccaaatctttgaactagaaagttctaaatttccctttaaagcgatcttcctatgggtttgagcactatcagacagataggtcctctgggatcagatgggttttgtgcacactttcccttatttatttattttaagagacagggtcttgctctgtcaccgcggctggagtaccgcggtgtgatcttggctcactgcagcctcaatctctctggctcaagagatcctcccacctcagccttcagagcagctgggactagaggcacgcaccaccacgcccagctaattttaaaatattttctgtagaggcgaggtcttgctgtgttacccaggctggtgttgaactcctgggttcaagtgatcctcccaccaccgcctcccagagtgctgggattacaggtgcgagccccccgcacccagcctccaccactctcgtattctgtatcttattcccctaggcgcctccagcctgggattgcgcctctgggattcaaaccaggactcaagtatctgaggttcttccttaatctccagatgtcccagcagtcccctttctctgacaaagtctcccttttcacgcgggatcctttccacccccagctccagctccccgcagtgactccgtggggttagcagcctttgtcaggcctcaaatgggcgcctgggtaggacagggagccaggtgggactcgcaaggccgctctgctccgggaagtggtgcaggcgcgcgccctggtggaaaacggcggagctgcaggctccgttccggctccgaccccgaggccgaaggccttccaggtcacctgagagtctccgcccaatggggcggccctggccagaagcggaggaggtggcacccgggaccgagctggggtcttggaggaagagagggtgaggggaatacagtactgggggtgagagaagggttggacagaagagggtcgggtatctgggcatgcgcagggccgcaggactcttggtggggtagcgagggggacggtcccacgactgctccgaagggccgggactcccagtgggggcgggacccccggagtgcccgcctgcggactcccaagcctggagcctggggagagggtgggcacctccgttcccgcacacccgtccatggtgtgtgcgccgagcgtccaggagccacggcggtgtcttccttgcgcgtcttttacacgtgtgggggtaggctgctcctcggggctgagccgtggccagggttatggagaggcccgcctctccccagatggcgtcgtcgagccctgactccccatgttcctgcgactgctttgtctccgtgcccccggcctcagccatcccggctgtgatctttgccaagaactcggaccgaccccgggacgaggtgcaggaggtggtgtttgtccccgcaggcactcacactcctgggagccggctccaggtgggttagactttatggggtgctgggaggtgtggcagatctctgcattcttttaagaccttcttccctgctccccacacctgggaggctgccagaagtagtggaagagcatgagctttaggtctaccaacctggacctgagctcattatgtagcctcagtctacctcagtttcctcttctgtaaaatgggaatgagaccttcctcaaagggatctataaggtaattggcagagtgccacactcgaggggccgcccctctatgagtggacgcttcctttctcctccctcacctccagtgcacctacattgaagtggaacaggtgtcgaagacgcacgctgtgattctgagccgtccttcttggctatggggggctgagatgggcgccaacgagcatggtgtctgcattggcaacgaggctgtgtggacgaaggagccagttggggagggggaagccctgctgggcatggacctactcaggtgcagaccctgcccttcctcatctgcctgacacaccagaaatctaggggctgagttttgacctgggcccatccatccctcccccagcctggttcacaggggcctcctcctctctgcagactttgcccttgtgccttcgtgaagaaggctgcagcagcagccacctttgggcctctcctggcccagaaatagagcagtggttatttatttattttcagttgaaatcttacatagagtcccaatttataaaaccagtaatagtggatggagcagctctgggtggagagaggttaggggctcaggacacttctctctctgaaactgtgtttcaggccttttcatggaaccctcaaagcatagcacatggaaccagagcattgaaagccactggcataattgcatttgatacgatcagtgccagcagatttgctgtgtgacttgggcctatcaccaaacctctccgggcctcttctgtcccctggagcttctgccaccagccattgatccctctgtcacccttctgtcccttggccctctcttttgccaggctggctttggaacggagcagctctgcccaggaggccttgcatgtgatcacagggttactggagcactatgggcaggggggcaactgcctggaggatgctgcgccattctcctaccatagcaccttcctgctggctgaccgcactgaggcgtgggtgctggagacagctgggaggctctgggctgcacagaggatccagggtgaggtgttccctttctcccagctttgggaagtgggagagatggtaggggcagggaggggcccgatccaggtgcaagcctgtcgggacatccagggagatgggagatgagcccacttgggaattctcctccccttcacttggttaagtcttccgtgtgctacagcctgttgcttcctctgggaagccttcctggacttccctgggtggtcaggtttcctgcttatatgcaagcaggtacttctttttcatcgcattcaacacagttgcatgcttacatttatctctgtgattattttgtctgcctcccccaccaaaacgtaggctccatgagggtaggtagttctcttctccaccatgttctcagcacctcgcccagtgcctggcatagaatagatgctcaatggtaaatgaaccactccccgatctcctccacagagggggcccgcaacatctccaaccagctgagcattggcacggacatctcggcccaacacccggagctgcggactcatgcccaggccaagggctggtgggatgggcagggtgcctttgactttgctcagatcttctccctgacccagcagcctgtgcgcatggaggctgccaaggcccgcttccaggcagggcgggagctgctgcggcaacggcaaggttagtgaacggtggagggggctgggggccaggagggccacagcagtgccagccactctcccctcccacagcttccccctctactccttggcagggggcatcacggcagaggtgatgatgggcatcctcagagacaaggagagtggtatctgtatggactcgggaggctttcgcaccacggccagcatggtgtctgtcctgccccaggatcccacgcagccctgcgtgcactttcttaccgccacgccagacccatccaggtgggaagaatgagggtggggaaggctggggagaagagaggatctgatatatctccgtgcttccatctgtgcccctctaggtctgtgttcaaacctttcatcttcggggtgggggtggcccaggccccccaggtgctgtcccccacttttggagcacaagaccctgttcggaccctgccccgattccagactcaggtagatcgtcggcataccctctaccgtggacaccaggcagccctggggctgatggagagagatcaggtatcccccagggagtaggggctaccttgaggggatgatagacctcccccactcccagtgggactctggaaatatgaaggaactagggagtggaagagatttcagagctggggagaggagttcctcccttcaaagccagcaactgcctttggggaatgtcggggggtatctcctttctcctgcttgtgtgaggtggtacacagtccccccttcacctggcgggaagcctgtcccggacagactcatctcagctttcccttggggcaggatcgggggcagcagctccagcagaaacagcaggatctggagcaggaaggcctcgaggccacacaggggctgctggccggcgagtgggccccacccctctgggagctgggcagcctcttccaggccttcgtgaagagggagagccaggcttatgcgtaagcttcatagcttctgctggcctggggtggacccaggacccctggggcctgggtgccctgagtggtggtaaagtggagcaatcccttcacgctccttggccatgttctgagcggccagcttggcctttgccttaataaatgtgctttattttctcttcagtgaactttatcccaggaccagtgggggtgggagagccaagtgaggcccaaaggcagctgtgggctggctgcggggcctgtggttgtgtactcattcctatgagtgggtgagtgatggggactgggcaggaggacagggaggggacaggagctggctgctgttggggatgactaggaccacagctccttggtccttggcttggaccggggaagggcactcgctaggggtggcagtgagatggcatgcctcttccatgaggtggtgcccgcttcctgcccaagtgggagccaggaagccagcgggggcctgaggcatgcctgccctgtgggtagctcccgaaagattccagactcgctctttagaatcaggtggctcactgagctctgtattttgtttcctggagctttcactggtttcttcccctgagataccccaagtgacatgaaaagcatactcagggcctagag

SEQ ID NO: 2981 - DNA, 1431 bp, Homo sapiens
agcgctcacctccgccgcctgccgcctgccgccagccgccgggtctggctcgccctgggctcctgccccttaccgctggagagctcgccggcgcacagggcctatgagcgaccgtcagtagcgcaccagccagccgtgcccggagcccgccgcagcctcgaggtcccgtctgaggtgcccctgaccgtccctgccctcaccccaccccggatcccggcaatgctaaccgctgtctgcggctctctgggcagccagcacacggaagcgccgcacgcctccccgccgcgcctcgacctgcagcctctccaaacttaccagggccacacgagccctgaggccggggactacccctccccgctgcagcctggagagctgcagagcctcccgctgggcccggaggtggacttctcgcagggctatgagctgccaggggcctcctcgcgggtaacctgcgaggacctggaaagcgacagtcccttggccccgggccccttttccaagctcctgcagccggacatgtcacaccattatgaatcgtggttcaggccgactcacccaggcgcggaggatggctcgtggtgggaccttcatccgggcaccagctggatggacctcccccacactcagggcgcgctgacctcacctggccacccgggggcgcttcaggcgggcttggggggctacgtcggagaccaccagctttgtgccccgccaccccacccgcatgcgcaccacctccttccagctgccggagggcagcatctcctagggccgcccgacggggctaaggccttggaagtagccgccccggagtctcaagggctggattccagcctggacggggcggcgcgtcccaaaggctcccggcggtcggtgccccgcagctcaggccagaccgtctgtcgctgccccaactgtctggaggcggagcgactgggggctccatgtgggcccgatgggggcaagaagaagcatttgcacaactgccacatcccgggctgcgggaaagcctacgccaagacgtcgcacctgaaggcgcacctgcgctggcacagcggcgaccgtcccttcgtgtgcaactggctcttctgcggcaagcgcttcacgcgctcggacgagctgcagcgccacctccagacccacaccggcaccaagaagttcccctgtgcagtctgcagccgcgtcttcatgcgcagcgaccacctggccaagcacatgaaaacccacgagggcgccaaggaggaggcggctggggcggcctcgggagagggcaaggccggcggcgcagtggagccccccgggggcaaaggcaaacgcgaggccgagggcagcgtggctccctccaactgagctcctcagtgccgcctccctgcgggtatcccggggggcactggatgcgagcccccaggtctgacgtccttgggggtggct

SEQ ID NO: 2982 - protein, 374 aa, Homo sapiens
MLTAVCGSLGSQHTEAPHDPRLDLQPLQTYQGHTSPEAGDYPSPLQPGELQSLPLGPEVDFSQGYELPGASSRVTCEDLESDSPLAPGPFSKLLQPDMSHHYESWFRPTHPGAEDGSWWDLHPGTSWMDLPHTQGALTSPGHPGALQAGLGGYVGDHQLCAPPPHPHAHHLLPAAGGQHLLGPPDGAKALEVAAPESQGLDSSLDGAARPKGSRRSVPRSSGQTVCRCPNCLEAERLGAPCGPDGGKKKHLHNCHIPGCGKAYAKTSHLKAHLRWHSGDRPFVCNWLFCGKRFTRSDELQRHLQTHTGTKKFPCAVCSRVFMRSDHLAKHMKTHEGAKEEAAGAASGEGKAGGAVEPPGGKGKREAEGSVAPSN

SEQ ID NO: 2983 - DNA, 46148 bp, Mus musculus
accccacttgctccggccaaaggtttatttattagtataagttcactgtcgctgtcttcaaacgcaccagaagagggcgtcagatctcattatgagtggttgtgagccaccatgtggttgctgggatttgaactcagtacctttggaagagcagtcggtgctcttacccactgaaccatctcaccagcccctagagcctctactctactgtgtagaacttagtgttcactctgggccatttcattgttcatctatggatgctgacatctgcaggccctgtttctgcagcttcttcccagctctgaggaaaaagaagaagacccaggtgccccagcccctggcccctgactgtggaaaagccctacacagcatagaggctgcaaacttgcatccccccacccccaccccctttgacctacacagcgccttttttgtattattgagggttaacttagggtcttaacaagtatgctacgtgtatgtatgtacaggagggtgcaggtgcctgaggagaacagaagatggcgttatttcctggagcaggaattacaagactctgaactaaactctgcccatctacaggagcagtacgtcctcgtcctctttgccactgagcaatctctccagctcacatttttccccctttttttgagacagggtctcactgtgtagcctagtgggccgtgtccttcctgtgttgaacacggggcaggcctcacactcggctctctgctgcctgagcttaacgcgggtcgggtcacaggcacatgctagcactttcagtctgcttttttctatgtttgagatatgtcgcccgcccaggcagttcctgaccttgttgcctcagcctccccaagtgccaccacactagacttattgacagtttagtctaagtgttgaatgtgttaattcactaaatgaatcccggtcagtgaagagaaacccaggatacacgagacaaagagaactgccggctggaacagtcagcacaactggaggtgaagcagacattcgcgctgcagggggcgggagcactcctgccaaggcgcaggtcagcagactgttttcatggttgtcgctgaacaagttacgcacggctggacagcctagtctctgactatgttgtttctttgttaggttttgtctgtttgtttgagacaggatctcactataaagtcttcattggtctggagcttgctatgtaaaccaggttggccttgaattcacagaaatcctcctgcctctgcctcccaagtgctaagattagaatttcttgccaccagacctggctctttgttattttttttttaaacatacagtatatcttctactgtatttttccttctgctcttatgaaaccacctctatacaggctctgggggaggtcatggggcagtgccctttcgggcttcacgagatcgattcctgactaccttgctatgaatggcagagcttgggaagtaacgcagcttttcttcttcttcttcttcttcttcttcttcttcttcttcttcttcttcttcttcttcttcttcttcttcttctacttcctcctcctcctcctcttcctcttcttcttcttcttcttcttcttcttcttcttcttcttcttcttcttcttcttcttcttcttcttcttcttctacttcctcctcctcctcctcttcctcttcttcttcttcttcttcttcttcttcttcttcttcttcttcttcttcttcttcttcttcttcttcttcttcttcttcttcttctcttcttcttcttcttcttcgggggctcatcctggagccaaggtccaaaagctcgttgccagtttttaatatactagtatagagtcataaagaaactcagctgctagcagtggtggcgcatgcctgtaatcccagcacttgggaggcagagacaggtggatttctgagtttcgaggccagcctggtctacagagtgagttccaggatacccagagctacacagagaaaccctgtctcaaaaaaagaaagaaagaaagaaagaaagaaagaaagaaagaaagaaagaaagaaagaaagaaactcaaagcttgcaatgctctgttctctcattcactgttaagtgtgttcttctaatagccatgttatatctttttattattaaatttactcgtgtgtttgtgggcaccaaggaacaaacttgaggaaactggttctttctttcctctgtgagggttccagggattgaacccagactgactgagcagcaagcacctttccctgatgagctgtcccggcttgggtgcatcacttctgtcctgactcgctctccagaccttctgcctggtgagttattaccctggggattttccttcattgttgtcttggagacctgtattctgaccctagaccacacctcttttaactcttggttttgcttttgttcccaagggtctcacttcgtaacctaagctactatgtaacccggggcagttcaggctgataatcccagtcctgcctccctaatgctgttgttcacggatgagacaccgtgtctggctgcctttctgtcttgctttactagctagtttaaagtgtcctgtctcccaactggctcctgagaaacaatgcctagaatagggtgtaagaggttctgtgtttcaatttcgtaagtctgtaaatgtgtttgcttaactgagtcgatgtttagttactatatacgatggcaggttatgatcgtcaggacgtctagccaggagaggatctctggcaggtctctccgtgatcttccatctggaaaccaggaagcacggtgcctttgctgatgctgtttctttgacccccttcatcttccctccatactttggatccacgtggttcagcgatgtcatgatgctgtttcctgcttatggatccttttcctcctcgggaaatctgtgatcctgggcggtgtctctgattgttctgtcagggattgctttccctccttcacttttctctgacagtctgtgaacataggacctactaggctaccttgctcctgcttggtgtttggacaggctctccctgagtttctcttttcagattcactctgaagcccaggtaggccttgaacactcagtgaacctttctgtctcagctcctgagtgcccatggttaacatgtgcccccgaatccagcttatctctacccgtgtgtgtgtgtgtgtgtgtgtgtgtgtgtgtgtgtgtggtgtcaatgaaggtatgcttacccacgagtgcacaagtggaggtcagggctctaggtcaagatgtcttccttaatgttgtctccaccttattttttgaggcaggttctctagtgagagatgtgaaacaaagctttctgcttcagctagactggctggctggaaacccccagagatctcactgtaactcggctctgccatgctcagcttttacatggacactgacgacctgaacacagatcctcatggctgcacagccagcagcaacccactgacccatttccttattaatctattaagaataaacatagggccaagtaaagctgtcttgagttccacattttcatctttcagattttcggagttatgttttcttttcttgtatatatttaggaaaggtgccatcttgtttaccgtattgcacttttatctactttctgtgtatgagtgctttgcctgcacttatgtatatgtatcacatgtattcctggtgcccagggagaccagaagagggcatcagatctcttggaacagatgggtgtgagccatctgtggatgctgggaaacaagcaagagcgacaagtgcttttaactgctgagccatctctccagtgcacaccttcatagtactctgtagaaaaacatttaaaaaaataattcatttatttatatgggtgaggaatagggggtcgggtgtacatagaccatgttatgcgtgtgtggaggtcagaggacaacttgcagaagtctattatttctgccatgtgagccccagggatagaatttagctggtcaggttttgtggcaagcatctttactcagtgagttgtctcattagatctattgtagtctttaaaatgattttatttattttgatttcttgagacagggtctctctatatagtcctggctgttcactttgtagaccaggctgccctcaaacttacagagatcctcctgcctctgtcttctgagtgttgtgattaaagacgcataccaccactgcccggtgcctttaaaaaaatttttttttaagattttactttttttatgtatatgagtacactgcagctgtcttcagaaacaccagaagagggcattggatcccattacagatggttgtcagccaccatgtagttgctgggatttgaactcaggacctctgaaagagcagtgctcttaatctctgagccatctctccgccccattgttagtttgtttgttttgatatatttcttattcaagttgggctcctagaaatcccctggctctaggtcctcatgctgggactatgggctcactgatgctcctaccatttgaaatgggggctgtggttgacttcaaagtattgcttttacagcaggcactctaccaattttttggggggggggggttccagacagggtttctctgtgtagccctggctgtcctggaactcactctgtagaccaggctggccttgaactcagaagtctgcctgcctctgcctcccaagtgctgggattaaaggcgtgcgccaccacttcctggctcagcttctttttatgtgggtatgtgggagagagtggggacagtgtcattctacagccacacactatgcatttcagattggccttgagtttacaataatccttcagcactcagtcaccaccttctaggactccccttgtgcaccagatggctgtgggcttccaattttttttctttttttaaaaagatttatttatttagttacatgcatactctctttgcatccagaagagggcatcagaactcattacagatggctgtgagccaccatgtggttgctgggaattgaactaaggacagctggaagagcagtcagtgctcttaaccactgagccatctctccagcccaggcttccaattctaaggtcctgcctctgcctcctgagcaatctccttatttgcaaagctctccaatattcaatttatcacagattcccttgattcgaagtcacctcatgactgagccagtggaggaaatgctttctaaatgacaagttctgtaaggcaaagatcacgtgcatcactgtttaaacagtgcatggcacatagtaggttttcagtgtgctaatagataaaacagacatgattcaacatgcagcacattcatgtgactcacaagagaatgatttgtcaaagatgccttataactcgggtctgcccgcctccccatcattcatcttagcccacaggaatgtgtatcaagatacctcccacacttctgagcctccccttgtctagaattttctcatccttctctctccctcaataccttatccttaatgggtacattcaactacattaatagatttgatgactccttaagtctccaggcattttaaatgtatttgggaggcctgggtgtgtaaaagcctttgtaacattagcatgagaatcctagctcagatctctagtgtgatctgatgtgttgtgtagtgatgattgactgtaatcccagggcccctggggggaggcaggaaatgaggagatagagggccagttagtcccgcatatgggctgacctctggagcaaggagtgataggaaggaacccgccaggtggtaactaaaggtgctggggttacaaaccaaggatcactcaagaacagctcagtgagcagaggcaagaggaggggctggagaagtctgagtcttaagcgtctattccacgtggatgggtattttgcctgcatgtatgtatgtgtgccgggaatcaaatcctctggaggagtcagtgctcttaagtcatcgctccagttcttggagaagtgctttgtttttaaagtcaggtctctgcttgtgagagctgaagctggaagaacatctctgccctgcttctctgtgaatcctctcaaggtcctacatttcttgtgagaagtgctgtatgtaaagattagtctagacaggcaggcagtccttgggtgtctttttgcagcaccgagagactgacagggaaccctcctgcttggtcacttggctgtggactcctggagggctggaagggacagcagtgagctcagggttagacagcattcatccaatcaactggagcttcagagtaaaactaagaatcacgggctgaagagatggcttagtagttaagttcacctgctgctctttttagaggacagagggtcgatctccagaacacacatggtggctcacaaccatttctaactccagttccaaggcatctaaaactctccacgatgggacagttgtgttatgtatgctcaaccagtgctgtgtgctaaggtacatccccggccctgttagccccatttgactgaagtacatctcacaggctatggagagatgggaacacaaactcaagcaggtgtttccgctatctgtgctcagcacttaatgctgtggtcaatgtggtgttgtgggtatgcctttaataggaactagacagcaccatctataactttagctgaacagcaaaaatacaatccaatttggtttcactaaggatctgacgcttgagagtaattttattgccaccctggtatcctttcgccatctcatgccctctgactggtcctatacagactggtgctgcggcaggggtgtgctcagcaaattgcaggacatcagtttgtttcctggaaccaaattatgggtcatcctgcctgggcaatctgtaagaaaatgacaggattctcagggatgtcatgtcactgagtctcatttctttttttcttttcttttttttttttttaaagatttattttattattatatgtaactacactgtagctgtcttcagacacaccagaagagggagtcagatcttgttacggatggttgtgtgagccaccatgtggttgctgggatttgaactctggaccttcggaagaacagtcgggtgctcttacccactgagccatctcaccagccccgagtctcatttctaaacgtctagaagagggcgctggatcccctggaactggagttaggaggctgtaaactgtcatgtgtgtgctggcaactgaacccagatcctctggaaaagcaattcgtgcttttaaccacagagacatctctccagtccctactatttgagagagggtttcatgtagctcagatcagccaaacatgaccttgaactttcctcctgatcctatatctacttctccaaggcacccattcctgtggactgataaaactacggaggactgctagttaatgcactaagcaacccctctgatatacattcccagcttccccatcattgacttaaagccacacatacagagcagtcctcctagttgagagcaaaaggttggggttagggagctgataagctagaggaaatcactaggtaaattattgaaatactgtatgaggaatgatgggcctacatttctttctttcttaccaggctggcctcaaactcaagaaatctgcctgcctctgcctcccaagtgctgggattaaaggcgtccactaccaagcccagctcttttttatttttttaagatttaattattatatgtgagtacactgtagctgtcttcagacactccagaagagggcgtcagatctctttacggatggttgtgagccaccatgtggttgctgatatttgaactcaggaccttcggaaaagcagtcagtgctcttatccgctgagccatctctccagccgggcctacattccttgttgcaaaacttcaagtttctatagcattaagtctgccttttgtcttgagaatcagagttacggaggcacaggaccagcatgcttctgcatgtaggtgtgtgcacatgcttacagtggagagagagcaccatgggtaattccagcactcaggactccaaggaagggaggctacagaaatattgaagccagtctgagatacatattgagttctaggctagagatcctgtctgaaagaggcagaacagaataaactcacaaaaaagaaaaatcgaattacattctaatgaatacattacaatagaactcatttcctgggcaatcttggtggcccatgcctttaatcccagcactctgaaggcagaagcaggtgggtctctgagttcaaggccagcctaatctacagaatgagttccaggacagccagggctatacagagaaaccacctggctccgcccccccccaccgtggggggaggggggcaacccaacccaaccaacaaatcacagccaaacaaaaattatgcttgcatagtaaacaaaaaaatctttcttaaaatcaggataagatgtggaagtattcagaacatatctatacatgaagccattggaaacatacattacaggcagaaaatacacacaattaaaaaaccccacgaggctatgactttaagtgtttcagagaacactaaatcccaagtttccaaagtgtggctagtgtagggcaatttctttacaccttaaaaacaatacaatttacatgctattttgacccatatgctcctaatccccccatgacttgcagctgggtatccaaatgaggggaggggaatgttaagcaactatatgcaacgtatttttatcttgtttgttgtatttgttttttgtttttgaaacaagatctcagactgtagttcaggcttcgggatactgagatggcaggtgtgtcgctacagctcgtcaatgcacacgttctttatataatactacacagatcttgtaaacgaagtctggacatcaaagctttatgggaactgctaagtggtctaaggacgcgcctccgcgaaactttgttaacagtccagggccccgacggggtctccaagggcaattaggggcgcctgaagccagctctgctcgagtctggaatgggctgtgtgaccttggacaggctccactctctctctgggcttcagtttgcaaatccgcacgttggaaggtgaaccacgtggttctcatggtccggttccgcacagagcgcggcagcaagccgacctcaccatgaaggcagcttcctgtgggcgcggcgcaggactttaacggttcccgtccccgccccctccgaggcccgcgaaaggctcgctttccgtacaccgcggcgagtgacggctctccgtagcgcgcagtccgagccactcgcgcgcagctccgccccaccccggaggcgtcccgtcgtgctccgcgccagactcctaagagcctgggcgcctcccgcctttccgcgcggcggcgaccccgaactcctcgcttcagttctcccggcgccccgtcctatcaacgtccaggatcccagccaatccgacgcgcctggagcctttaccttccgcccacccttctccccgcgcacagccgggctgagcccgaaggcctttaccgggccagcccaatcagcggcgcgctcttacctgccccaccccagagcccctcccctcgaccaataagcacgccccatcccgctgcccgcccagccaaccggaccttgaagcccgcaggccaatgggcgcgtggcggcccttcaacgctagccgtccggccaatcgggggttccgcgtggccccggccgtagccaatcgctgggcagcgcggtgccgccgcggagaggtccggcaaggatatccctccgcctccctccctcgatctctctccctccctgcgatccgcctctcactcactcactgccgcccttcctttctccctccgccgcccgagcagcagccgcgctccgagctgcccccggggtccctcccccgccgccagaggagcagctgctgccgcctagcacattaggagggcggaaggaaggaaggagagcggggaggaaggggagccggagcgcctggccagaggcagccggtgaatgggcttgtggtgacccccaccccccaccccaccctcccttcccacccgacccccaacccccatccccagtcggagccgccgcccgacaggccgggccgccgtcttgcgaggagtccccgccgccgtcacctccgccatggagctcataaccatcctcgagaagaccgtgtctccgggtaggactcggggccggggggtcgggccgaggtgaccggggtgggggagggggtggccccctctgaccccgctgcctctccccccatctctcccggcagatcggctggagctggaagcggcgcagaagttcctcgagcgtgcggccgtggagaatctggtgcgtgccgccccgccgcgccccatcccgccgcgtccccatccctgcgtgcggcccttcccgccctcctggaggcccaggcctcaggaacccaccccgccccagctcgtccccctacccccccgcccggcccaacctaaccccgccatcgggaagccggtgggtgtgtcccgccccgagccccgcgtctggccaatagcgaggcgcgccggggtgatcgccgtccaatcgccacgcggcctgagggcggcggtgctgcgggagggagaaagagggagggaagggaagttaggttgcatggcgctgcgtgttcagcaagggtgggggttggggagccgggcctaggggccatgtggaagctctgcgccctgccgcctgccttgtactggctgcggccggcctctccttcctgtcccctggttttgaggcagtatgcaactacttcccagagccctacccttccccagctcccttggtctgtgctcatggccacgcctggcacccgaccacctctggacccattgccacaatttttttctttttcttgcccattattatcccattcctggtctaagtgcacgaatgttctgtttggacttaggttttcagagaactcatctttaaggatctcaggctgaggctcatttctgagattgagcctattctctgataaatcacaaatgtaaccccgtttttcatactttcggatttaagaagtacatttgagaaaagaaaaagtgactgacttttgtataggaaaatgtgggattattgaagcagcctattgccagaatgtttctcctctcctttttgggggaaggggagggaagcgtggatgatatggaaagtctctttaaaggtaggaagttttaaaaagtgaaaaaaaacattgtaacccaatgtcctttgtgagagctttgcaaaatagtaacatccatacagcgacatatctgatttgtactgaccacttttggtggagaggtaagcgacttgtgttaaggtttttttatctcacacctttccaagcatttcctttttagtgtagactgagaattctgctcatagtatattcttggttttgcttttgctactttgcaagaagccctttttcctgctcctaactcttcagtggcacagaatagaaattggagaattgtgttctgagcctactgtagagtttgcttacattgagaattatctcctgtgtttgaagagtttgctaacactaaaaaaagtgtctactttggccttctataacattcctgattggacagattacgtacaggcccacccccctgtgtgtgcctctgtatgctcagaaagaggaaggggggtgttatagatgattatcttttggacctgtatttcaaaacatagatttttggatgattcattgttagttcacattaggtccaaaacaccataggctccctggtatgttctgcttctaaatgaagccagtttttttttttttttcccctctctcttttttttttttttttttttgggcgggggggagtcaagacaggatttctctatatagccctgactatcctggaactcactttctgtagaccagactggtctcccaactctgaaatccacctgcctctgcctcctaagtgctgggatgaaaccaatttctcttgacaattcatcattcacattgtcatattctttcaatttctgaaaactagttaacactttggcttacagatcccttttgttgaacatgcagaactaaaacacggaggactcggtcttacatgtatgttagactggcacacatatgttagaaaggatgccttacatgagatcacagggctgtcctgatgtttttgaacaagatttttttttttttaatatacttttcaagaattcttttcgttgagctgatttgcagtactggacattgttgtacatgcttggagaaagttgtcactaggattgccgtgtcaccaggcatcgacttgcctttaattctggggagatatttattagacttgggctcaaaacatgttcttgataggaggaatctgtttcttcatatagcaggtgacttgtccttgaagtggcttttgttgcttagtcaggccttaactttttgaacccaaggaaacctcttcaatgttgagtctaggcaggtactatttcaaagagagatttcccagtttcctgagataccttgatttgatctaaattttgtgtgcttctctagtttagtactttataagcaaggggaaattgctaatatgcttgcaaatgcaccttctccacagcccacgttccttgtggaactgtccagagtgctggcaaacccaggaaacagtcaggttgccagagttgcagctggtctacaaattaagaactctttgacatcgaaagatccagatatcaaggcacaataccagcagaggtggctcgctattgatgctaatgctcgacgggaagtcaagaactatgtaagtgactgtccaatccttgatgtcacatggtctaaggaacagcattgtaagggagtgttcatttacctggcatagagcatgacagatttctgagacctcaactttaactgaatgtaaaaatttattctgattagtctcttggtgtggaaatgggtgtttggtgtgttgttgggttcagcttgctaaggtgacctgcagcagcttgggaaactttagttgggtctcttaaaagatttcactcctgaagtactgggagtgccacactgcactccggggtatctttgagtgtgtaacaaggtgttaagtagcccagtccatcctcggttttattaaagggtggctatgaactcctaacatttctgcacttactctaaaaggggtcaggtgtttgccaccatgcctggattttcatagatatcttaaacatattttctactttaaaaatgtgtgtttatgtatgttttagcaactttggaagccagaagagagtgttgattcccctggatctggagttacacgccatcgtgaggatcagacaagggtgctgggaactgaactctttggagagcagggagggttatgctgttttgctctccccaacacagtcccacagctcccctttgttttagggatggcaggtcctgttgtttgctggtttttacaggataatgtgtaaagtcagggagataaataagtaattttgagtcaaacaaagagcttgaagatttgtctatctatttatgtttcactatgtagtctaggctggccataaactcacaatctaactgcctttgcctctgagtcctgggtgtgtagcttgtctttttatgtacttaaaaccagttatggaaaactttcttgagatctcagcattgtgagtgagttctttgctggttttgcattgtggcctttttatgattttgttgttgttttgttgttattgttgaattagaaagcacaggattcaaacatagatagataggcttgcctttttcttgttttaagtactagttacttagtggtctttatggataggggccaaaggaaacttgataaattaaatagtcacagtcataatttgttcagggtattaaggtggaaatgagaggagtttctgtttgtatttaggcaggtcaagattatgggcatcataattgctggatttagattctacttttaggcaaattagtgtcctgtgaggcaggtgcttccctagcagtgaccccccctcccttttccagtcatcctgtctactgtcacttggcacaagttaggaaaaccaaattactttgattcttccttggagtatataaagttatttttacccaaaattgtgtctactcggaaatgacatttttctgaagtgttacttttagacagagtctcactatagctgaactcactatgttgaccaggttggcctcaaactcacagagatcaacctgcttctgtttctctagggctggattagaggtatgccaatgtgtctagctattgagttattttaaattacacatatgtgtgtgggtatgtgcactttagtacaggtgcctatggaggacaaaggtgtaggatccatccccctggagctggagttacaaggagttgtgagcttcgtgacataggagccaagcttgagttctctgcaaatgttgcatgcacttttaatgtctgagccatctttccagccaagcataataatattttaatccccacctccttagttgttggacataaatcttttttctcttttgttagttttaatcatttgaagctagagatctcacattgttcccaggctggcttctaccacacacacggtagtccttttcccttgttccctggtactaggtgtctgcatcctgggcagggatttagtcagattgagtaactcccattccccttctgaagttttagagagcttacctcatttttcctttaggattttcagaaaggagcttgctcactgtagcccaggctagcctccgtcttctgagtgctgagcttaggtggcagccagggtgtccaccactgtgcgcctttgacagccttcgttttattgacagccattcaagctctgctgttcctagagagcaaaactttaagattgaaattattgttattaggtggaggctggcaaaaaatgatatgccatataagagagtgttcatactagctaataactgtaccacagggcactaagtgacctgacctagtcagcagagctggcctgaatatctaccagctctttttttttttttttagcccagtgttcatgccaggaacagttaactgtttgcctttgagtgagctcatggtctgacttagatgatcatggtaatggttaaccttgcagaagcggtggcctcctcctttattttaagctgtgcgattgccctgtataaatgctgcatttctagtgagacatgcttagtggcgggtttccatttggcatcactgactacttcttggtgatggctaagaacactattttggttcctaggcatatagaactagtcgtctgagaattcagttatataatggttgggtcttagattttggtaacatttacttgatggtgtcacttaaccccaagctttttacataagtcagtactagattgtagtggacagaaaggaaggaattgtgtttgtcgttggtgagaaaatgacttccttgagtcagattagattaatgtattgggatttatattcccctgggtgctccacagcaacccatcccataaccctaccttcctgtccaaaaacggcagtgagtgtgctcttactacaaacacatgcctagaacgcatattttgccctctcatctctcctgccttgcctttcggggctgctactatctgacttgttgagttttgatgtgagatgggttgggaagaagaagtctatatttggctgcaagcaggactggttttgctttaagcttctggtgttgctacttacctagtctttttgtggggtgagaacaaaagtcagatacatgttaaagaagtggttgttggtgggtgaaatatactcagagaatgttacaaactgatattctgtgtcattttccctcctccaaactcgcccctctaggttttgcagacgttgggcacagaaacgtaccggcctagttcggcctcacagtgtgtggctggtattgcttgtgcagagatcccagtaagccagtggccagagctaattcctcagctggtagccaatgtcacaaaccccaacagcacagagcatatgaaagagtccacattggaagctattggttacatttgccaagatatagtaagtatttgcctacggtttctaatctatgctttgattctctaggtgtcacgtgagtgatactggggtctctatcacaagactgggagcaccgagctgctggagtgctttagagataggaaggcttactttggaccttcttttcttttttggtttttcaacacagggttcctctgtgtagccctggctgtcctggaactcactctgtagaccaggctggccttgaactctgaaatcctcctgcctctgcctcccaagtgctgggactaaaggcgtgtaccaccactgccccgctgaacctttcttctcaaattactaatcatgttctgaaataaggaactcagaatggggctgagtttgggtgtagctaaggtagagtgtgtagtgttcaggagaccttctgatacggtctccagcacagaaggaaaaagaggaaactcagtggcaatcagagattgtttttatggttttgagacagtcttgtattccaggccgaccttgaactcctgagctttttgcttccatttctcaagagctgtttttagggggtgtgggcggtagccatgaatgttcccatgcctttttatttactgtctggaggctagttttctcacctccagtgttaggcacgggaaccacaggagtcctaggtacagccctccttggactgttgctggtgaggtttactcctctgttctctggtcagcactgacttactacacagcccataacatttgacctgaccttagatatccttagtcactccatgcaggtctttggctgttgtaaacttttatttttggcacaggtggggaaaactaccagatgctgctgtccctgtccagagaacaggggctgatgagtttggtttgtgccattctgggggtattttgtaggtcctttgcagaactaccccagcgaaactaagaggaggttgtaggctctcttcagtagctgttagcattggaaggacagcaggttagtcagcagcgcgttactgggtcgtaacctttctctgcttgttttaggacccagagcagctacaggataagtccaatgagatcctgactgccataatccaggggatgaggaaggaggagcctagtaacaatgtgaagctggctgctaccaatgcactcctgaactcactagagttcaccaaagcaaactttgacaaagaggtatgtttctccgacataacctgttagagtgtgagaactgaaagacttcgagtgttggttttgtctttaaggtcagaatgtgctcatctccagtctagtgaggtttcttgtgatgtgtccaggacttgatgaagtggcagattggccgtgacgacctgttttaatgtgttaggtcggttgttctgtttgctacggaggcattcatcaagtttcatctgcagactgactttatacctagtggctgacttcccattttctccagtctccagctgctagcacccacaattctgctttctgtttctgtgaatttgattactccggatacctcatgtaaatacaaaaatggaatcaggcctcatttgttgaacttttgagttactctaatgttttgtgtgtgcgcatggcgtgtggggaatggtgcgcatagtacgcatagtcaggggacagacaatgccgaatctgttttctctggtcccctttatgtggttccaggggttgagctccggtcatcaggcttgcacaccaagtacctttacccactgagccttcctaccagtctatccttgacttttcgtagctagttttgttttgtttgttttgttttgttttttacctagcaaaaagttgtccatgtatagttttcttcataaagcttgatgatgatgataaatgttttatatgtatgtattgcattttgtatatcaagtcatccattttgggtagcttttgcctttcggatactgtgaacagtgcccggggaaagtgagcatgtggatggtttttgaaagctgacttcagtgcattttagcctatactcagaagtgggattactgagtcatatggtctgaaaatattttttgatttatgttcattgacaccttggatcagtttttgtttcttggccttgggttgtgagagctaggatagcacagcaaactaatttgtgtatgtgtgattggttactttgttttctgttttgtatgagacaggctctgaatgctgggattaaaggtgtacgccaccatgcccagattcagagcaaactaattataattggtccagaaatggaattttcctttgagatcacaaagagttaacagtgaagttaactgttctgtttgctctttaccgtgtttgatgtgaatttatctttcacagaaaaaatttgtctcagaaaccaaatgttctgaatacctttattttttttttttttttgaggtatagagttcactctctataaccctggctaacctagaatccattataaaacatgctagcctgaaactaatgagatttccctgttctccctctacacatgcgctaatcttaaaaattccatataaggaaagtggttttcccacgtgtagggtttggttttggtttttcctcttctcaccagctgttgttagccttgtgacagtcttggtctctctgtccccctgatgcctttcttgtggagtcttgacgcttcctacatggagttaattcattcctaatgctcttttcctttctgcagtctgaaaggcactttatcatgcaagtggtctgtgaagccacacagtgtccagacacaagggtaagtttgttgctatttgaaaattctctctccctgtcttcctaggaaacactcttatcagccatttggagatttagggaatcattgaattaaataaagtttgagtaaccttgctaatgaaagttttcttcaacatacgtaatagatagatactattactctcttaacgatagagaaggttttgaccacctttgctaatttagtgccatgagttgttcagtgtagacattgtagacattgaaatgaacggcgcgttactactgctgtgacctaaatttgaccctggaagttagtgaaaggaatgacttggtctgggtagcaccagtaggtttaacccttctgtgggttttcctcatggtacatggaggggggcagactgaatatacaagaagagatgtttaaaatggagggggtaggtgacagcgttactcagaggtgcctttagtcattaagtcttccttcgcagactgtttgctttcttagtaactgttgcatctgttcctaaaaggtaagagtggctgctttacagaatctagtgaagataatgtccttgtattaccagtacatggagacatacatgggtcctgccctttttgcagtaagtattttatgtaatttgaacttgtagttagttgctgggctcattatttttaattactattttgtaattctgtgggtttttagaaacttaatattataaagtcaagaaaattacttgagtatgggtgttaaggcttgttgtttatttttgtgagacagtgtttcacaccatacatagttccagttggtctgaagctcactatatagtccagagtggcctcaaactcaacaatcctctttagggctggaattataggtgtgagtcccctgatgaatggtaattttaactttatatgccaagaagatgtctgctttctttggcattatatatatatatgtctaccaccaacactccaaacagggtccctgtgaccctggctgtcctggagcttgctctgtagactaggctagccttgaactctgtagactaggctagccaggctgcctctgcctcctgagtgccgagtagtgctaggattgttgtaattagaggtgtgcattcaataagatattttaactgatattttgcaaggctttttgttttttgtactcaactacactacacaaattgctttatttattttttagaattatctattttacgtatatgaggacattgttgctgtctttagacacaccagaagagggcattgcatcccattacagatggttgtgagctttcatgtggttgctgggaattgaactcaggacctctgaaagagcagtcagtgctcttaaccactgagcccacaaattgtatttttttaatctgtttgtttttcttttttagaggcagggtttctcccaagtgctaggattaaaggcatgcgccaccactgcccagctgtatttttttaatcttgaatgtgtggttaaaaaggtgtctgacttggtgtcttttttcctttcagatcacaattgaagcaatgaaaagtgacattgatgaggtggctctccaagggatagagttctggtccaatgtctgtgatgaggaaatggatttggccattgaggcttcagaggtgagcctggggtgagcctctctgagaagagctgccattgtgtcagggcttgacacatcatctcctggaggggttctgttctggctgggtgactgtagagattgtttttcggcttaccagattcccttactaataagacaatgcatgtttttgccagtttcaggtatttatactggtagttctgttgtgaacacaagggggcagcagattgtcagcttactgaagtggccgcagggaattgtttccttaggaccaagatgtgtaattgacaacttaccagctctggagaagtagtcagctatggggaaagggtgtctctgactggggaccttgagcaactttatcttgagtgacccttgtgtatctcgtgagccaaaaaagcactgtatatcagacttagttgatttttcatatacatttcctgtgtgttttgaaaatacagaacagcctcaggtgttcctatccatcttgtttttgtttttgttttaattaattaattaattaattatatgtaaatacactgtagctgtcttcagacactccagaagagggagtcagatctcgttacggatggttgtgagccaccatgtggttgctgggatttgaactccagaactttggaagagcagtcggatgctcttacccactgagccatctcaccagccctgggggttttttgagaacttgtttcataggacttggggcttgctggtggggctggtagccagtgagcctaggactctactctctctgcactgtagtgctaggattatgaacttgtaaatcatagccagttgttttctgttttgtttttaaaacagggtctgactatgtagctctagctgtcctagagctcatgtgtcccactgcctgtcaagtgctgttgaaagcatgcaccactgtgtcgggcagcacacagttttctcatgtgcgatctggacaggaaactttgcaaacattttactagactgggttatctttctagcactagatgtcaggttattaatagtttttttctttttaatgtattcagggatgaccctgagtttctgattctgtctcccatctgctaagtatggatcatctcccactgacttgtgcagtgttggggactaaaccacaggctttgcacacgcaagagaagcactgtagcaactgaggttcatccccagtctaagaatgtagttctaaaagtaggcatggtcctttaatatacaggaacgtggtgcatagatctgcatatgtgtgctacataatgctgacgttgatcagagtatggccaccagctccaaataccacagcgaacacaaccctggcattatatacctgctgtcgttcttactgtaggtcgtagcattcatcataacaacttgtgtactttgtgtttctcctcaggcagcagagcaaggacgccccccggagcacaccagcaaattttacgccaagggagcactgcagtacttggtgcccatcctcacacagacactgactaaacaggtgagcctctagactggttggttccgtagggaacagcttccatgcatgacgttggcgccatctgttgtggatgactcaacttgggactagctgagctgagccactgagttgtgcctgagtgtttcaaacattttggttgtgaacaaaccttgcattgctgtgatttcatgaatgctatagcatttatactcatgaaacatgtgttttgtataagttccaataaagataggttgtgggtagtagcaggaagcttgcctggcatgcacctgttccctctgcttcaaagaagaaaaagaaaaagtagaattgatatgctacctatagggctcttaaaagtctgttttagtatctgcaatagtttcatgaaatcattggatttatgtatgtatttttaaaaacgaataaagttggacacatccaaaaaaggactcttaacccatgaaaaatacttgttaggggctgggaatttgagctcagtggcagagtgcttacccaccatcatgtatgaagccctgaggttaggtcttcagggccacctaaaacaaggtgtgtgcctgtgatcctaacactaggatctggaggtgggaggatcagaaattcaaattcacttggctacctagtgagatctgtcaaaagaaccctggaacctaatccaaagccttccatgtcagttattattcattacaatggctaagtgatggctcaggggttgagagtgagtactggactcaagtagctacagctgccaactccaggaagacctgtatttctggcctgccttcacagacacatgcatacacatattttaaacacattcattcatatttgtaaacaagagcaagttgtctttttgttctattttcttaagacagaatttctctgagtagcctttgctttcctggaattctgtagaccagactggcctaaaattcacaaagaaaggttcattacaaaatcaaaatcaaagctgtcttgaagatctaagtgatgggtacatacaacattcttaggtttttttgttttgtttaagctttttttttgttttgttttgttttttgagataggttttctctgtgtagccctggctgtcctggaactcactctgtagagtatgctggcctcaaactcagagatttgcctgcctctgcctctcaagtgctgggattaaaggcatgtgccaccacgcctggcttgtttaagctttttgaggcagggtttctctgtgtagccctgactgtcctggaactccactttgtaccccatgctgacctggagcacagagttccacctgtctctgcctcctgagtgctgggactaaaggcagccagaggtctcatgagcactggattttataccactgctctcctcactttatccattgcattgtttcctgttatcatgtttatgaactgttactaagagaatctcgcagtgtcctgtgtgactctgagctgtgaagtattctgtgccggaatgtacatgtttctcggtgcatatcagtctcagagtttgttaggaatatgcaagtttaatagctttgacccttttttttaaatgtatgtctctgtgtgtgttgcttccatatgtctgtacaccatttgtgtggctgctattcttggaggcctagagagggtatcaggtctggagctagtagctattgaagacaagcccctctacatctctccagcatctgcaatgcttaccaggaatgcctttacttttgaatatatttgctatattttttcctcctgaacagactttttttttttcttttttgagacagggttgcatgtatcacaggcttatctcaaacttgatatatactttgaccctttttccacctaccagtgttggagttacaggggtgttgtagcatggctgctatatgtattgttgacaaccagtctcaggctttgcaagccctctaccaacagctacatttccacctgctgttggtttgagacaggatcgttgtacacctggttagtctcaaactaagatagtcctctttcctcaggctcttaagtcttacttttacaggtgtgctccaccagcctgggcattcttataggtagtggaggtttcttaattctattgtacatgataattgtattcttccatctgtttcttggggtgacgtaggttatgctgtgatgaaatgtgaaaaaagttttttgtttttttaaatcagtgttttatattttactccctgattaagctctaatgatacttgggagtatatagcaagccttctaagtgaattcattgcaagaaaagcttacttaggctgggcgtggtggcgcacgcctttaatcccagcactggggaggcagagacaggtggatttctgagtttgaggccagcctggttgcaggacagccagggctacacagagaaatcctgtctcaaaaaaaaaaaaaaaaaaaaaaaaaagcaaagcaaagcttacgtagtgccacatctgtcaccaggatgaaaacgatgacgacgatgactggaacccttgcaaagcagctggggtgtgcctcatgctcctgtccacctgctgtgaagatgacattgtgccgcatgtccttccctttattaaagagcacatcaagaaccctgactggcgataccgggatgcagcagtgatggcttttggcagtatcttggaaggaccagagcctaatcaactgaaaccattagtcatacaggtaaagcccggggaagttttagatttgaaatggaatgggggtggagagtgcgcacatgtaatatatgtgtgactctaaataatcacaaagatttccaaataattgaatggttcgtagcacaggcctacaaacccaaatcacacattcttgtggggattaacaggtcagttgctcaagggtgccacccttaactggataatagtgagaccatcctatgctatgcaatacatttcctgtcttagtatagtttcttgtcattaatggtgaaatatataacttttaaaatttagtcatgaccaagaaacttgaaaaaaagaaaaggctttaccttatatctcttaacttagcacttgttttctgtaatttttggagagcaggatatggagctctcactatgaagattgtcttaccaggatcttttcttattttcttttttttaaatgctacattgtaagcattttcctgttgcttttggactggagagcctccacatatatcccagggtagcctactgcctcagcctgtgagtgctgccatatccactagctctgagctccagggctcacaacgaatgtcttcactcagccttctaagcaaatgggaattatactgtgcagtgcttagccatttactctgtgtttgtttgtttgtttgtttgtttgtttgtttgtttgtttagggtcctgtgtgttgggccttaaatcaggatgtggggtgatgctggccttgaactccagatttttctacttccactacccaagtgttgggtagataggctcacccccccatttctataatttttaatggtattattctagtctttgaacaaaatttacattatgtaatgtagtctttcttatggaaatatttttattttgctggtataaatgacagaagagctcatggtaatttaattttgtgcataaagaactgagtctgtcaggatagaagccagtgccactgtgatcacttcttgtctttacctgttccatatagactgcttgaaagtatccactacaatcttgaatcatatatggaatttggtgaagggaaagaacattttaaactgttttgtttactgttattattttgttttacaaaggatctaagaacattctatcattatatggggccagggattgttactatttcacatgaggtctttgtaactcaggctggcatcaaacctggtacatacataacacatactagccacgggtgcccttcgctgcccttagatcccaagtgctgcagatacaggcatgtgccacaatgcccgtgagtatttcttctgaatgatagtcgttatgaattccttttgttttgctttattgtatttacaggctatgcccaccctaatagaactaatgaaagaccccagtgtagttgttcgagacacaacagcgtggactgtgggcaggatctgtgagctgctgcctgaagccgccatcaacgatgtctacctggcaccccttttacagtgtctgattgagggcctcagtgctgagcccagggtggcttcaaatgtgtgctgggtaagggattttcttcctggtgaaggcaggagcttgtccgagccattaggaggtgtgggagagaaaggttacttgtctcattgaaaggcgtgctctgagttctgtctcttaatgtcttgagaagccagagggaactgtactccgattcgttcccagagcacttggactgcacctgctgtactcctatgcttgtttttagatgaaaagctttgtttaaatggggttttttgtttttataacaaggaaaaagacagggatgaaagccaaagggggtaggcagcctctgtgctgactctgtaggctgtgtaacttactggggatagagtttgggaaaggaggagtggggctaaaatcctgtggtctgtgtgtgtttgagacagtttttctatatagccccgactgtcttagaactcagtctgtagacgagacaggtcttgaactcacagagatctgcctgcctctgcttccatcacccggctaaaatccttttttaagagtgtaagaataggaaatggtaggccttagtaaaagaattctgccacttagagagctgggcagatgactaggcatccacagtataaatacttgaggtatatgagtgtttggtctgtatgcatttatatattccttgtatctggctggttccaacccctggaactggaattacgtgtagttgtaagccaactgtgggtgctcgggactaaacctggatcctctctgcaggacagcaagtgtgctctcccatacttaaattttcatcatcttcattattatttatttggagacagggtctcactatctagcccagaaattatgagtggatgcttatgtatacatgtttttaaagtttattagcacagctacatccacatagaattataatactcgtagtcaaataaatacatgaccatttcctaatagattcccaggcatggagtctctagtggtttccctggtagaccacattgcattaggagttgtctcaagaacctgttgggaaatagagcctcttgtttttccttccctcagatctactgaagctggcgttagaaccagttgtgaattgcctgatatgggtgctgagaaatgaactgcttttctcagtgatcttttttcttcaaaacagagatagctctggcaactaggctgcctctccccaccccctcaaaactcagagatccccctgcctctgcctctcaaagtgctcggagtaaaggcgagcgccatcactgtctgatcctttagattatcttaaagcgggtggggcaatgagagaatcctgtagtgggcttctcttaagactaatcttaaactggcgtggtggtgcatgcctttaatcccagcactcggaaggcagaggcaggtggatttctgagttcgaggcagcctggtctacaaagtgagttccaggacagccagggctacacagagaaaccctgtctcgaaaaacaacaacaaacaaacaaaatcttaaatctctacattccaggctttttccagtctggctgaagctgcgtatgaagctgcagatgtagctgatgatcaagaagaaccagccacctattgtctgtcttcttcctttgaacttatagttcagaagctattggagaccaccgacaggtaattgatacccactggagcccgtgatgcacccctcactgctgttgctggagagtgaggcactgggaccacagaaaggaagcctgctcttttcagaactgaggagagggtttggtaaccacgagagagctagggagggtgtggtatctagactaacactcgctcccatgagttttttttttaatggtttttcgagacagggtttctctgtgtagctctggctgtcttggaactctttctgtagaccaggctggccttgaactcagaaatccgcctgcctctgcctcccgagtgccaccacgcccggcagttcccgtgatttttgtttctttggtttgctggttggttttttgttttttgagatagggttcctctatgtagccctggctatactggaactcatgctggccccaaaggggttgaaggtgtgcaccaccacacccagctaccaaccatttttgcatcctatttacagttatttgtgataggtaatgtctctgaactgcatccccaacctctggttttatttttgggaaactgttgtctgctttatgagcccctttatcccttcttggctgaggcctgacttgcattgcgtccttgtagacccgatggacaccagaataacctgagaagctctgcgtatgagtctctcatggaaatcgtaaagaacagtgccaaggattgttaccctgccgtgcagaagaccaccctggtcattatggaacggctgcagcaggtgcttcagatggaggtgaggcgactgcagtgttttatcctgggcaaggtggcaaagctttggatgcacacaaaagtgcttttgcccttgaccatgctcggaggtttaatcaccatcacccaaacccaaaaagctctcagcgtgctgctccctgttacattgcagaggctcagctgacatcagcagtggaggtttcactagagcactgtttgttcttttccttcagtcccatatccagagcacatccgacagaatccagttcaatgacctccagtctctactctgcgcgactcttcaggtaggatggcatcatctctctccttttgcttttgttttacacgtgtgggtgttttgcctacatgtatgtctgtgtcccatgtccatggggttgcccaagaagccagaaaaggacactgagtctcttaacaccggagatacaaatggtcgtaagctatcttgtggtgctgggaattgaagccagatcctctggaagaccaggcagtgctcttaagaactgagccttctcgaatccttaacctcctcagcaccagaaaggagcagaatcattttatcattgttacagattcatggccacacagctgtaaagtagtgagaccattctgactaggggctgtcctctctctgactgaagggaaattacttttttgtctatcctagaaggtctaatctgtcgtttgtggtgatgaagatgccccagaatattctcttcttctttctgtgcacctttcttgtgtggacagctcttacccggatttgtctggctggagctgggtctcatagggcttatttagttaaaagtatgtcgctggggctaaggtcaggaggcttaaacttggtcatcttttgaaaccgtctctgatggggtgtttatagtgctttttattcaggagattctaattaatagttactgggaaaactgaaataaaatgtcactttctgcttactccttttctatcagcaaaaggagaacatggggacttctgagacatacgtagcccctgggtgttattattcagtaacactcagctgttgacttagctatgaacccctcttcctgagtgctgggattaaaggcctgcactcagctctggctgcctggctcagatgtcatattttgaagcatggtgttacagctttctcaacaaactaaagatagagatgatcctgttactttagataatgcaaactcaagaacagttttcataaggtctatggacatggaaggagttggggtgtagaaggttgtcaggcacagtgaattggagaatagagagatcattgcaattaatgttgggttgcagctgtttgcatgtgtcttgcagaaaatgtcatttggcattttcaaaataatagtgagggacttaatattttatttttttagagaaatgtgtagtgttctgatttgaagatttcagtgaccagatcccaattcttgttcatttcacagaatgttctccggaaagtgcagcatcaagatgctctgcagatctctgatgtggtcatggcctccctgttaaggatgttccaaagcacagctgggtctgggggagtgcaagaagatgccctgatggcagttagcacactggtggaaggtcagtgagcaagcattctatcaggtttcttttcccttgaacagcaccttgcttttttattaaggttttctcttgttgagggctgaggaaacagaagaaatactccggtctcattcctgccttgatacctttgagtgtggactataatgctttggatttgggttgattgatcatggggcagatgaacctgaatcttagtaatttctttttttcttcttctcttcttctcatcttcctcctcctccttctgttattattatttttttaagatttatttattttatgtagagagtatactatagctgacttcagacacacctgaagagggcatcccattacagatggttgagagccaccatgtggttgctgggaattgaactccggacctctggaagagtagccagtgtccttaattgctaagccatctctccagccctattattattattattattattattattattattattattattattattattattattattttgtctgaccatacagaattgctttgattaaggcatctgaagcatattaaaagaacacattgtaactctggaatgctttatcagaggtgactagtactaaggccattatttaaggaccacttttctgaggaccagtcccgtttctggaataaagagcctgtgtccacaactaagggtaaccacattcctgtacttttatacagattttgagttctggtggcacctcagctatggaatgaggcctcaaaataacaaaacgcgctagaagtgtctgaatggctacgagtgcttgctgctcttacagagaaccagattttgactccagcacccagatggggtggcttacaaatacctatatcttcctctatagcctctggatcctgcacacatctttacacacacagacacaaaacactagagtgctgggtgggttgagtgagtcccactcctgttgctgtggactaggctctgcctgcctttccccattctctctgtgctgtggattgaacccagggccttgcctatcttagacaagtactagaccatggggttccacctgcctttctgctacttttcctggctgtggcttgttacatccttgctgcagttgagtagaagaccttgtttggaggctggcttccagtggagggaggaggggatatgaagcagtgttgctggcctttcctcaacatccatgctaacttttggtcttttagttacagtaaaatctcgttctgaggagcattggcattttttctaaggcatttgaatttggcccttccagcagttatgaaacttccagcagttaggctaacatgagaccatttgaatgcctcccctatagaaatactaacacttggctaactttttgagcactgattgagttctttgactcacattatgtcctgtgtttgttccattgacagtgttgggtggtgaattcctcaagtacatggaggcctttaaaccattcctgggcattggactgaaaaattatgctgagtaccaggtaggatatgctcttgagaacagtctctgtgggctttgattgttccatattgttgagactgagatctggagcttggcgcccgctgatgtagacgctgagctgcatcccacacctcagaatcatgctctgtcacagagtagaagagcacagacaaagtcaggtccaagcccagtgggcctgcttctgcattatttgtagccttaccgtctgcactggaggtagtctgtgaaaagacagtgggttgccaggtaaaggttacaagacgactgcctgaatggtcctaattacagggcagctgccaagttatgtgatcactgccctaaagagcagcactgtttccatgtctgccaccatcttcctttcctgtggccctcacaaggccactgccttgctgaatctggtgaaagctacataatgtccaccagggaaggatgctttattttatttattcgatgttctcatcttgactctggttcacataattatgagagacgtttaaataatcaagctgtcttgctagcagcctcttctgttgggatgatctctcccttggttctttgcaggtatgtttggcagctgttggcttagttggagacttgtgccgagccctgcagtctaacatcttgcctttctgtgacgaggtgatgcagctgctcctggagaacttgggggtaagcagtctgcagtctaattagccagtcttggaaggaactgtcaggccgtggcaggggctgtaggttcctcgagcactatctgctagcttgtgaagaatagaattgtttatttttatagacatatccaaagtaacaaaattaattaaaggaatatgttctaaatatacgatttctctatccagcagtaactcaatttttttctctcaagtttcttgcatcttcagagcagataagatttggtgtttctaagtttcctttttcttttttccttgttagaatgagaatgtccacaggtctgtgaagccacagattctgtctgtgtttggtgatattgctcttgccattggtggagagtttaaaaaatacttagaggttgtattgaatactctacagcaggcctcccaagcccaggttgacaaggtaagcttggaactgtcctgatgcgctttaaagaccactttgaatagaagtctgagaagactttataggtgtacctcttaaaatggccaatatgaccgaggttttgttcttttgtcttccagtcagactttgacatggtggattatctgaatgagctaagagaaagctgcttggaagcttatacgggaatcgtccagggattgaagggagatcaggaaaacgtacaccgttgagtatatagcccagctcccaaaatccactgaccagggtgcacagggccagtgagctgcatctacctttgtagctcattggtgaactagtacctgctacatatggggagagaaacaatcgccctaatgaagagagtggtttgggggaggggatatatagacattatatttctgcatccttctactttgctatgcttttttctcctatgggcggggttgtaggggatcaagcccagggctacatggtatggtagcaaagctctacctgaatcatgcttctagctggcttgctttgagggaaagggcagaagtgccagtactctctgccgattgcgggcagcaggtgttgagcagctaaagcccccagtggaggttgttcattctgtgttccactcctgggatgcaactcagtgtcgtgggaatacttccccacggtgtgtaaggcttgcatctattccattcttcagtaccacaaaaaggtcttatgtcctacctgatcacagaaggggtatttctctcctctgcatttgaagggtatccttctaaactgaaaagtaacttttgttaatgccgtgtttagttggctgcccagtaggaatctttccattggggtagagtgacagggacatattgagaagagacagagtcctgtctgacatggacagtttcatcagacctcctctttcctttatagcggatgtaatgctggtacagcccagagtagaatttattttgtcttttattgatcacattgctggagatgaggatcatacggacggagtggtagcctgtgctgctggtctgatagggtaagttattctttttccatgtgggtcctggggatttaacagcaggcagctttacccactgagccggggctaccatatagctcttctgagaccctgaggctatactgggacatagctttacagctcaaaggcctagtgcaatttccctttttttgagaaggtcttgctatgtggcccgtgttgacattgaattcatgatccttgtcagcttcttccttgatttctgacattacagggttgtaccatcacactcagtgagctacagccttgggcaaatcttgaactgatttgcccaattgattccagaaatctcttacaaacaatttttaagaagcgaatggatgctaagaaacatagagttgcctcactcagtcattcgtgggtgtttgttttgcacagggacttgtgtacagccttcgggaaggatgtactgaagttagtagaagctaggccaatgatccatgaactattaactgaagggcggagatcgaagactaacaaagcaaagaccctcgctacgtgggcaaccaaggaactgaggaaactgaagaaccaggcttggtaagctcttgtctgcactctcaggtctcaggagggtttatgttctataggatttctaatattcgctgcctactggtattttggctacacactttttggtacctgtgtttgagcaggcagccagacacagccagacaaatatttctaagccatatatttgagtccttgtgttgaacgacaacacaactcactgaccaagacactgaaaatactttggaacctaataaaatgttcccatatttgttctctttctactcctccatgtccttttttatttgtgcagagtggagggtctttttgtagtctgctagcctagatactgctttgtagattagactggcctcaaagtcagacacctgcctttgtctctccctcctgagtgctgggtttaaaggcgtgcacctccgtgtatgtatggccttgcatgaccatttatttgcttggtttctggaaattgaactcaggacatcacaaattgaagtaagcacatttaccactgcactacaatatatgcttatatatggcagcaggtatacagaacaaaggaagagaagaaaaataatcaatctttaagacttgatgggtcccatttttagctttgggctacttggttgtaggagttggggatacatatgacctcagagttgacctcttcgtccttttgtttttagatctggtaccactgggatgatgacctgagacccccactggaaatctccaatcttttgaaaaacccggaagtgaggagtgtgcacggatgctgaatgcttgggaatgagaggatgagtgagtgaggcttgaaaacaccacactgaaaatcctgccacagccaacagcagcagcgctgttagacatgagctaagtaagcactgagtttgtagaaaacataacatcagccatcttggaacagagaaacaatggatttacttacttattaaaaacaaaaaagctgtctcttcccagggaaggctagaactagctttcctgtcttggccggtgccgaatgggtgactgatttgggagaggaggacctgggttcacctgtggggctgtgttgtgaaaggcagcctggcccctgctactgaggagaaagatggagcccgggtcttgagcccaccttcactgtaccgttgcacttggtactgtctatgtgcccttgagaaggcgcgtgggggatttcacagtctgagaatgagtgtgtgtgagtgaggcggtacccacattctcaacttcaagtcattgcagtttctttttcccagaaaacaaaggggtttgatgttgcatttcataaactaactgaagttctggctactgatgcagcacaagagacgtgttttttttttaaatgaggaaagacgctgtttaggtttggtttggtttcattttaattactctagggaaaacactgacgaatggtcagcgctcctgtcctgatcttttcatcaaggcgcctttcctgtactatggttcagctgtgaatgtagctatggggggaggggggagaaaggagaactctggagttagaggatatagaaaataaaagtacagttgttacaaagaaaatgcagacttcaaagacagaaaaagccacaacccaaaccaaaatttaaatgcttgaaattggcatcataaacaagctctctcctgacttgtattgtggcagtcggaatgcccccagaaaactgtgccaaagagtttagaaaacaaatgtacaataaaagtaaatacactcaaaaccgcaaacttcaggtaactattttgaattgcaaatgacgaaaatttaatgttgaacgatctgataaaataaccatttggaaactgcttggccttctgtccctttctttgactgactgcaatgcggtattggtctcttgctgcactccaaaccaactaaccactaagacagtgtgtgtgtatccgtatacacagcatacacacacactaaatacaactgttgtgatgaaaatggcaccaggaagaaggctctatttttccactgaagttgaagattagtaaaatggtgtcagatggtgaccctgctcgcacgctttagtaattttttaaagtgtggtgtgctgtgattataataaatcagaattatttttccttttacaagggaacaaggcaccctgagttttagagtctttcagcaataagaaagcatttcagtaagctggccctcttggctcgtgcagatagtaggagattagctggcgttttgaatatgctgctttaaaaaacagtagacaccgaggaagtttttattgcttcctggtagtgtggaagaaacacaagaccctcattcccatttccatttccattgtagtcaaaggtattggcttaggtttctcccgtgctcctttcatcccctccctgcctgagcctgttcctaagtgggattggctccgcttgcctgtccgtacgaaatgcagcgtctgtagtagctctttacagggtatcagatattgtgccttttggtgccaggttcagagtcaaagtgccgatctgatctgtgaaccagtgtacaaaaaaagtatttgaaggagaaatgctccattatgagcaaagctctctaggagtccaagccctcgggagaagcccaggcctctgaacgccttgtttccatcttagctgtttttttcagatttactaaccattcctgatactagatagggttggaacagggcttagggaagggggcagaaatattgggggaaaggaaaaacaatgtgatcattcctcagtgctacccatttctgtcctgtgtgggctgcttagcgagacagcagaggatgaagtacaccgagaaccctgatgaaaacaagaccttgcctgtgttttgtcgtgttctgttccagggaagcagttgacaagtgctgttactaatcctttctcccagatgcattcagtgctcgagaggaggaaatgggctgattggattgtggtcttggtgccttgctgttctattctgcactggttacgcattttaatcctcttttagttaccttcagctactgttttctatggtttgggtgtctgtccttaatcagttcgtaccacataaggcaaatgaatgcgaaatgcattctgtccactcactgtctgggccttccccaccctgagtcttggcacattccttcaagaatgtagttaccgtctgcttgggaagatgtcagtgcaaatgtgaagaaaatgggcatcggatagacttgggtttgccacaagtggcatctgcctgcaccaattacattggttaattttgcttttcatttttctcagttacccccagtcctccctctctgttgaaatgttgaagatttagctgtcagaggcaactgtgatcctgccttagggactggagaagtggagggacttgctcagtatggtgttctaatgttcagaaccaagcagtctccttacttactattttaagatgtgtgtagtttgactttagaagaagttcaaattccatccactttgatagcatcaatctgtaattggcattcagaatgcccttggcatgccagtctgtgaaggcattaaagacctgttaaaacacttgagcccaactttattaaccaaaactgataccaccacctttatcttctgaataaagtccgctttatttttattttcaacattttgctgcttcgttctttgtttcagatgtcactgctgtgtcagtgaggtgtggtttggaagaagctggagagagtgtgtatatgtgtgtgtgtgcaccctgctggcaaactgaggaggatgtggggcggttgtcctctgcctaagaccccagtgtcagtgcccacccaaacttcctgtttagcctgcaacaacggccagtttctctttcctgaaccttgtatttaactggatcttttcctccctccttttgactaacagtgatacctgctgacttaactgtcctcttttaaagtaacttgcatgtggccctccatactgcatactccatacggaagctctgacacctagcctgtatatactactctctccagatgtcataatcaaaagtagaaatgggaatgactgtgtgcaggaggaacagctgtgtcttatgattgtggagattactgtatgagagcaatttgtcacaagccacagccattggccacaaaccaggtgtgctttcagttgagactgctgtcaaggaagttcttgactacagtgtgacagtcacttgaatggtccccactcaacctgaaatgaaaaccagcatcctgactgtcacagcaaccttcctgtcttctcagtgtaaggagcagagtaaggttgctagactaaggtgacagggaaccagagtgtgggaccaccctgaagacttctacctgcatcacagctgtttagctgctttttcccaagcaccatctaaatgtgtcttaaacttgtttactcattggtggttggcttttttccactatcatgtaagtttgctaatgtagtttgttttatatttttctactttctctgtagattggaactcactttgtagaaacaggcaggtcttgaacccagaagagtcacctgcctctgtctcccaagtgctgggatcaaaggtgtgtgctaatattaatgtgcccacccctctgaatagcctcttaaacttgagtaaagtgaagcaatgacagcggggttggtcagtgttcaggcatcaccagtatggctaattgttgtactcatttgcatttaatgcactcctaagtcaaaagactcaactcttccacatataatcattccagtttcaactttagattatacatgtcataaaatgtcaggcccaaaactgcctcgcagacactacatgtcattcatgttgtaatgaaggtactattttaatcccattttacagctgagaacacaggagctaagaactttgtcagcttccccttgccccccagaatctgtgtactgagtatgggtatttttcaaatccagtcccaaggctttttatagtcttaactctgcagtgagaattattttatacctttgagaactgctttttgtgttagggcaacaagatgtctcagtggggtaaaggcacttgctacattaaacctgacagcctgagttcattcagctagatgccgtgatagaaggatagaatccattcctctgacctgcgcgcacacacacacacacacagtcagataatacagtaagatcataatgttgtctaagttgttaatggtgtgatacaggacctactacattgctgggttgatctcaagcttgagattttggcatctggagtgctatgattacagatgtgtgttatcatgagcggaaaactacaaatgtgggtctcttttattaagacttggggctggagagatggctgtttttttccagaggacctgggttgaattctcaagcacctgaacggtggctcacaatcatctgtaactcaattctcagaagctcggatgccctcttggcaccaggtgcacacttgtaggcaaaacgctcatataaaactttaaagataaatattctcttgctgcatatgtaagtgcatacctttaacccctgaactcaggaggcagagagacaaatctatgagttcaactctacatagttctaagacagccagggtgacctagtgaggtgcagtcttctagaagcaaaaagatgatctctatgtgtacatgtgtcaggctgcatgtatttatgtgcaccacaagcatgcagatacacattgagatacctttaggaagctagagaacatcatatcccctgtaagtagtttcagaggattgtgggtggctaatactgccttgggaactggctatcatcctgcctcaagccaggcaatgagctattgtacactgttgtataactgccaaactcaattcactaggggtgccaaaggggggtcaactttcttactatttgaagtctgaactaaaccatctctacttctgctccacttcccctctgaggcagaagcgtcttgaaatagtctatggtgcctggtaggcaggaaggccagagggctgctgagtaagtggcacttcgtaactcccagccccgtctgcgggttctgcacagtgcagcccagatgggaaacctgtgaggcctgcctgggcaacctttcttttccaagtgctccttggccacatgtatcccgaagctgagctgtcttcatgcatttcagctctccctaccggcctgaggtctggatgcagacagggagataacctgtcctaatcctggggatgagagactcagactctgggtaacttctccatagcagtggcagtccgtgttctttactgagtaccaccctctagtgagacagtcagacctttaaaaaatatatttatatgagtacaggcacaccagaagagggcatcagatctcagtacagatgggtatgagccaacgtgtggatgccaggagttaacttaggacctctggaagagcaatcagtgctcttaaccactgagccatctccccagttccccaattagctctttttattcctcagtttctttgtaaaacatttcattgaaagagaaggcataggaattttacaagacttagaacataaattagatagccaatcaatcgaatgatgaatatcagaccctaaaggcactgaggatacatagtaagctgagctaagcccccagatctatttcctgttgggctcatattaatgggcaattaacacaggtattcaataacttaataaaactttctttttggtttttccaggccgggtttctctatgtagccctagctgtcctggaactcactcttactctagaccaggctggccttgactttacagagagccatctgcctctgtctcctgagtactgggattaaagccctgcactgccactacccagcttagctatctctcatttaaaatttttctttttaaaaaattgaagtatttttaacttaagtatgttcatgttttgcctgtgtgtgtgtctgtatacaaaatgcttctctgttgcccaaggaggccataagagagcattggcttcctgaaactggagttacagatagttgtgaaccactgggtgagtccagggaatgaaatctggggttggtttgtttgtttgtttgtttttaagatttaattatttcatgtatatgagtacactgtgtcttcaggcacaccagaagagggcatcagatcccattaccgacggttgagagccaccgtgtagttgctgggaattgaactcaggacctctggaagagcaggcagtgctcttaactactgagtcatttctccagcccaaaacctggatcttttttgggggggggggttgttttggttttgttttttcgagacagggtttctctgtatagccctgactgtcctggaactctctttgtagaccaggctggcctcgaactctgaaatctgcctgcctctgcctcccaagtgctaggattaaaggtgtgcgccaccaagcctggcaaaacctggatcttaatggaagaacaagtgttcctaatcactgattcatctctctaaccctgccttttacttttagatttttattgcatgtatgtgtgtgtgtgtgtgtgtgtgtgtgtgtgtatgtgtgtgtatgtatgtatgtatgtatgtgtgtgtgtgtatgtatgtgtgcatgtgtaccacatgattatttttacgtgtaccatatacatggttggtgctgggaaaagccagaagagggtgttggattccctggaactggagttagaagcaccatgtgagtactggaaactggtcctggtcctctgaagaacagccagtgctcttaatgaacaagccatcttccagcccctatctgtgcacggtccctattttcatttaatttaacaagcccaggctcatttgaatctttgttatgtaatccaggcatgtttttatttcttcaagatgtatttatgtatgtattttatagataggaatgtcttgcctgtatgtatatctgcacaccagaagagggcattggatcctatgggactgtagttacagatggttgtgagccatcatgtgggtgctaggaattgaacacaggacctctggaagagcaacagtgcttttaatggcctctgcgtctctcgaaatcctgccaggcaggttttcaactcttttcttgccttagcctcctgactgttggattatagatactataatctagtatgtccagatttatttttttgttatttcagaggtaacaagggtgtctgtcagtcgggggctggagagatggctcagtggttaagagcactgactgctctactacaggtcctgagttcaaatcccagcaaccacatggtgactcacaaccatctgtaatggtgatctgatgccctcttctggtgtgtctgaagacaggtacagtatactcaaataaaataaatcaatcataaaaagaagaatcggtgtcagccacccagcctgggcttgaattcataatcctccagtctcagcctcccaagtagttggggctagtagcacataccactggggtaattttgtttgggatgctggggatgtgctcagtggtcaggcagttgcctagcatgcacaaatgcccaggtgtgtccccgcaacatggacatgaataactttgactttggataaaaataaacattgtttttgagaaaatgagacagttgtgaaacggctctacaacataccacatctcccccaaaagcccagccccagaggctgtggctgctctgtggtgctgcacaatctctgaggaaaagagtgtgaagtcagtgcaggaatgacttcccccactgcctcacctctgtccacaggacccagcagctacccatgatggcccgtgatggttccacagtgtccctgacttcctgaggcctggaagtgtggcgtcaaaggtggcactgtcacatacatctaatcaattttacccgccagcgatttgagtcatctggttttgattcagcctaatgccgcttcttcctccgtttcaggcaagaatgggacaggaaagacaaaagtttctgcagagcaagaggcgtgggagtgggagaaaggctctcctcatggcttccaggagggttacttgccagagctctgcttcagcagtgtctccctctcttgccatacccgagaaggccagttaggaaggtttcagactgactagtgcccaacacagctccctcttctatcttagctgcccccccttaccctttccactccactgattctctcctgtcccctccagaagaggagcctagctggtttcatggttcttagaaggacttagagcaaacccagctctctcagagaagtgaagtaactgaagtctcgcagttttgttcctctattcactcagttcttcagaacatgccttctaatcctccaggatttacctccaaggccatgtcatctgtggctcttcctagacaaccctgaagccatgccttgcttactcctcccttgccccagcaccttacattcacactcaggaagagccctgtcactgactgctctcttagcccttgctttttgagactttaccacctagcccagcgactcccaatatgagatttacagacggaggtcatcaccctcaacttcctttaatctgactgctgctgcttcccaggtgctgggatcaaaagtaagcaccgtcatacccagcctccagctttttatttttatttttccaagacagggtttctctgtgtagcccaggccatcctggaactcactctgtagctcaggctggccttgtactcagagacctacctacttctgtctcccaaatgctaggattacaggcctgtacctggccaacttgttttaattataaattcctttttttttttgtatttgttctaccagattttaagttccatgagagcaaaaaagagcacacttcttattttcagtgtccagtatgtcatggatgtttgagagatttttgttaaaagtcagacaatcctctcgctgaagaagtaagctgaaacaggaagactgcttctcacttgatgccacagagtgaagctatgtctcaaaacacgcccccaaataattttattttattgaacaatgtagtgaccatggtctgggatgagctcttgtcctcagaactgtctgacatgaacaagaactagaaacagaatatgctggaatcagggccagggcaagttttcaggtttcatctaattctttggggcttttgcccccagccacctagagcctaggctctagggcaccaggtgactcactgaggcctgcattgtaagcagctgccggcaggggctgactcatccgggagagtgtactcagaggtccctcgacccactcactgtcttttccagcaagggaggacttgccatggccatgtctgtgctctcgggaattgtggagacaactccacacctggcctggcctccagtcttgcatggctcctgagaaattctggggcctgaaggaaaaggacacctaccttgtccttgggtctactgagcgggacgacctgtgttccaatcagcttgccttcatatctacaggatagatgggtcatcctatacggtctaagaaagttcgtgcctgcttggctagcaaatagctgaccggcctctgtgttctggactataaaagggagcaggccagcaggagtccaagccagtgagaaccccctcctttgatgagtgtccaagactggggccggtcatcctgggaggaacagcttacccagcctagcatgtttctccacagtggagaagatgacaactgcccttgtttctcaaagctcccccggaacaagagacctttttctttcatccttcccttttcagaagcactctgctagaagccagaaaggtggactcagcttccatggaatcttcctagctaagtactgacccccaccagagccccttccctagcctatgcctggcctgcagagtttgcatctccctccctcacaaggcaagggccctcgagctttgctctggcgatctcccagcagagtcaggctggctttgcctctgtccacggttcttaatccaccagggaacgaaaatgactcattaacatctccccggcacttgcagggcaccttggcgtctgatctctattctttcccccttggggtggcctgtccggaacgatctcctgtctaagtcagaggtgaagtaacttgcccaaggtcacacacagtgggaacgtggcaaaaagacttatcttctgcctggcagtttggcaggtgctcaaatctttgtgtaaagggcgaggtatggtgtttcttcatctttctggcctctgggagtgtctttaaagggcttggaagggatgtccgtcttcccaaatgaacattttatctccttagttcacgctcactttcaaagttagatttaactctaatgtctctgtgttcaaatagatagattacttcgatgccccttcctacgagagcaaagagtacatagtctagtgatgtttcttctccgaagaccaataaaaaaataaaaatatttcccccaaataaacagctccacttctttccaaaatgtgcaaccccaagtcctgccccgaggcgccccagcacacggtccgcagacactgcgccggtcggcggggaggggaggccgcacggcggggagctggtgggcgcccggcgcgctgccagcctcagccggaccgcaccgcgggggccgccgcccctcgccacgtggtggtggcaaccgcggggtcccgggcgccggtccagctggagagacccgg

SEQ ID NO: 2984 - DNA, 3866 bp, Mus musculus
cggagcgcctggccagaggcagccggtgaatgggcttgtggtgacccccaccccccaccccaccctcccttcccacccgacccccaacccccatccccagtcggagccgccgcccgacaggccgggccgccgtcttgcgaggagtccccgccgccgtcacctccgccatggagctcataaccatcctcgagaagaccgtgtctccggatcggctggagctggaagcggcgcagaagttcctcgagcgtgcggccgtggagaatctgcccacgttccttgtggaactgtccagagtgctggcaaacccaggaaacagtcaggttgccagagttgcagctggtctacaaattaagaactctttgacatcgaaagatccagatatcaaggcacaataccagcagaggtggctcgctattgatgctaatgctcgacgggaagtcaagaactatgttttgcagacgttgggcacagaaacgtaccggcctagttcggcctcacagtgtgtggctggtattgcttgtgcagagatcccagtaagccagtggccagagctaattcctcagctggtagccaatgtcacaaaccccaacagcacagagcatatgaaagagtccacattggaagctattggttacatttgccaagatatagacccagagcagctacaggataagtccaatgagatcctgactgccataatccaggggatgaggaaggaggagcctagtaacaatgtgaagctggctgctaccaatgcactcctgaactcactagagttcaccaaagcaaactttgacaaagagtctgaaaggcactttatcatgcaagtggtctgtgaagccacacagtgtccagacacaagggtaagagtggctgctttacagaatctagtgaagataatgtccttgtattaccagtacatggagacatacatgggtcctgccctttttgcaatcacaattgaagcaatgaaaagtgacattgatgaggtggctctccaagggatagagttctggtccaatgtctgtgatgaggaaatggatttggccattgaggcttcagaggcagcagagcaaggacgccccccggagcacaccagcaaattttacgccaagggagcactgcagtacttggtgcccatcctcacacagacactgactaaacaggatgaaaacgatgacgacgatgactggaacccttgcaaagcagctggggtgtgcctcatgctcctgtccacctgctgtgaagatgacattgtgccgcatgtccttccctttattaaagagcacatcaagaaccctgactggcgataccgggatgcagcagtgatggcttttggcagtatcttggaaggaccagagcctaatcaactgaaaccattagtcatacaggctatgcccaccctaatagaactaatgaaagaccccagtgtagttgttcgagacacaacagcgtggactgtgggcaggatctgtgagctgctgcctgaagccgccatcaacgatgtctacctggcaccccttttacagtgtctgattgagggcctcagtgctgagcccagggtggcttcaaatgtgtgctgggctttttccagtctggctgaagctgcgtatgaagctgcagatgtagctgatgatcaagaagaaccagccacctattgtctgtcttcttcctttgaacttatagttcagaagctattggagaccaccgacagacccgatggacaccagaataacctgagaagctctgcgtatgagtctctcatggaaatcgtaaagaacagtgccaaggattgttaccctgccgtgcagaagaccaccctggtcattatggaacggctgcagcaggtgcttcagatggagtcccatatccagagcacatccgacagaatccagttcaatgacctccagtctctactctgcgcgactcttcagaatgttctccggaaagtgcagcatcaagatgctctgcagatctctgatgtggtcatggcctccctgttaaggatgttccaaagcacagctgggtctgggggagtgcaagaagatgccctgatggcagttagcacactggtggaagtgttgggtggtgaattcctcaagtacatggaggcctttaaaccattcctgggcattggactgaaaaattatgctgagtaccaggtatgtttggcagctgttggcttagttggagacttgtgccgagccctgcagtctaacatcttgcctttctgtgacgaggtgatgcagctgctcctggagaacttggggaatgagaatgtccacaggtctgtgaagccacagattctgtctgtgtttggtgatattgctcttgccattggtggagagtttaaaaaatacttagaggttgtattgaatactctacagcaggcctcccaagcccaggttgacaagtcagactttgacatggtggattatctgaatgagctaagagaaagctgcttggaagcttatacgggaatcgtccagggattgaagggagatcaggaaaacgtacacccggatgtaatgctggtacagcccagagtagaatttattttgtcttttattgatcacattgctggagatgaggatcatacggacggagtggtagcctgtgctgctggtctgataggggacttgtgtacagccttcgggaaggatgtactgaagttagtagaagctaggccaatgatccatgaactattaactgaagggcggagatcgaagactaacaaagcaaagaccctcgctacgtgggcaaccaaggaactgaggaaactgaagaaccaggcttgatctggtaccactgggatgatgacctgagacccccactggaaatctccaatcttttgaaaaacccggaagtgaggagtgtgcacggatgctgaatgcttgggaatgagaggatgagtgagtgaggcttgaaaacaccacactgaaaatcctgccacagccaacagcagcagcgctgttagacatgagctaagtaagcactgagtttgtagaaaacataacatcagccatcttggaacagagaaacaatggatttacttacttattaaaaacaaaaaagctgtctcttcccagggaaggctagaactagctttcctgtcttggccggtgccgaatgggtgactgatttgggagaggaggacctgggttcacctgtggggctgtgttgtgaaaggcagcctggcccctgctactgaggagaaagatggagcccgggtcttgagcccaccttcactgtaccgttgcacttggtactgtctatgtgcccttgagaaggcgcgtgggggatttcacagtctgagaatgagtgtgtgtgagtgaggcggtacccacattctcaacttcaagtcattgcagtttctttttcccagaaaacaaaggggtttgatgttgcatttcataaactaactgaagttctggctactgatgcagcacaagagacgtgttttttttttaaatgaggaaagacgctgtttaggtttggtttggtttcattttaattactctagggaaaacactgacgaatggtcagcgctcctgtcctgatcttttcatcaaggcgcctttcctgtactatggttcagctgtgaatgtagctatggggggaggggggagaaaggagaactctggagttagaggatatagaaaataaaagtacagttgttacaaagaaaatgcagacttcaaagacagaaaaagccacaacccaaaccaaaatttaaatgcttgaaattggcatcataaacaagctctctcctgacttgtattgtggcagtcggaatgcccccagaaaactgtgccaaagagtttagaaaacaaatgtacaataaaagtaaatacactcaaaaccgc

SEQ ID NO: 2985 - protein, 860 aa, Mus musculus
MELITIKTVSPDRLELEAAQKFLERAAVENLPTFLVELSRVLANPGNSQVARVAAGLQIKNSLTSKDPDIKAQYQQRWLAIDANARREVKNYVLQTLGTEYPSSASQCVAGIACAEIPVSQWPELIPQLVANVTNPNSTEHMKESTLEAIGYICQDIDPEQLQDKSNEILTAIIQGMRKEEPSNNVKLAATNALLNSLEFTKANFDKESHFIMQVVCEATQCPDTRVRVAALQNLVKIMSLYYQYMYMGPALFAITIEAMKSDIDEVQGIEFWSNVCDEEMDLAIEASEAAEQGRPPEHTSKFYAKGALQYLVPILTQTLTKQDENDDDDDWNPCKAAGVCLMLLSTCCEDDIVPHVLPFIKEHIKNPDWRYRDAAVMAFGSIGPEPNQLKPLVIQAMPTLIELMKDPSVVVRDTTAWTVGRICELLPEAAINDVYLAPLLQCLIEGLSAEPRVNVCWAFSSLAEAAYEAADVADDQEEPATYCLSSSFELIVQKLLETTDRPDGHQNNLRSSAYESLMEIVKNSAKDCYPAVQKTTLVIMERLQQVLQMESHIQSTSDRIQFNDLQSLLCATLQNVLRKVQHQDALQISDVVMASLLRMFQSTAGSGGVQEDALMAVSTLVEVLGGEFLKYMEAFKPFLGIGLKNYAEYQVCLAAVGLVGDLCRALQSNILPFCDEVMQLLLENLGNENVHRSVKPQILSVFGDIAIGGEFKKYLEVVLNTLQQASQAQVDKSDFDMVDYLNELRESCLEAYTGIVQGLKGDQENVHPDVMLVQPRVEFILSFIDHIAGDEDHTDGVVACAAGLIGDLCTAFGKDVLKLVEARPMIHELLTEGRRSKTNKAKTLATWATKELRKLKNQA

SEQ ID NO: 2986 - DNA, 55722 bp, Homo sapiens
  misc_feature (1)...(55722): n = A, C, G or T/U
acactatacatccacccactagaatgtctaaaactaaaaagacaagactgactgggtgcattggctcacacctgtattcccagcaccttgggaggccaaggtgagaggatcacttgagcccaggagttcaagatcagcctgagcaacacagtgagaccctgtctctacaaaaaataaaattagccaggagtggtggcatgcaccagtggtcccagttacttggggtgttgaggtgagaagattggctgggcaggttgaggctgtaggtcactgcactccaggctgggcaacacagcaaaatcctgtctcaaaccactttggaaaacaggttagcagctccttatataaaaatataagcttaacatatgacccagcaactctactcctagctatttttccaagaaaattcaaacttgtccatccaatgactggcacataaatatttatgacaagtttatttatagtaatcccaaatggaagcaacccaaatgtccatcaccagatgaatgaataaatgtgtggtacatccatgcaatggaaaacgatgaaaagggatgaactactgctatgcataacaatgtgcttcatttcaaaaacacacggagcaaaagaagcaccaaagagtacatatggcacgattttacttacataaaattctagagaacacaaaataaaataatgtccacaagtagactgtggctgtaggatgtaggaggttgattgcaaaggagtgtaagtcatggtgctggtaaattggttcccaaaaaaagaaagaaagaaaaagcctggatttgtggtacttactgttttctgtggtgtaaatactcccaccatgaccaactttgagctactaatacgatgttactaatgtagatttgggaagagatgtacatatttggctctcctgagctggtactagctagctccagcacattaccacagaaaggaacaaaggtgatccgatggtcagtatcttgactgtggtagtggtagcacaggtttatacatctgtcaaaacttaccaaactgtactcttaaaattggtgcactttctgcatgtaaattatatttcaaaaacagttatgtttcaaataaatatcagcaacaacccatatgcccaataacaagggactggttacattagtttattgtttatcctcttgatagactaggatgcagccattcaaacttagaaaatttcagcaacacagcaacatgctttgctatactgtatcatgttttgtggcagaataggaaattttatttatttatttttattttttattttttttgagatggagtttcactcttgttgcccaggctggaagcaatggcgcaatcttgggtcaccacaacctccacctcccaggttcaagcgatttttctgcctcagcctcccaagtagctgggattacaggcatgcaacaccatgcccagctaattttgtatttttaatagagtcggggtttttccatgttggtcaggatggtcttgaattcccgacctcaggtgatccacccgcctcagcctcccaaagtgctaggattacaggcgtgagccactgtgcctggccaggaaattttatttttaccatatgtttgtctatgcaaattttgtgggcagatggataacatgaggctttttgaaagcactgtcatgagttaattcttttctttgtatttagaagcagtatacagcaaaatggttgacagcccagaatctgtagccagactacctgggctagtagtattcagatcccaggtgtcacttctctcagctgggtgaccttaagcaactaacctaaactctttgagccttagtttcctttttcgttttttgtcttttttttgagagggagtctcgttctgtcgcccaggctggagtgcagtggcgcgatcttggctcactgcaacctccacctccttggttcaagcaattctcctgcctcagcctcccgagtagctgggattacaggtgtccaccaccatgcccggctaatttttttgtattttctcgtagagacggggtttcatcgtcttggccaggctggtcttgaactcctgacctcatgatccacccgcctcgccgcctcggcctcccaaagtgctgggattacaggcatgagccaccgcacctggccaagccttagtttcttgactgtaaaaaaggcacaataggagtacctattttggagggttgctgggaggattaaatgagttactatatgtaaagagccttgaacaatacaaagagtaagtgttttaaaaacatcaggctgggtgcagtggctcatacctataatactagcactttgggaggtgggaggttcacttaagcccaggagtttgagaccagcccgggcaacatgacaaaaccccatttctacaaaaaataccccccaacacaccccaaaaattagccaggtgtggtggcacacacctgtagtcccagctactgaggaggctgaggtgggaggatcacttaagcgggaagttcaaggctacagtgggatcacatcactgcactccagcctgggtgacagagcaagatgctgtctcaaaaaaaaaaaaaaaaaaaaaaaaagggccgtgtgcagtggctcacgcctgtaatcccagcactttgggaggccgaggcaggtggatcacctgaggtcaggagttcgagaccagcctgaccaacatggagaaaccgcgtctctactaaaaacacaaaaaaattagctgggcatggtggcacatgcctgtaatctcagctactcgggaggctgaggcagaagaaccgcttgaacgcaggaggcggaggttgcggtgagccaagatcgtgccattgcactccagcccgggaaacaagagcgaaagtcggtctcaaaaaaaaaaaaaaaagctattattttcatgaagcaatgatattgtttggacaataaaaatgcttactatgtgctaggcaggaaacacaggaatttatatgacatggcttctaaccttgaggagctataaatgtggttctcaattgtggggaggatttagcagggattcactcccttcctaggagttattctgtaacatctggagacatttttgattgtcccaccatgacttggtgggagacgagccagtggaacttagtaggcaggggccagaaatgctgctaaacattctgaaatgaacaggacagcttccccaaaggtaattatgtgagggcaggcacagtggctcatgcctataatcccagcactttgggaaaccgaagcgggtggatcacttgaggccaggagttcgatacaagcctgggcaacacagcaaaaccccgtctctacaaaaaatacaaaaattagccatgtgtggtggtgcatgcctgtaatcccagctactcaggaggttacccagctactgggaggcagaggtcacagtgagccaagatcacgccatggcactccagtctgaacaagagtgagactctgctctctgccaccaccgccccccaacacccacaaaaaaaagaattatgttgtccaaaataatcaaggttgagaaaccctgagtcatagtctaactcaggacaaaagatacatgcatacatacaaattgtacaaggcagacaatcaaaatagagcattatgcaattatacatataaaaaaaaaaacagaaaagatagaatagccctgggccagagtacaggattccctgtgacacctggccaggaagacaggcctcagtgaacttccagttttgggacccagtggacatacttcaacgatttgcaacttttagcttattctatcagtaggtaccttttttaaaggttaagtcaaagttaaaaggcttcacttctgcattgcactaccagtgtgaaaatgtactggggccagttcacatatgtttaattcatattatcttttcaatgcaacttgataaagagttgagtcaatttaaaattcttaaaagggcggagcaaggtggctcatgtctataatcccagcatcttgggaggcagaggcaggaggatcacttgagtccaggagtttaagacctgtctgggcaacatagggagaccctgtctctacaaaaaaatgaacaaaattagccaggtgcagtggctcacacctgtagtcccagctttttgggaggctaagggaggaggactgtttgagcccgggaggttgaggctgcagtgagccaagatcatgccattgcatttcagcctgggcaacagagcaagatccagtctcaataaataaataaataaataaaatcattaaaagtacattttttggagtcaacaagaaatgatacataggaatattttggtttccatttaaaatagaaccattttggggaaaatatgccaatattttaatggtggatataatttgaggttgcaggtggtttctgcggaattccttttcaaaattcctacagtgaggaacatatatttctttgataatctgagaaagaagaaagcatctgggcgcagtaactcacgcctgtaatctcagcacttaggaggctgagtcaggtggactgcttgagctcaggagttcaagacagcctggacaacatggtgagaccatgtctctacaaaaattagctgggtgtggtggcatgtgcctgtagtcccagcttgaatagcggtggtggaggctgcagtgagccaagattgcgccactgtactccggcttgggtcagtgtaagaccctgtctaaaaaaaagcctgatgtaatccatacatagttcaaggaaatgcaacttgaagtctcggtgtaatcctccccatcctactaaaccatgtggccaccaactcctcccacttgggaaacactgcaaagtggcaccaccacccattctgcagtgcaagccagaaatctagtagggaccagtggacacttccctcttctttcaatcaatcgcaaagttcttcatgccactgcattctagcctgggagacaaagcgagatcctgtctcaaaaaaaaaaaaaaaaaaaaaaatcaccaagctcaattaatttcgatatctctttgtgtttctaccattacttccacccttctccttttcacaagtatcatgtcctatgtgattactgcaacggcctcctaactggtctccctgcatctgctctttccccttcccacccaatctcgacattgtaatgaccatccttcttaaaacctttcaatagctctcctttgctcttaggatatagacaaaaccacttgcatggcagggaagatcttatatggtcttgcctccactcaaaactagctcaactcaatcccttgttctctgttttggggacactggcattcttgcagtaacttgtaatccccaagctccttcccacgagagtctccatacacactattcctctcttcttcacctgagtaactctcttcccttcctcagctaagctttccctgaactccctgactggaaccttccttgacatgtgtcacttttacaactttacatgtttgagagattaaatgattaaagtctatcttccctaatagaccaaggaccactcacttagcacaaaatacatggtaaggagataacagccaatgcatacataacatgctagactggcattcaccatgtcttttatttatttttttaaattaaaattaaagctgccatatttttcttttcttttttgagacagggtctcgctgcgttacccaggctggagtgcaacggcgtgatctcggctcactgcaacctccacctcctgggttcaagtgattctcctgcctcagcctcccgagtagctgggattaaaggctcctgccactacgcctggctaatttttgtattaagtacagacagggtttcaccatgttggccaggctggcctcaaactcctgggctcaagtgatcctccagccttggcctcccaaagtgctgtgattataggcatgagccactgcactcagcccattcaccatgtcttaactcacttaggacctccctatttgtccctacatagtaaggacaattaatagtctcattttacattgaggaaagttaactcacaaactaagaagtggtagagctgggataggaactcaggcacccaatttctggagtctgtgctcatcactcaagctccggtacctcaccagcatttattgaatgtgagtacttttgataagaactaaacagcaccatcagtaactttagttcaactaaagtcagttcattttgattttggtaaggattttatgtttgattggaactttgctgtaaaacttttattttcccagcattttacttcagccacagggtctagctgtcacccaggctggagtgcaggatcataggtcactgcagccttaaactcctggcctcaagtaatcctcctgcctcaccctcctgaagtacatgccaccatgcccggctttttcaaaattgtatgggttgggcgtggtggctcacgcctgtaatcccagcactttgggaggccgaggtgggcggataacttgtggtcaggagtttgaaaccagcctggccaacatggtgaaaccccatctgaaatataaaaaaaattagctgggcgtggtggtgggtacctgtaatcccagctacttgggaaaacaagggattgagaacaagggattgagtcgagctagtgctgagcggaggcaagatcatacaagaccttgcctgccatgcaagtggttttgtctatatcctaagagcaaaggagaattgcttgaacccgggaggcggaggttgcagtgagctgagatggcaccaccgccctccagcccgggtgaaagcgagactctgtatcaaaaaaagaaagaaagaaagaaagaaaattgtatagagacagggttttgctcttatttcagttgctttaaaaatccatttgccctcactggtatcatcatgactgatgttgagacagaggtagcccagcaaactgctggagagcaggggaaagttagcttgagtgaaacaaattatggataatttgtagtgtaggtaactcaggtaaggacaattccaggattttcacagatgtcatctcacttaatcttcattgactttttagcggcggtggggggacacagtctcactgtcgcccaggctggagtgcagtggcgcaatctcggctcactgcaacctctgacttctgggttcaagtgattctcctgcctcagcctcccaagtagctaggattacaggctcccaccaccacacccggctaatttttgtatttttagtacagacagggtttcaccatgttggtcaggctggcctcaaactcctgggctcaagagatcctccagcctcagcctcccaaagtactgcaatgacaggcgtgagccaccacgcatggccaatcttcattgatttctttttttttgaaatggagtcttgctctggcacccaggctgaatgcagtgttgttttgttttgttttgttttgagatggagtcttgctgtcatccaggctggagtacagtgggttttttttgagatggagtcttgctctgtcacccaggctggagtgcggtggtgcaatcttagctcactaccacctctgcctcacgggttcaggcaattctcctgcctcagcctactgagtagctgggattgattgcaggtgcccaccaccacgcccggctaattttgtatttcagtagagacagggtttcactgtgttggccaagctggtctctaactccggacctcagttgatctgcccacctcagcctcccaaagtgctgggattaaaggcgtgacccaccacgccctggcccaatcttcactgatttataacaaagttacacacacagggcagttcttccacagttaatagatgaagcaaaaggctggggttagctgctaagccatgggaaatccactagtcacagtatggtgtgaggaatggtgtccctacatttctagcttcaaaactgcaaagatatctctagcagagaaagaccatttcttcctcttttaacaaagagttggccaatctttcctaattctttgtgaaacctttcaacaaagtcagacttcctcctaggttttcccagtgtggctactgcagggcaattacctcacaagctcaagtcatatggtaaaaagctctatgaaccagctacatccaattacccctacatcattactgtgaaaatgaaacaattcaagaaattctttgttaccatttattttttctttttttgagagtcttaactgtcgcccaggctgaagtgcagtggtgaagtcttggctcactgcaacctctgcctcccgggttcaagagattctgtctcagcctcctgaggagctgagattataggcgtgcgccaccacgctcggctaggttttttttttttttttgtatttttagtagagacagggtttcaccatgttggccagactggtcttgaactcctgacctcaagtgatccgcccgcctcggcctcccaaagtgctgggattacaggcatgagccaccgcgcccggccctattattacacttttcctttatcattttaaaaatcttcatttttttaaaagagacaggatctcgctaagttgtccaggttagtcttgaacccctgggctcaagcgatcctcccaaagtcctgggattgcaggcctgagccacatactgtatgcacattttttttcttttctttgagatggagtctcgctctgtcgccaggctggactgcagtggcgcgatatcggctcactgcaacctctgcgtccagggttcaagcgattctcctgcctcagcctcaggaatagcttggacttcaggtacgcgccaccacaccgggctaattttttatattttagtagagacggggtttcaccatgttggccaggatggtctcgatctcttgactcgtcatccgcccccctcggcctcccaaagtgctgggattacaggcgcgagccacagcgcccggcccacgttttctttatatgcattttgctaagaaaaggcattcatgagtttcttccggggttgagaactgaaacaggttaagaaccacaatcctttattcctgtacacacattctttctggttcgaggttgggcctttacagggtacttttggagggtgaaacatttccatcctgtcaagtacctggtagctatggatggggggtctaagaggaggaatcccttagctcacccctaagcaagtcagatttatcacagcacaggtctcaagccccatataagcaggcttaggggactccttggagaggaagctgcttgtagggacaagggccgtcaggagagcttgagcttatcaagccactaaccagctgtgtgaccttggacaagttccagaccctctctgggctcctgaacccattccttaccaagccattaaccagctgtgtgaccttggacaagttccataccctctctgggcttcagtttccacatctacacattggcagtggagccacatggccttacggatccctcccagccgaaagcagggtaccaagccgacctagccattaaagcagcttcctgtgggcgcggcgcaggacttcaacagtcccccctcccccgctcaggcccgcgaaaacctcgcgcaacacgcccctcggagcgacggcgcttacccaaccgcagccccagcgctcgaacccagctccgcctcttcccgggggcgtcccatcgtgccccgcgccgggctcctagggttgccgggcacctcccgccttcccgcgccccgaccccgaactcctctccttagttctcccgggcaccctatcctatcaacgcctactatcccagccaatcgcgcaggatccgagtcgtgcctccggtccaccctcctcccagcgctcagccggtctgagctcaaggcctttaccaagcccacccaatcaacggcgggctctctcctaccccatcccaatctccctcccctcggccaatccgcgcgctccattccgctgcccgcccagccaacccgggccttgaaaccagcaggcgaatgggcgcgagacggcccttcgacgctgagcgcctggccagttagggattccgcgtggccaggacaacggccaatcgtcgtggagcgcggcgcctccgcggagaggtccggtccgaatatccctccgccttcctccctccctcgctccctccctgcgcgccgcctctcactcacagcctcccttccttctttctccctccgcctcccgagcaccagcgcgctctgagctgcccccagggtccctcccccgccgccagcagcccatttggagggaggaagtaagggaagaggagaggaaggggagccggaccgactacccagacagagccggtgaatgggtttgtgggtgacccccgccccccaccccaccctcccttcccacccgacccccaacccccatccccagttcgagccgccgcccgaaaggccgggccgtcgtcttaggaggagtcgccgccgccgccacctccgccatggagctgatcaccattctcgagaagaccgtgtctcccggtaggacgcaggagccgggggtagggctgaggtgattggggtgggggaggggaggcccggcccctctgaccccgctccgtctcccactttcctccccctagatcggctggagctggaagcggcgcagaagttcctggagcgtgcggccgtggagaacctggtgcgtgctaccccgccgcgcccatcccgccgcgtccccatccccggcgtgctgggccttcccgccctcccggaggcccaggcctcgggaacctaccccgccccatcccgtccccttcccccctttccccctccccccccaacccggtccaacctaaccccgccatcgggaagccggtgggtgtgtcccgccccgggcctcgcgactggccaatggcttggcgcgccgagctgcctgccgcccaatcgttgcgcggcctgagggcggcggtgcagcgggagggagaaagagggagggaagggaagttaggttgcgcggcgctgcgtgttcagcaggggtgggggcgggggagtcgggcctaggggccatgtggaagctccgggcccggccgcccgccctgtctgaccccggccggcttctccttcctatcccgtggcccctgtggctctccccacctatttcctagagctctgccctttcctagctaccttggtctgtactcatggccaggcctggcacccgactgcctcttaacccatttccactgatatttttccctctttgctcggttattcctctcttggggttttttctttttctttctttcttttttttttttcttctgacctggatgaatagagacctaatcactagggatctgcacccagaaaacagactgaggctcatctttgagatggggcctgtttgctgatgaaatcacaggggaaagttcctcgtttttcatattttaaaatttaaggggtccggagaaaatgaagctaagtccgctagagactggtcctttgtataaaaatgtgggatggattggttgaaacagcctagatgccagttaagtttctctttggtgtccatctcctgttgggggatggggtcagagggaaggattggatgatgcttgacatctttgagaaaggtaataggaattaagtctgagtaacactaaccatatgtgttcctttgtgttatataggcaaaatgtcaacatcaacaaagtgacaaggcttattttatacagactgcctttgaatgatttttttgttgtttttcatatgtgccaatttttacaactaacctgtttatcctttcctagaagagatttttccactagtataggctgataattccatttagggtattattcctgtttctgcttttgcaaattttgcaaaaagctttttatcttattcctaacattcttaacattctttagtggtacataattaataaaacttttaagaattatcttctgctgtgattgcagagcttgttagcagtaagaaaaatgtgtctgcttttgacttttcctgctaactttgctgtttgggcacggtttttggtggagaggtgtgtgtgtgctaaatttttaaacaaagggagtagtttttgaggcctgtggattacaaaaggttacaaaagaacatgcttttcagggatccactgtattcctcaactaaagtccaaatgtaaaggagcaagtaattgttgatcattagatacaaagttattttgcttgaacagcttgcctgaagattttttctttcactttttccctatttctaaatatcttatcacttttccttataaatctgcttttttcattgttccctttttgctgagtgcccacaaataaaacggaggatgaggctcctaagtttgttttaggcttatctgtatttccccctctcataaaagatcacctccttccatggattgaaaagctaccctgctgctgccatgagatggaaagttggatcattcttttgggaccaaggtttttgaaatttagataaacagttttattttctaccccccatcataacagccattcatttaacaaacattgagtaccagacattattaaaagttcttgggacacctcagtatacatagaagactgactactactaccatactctgaaaccttgcaattcgggggtctaacatgacaatttgggcactaagaatgatcttgatagggaaatctgtaattcctcattaagtgctaggctccacgagaaaagtggaagacttcctgttacactaagtaacatttttatagaagtcagtgaagtaaatattttgtggtttcctgaaatgcttatatcaaaaaaaaattagacattagttccccccctcgccgcccctctggtggttcagtgctctataaattatcctcagttgtggaaattcctaagatatttttatttacaaatttatcttcccttaacagcccactttccttgtggaactgtccagagtgctggcaaatccaggaaacagtcaggttgccagagttgcagctggtctacaaatcaagaactctttgacatctaaagatccagatatcaaggcacaatatcagcagaggtggcttgctattgatgctaatgctcgacgagaagtcaagaactatgtgagtaacgcttatctgtttggttatattgcccagagaacaagaaatcgctttctcagatcttttgctatttgcatgggatagagctaacagtgtgataggtttctgggacctcaactttacctaaagataaaaattgtctttgtcttaaatctttctcaacacagcttgtccattcccattgatggattggaattctttttagatgactgaggtaggctgcagcagtttgggaaactttaattacgtgccataatttgtaaaatctgtttggcaaatgggagtagtgtacaaattggtgctacatttgtataaaaattagggaatttgttaataggtatttccaagctctccagaaattccgattcggtacttctggagtacagctcagggaatttttttttttttttttttttggagacagtcttgctctgttgcccaggctggagtgcaatggcatgatctcggctcactgcagcctccgcctcccaagtagctgggattacaggcacccaccaccatgcccagctaatttttgtacttgaagtagagacggggtttcaccatgttggccaggctggtcttgaactcctgacctcaggtgatctgcctgccttggcttcccaaagtgctgggattacaggagtgagccacctcgcctggctgttgttgtttttaaattaagttctttagtgatctgtcttacatgggtaaggcacaaagaggagtgagttaaatatctgtgcagtcatcattttgtccttggtatttgagtggaaactagtggggaattcctacatatgtacttgtgcaggacatggttatgcacatcatacttgctatttcctggttctagatatcagcattaggtaaagtagtgccctgtaaggcagtaacttctgtatctggttgtgtacctccttctgtcaccaatcttgcatacccatgataaggagccgggttattaaatccaacttggtttcaaatcgttttggagcatgtagagctgtttctattcatgttggttctgcttgtgtaataacaacattttaattccttctccctcagctaagtgacataaatggaagtatattctatcactggaaatctcgatactgatagtgcccattcagtttctcatcttccttaatttacacactagtaaatgggataagatgtaattggaattgtaattggcttattttttggcacatcactcttaacaccaaccctttaaaaaaaaattagacaataatggctgggcgcagtggctcatgcctgtcatcccagcactttgagaggccgaggtgggtggatcacctgaggtcaggagttcgagaccagcctggccaacatggcgaaaccctgtctctactaaaaatacaaaaattagctggctgtggcggtggatacctgtagtctcagctactctggaggcttaggcaggagaattgcttgaacctgggaggcggagattgtggtgagccaagattgcgcattgcactccagcctgggtgacagagtgacactccatttcttaaaaaaaaaaaaaaaaaaaaaattagataatttgtataggcatggttaagccctcgggcatgagaaaaaagctaacagtaccttggcctttttccctttcatagcacaacgataactaatactaagtttcactgttggtgatcttttttgaaatctggatattggggcacaattgggagctagtttctcttttctgataattgaatattactattaaggttacctctagtttaaacagaaaacttttagtactcaggaggtggacatccgtagtttctaaatcacctcaagtaatatggagtcttcagaaagcaatctaaaggaaaaaggtaaaggtagaatgggattcagtgcactccacatatgtactaggagactatgtagtgtggtgtgaaggcaccctggacttgggttaataatacccattcagcccctgatattttggacaattcaccttgtttttccccctcattccctcgtgtctttgacataccgtttttgtccattctagctctgctagtcctcgagagcaaagcctttcatttaacatcaatcagaactgtttgtagttgggtagagctgatgggggtgggggccagggatgatgatataccgtataagaaggaaagggggagttcattattggtgctagctgcaaagcaggatactaagtgatccgacccagtcagcagagctggcctgaatatctggcagctattctttgtcccgtgttcatgccagaacagttaactgtttgcctttgagtggactactgattcttagtgagttcattgactgaattagctgatcacggtaataattagctctaggtcaattgtggcttcatcttttatcatacctgtgcctttactctttacataaatggtggcgtggttaccatgtcaagcgagacatgtttaatgacaagtggatcttgttttgacatctggctagattttggtatctgtcagtgatagaacagttctttgattcttgggcaaacagaacaaatcctttcagattggaagttatataaagattagttcataggtgttattaacatcagcaacgttgtttttgtatttagtgatgttgttacttgaccaaggcctttctatgtaagtcaccccgaatgctgagttgttagtgattagaaggaaaaagttttgtttcagcccacgtctcatgagtaagatctccttggatcagattagacagtgatctactgtgaataagacccacctgaatgccccagaactagcttcattctagtgtccatgtctgtctacaaaacgagggtgtgaacatcctttccttataacagcaacaatgagcctggaagatgagttttgtccccatctctctcctttgccatttactgctacctcctcttgtaacttctggtttcccacctcgtgttgaaggttgaagtgaggtgggatgactggttttgtttctaggttctagggcagtgttgattatgctgatgttgctactgaggctggttttttctgacagcctttcctacttctccgtattatagataagaattctgaggccaggcacagtggctcacgcctgtcatcccagtactttggtaggccgaggtgggtggatcacctgaggtcaggagtttgagactgtcctggccaacatggtgaaaccccatctctactaaaaatacaaaaactagccgggcatggtggcaggcacctgtaatcccagctacttgctggggggagctaaggcaggagaatcgcttgaacccagaaggcggaggttgcagtgagccgagatcgcgccatcatgctccagcctgggggacacgagcgagactttgtctcaaaaaaaaaaagaattctgagacagctgcctgggcacagtggctcacacctgtaatcctagcactttgggaggccaggaatttgagaccagcctgggcaacatagggagacccccatctctactaaaaacccaaaaaagttagctgggtgtgatggcatgtgcctgtagtctaagctactcagggaggcctgggaggtcaaggctgcagtatcgttgtgccattgcactatcgttttgctactacactccaccctggacaactgactgaggccttgtattttcctttttttttttttgagcctgggcaatatggtgatgccctgtctcaacaaaagatagctgggcatgtcagcatatccacccctgtagttcagttactcaggagcctgaggcgggaggatagattgcaccgtagagattgaggctacagtgagctgtgatcgtgccactgcactccagtccgggcaacatagtgagaccctgtcttaagaaagaaagaaaaaaaagaattcagagacactaatataagtatggtggtgggcaaaatgtggtcaaatagtgttagaaatttgtatcttttgtctttttttttggtgcaggttttgcagacattgggtacagaaacttaccggcctagttctgcctcacagtgtgtggctggtattgcttgtgcagagatcccagtaaaccagtggccagaactcattcctcagctggtggccaatgtcacaaaccccaacagcacagagcacatgaaggagtcgacattggaagccatcggttatatttgccaagatatagtaagtgcttgcctaatgtatctggtttatatacctctgattgcctctagctgtgacatcaatgatattagtactaccttattgaatcacgaagaaagccaagctaaattgcacagttttgaaagtgagactgatttatttcccttaggcctgtgtcttcacattgctaatcatgccctaaagtaaagaaacttgaggatcgcaaactgaaaacagaagtctatgtttgaagagtcttagattctagacttacaaaatgaggatattctcatttggattatccctgacccagtcttttttcttaagatcccgaatgtaccatgaatgttgtggcgcattttcatttacaacattacggaaagttttgccaacatttgatgtagttggtttagccactggagacacagtattttagatgtagcccccccagcactgttgttcctgatgaggttaccactcttggtgtgtattttaatatatagactttatgaagcaaaggagcccacagcacttgacccagacttagactccctagatgtgcctaggtgtcgatccttggccttggcccttaaatgccctgaagctttactttagagtacagatggcctggaaaatacgaacagactgccatctccatttgcacagaagtggggaggaaagcgaatattacctcatacccagagtcattatgctaagaagtcaaagatgaagttgatgagtttgacttggttttgttcagttctggattgccagtaccatgagacattttgcaggtggtttgcagtgttattcccaaatggaaacgggtggggaaagatcaccaattcatgatactttcttgagtgaactttacagttaaaaggactgccaattaagccaggcacagtggcttacacctgtagtcccagctgcttgggaagctgaggtgggaggatcacttgaacccaggaatttgagggttcagtgcattgtggtagtgcctgtgaatagccactgcactttagtctgggcaatacagaccctgtctcttaagaacagaagaaggactgcttctgtcgtgaagctccttatggcagtcttttggaggggattgattccagcaccctcctcaggtaccaaaatcctcagatgttcaagtctgttacataaaatggtgtagtatttgcatataacctatgcacatcctcccatatactttaaatcatctctagaatacttacaatacctaattcaatgtaaatgctatattaatagttggtatactgtattaagggaatgatgacaagaaaaaaaggtgtacatgcaccttttggtgcagtacagatgcaaccatccattttttttcctctaaatattttcaatccatagttgtttgaatccacagatgtggaacccatggctgcagagggctgactgtatattcattgcacttctctgcttgttacaggacccagagcagctacaagataaatccaatgagattctgactgccataatccaggggatgaggaaagaagagcctagtaataatgtgaagctagctgctacgaatgcactcctgaactcattggagttcaccaaagcaaactttgataaagaggtaagttttttgacaataaggtatagattcagacagtaagggatgaaagagttgaatgaaagttttttgttttgttttcttaagtttatggtttagaaagtaccacctacttaaaagtatttgtttccagtttagtcgagttcgtattgtgtgagatatccccatggagtgtttgccgtttctcatcatgcttttggaaataaagtgtttctaagcttaggtttttccttttgcagtccaaagtgtggaatgttgttgggtttttttaaattatagggcatggtggtgcatactggtactccagctacttcagaggctaaggcgggaggattgcttgagtccagttattcaaggccagcctgggcaacaaagtcagatatcgtcccttaaaaaaaagaaaggaataggctgggcgatgtggcttaagcctgtaatcccagcactttgggaggctgaggcgggtggatcatcaggtcaggagtttgagaccagcctgacgaacatggtgaaaccccatctctactaaaaatacaaaaaaattagccgggtgtggtggcgtgcgcctgtaatcccagctactcaggaggctgaggcaggagaatcacttgaacctgggaggcagaggttgcagtgagccgagattgcagcactgtattccagcctgggcgacagagcaagactgtctcaaaaaaaataaaaaataaaaaaaataaaagaaagaaattatggtatgtactatatatgttggtttactttggtttcttttaagattgtgtgaatcttttgccttgtactaaagattttgtggaggccgggtgctggggctcacatccagtaatcccaacactttgggccaccaaggcaagaggatcacttgaagccaggagtttgagactagcctgtgcaacgtaacaaaaccctgtctctaaaaaaatttctgtggagaagaacaactgagttgttaaccagttttgtgagctcttgtgtttacagggcttataatggaaaaaaaataatgaaaaatgaaataaataaaaattatagcaattggtctgtttcataccaccttaggaaggtgtttttaagaaacaggatatatagccaggtgctttggcacatgcctgtaatcccagctacttgggaagctgaggtgggaggatcacttgagcctgggagttcaaggctcaagatttcaccactgtacttcagcctgggcaacagtgcaagactctgtctccaaaaaaaaaatatatatatatatgtatatgtatgtgtatgtataatatatatgtaaacattttggctgaaaatgcaatgaataacataaaatttaccatcttaaatcatttttaaatgtatagttagttaagtagattcacattgctgtggaaacaatctccagaactttttcatcttgcaaaactgaaactgtacatactgaacaacaactcctcatttccccctttctcagccactggtaacgaccattttactttcagtttctatgtattttactactctaacgaaataccttacgtaagtggaatcatatttgtctttttgcgactggtttgttttacttagtatgatgtcctcgagattcatctaaggggtagcatttgtcaaaattggctttttaagggtgattaatattccattatatgtatatgccacattttgtttatctagtcttccatccatggccatttggtttgcatccaccttttggctattgtgggtaatgctgctatgaacatgggcatgcatgtgtatctttgagactctgctttcagttctttagggtaaataccgacaagtaaaattgccagggtcatggtctgaaagtatttctgtatatatgtttgttgacacttcagctgggtttttaccatttcttgactttggaaaggtctgaaaccccagagcaaatggcaattctaattgattagaaaactggatttttccttaatagattttggaagatttaggagggtagcacataaagttcattctcccttttctcaccacatttgatgtgaatttgctacctctcagaaaacaaatttggtctctgaaataaagcagatgttttgaattctcttatataaggaaactgattttcctacatgtaaatttttatcttttaaccatttttatttaaaacttgtgacctacatttttctgtttcctccctgaagtctttgttagtggtcattttggagattaaaagattagggacctcattggagggcaagtcacatagcagacaccgaaggtaaactctttatagcctttatagtgctgtaccatctcaagggagagtggcttgattgtaccaggcagggctgtgtggggccctgagggggagtgagaggttttccttgtagagggagtctggaaatcttcctacgtacaggttatgctctcctaattctctttatttttattcctcctacagtctgaaaggcactttattatgcaggtggtctgtgaagccacacagtgtccagatacgagggtaagtgtgaggttatatgaaaaatctgtcttacatctttcttaggaaatgtcaaatctaatataagtttgaaatactgggaatcagttgacttcagcaataaggtttgattaatattgttactaataattaatattctggctgggcatggtggctcacacctgtaatcccagcacttagggaggccatggcaggcagttcacctgaggttaggagtttcataccagtctggccaacatggtgaaaccctgtctctactaaaaataaaaaaaaattagctgggtgtggtggcacgtgcctgtagtcccagctgctggggaggctgaggtacaagaatcgcttgaacctgggaggtggaggttgcagtgagccaagatcatgccactgcaaacagactccatctcaaaaaataataatgataattaataaaaacattagagaagagggaagaattgtcatggaagttgccatcctcttaaaaaaggtttaaggtgccagtgtggtggctcacactataatcccagcaatttgggaggccaaagcaggaggatcactgaggtcaggagttggagaccaaactgggcaacatagtgacaccatctctactaaaaaatatgtatacacaaataaacagttaagggagaaaaggttttcgatcagcttcgctacttcattgccgtaggttattcaagccatttctactaaaaaatatatatacacaaacagttaagggagaaaaggtttttgatcagctttgctactttattgccataggttattcaagtgattgttttcccctgtagccattaaagcagctttgctattgctatacccaaaacctgacccttcaagaagatagaagtaatatcttcagtctgaatagtattagtgaatttagccgtaccatgggttccacacgcacctttaatgcaaaaaaaaagactgaggccaggcgcggtggcttacgcctgtaatcccaacactttacaggcgcatgtctgtaatccagctactcaggaggctgaggcaggagaattgcttgaacccgggaggcggaggttgtagtgagctgagatcacaccactgcactccagcctgggagactccatctcaaaaaaaaaaaggactggctgtggtggctcacacctataataccagcactttgggagaccgaggccagaggatcacttgagcccaggagttggagaccagtctgggcaacatggcgaaactccatgtccacaaagattagctgtgcgtgatggggcgagcctgtagtcctagctacgtgggaggctgaagtgggaggattgcttgagcctggtggttgaggctgcagtgagccgtgatcatggccactatacttgcaccagggcgacagagcaagaagactgtctcaaaaaaaaaaaaaagagaaaaatggccgggcgcagtggctcacacctttaatcctagcactttaggtggccgaggtgagtggattgtctgagctcaggagttcgagatgagcctggtcaacatagcaaaaccccgtctctactaaaaatacaaaaaattagccgggcatggtggcgggcacctgtagtcccagctacttggaaggctgaggcacgagaattgcttgaatcggggaggcagaggttgcagtgagccaagatcatgccactgcactccagcctgggcaacaggagcggaactctgtcccttccccgaaaaagagagacaaaatgggaaaataaaggaacagataatgagggaattaaagggagagaatgaattttagggaaatgataacgtatcccatatttacctcaattaatccttaggattattggcccatttgagtgaatctaactttgtcagattgcgttgttattttagtaaactatctgatctgctgttcataaaaggtacgagtggctgctttacagaatctggtgaagataatgtccttatattatcagtacatggagacatatatgggtcctgctctttttgcagtaagtatttctatttatgtgatttgagcttgtggctaattacagagcccatcatccttagtcgctattttgccaattctgtaatattttacttaatactatggaatcaaggaaattcctcgagactgttcggtttaagctcatcagtggtgtgccaagaaaactggtgctaactttgtgtgggtaaaagaccttcattttgaggtcaggcccggtggctaacgcctgtaatcccagcactttggaaggctgaggtgggcagatcacctgaggtcaggagttcgagaccagcctggccaatatggtgaaaccccgtctatactgaaaacacaaaaattagctgaacgtggtggcacgtgcctgtaatcccagctactctggaggctgaggctggagaatcgcttgaacccaggagacggagggtgcagtgagccaagatcacgccattgcactccaacctgggccagaaagcgagactctgtctcaaaaagaaaaaagaaacaacctgcattttgaaaatctgaggctgggcatggtggctcacgcctgtaatcccagcagtttgggaggctgagactgacagatcgcttgagtccaggagtttgagaccagcctaggcaatatggtgaaaccccgcctctacaaaaaatacaaaaataagctgggtgaggtggcatgcacttgtggtcccacctatggaggaggctggggtgggaggtttgtttgagcctgggaggtggaggttgcagtaagctgagattgtgctgctgtactccagcctgtgtgacagagtgagaccccatcaccaaaaaaaaaaaaaagaaaagaaaatctttcttttcctatcttttctttcaagcctagcttcctttttatagttacatttctgaaatttgcatgtctgtggttaaagccgggttggggcagggactcacttgaatcagtacttatttggggcctggggtgtttttcttcttaagatcacaatcgaagcaatgaaaagtgacattgatgaggtggctttacaagggatagaattctggtccaatgtctgtgatgaggaaatggatttggccattgaagcttcagaggtgagctggggagaactattactctgaatacgctttgggacatatctcatttgtggatgatgttccccttctaggagaactttattctgtctgggtttagagggtatctccattggcagagattttgatttttctgctagccagagcccttcatgaaggaggcacatcagtaatgagggctcacgttcttgccaagcagtcaggcatgattgatcgtaaatagtggtattatcactgtgaacacaagggggcagcaggctgtcgcagtttaccaaggtgatgcctgatgctgaattatttccttttggaagtcctaatgcaagcctaggatgtataattgatactttactaactctggtgaaagagtcagatatggaagagaatggggagttctgtacttgggatctttgaattcaagttttgtttccagcttggtctttacacacttttatttcaggacaaaaataaaaaggttttttttggcatctttaggcaaactgagtgtgtgttgatccaaggaacactgaaatatcaggttgtccatatgaattgaacttatgaaaaaaaagttatacttaatgttgccttggacctatattatatggcctaaaagattctcactgaagtagaccaaaaaattagcactttccaagatcacattgtatgttaccatttgtccttgtatgtttctgtttctgttaagagatccctgttcggctctcattgtatgcctttagtatacagagctcggttgcttttgtctagaatttgctttgtttctcctcaggcagcagaacaaggacggccccctgagcacaccagcaagttttatgcgaagggagcactacagtatctggttccaatcctcacacagacactaactaaacaggtgagttaccttccaaatataggtaggtaagctgtggaaccttactaagagtaaactgtggaaactttccatggaaggaacttcgcagcccatcaactatttgatgttctgttgttgatgacttagaaacagctaagctgcatctataagatcccctaggctctgacttctttgtgaaggagaactgagtcttaacatctcagatgcatcttgctcaggaatgagccacatgctgctctgatttcctgagtgctccattgtccaaactcataaaagaaaggtgctctgtcaaagcttcagtgaagcaaggttaggagcaaagatgtgctggttttaggccacttgcgtatctgttgtaatatccaggatactttcgtgagttcacagggtgtatgtttttaaaattctaaggaagttggatataagttattcagatgctaatgaaggaccccaacccaagaaagaaacccttctactgatcctttaagataattaacttcaattattaagattcaggatgaaagtaaagtgacaagacttcataaagattggggtctaatgagtaaatatagaagttcttttatgaggaccgtgtcctggttgcttttgttctcctgacttgatgcaacacagtgttttttgatacggtatttgggaagcttcttctggtgcatgtgaagtattaccaaagagctgctagtactctgacgaaacaatgttggtaactgagcattgcatcatttctttgtacacaggaatgtaattgtttttagggatgtgtataattctcaatatagcagtttcaaaagctaagtagggatgtgtttggattaaaatgaactgggtgttcccttaattttcatctctcctctcagggtttttttgtttttgtttttgttttttcttttgttttgagatggagtcatactctgtctcccaggctggagtgtcatggcatgatcttggctcagtgcaccctctgcctcctgggttcaagcagtgtcccactctagcctccccagtagctggaagtacaggtgcgcaccaccacgcccagctaatttttatattttcagtagaagcggggttttgccatgttagccaggctggtctcgaactcctgacttcaagtgatccgcccgcctcagcttcccaaagtgctgggattataggcgtgagccactgtgcctggcctatagttgctatttttatcttttgacttcgtgtctttacttttgtgtgtgtgtgtgtgtgtgtgtgtgtattttatatatatattatatattttatatattatgttatatatattttatataatgttatatattatatattttatataatgttatatattatattttatatgtattatgttatatattatatattatatatgttatatgttatatattttatatgtactacatattatatataattatatatattttatatatattatatatatttattttttagacagagtctcactctgttgccaggctggagtgcagtggtgcgacctcggctcactgtagcctccgcctcctgggttcaagcgattctcctgcctcagcctcctgagtagctgggactacaggcatgcaccaccacgcctagctaatttttgtagttttagtagagacggggtttcaccatgttggccaggatgatctcgattttttgacctcatgatccgcccacctcagtctcccaaagtgctgggattacaggcatgagccactgcacccggcctcctttcttatatttttattgtgcttttcctatttgagaacaaattattctttgtgtgattttctgaaactgcataggcaacctgccttaagtttactatgtggtgtgaatggccacaattaggaagctataccttggattctaacttaagaggagatattagtggaatcttttcttttttgaacttttgtggttttggtttttggttttttggggtggcgttggggggtacagagtcttgctctatcacccaggctggagtgcagtggggcggtcttggctcactacaaccttcatctccctggttcatgtgattctcttgcctcagcctcccgagtagctgggattaacaggtgtgtgccactatacccagctagtctttgtatttttagtagaaacgaggtttcaccatgtttaccaggctggtctcgaagtcctgacctcaagtgatctgcctgccttggcctcctaaagtgctgggattacaggcatgagccactgcactgcaccttgcctcttttttgaacttttgattgaatcatgtcttcttcccagtcatgaaactcccttactttcctggtcttttattccataggttaatttttgttgattttggactttatttattattatttttaatactatgtttttttttttttctgacagagtctcactctgttacacaggctggagcacagtggcacaatctcggctcactgcaacctccgccttccaggttcaagcaattctcctgccttggcctcctgagtagctgggactacaggcacgtgccaccacacccagctaatttttgtatttttagtagagatggggtttcaccatgttgaccaggctggtctcaaactcctgacctcaggtgatccacccaccttagcctcccaaagtgctgggattacaggcatgagccaccgcgcctggccgattttggactttacataactggaatcatacagcatacattctagttctgtattttgttctaaatgtttggaattcattctttttggatgtagttgaaattttttcattcttgttgtgtagtactaaatggaatcttcttccatctgaatcttgtttaacaaaggctatgctgtgatgaatgtttgtggaagagacaaaatataaaggtcttatattttatttccctggagtttaagttctaaagacattcaagagtagtcagaggacctttagagttaaaatgattctttggacaaaatcttaactagtgccatattctttcaccaggacgaaaatgatgatgacgatgactggaacccctgcaaagcagcaggggtgtgcctcatgcttctggccacctgctgtgaagatgacattgtcccacatgtcctccccttcattaaagaacacatcaagaacccagattggcggtaccgggatgcagcagtgatggcttttggttgtatcttggaaggaccagagcccagtcagctcaaaccactagttatacaggtgaaactgagggatttttggagtagaaagtaggatatttattgtttaaacttaaagcatatctttatttttcaaaacaaaactgtaaattgtcatctacaaagattatctctagatacttgtttacttttaatgagggtaaaatatatttcttaggtttttaattacataagtcagcatgatccagagacatgtgaaagaagccaaaagagaaaagtcatctttaatttcattgcccagaaataccactcttaactctgtatttatccttgaagctttttcctatgtgcatgtgtgtgcaacaggctcttcctgtgcagattgttttataacttgtttcttcatttaatactatgttgtaaacatttcccaataatttttttttgcacctagcactgattccccataatttttaataatggcattattattctattctttggacaaaatgtcctttatgtaatgaaaatgttcttatggaaatgttgtgcttgttttgctattacaagtcgtgccattgcactccagcctgggcaacgagcgaaactctatctcaaaaaaaaaaaaaagagtttgttatagttgagtttagtgcttaaagaattcagtcttcagtctttctggatatagccagatgccatcatagctgcatcctgagaattctgagtatctgagtaattctttttttttttgaggtagggaggcggggggatggagtcttactctgtcacccatgctggagtgctgaagtgcagtggtgcaatctaggctcactgcaacctccagctccccagcttaagcaattctcgtgcctcagccccctgagtaggtgggactatgtgccaccatgcccagctaatttttgtattcttagtagagagaccgggtttcatcatgttggtcaggctggtcttgaactcctgacctcaagcaactcctgacctcaagtgatctgcctgcctcagcctcccagagtgctgggattacaggcatgagccatcatcatgcccggcctctatctgagtaatttattgcagactactaaaagcatttacaccaaattcttaatataaaactctaaactggagttttgaaagatattttcaaatattttgaaagatgtttcacaccatgtcctgtaaaattacagaagtatcttggtgacttttttgagttaagccatccatcagtatttctttctctggggtagtagttaacatgaattttaatctttgttttgctttgctaataactgttatattttcaggctatgcccaccctaatagaattaatgaaagaccccagtgtagttgttcgagatacagctgcatggactgtaggcagaatttgtgagctgcttcctgaagctgccatcaatgatgtctacttggctcccctgctacagtgtctgattgagggtctcagtgctgaacccagagtggcttcaaatgtgtgctgggtaagggattttcttgctggtgagaaaaggagcttgcctgcgccactggcaagaaagtagaaggtgtgggagagaaatcaatctgcctcactggaatgctttttctgattttctttctaatttattcaattaaaatgtgggggagattccaactgcaagagccagtgggaacacttgacttatggttactggttcctgaaccacttagaacagtcatggtaacccagtggggaaactatctggacttgggttgctttcttgaattgcttggggacaagaagttttgattaaggtagagagtttttggctgtaagaagtatcattgctgagtagagggcaagagggaaggaaggtaggcagcctaaatgctgagtcagtataggctaatgtaattggttaaggggaggaagttcaaataaggaaggaatggggctaaacgtctttctgtgaaaggaaacagaaatgaaatggcaggtatggttgaaagtactctgctgcttagagagttgtcagattatcaaacaggatgatgagagatgtcagattatcagacaggatttctgtgattggaaacagaagaaatggcaggtattggtgaaagtactctgctgcttagagagttgtcagattatcagacaggatgaacaggaagtacaaatcaaataaataaatagttagtttaaaagatacctgtaaaatgctgtcttgagatgaccttggcagaaaaagttggaagttcactgacacggcccaaagtatcttaatgaaaaatgagataatcctaaggtgtggggttctttcaggattaacattgaacctatgtgcatttcaggctttctccagtctggctgaagctgcttatgaagctgcagacgttgctgatgatcaggaagaaccagctacttactgcttatcttcttcatttgaactcatagttcagaagctcctagagactacagacaggtaactgatatttcacagaaatgagtgacgtctttgcatccaagttctattgccttctgtgtggaggatatctagcttaatcatagaagcataatgagacaggacaagactctaccttctctagaggaattaaaagaaacccgctgggcgcggtggctcacgcctatattcccagcactttgggaggccaaggcggctggatcacctgaggtcaggagttcgaaagcagtctggccaacatggtgaaaccctgtctctactaaaaatacaaaaaattagccgggcgtgctggcgcatgcctgtagtcctagctacttgggaggctgaggcaggggaattgcttgaacctgggagatggaggttgcagtgagctgagactgcgccattgcactccagcctggacaacaagagtgggactcgtctcaaaaaaaagaattccatgattgattgatatggtttgtttaaagatggagaaagaaatgcagattccacctacccttagaattgtttcagtttacagctgcgatattgatatattgtgatttgttttctttctttgttgggggtactggctttggggcggttccttcattttgcagcattgacagttaacaggagtatttggttacaagcagaaatgatagtactcattatgaatttgattgccacaccaaatcaataactaccatttttattttattttattaattaattaattaatttattttgagacagagtgttgctctgttgcccaggctggagtgcagtggcgcaatctcagctcactgcaacctcctcaagcgattctcctgcctcagcctcctgggtagctgggactacaggtgcatgccaccatgcctggctaatttttgtatttttagtagagacagggtttcaccatgttggacaggatggtctcgatctcctgaccctcgtgatccacctgccttcgccccccaaagtgccaggattacaggcatgagccaccatgcccggccaactaccatatttttatataggatgaagaacttggggtaaatacagttgacttagaaacaagcttttgaaatgttgtttaaagggattataagttggagacaacctttaacaatttatgttttgtatgagctatacctaaagtcatgagcaaagtaaaccttcaggaagagagctgagcacaaaatcttccttttttttttttttgagacagtcttctcttgtcacccaggctagagtgcaattgtgcaatcttggctcactgcaacctcctgggttcaagtgattctcgtacttcagcctcccgagtagctggtactaaaggtgcccaccaacatgcctggctaatttttgtatttttagtagagatggggtttcgccatgttggccaggctggtcacaaactcctgacacctcaggtgatctgcccaccttggcctcccaaagtgctgggattgtaggcctgagccactgtgcccatcaaaaaaaaaatcttccatttaactagttcatgtccatgcctctttgagattatatatgaagacatcttttttaaatgaatgaagaaaattggggtatttttttttttctgggacggagtttcggtcttgttgctcaggctggagtgcggtctcggcccactgcaacctccacctcccaggttcaaggaattctcgtgcctcagcctcctgagtagctaggattacaggcacaagccactacacctggctaatttttatatttttagtagaggtggggtttcaccatgttgaccaggctggtctcaaactgacctcaagtgatccgcctgcctcagcctcctaaattgctgggattataggcatgagccatcacgtctagccaggaaaattggggtattttcttcatagcacttcagacaacctgttaaattgttcacatgattttttaccatttcaaaccattttttcctctataattttagcccatttccaaaagggccattctaaattttaactgtctggagaccataatgaacatagccattggctcaaaggacttgaagatttcattcttggatattgtgttttcaaactcaaaccaggtctgcagacataccggttcctgagttcttatttttggcaagacattgtctatgttcttccctgtccttttcatttgaggctttaagattttcgctgtgttctttacagacctgatggacaccagaacaacctgaggagttctgcatatgaatctctgatggaaattgtgaaaaacagtgccaaggattgttatcctgctgtccagaaaacgactttggtcatcatggaacgactgcaacaggttcttcagatggaggtgagacctaagagtgcccctgactatgggtgggaattgggtagtacttttgacacctaggtctgttttccagactgttctgtctttttagtgtttaagtatatattttctcagaaagataataaagcttatacaaaaaacattgcaccttaacgttagcattgtttgtcatggtttactcatatatgtgttacactatatgtattatgggttttttgttgctgttgtttactttcctatgttagtattagggaagattattaaatggtcccagcaaaagtggaaggttttcatgtagagtatgttttcttattttctttgtagtcacatatccagagcacatccgatagaatccagttcaatgaccttcagtctttactctgtgcaactcttcaggtatggtggtgccttatgacttaataactccaggttggagaattattagtatctcagtataacaagttcgtgtacacacagaactcgaaaatggtatagatgatgcggatcagaagctgttctcagaaggctttggtctgtgattggttgattgggagaggaattccccacctgccttacctgtctgtctagaaagattcaaatcctacttatttacagatggtctagatgtaatcttgataaaatcaaaccaacttgacttctcctaattcaacatacactcctcagacctctcttcctcactcgtttgtttcaactaatgtcactgtgtagagaaggaaactacttaatgtgtgatggttccttccagatgtatagctcatttgtgttggcagcttgaatggttttggtttttttattttgaaaaccaaaaaactcttggtttttcattaggttattcaagcctagctcagtcagatttggttcccagctatagttcacttggctaaaaataaagccttgaatttgtaccgtcatcttttgaaacatttgctgtttgacctaatgtcagtgacattagttgaaacaaacgagtgaggaaggaatgtttgatgggagaagtcaggttggtttgattttatcaagtttatttctaggtcatctgtaaataggtaggatataggaagggttgctttttgtttgttttatgaataagagctctaaggtgatagggccttctctaaagctgaagtaatttaactatcattccagtaagactggactatggcggctaccagcagggatttgtcagacagtaagacaaatgaaattgagaggacatgaccttctgcacaacggaggatcagctcacgtttgttctgaattgagaaacaggagaaatgttaaaatgtattgctgatgattggtactgtcaatgtttttgtgtataaaatacatttggcattcccaaaattaaaaaatatcaagggacttaattgattttaaaaagaaaaggtatagtgttctgattgggagatttggaatcaactgatcttgaactcttactcatttcacagaatgttcttcggaaagtgcaacatcaagatgctttgcagatctctgatgtggttatggcctccctgttaaggatgttccaaagcacagctgggtctgggggagtacaagaggatgccctgatggcagttagcacactggtggaaggtcggtgagaaatactgtctggtcagggaatgtctttggaatgtaggcatttcagtggccttaaataattgtcacccaggctggagtgcagtggcacgatcttggcgcactgcagccttgaaatcgtgggctcacatgatccttccacttcagtgcccccacagtagctgggactaacagatgcacaccaccatgcccagctaatttttatatttttggtagagatggagtttcgccatgttgcccagactggtcttgaactcctgagtcaagtgatcctcctgcctcagcctcccagagtgctaggattatagatgtgagccactgggcccagcttaattttgtttgtgtgtgaagatagggtctcactatattgctcaggctggtctcaaactcctgggcctccttgtcagagcattaaagaatttttgactatagaaagcatagtccttttactggggcatgagtcacttcaaagttagattgaacttaagtgcacaccacttaaatttgtataactgccttgtcagtccatttaaatggggagccagtttgcaacggagattggcagaggtgttgttttttttttgttttttttttttgtttgttttttttttgagacttgttctgttgcccaggatggagtgcagtggcaccatcttggctcaccacagcctccacctcccaggttcaagcaattctcctgcctcagccttctgagtagctgggattataggcatgagccactgtgccctgctaaaagtttctattttctttcctggtacttgtcatcacctggtttggtttgtagtgctttggactaagattgacacatcatggtgcctggtatgggatgaaatgaaacattgagcgagttctaggaattgattttctgatttttacatgtctgactgcaaaattggtttggggaagccatatctgacttaagactctttgaaggggcattacgaagcactttaggaatctgatatgccttttcaggggtggcctgtaagtacattgctaaggccatttacctgaggaccactctcctgaggactagacctatttttggcataaacagcctatgtccaactggtctgtcaacatgtgaccactcctctgaaagggcaaagaagttaattttggctcctggagtggctgatttggatctgaagcccagtgctgcttttcctggctgtggcttgtttagcccttgatggaattgcctaaggaccctgttttgaagctggcttgcagaaaggacatgctattatcagatgaggaggtggacaagagtcagtattgctggttcagcccatttaaaattaaccttgacattccttgagggtcataccacttggttgtattagtcagagtaaagccctattctgtggacagtgggcattgtctctgtggcgtatgaattagggcccttccagcagtaataaatttggcttatgcaagcctttaatgtcttcatgatggaatcggtaactaaagcacatttcacccaacctgttgagtggagcgagtacattttgggagaggtaggatgggttatttctgcctgcctctgtgttaacccgtggtgctgtcattggctaatagcttatttcattacagtgttgggtggtgaattcctcaagtacatggaggcctttaaacccttcctgggcattggattaaaaaattatgctgaataccaggtaggatgtgcttttcaaaatagtatgttcccatttatatctgacagtcactgtagtgcacgcaaaaccaggttcttatagcttaagtagtttttcctgatacattgtcctaaaaggcaagctactttattcattgcctgaacgtttgaactggaagtagtccatgaaaaacaggatattagatgtaccagataacggtggacaagatattagatgtaacagataatggtggacaagatgactgtttatttgcttagacagtactaatgcaggagcagctataaagttgagctattagcaccctggagagcaaggctttttttttttttttttttttaactttatcagtgatctctctcggatagtctttgttccctgcctgccatgttggttgttgaaaaattaatctcggcagagggatttaactctaggttcaagtgataaaagctcagcagctagttaaaaataatatcttgccccagcaggcagccttttctgttagaagattatttccttgattcttggcaggtttgtttggcagctgtgggcttagtgggagacttgtgccgtgccctgcaatccaacatcatacctttctgtgacgaggtgatgcagctgcttctggaaaatttgggggtgagtatctacacacaatctaattaaccagtcttctttgaagaaaacaacagttggaaagatagttaaatatcgacaggctgggcgcagtggcctgtaatcccagcattttgggaggccgaggcaggccaggagttcgagaccaacctggacaacatggtgaaaccccgtctgtactgtagatacaaaaaaaattagccgggcgtgatggcaggcgcttgtaatcccagctactcggaaggctgaggcaggataatcgcttgtacccgggaggtggacgttgcagtgagccaagatcacgccattgcactccagcctgggcaagaagagccaaactccgtctcaaaaaaaaaaaaaaaaaaaaaaaatcagtgacagggagctgtaagtttctagaacattggctttgggcttataaagaggggagttgttcatttcacagatgactctgaagaaagattgtaaagttaaaggaatgtgtgctctattagagatttttaaaacaaaacagtaaaatgcaaaggaaaagtaaatacagttgttccttgacttatgatggagttaggtcccaataaacacattgtaaagtggagaaatcatcaaaccatcatgagcaggggaccatttgtatattatacctctctccagagatagccatcattaattattgtacatgtgtgttctcagacaagtcacttgattcttaagtcagtctcctcatgtgtaaagtgggaataccaatacctgggctagcttcttagagttggtgtgaggtgcaaatgggaaaggttttgtaagctataaaggaccatccaaatatttaaaatcaatagttgcttgttagaaatgaaattttcatgaatctttggaccaaacaagttttgacttaattcacttttccttttgttccttgtcagaatgagaacgtccacaggtctgtgaagccgcagattctgtcagtgtttggtgatattgcccttgctattggaggagagtttaaaaaatacttagaggttgtattgaatactcttcagcaggcctcccaagcccaggtggacaaggtaagcttaaagctatcttggctgttctttaagtctagctctaattggagggactattgacaaacatgcagctaaaagtgatcagtgtgatgtaggttctgttctttgtgtcttacagtcagactatgacatggtggattatctgaatgagctaagggaaagctgcttggaagcctatactggaatcgtccagggattaaagggggatcaggagaacgtacaccgttgagtatacaacccagttcccttcgtccgctcgccaatgtgcacttagccaagtgggctatgtctgtcattctgtagctcgcttgtgaacctagtgcctgttgcttaaaaggctgggagaagggggagcagtgccctaatgaagagagtggcttggggaaaactgtagactactgtttttgctctgcttcttctttcttttttttgttttgagacggagtctcactctgttgcccaggctggagtgcagtcgtgcaatctcggctcactgcaacctccacctcccaggttcaagcagttctcctgcctcagcctcctgagtagctggaactatacacatctgccactatgcctggctaatttttatatttttagtagaggcaagctttcaccttgttggtcaggctggtcttgaactcctgatctcaattgatccacccgccttggtctcccaaagtgctgggattacaggcttgagccactgtgcccagccttttaaatttattttattttatttttattttttggagacagtctcactctcacccaagctggagtgcagtggagcgatcacagctcactgcagtcttcacttcctgggttcaagtgattcttatgcctcagcttcctgagtagctgggactacaggcacacaccaccatgcccagctattttttttttttttgtattttagtagagatgggatttcaccatgttttgcaggctgctctcgaactcctgagctcaggcaatctcccaccttgggctcccaaagtgatgggatttcaggcgtgagccactgcacccagccctctgcttctttttctcatatttcttgagtattacaagggatgggattcagcaaaaatgttggggggaagaaacccaacataaatgcttcctgtatcaaccatgagtggcaggtcccctacccctttcccatccccacaagctaaattggaggactggggagtcataattcccgttacgtgttcttgttgctgattggggaaattttttacttcaccccccttggtatcattagctcaggaaaaagttaaatttgtttcttctatatttgcctataggaagaggaatatttgtctcttctgtcgacttgaggaacgacacattaatcaaaggaagaataatttgatataactatatgcatctagttatccagcttggaccttgtatgataggggtataatagttggaaattttgaaaaaggatgtagtcctgccatatgagggacagctgcatcagaccttctctctcttttttttttcttttttttttgagatggaatcttgctctgtcgcctaggctggagcgcagtggcgcaatctcggctcactgcaagctccgcctcctgggttcacgccattttcctacctcagcctcctgagtagctgggactacaggcgcccgccaccacgcccggctaatttttttgtatttttagtagagacggggtttcaccgagttagccaggatggtctcgatcttctgaccttgtgatccacccgcctgggcctcctaaagtgctgggtttacaggcatgagccaccgcacccgaccaataccttctctctcttttatagcggatgtgatgctggtacaacccagagtagaatttattctgtctttcattgaccacattgctggagatgaggatcacacagatggagtagtagcttgtgctgctggactaatagggtaagttataccctgcttctaagagctgaatagaacttctcacagaaaatgagaaaacatggagtaaggagttttgagagtatcgcggatggcaacaattcacttttttggcacagagatttctttgcagaacgcttcatgtcctgttttgagtgttcacatgatagtttattccagaccctcaaggtgtctgtattacaccccattaaactctgatgttggtcaacaattgcctctgtctagtgacctctactgagggttttatttatctttgaaatttgctaagaaacccatagcactggtttggaaggctcaaaacattatactggtatggggctaggagctcattctcagctgtgtttgttttgcacagggacttatgtacagcatttgggaaggatgtactgaaattagtagaagctaggccaatgatccatgaattgttaactgaagggcggagatcgaagactaacaaagcaaaaacccttgctacatgggcaacaaaagaactgaggaaactgaagaaccaagcttggtaagatcttgcctccactgtcctctttcttctacttcctggaggaggggggtatgttttctttaggccattctggcaagcactgccttctggcattttttttgtttgtactttttcccatgtaggtgcttctgagtcaggcagcctcagtttttccttgagccaaatgtttgactcctcatagtgatggagagcagaacttttaaaactggaattcactgaaattccctgagtattttgggtcctaataaaatcatcagtaatgccatttccccctaattctcttctgttttctattcctttcctcatgccctattctttctttacagcagtgcttttagacgttgcctagctctagagaagatttccaaagtcaaatgtttttttgtgtgtgtgtgtgtgtgtgtgttttctttttgagacagagtctcactgtcgcccaggctggagtgcaatggcacaatctcggttcactgcaactgctgcctcctgggtttgagcaattctcctgtctcagcctcccgagtagctgggattacagtcacatgccaccacacccgactaattttctttttttcttttcttttcttcttctttttttttttttttttcttttggagacagtctcgctctgtcgcccaggctggagtgcagtggtgcgatctcagcttattgcaacctctgcctcccgggttcaagcagttctctgcctcagcctcctgagtagctaggattacaggtgccctaccaccaccacacctggctaatttttttgtatttttagtagaaacaggatttcaccatcttggccaggctggtcttgacctcctgacctcgtgatccacccacctcggcctcccaaagtactgggattacaggcgtaagctaccatgcctggcccagtttttgtatttttagtaaagatggggtttcaccatgtttgccaggctggtcttgaactcctgattttaggtgatccacccacctcagcctcctaaattgctggaattataggtttttttttttttttttttttttttgtatttttagtagagatgggttttcaccatgttggccagactggtcctgacctcaggtgatccacctttgtcggtctcccaggtgtgcaccaccacaccaggccttggctcctactttgaaatgcaatcttgtttgtttggagacagagtctcctctgtcacccaggctggagtgcagtggtacaatcacacctcatagaagcctccagctcctgggcttaagtggccctcctgcctcagcctcccaggtggttgggactgcaggcaagcacctccatgactggctaatttttttttatttttagagacaagatctcctgttgcccaggctgggtttgaactcctgacctcaagaagttctccctccttggcctcccaaagtgctgagattaaaggcttgagccactgcacccagactgaaatacagttttaatttctttcactcttaattagttatcttactccacagatctcagtaaaattggctctttgagtttccctcgcaccctctgatgtaggtgttaataagagcaggtcaatggcacataggacaagaagaaagagtgtcaatccttgaaatgttgacaaattccattcaggcctaggagcatgtaattgtaggagtcagcattattggctctgttgggtatatgtgatctcaaagattgacctttttttccatctgttttcagatctgttaccattgggatgataacctgaggacccccactggaaatctcccatcttttgaaaaacctggaagtgaggagtgtgcacggatgctgaatgtttgggaatgagaggatgagtgagtgaggcttgaaaacacaccacattgaaaatcctgccacagcagcagccgcagccgccaacagcagcgctgttagtgagctaagtaagcactgacttcgtagaaaaccataacatcggccatcttggaaaagagaaaaacaatggagttacttatttaaaaaaaaagaaagaaagttatctcttcccaggagaggctagaagtagcttttctgtcttttggccagtgccgagtggaatgcctggtttgggggaggaggagggactgggttcagctgtggtgctttgttgtaaaaggcagcctggcctttgctactgaggagaaagatggagcctgggtctcaagcccaccttcgctgtacctttgccacatggtactgtatgcttgccagctagaaggagggtcagggattttttacagtctgagaatgagtgtgtgtgagtgaggcggtatccacattctcaacttcaagtcattgcagtttctttttcccagaaaacaaggggttagatgttgcatttcataaaactaaccgaagttctgtctactgatgcagcacaagagatgtaaaaaaaaaaaaaaaaaaaaaaaaaaaaacacacacacagaggaaagacgctctttaggttttgttttgttttttttttttggttttgttttttgttttttttactctagggaaaacactgacgaatggtcagagctcctatcctgatcttttcatcaaggcgcctttcctaataatatggttcaactgtgaatgtaaaagtgggggggaggggggagaaaaagaaaactctggcgttagaggatatagaaaaatataagtacaattgttacaaataacgcagacttcaaaaacaaaaaaatcacaacccaaacaaaccaaaatttaaatgatcagaattggcagcacaaagaaaacgccctctcctgacttgtattgtggcagtctgaacgcccccagaaaattgtgccaaagagtttagaaaaataaatatacaataaaagtaaacacatacacacaaaacagcaaacttcaggtaactattttggattgcaaacaggataaattaaatgttcaaacaatctgataaaataaccatttggaaactgcttggccttctgttcttttatttgattgactacaatgcggtattggtctcttgctgcacttcaaaagcaaccaacaaaacaaaaacaaaaaaaagtgtgtgtgtgtgaatacacacacacactaactagaagtcttgtgatgaaaatggcacttggaaaaggttttatttttccactgaagttgaaggttaataaaatggtgtcaaacgtcccctggtcacacacttgaatatttttttagaagtgtgatgtggtatgattaccataaatcagacttaattattttcccttttacaagggaacagggcatcctgaattttagagcctttcagcaataagaagggatgttggtgagctttgatcctcttttggttttgcagttgttaggagtttttgctggcattttgaatatgctgctttcagaaaaaccaaggaagttttaaaattgcttcctggtccttagaggactaaaaacaagaccctcattcccactttcatttccactctagcaaaaactgggcttgcgtttttctccaactcctcgtttatatcctcccttccatgtccaagccttccattcctaagtgggattggctcagttttgcccatccatatggcagcatctctaatagctcttgtacagggtatcagatattgtgccttttggtgccaggttcaaagtcaagtgccgatctatgaaccagtgtacaaaaaaaaaaaaatccaggtatttgaaggagagacgctccattgtgaataaagagctcataccagctcctaagccctattaagaagaggcctggtcctctaatgccttgtttccatttcagttgttctttgagagacagaatgatgtactaaccattcgtgattattaagatagggttgggtcagggcttagggagggggcagaaatattggggatagaaaaaaaatctgatcattcctcagtgctacccatttctgtcctgtgtgggctgcttagctagacagcaggagaataaagtacaccgagaaccataatgaaaaaaccttccgtgtgttttgtcatgttttgttccagggaagcagttgatgagtgctgttactaatgctttctcccagatccattcagtggtggagaggaggaaaatgggctggttggatgtggtcttggtgccttgcagttactctgcactggttatgcatttaattctcctcttttctagttaaccttttgccagtgggttttccatagtctgggtatttgtccttatatcagttataccacctaaggcaactgggtgcaaaatgcattctgttcactcactgtctgggccttccccaccctagtcttggcacattccttcaagaatgtagttaccgtctgcttgggaagatgtcagtgcaaatgtgaagataatgggcatcggactaggctttggtttgccacaagtggcagctgcctgtatcaattacatttattaattttgcttttcatttttcccagttctcctcaccccccctttgttgaaatgttggacttgctgtcagaggcaactgtaatattgccttagggacttgtggagaaggggaattgctcagtgtagtgttttaactttcagaaccaagcaatctatttactcttacaaatatttaagaagtgtgttagtccaactttaagaaaaatccaaactcatcagcttttgatagcatcttggtttttgaaacaacttcaatctgtaattggcattcagaatgcccttggcatgccagtctgtgatggcatttaagacctgtaaaacacttgagcccaactcgattaaccaaaaccgataaccaccacctttatcttctaaataaagtccgctttatttttattttcaacatcttgctgctttttttttttttttttgtcccaaatggtgtcacctccatggaggtgaaatggtttgaaagtcagaatgtgtggtgagaggtgtttgtgtatgtatgtgtgtggggaaaaggagggacacacatcttgaaatggatattacatagtgtaatgtgatatagatgaaacagtgtcctacaaatgaggtaaggaaaaagtatgcatggaggatgtttcgtgtttggagagtttgaagcattcctcatcagtaaaacaggaatactgactaaggttgttctgcaaattaaaacataaaatctcagtgtttaccatttttcacttcaggtgggccaagctggcaccttggaggccaggtggaactgcaggcttgcactgtgtttctgagtgtttgtattgggaccaggtatacggtaatggggtttcttgtgggagcagttgctccttctctgccatttgatgaactaattgcattcttttctcaaatctcaccttcagtggagaaatgttctcagtgaatcattgtcctctgtttgtgcctatttctcaagctaattccgtgtctaatggatcatccaaaagttggcctttcacttagttttcatcatgtatttcatttctacttgcatttccccccctcaagaaacttagaacactagtttgagatttaggagactaggccctttcctttaaccctgctgcttattagcgtagtggtgcctgcaggctagttcatggaaatacaccctttcttagttaagcaaagtaagggctgtagactcccttttctgattgtacaccctgttagtaaacttttgatcatgcataccccatgtgtttataaataacatacttggactactataaccacatattgtgtaatcataagacacaaaaatagaaagtaaaaagcaattacatgataaatagaagttctagtatttctaaatccaatttggaggttactgagttatagagagtaaatttttaccagactgcattaagtcctgaacagcaatgattcactgagaacatttctccactgaaggtgagacttgagaaaagaatgcaattagttcatcaaatggcagagaaggagcaactgctcccacaagaaacccggttaccgtatacctggtcccaatacaaacactcagaaacacagtgcaagcctgcagttccacctggcctccaaggtgccagcttggcccacctgaagtgaaaaatggtaaacactgagattttgtgttttaatttgtagaacaaccttagtattcctgttttactgatgaggaaggaagggcagaaagattgactcatcacaccaaggtcacttagagccagaattcggagcccggtctgtcaaatcaaggctttacacatttgccctggacagatgctatgagcctcttagtaataaaaaaacaaaggtccatattgcacatacttaggatatgccatccatttccttcccagcactatctaaaagtatattttaatttcgttgtttatctgttgccagttttccccgctataacgtaagttccctaatgcagtgaccttgactgtcttttagtatgctcagctgagagagcgcctgacatatagtagaccttcgataaatatttgttgaactaatgacatagtagagttcacagagttcctgtgatggcatcacttagcctttgaagggcaaagcatccagaaacctgggaatggcagggccacagaagacttctagctcttatctgctggatgacttcaggctaacttctcaaccttggattaactgatggaatgggaacaggattagtgaatagtcattatttacatgatgttctttttatgtgcttacaagatgctaggcctgtaataagttctttcatagagtaataaactttatcaacactataaggaaggcaccattttagtcccattttacaggaggaaatgtgaacaggctaagaaccttgcccaaagtcatgtgggctagcaagcagtcctgacctggatttgtacctctagcctacattgtgtgccagtgttgtaaatgagcttatagttatcaatcagagagaaccctggttgagattttggaattcaataacaaagccattttgtcttaattctacaataagttccattattaacctttggcaactgccagactcttaattgagtgtgtgtgtgtgagatcagtttctctcctaattggagtttgaatgtgtgtgtgatcagcttccctcctaattggagtttgaaccaaaccatctccctgcacttctgctccctttctctctaagctggaagcttttgggaaccagggctgggggaggggtggttgttggtgctcagtggccaaaaaggccattaggctgctgagtaagctccacatctgaattaccccagctctgtcagctgattgcatgcacagcacaggcaggaggccttcaaagcctgagctgttccctctcccaggtgctccttggccacaggttaccaagctgagctgtcctcagtgtgaaatgtacctttttgtctgaaaggaaagtacatctcagctttggcatatggcattagctctggatgcagaggggcagcctgtcaccatttccgaaggaaagagttcacaaatggctctgtgtgaataagctcttcatagcgatgagcaatgcctgctatgttctgggcattgcccttcaaaatattttagtctttcgagtatgaccttggacaaattctccaactcttctgattctcgatttcctcctgtaaaacagggatcccaatgaaagataatgcatacaaagtttttagcacaggaccttgaactcacattgattaaccaatcagctactactggccaggcgcggtgtatgcctgtaatcccagcactttgggaggccgatgtgggaggatcgcctagaagttggagaccagcctgggcaacatagcaagaccttgtctctacaaataataaaaaacattaggctgggcgtggtggctcacgcctgtaatcccagcactttgggaggctgaggcaggcggatcacctgaggtcaggagtttgagaccagcctggtcaacatggtgaaaccccatctctactactaatacaaaaattagctgggcatggtggtgcatgcctgtagtcccagctactcaggaggctgaggcagaaaaatcgcttgaacctgggaggcggaggttgcattgagctgagatcgcgccactgcactccagcccgggcaacaaagcaagactctgtctcacaaaacaaaaacaaaaacaaaaacaaaaaacaggctgggcgcagtggctcacgcctgtaatcccatcactttgggaggccgaggcaggcggatcacctgaggtcaggagttcaagaccagcctgaccaacatggtgaaaccccgtctcaactaaaaatacaaaattagctgggcgtgatggcacatgcctacaatcccagctactcaggaggccaaggcaggagaatcacttgaacctgggaggtggaggttgcggtgagctgagatcgcgccattgtactccagcctggacgacaagagcgaaactccatctcaaaaacaaaaacaaaaaaacacattagccaggtgtggtgggaggatgaggcaggaggatcacttgggcccaggcgatcaagtctgcagtgagatgtgattgcgctactgcacttaccaaacaactgtttacgtgccaggagacactggggatatagcagtgaataagcaaacaaaatcttcctgtggagctcacattctgatggataaataatcaatattcaataattcaatataactttttttttttttttttgagacggagtcttgctctgtcacccaggctggagtgcagtggcgcgatctcggctcactgcaagctccgcctcccgggttcacgccattctcctgcctcagcctcctgagtagctgggactacaggcgcccgccaccacgcccgggtgattttttgtatttttagtagagacggggtttcaccgtgttagccaggatggtttcgatctcctgcccttgtgatccacccgcttcggcctcccaaagtgctgggattacaggcgtaagccaccgcgcctgacctcaatataaccttttaaaaattctgtttgggagatagcagaaatgaacatggctgtggagaaaaatgaagcacatatggaattataaaaaacaaaaaacatctgggcgtggtggctcatgcctgtaatcccagcactttgggaggctgaggtgggggatcacctgaggttgggagtttgagaccagcctgaccaacatggagaaaccccatctctactaaaaatacaaaattagccaggcatggtggcacatgcctgtaatcccagctactcgggagactgaggcaggagaattgcttgaacccgggaggtggaggctgcggtgagccgcgatggtgccattgcactccagccagggcaacaagagtgaaactccgtctcaaaaaaaaaaaaaaaaaaaaccactctattccttcccaaaccctactaattcaattaggggctctgcattacctccacaggaatttggggacgtggtgaaggaatgtctttctaccactgccctaccctcccatctgatggaacacctgcagctgcagttggagtcccaggatgcttgcatggtgaatggcccactttctagggtctggaactggagggcgaaggtggcacctagatcctgcagtcacatggggctaatcaattttcctgcccgccagggttccatttgagtcatctgggttttattttgattcagcctctttaactggctgctaatgtcacctcctcctactcttttcaggcaataatgggacaggaaagacagcctccagagcaagagtcatgggagtgggagagtctccctggtggtttccaaggaggaaacactggcagggcctggctctgggggcctgcatttgcactgtctctcctaccttaacgattggaggtgggtcctctgttatcacacctgtgaaggccatttagaaatgttttacaactcatgcctgaccactgtccaccactttccccactgtcctcccactgtggctcctatccccttcaccatctcccctattattgtctccaccatgatgagccctgccaataccaggggctcttaaaagggattcagaccagctgggcatggtgtctcacgcctgtaatcccagcactttggaatgccgaggcaggcggatcacgaggtcaggagatcgagaccccatctctactaaaaatacaaaaaattagctgggcgtggtggcgggcgcctgtagttccagctactcaggaggctgaggcaggagaatggcatgaacctgggaggcggagcttgcagtgagcggagaccacgccactgcactccagcctgggtgacagagcgagactccgtctcataaaaaaataaaaataaaaataaaaagggtattcagaccaatgttcagctttctcagatgaggaaacaggcctagaaaagtgaagtagtcttaagtcacactgcctcatttatttattcattcaacaaagaacatactttcttactcttttaagatttagcttagccaggtgcggtggctcatgcctgtaatcacagcactttgggaggccgaggcaggtggatggcttgaacccaggattttgagagcagcctgggctacatggtgaaaccttgtctctacaaaaaatacaaaaattagccgggcgtgtggcatacgcctgtagtcccagctgaggcgcaagccaccacgcctggagactgaggtgggaggatcaccttagcccaggagggcgaagctgcagtgagccaaaattgcaccactgcactccagcctgggcgccagagaaagaccctgtcttttaaaaaaaaaaaattgtaagagctcatcaaggagaccttctctgaatactgtgaagcagatcccatcctcccattcttctctagtactgccccttggtgtttctttttatcctttatcacaatttccttccttccttctttccttctttcttttttttgagacggagtttcgctcttgtcacccaggctggagtgcaatggggtcacctcggttcactgcaacctctacctcctgggttcaagcaattcttctgcctcagcctcccgagtagctgggattacagggacccaccgtcatgcctggctaatttttgcatgtttagtagagacgggtttcaccatgttggtcaggctggtctcaaagtcctgacctcaggtgatctgcctgcctcagccccacaaagtgctgggattacaggcatgagccactgtgcctggtcctttatcacaatttctagtggttttacttattcatctttttatttttctgacttctctaccatactgcaagctctaagagagcaagagacatgtatacctgtcagagacatgttcagcactgtattctcagcacccagcacataatagatgttcaagaaatctttgccgaataaatatacaacgagcaggtaccaaccctcagggcaccttagaatacaaggatggatgggatataatctctgctctcagaactgcctggtatgagcagcagaactagaaatggagaatgcaatgagatcaggtccagattgggggagggggaggattttagggcacctaaaccaggcctaatggacttttgccaccaaccacctagaaccaaggatagaagcatttggctgcaccctgccaggtgactcaattaggccctgagcatccaagcagcagcagggggctgatgactcatcccagacagtgtgtgcttagagggtcctgggacccctttttccagtgagggagggcttgccagttggtcttatgggtcctgtttgtggccaagtccaaggtcaccgagggtcccagagacaaccctacacctcctagtctagcctccaatcttttgcctggtcccttgcttcagaagagatcttggggagtactagggaaaggaacatctgcctagcccttgggattagtggggtgacagatgtccccactggtttgccttcatatctagagggtagataggtcatcccacatggttcagagaaagctagtgcctcagagaacaagtggctgacctgccttcctgttctggactacaaacgggagccagtgctggcaggaaagactgaaagggaacccagcaggaggaggaggaaggaagccactgagaatccccccttctatgaagagaatgagtctagagctctggctggctctcctggtagaagctcacctctcagtccaattttctcccagcagtgaggaaagatggcagctgctgcttttcaaagctcagagagagcaagaaaccttttccttccatcctccccctcggagattcccacccccatcccacctcaggagccaaaaaggtaggctcaggttcccagcagtcttcgcagctaaggctgaatctgccaaaagcccccgcccagcttatcccctgcttccgggctttgcctccctgtccacagaggatgctcttcagccagagtgctccagggttcccctgatcattctctacctgcagctaggctgaccatgcctctgtccacattatttaatccaccaggcaatactcaaaatgacatcgttaacacttcctgagcattcgcaggctgctgtatttagttctgatccccattcttcctccatgagagtgcttaggtggggcatgatctccagcttagaaaggttaaggtaacttgcccaaggtcacacagcaggaaagtagcaaaaaacttgtttctcttgcccagcagtttggcaggtgctcaaataatctttgtgcacagggtgacatctgttgtttcttcatttccctgacctgtgggtacttgagggtggccggggagtggtgtgtggggagggagatggctgtccttcttcatgaatgaatctttgacctccttagtttactctcacttccaaagaagttacagctttaatctctctgtaccctatgttcaatgtatttatcgcagcaatgccccttttaccaagagcaacgaagagcaggtctaatgatttccttctcaaaagcgcaaagaccaaaaaaaaaaaaaaaaaagccaaataaatagccccacttcctccccaaatatacagcccataactaaacaaccaaaacaaccaaagcatcagccgggcccctgcactgaccgcagacgcccccaacacacgccaccacgccacactgcgccgggaggcgtcggggagggggcgccagcgcgggccgctggcgccgcagggagccggtgggctccgggcgcgctgccaggaagggccgcaccgtaggggccgccgcctctcgccacgtggtggnnnnnnnnnnnnnnnnnnnnnnnnnnnnnnnnnnnnnnnnnnnnnnnnnnnnnnnnnnnnnnnnnnnnnnnnnnnnnnnnnnnnnnnnnnnnnnnnnnnnnnnnnnnnnnnnnnnnnnnnnnnnnnnnnnnnnnnnnnnnnnnnnnnnnnnnnnnnnnnnnnnnnnnnnnnnnnnnnnnnnnnnnnnnnnnnnnnnnnnnnnnnnnnnnnnnnnnnnnnnnnnnnnnnnnnnnnnnnnnnnnnnnnnnnnnnnnnnnnnnnnnnnnnnnnnnnnnnnnnnnnnnnnnnnnnnnnnnnnnnnnnnncagagcgcggtaccaggggggtgggggcactggtgcccgtttggggagggagcaggcggagggggtaagctgcgattacaagcaggaaccggcagcagctgtgagtccccggctggggctagggctgggggaggggagcggcgcccgggctgggccccaggggtcgcggggtgggcaggaggaggcggcaggagggcggctggcagccgcacgggatggctgggagggtaaggggtccggtgtcggccgccctcatcccctcgcgtccccctccgccgccgttcctcaggccgcgccactcccggagccccttccccggccccgagagggtgtccgggggcccagggctcggccggttgtgggggagggggctgcgtggtctcggcccccgagaggggaggggcgacaatttctgtcggccgagcgaaaggggtttaaagggcggctcttaaaggggccgcaggaggggcccgggccgacagaggcactcaccccttccccagccgccttccattgcgctcacccgggcgctgggcccagagaggaatgcggaggaaggaggcatttgtggtgcggcctcggggacagagccccgccagcggggtgggcgcagaggggcgggcgggggtctgggggggtgtggtaagcgctggcgcgcggagctggggggaggggatggcgtgggaaggagagggttaaaggtggggccggccctacaaacgcgcgcacacactccttactcagacccagtcactcgcgtttccctggcacttagatgggcctgtgggtggcggaggggggggggtggattgaattggagcctgcgccggagccctttgcaccccaagctcctgcagcccgacctgggggccccgctgtctgaactcacagctccctgccgagccccctctccggggtgcacataacgctccagcgcgcgcacacacctcggacagtcccctcgcgtctcacgtgacacgcggcccggacgtgccaccctgcccacgcgctcacgcacgcgtgcacacaccagcctcctggtcgctgccccactccgtcccgacgcccctgcgaccccgaaggcactcattgactgacacacctacactcattcacagacgcacactccccccatacgccaaccccagacacacattcataaccaggcccgagagaagtacacacgcaccccctcactgcctactcctgctttcgggagcctgagtcattcctgccccctcgtagggttccccatttcccggtgcgcgggcaccctgagacag

SEQ ID NO: 2987 - DNA, 5779 bp, Homo sapiens
cctccgcctcccgagcaccagcgcgctctgaccgccacctccgccatggagctgatcaccattctcgagaagaccgtgtctcccgatcggctggagctggaagcggcgcagaagttcctggagcgtgcggccgtggagaacctgcccactttccttgtggaactgtccagagtgctggcaaatccaggaaacagtcaggttgccagagttgcagctggtctacaaatcaagaactctttgacatctaaagatccagatatcaaggcacaatatcagcagaggtggcttgctattgatgctaatgctcgacgagaagtcaagaactatgttttgcagacattgggtacagaaacttaccggcctagttctgcctcacagtgtgtggctggtattgcttgtgcagagatcccagtaaaccagtggccagaactcattcctcagctggtggccaatgtcacaaaccccaacagcacagagcacatgaaggagtcgacattggaagccatcggttatatttgccaagatatagacccagagcagctacaagataaatccaatgagattctgactgccataatccaggggatgaggaaagaagagcctagtaataatgtgaagctagctgctacgaatgcactcctgaactcattggagttcaccaaagcaaactttgataaagagtctgaaaggcactttattatgcaggtggtctgtgaagccacacagtgtccagatacgagggtacgagtggctgctttacagaatctggtgaagataatgtccttatattatcagtacatggagacatatatgggtcctgctctttttgcaatcacaatcgaagcaatgaaaagtgacattgatgaggtggctttacaagggatagaattctggtccaatgtctgtgatgaggaaatggatttggccattgaagcttcagaggcagcagaacaaggacggccccctgagcacaccagcaagttttatgcgaagggagcactacagtatctggttccaatcctcacacagacactaactaaacaggacgaaaatgatgatgacgatgactggaacccctgcaaagcagcaggggtgtgcctcatgcttctggccacctgctgtgaagatgacattgtcccacatgtcctccccttcattaaagaacacatcaagaacccagattggcggtaccgggatgcagcagtgatggcttttggttgtatcttggaaggaccagagcccagtcagctcaaaccactagttatacaggctatgcccaccctaatagaattaatgaaagaccccagtgtagttgttcgagatacagctgcatggactgtaggcagaatttgtgagctgcttcctgaagctgccatcaatgatgtctacttggctcccctgctacagtgtctgattgagggtctcagtgctgaacccagagtggcttcaaatgtgtgctgggctttctccagtctggctgaagctgcttatgaagctgcagacgttgctgatgatcaggaagaaccagctacttactgcttatcttcttcatttgaactcatagttcagaagctcctagagactacagacagacctgatggacaccagaacaacctgaggagttctgcatatgaatctctgatggaaattgtgaaaaacagtgccaaggattgttatcctgctgtccagaaaacgactttggtcatcatggaacgactgcaacaggttcttcagatggagtcacatatccagagcacatccgatagaatccagttcaatgaccttcagtctttactctgtgcaactcttcagaatgttcttcggaaagtgcaacatcaagatgctttgcagatctctgatgtggttatggcctccctgttaaggatgttccaaagcacagctgggtctgggggagtacaagaggatgccctgatggcagttagcacactggtggaagtgttgggtggtgaattcctcaagtacatggaggcctttaaacccttcctgggcattggattaaaaaattatgctgaataccaggtttgtttggcagctgtgggcttagtgggagacttgtgccgtgccctgcaatccaacatcatacctttctgtgacgaggtgatgcagctgcttctggaaaatttggggaatgagaacgtccacaggtctgtgaagccgcagattctgtcagtgtttggtgatattgcccttgctattggaggagagtttaaaaaatacttagaggttgtattgaatactcttcagcaggcctcccaagcccaggtggacaagtcagactatgacatggtggattatctgaatgagctaagggaaagctgcttggaagcctatactggaatcgtccagggattaaagggggatcaggagaacgtacacccggatgtgatgctggtacaacccagagtagaatttattctgtctttcattgaccacattgctggagatgaggatcacacagatggagtagtagcttgtgctgctggactaataggggacttatgtacagcatttgggaaggatgtactgaaattagtagaagctaggccaatgatccatgaattgttaactgaagggcggagatcgaagactaacaaagcaaaaacccttgctacatgggcaacaaaagaactgaggaaactgaagaaccaagcttgatctgttaccattgggatgataacctgaggacccccactggaaatctcccatcttttgaaaaacctggaagtgaggagtgtgcacggatgctgaatgtttgggaatgagaggatgagtgagtgaggcttgaaaacacaccacattgaaaatcctgccacagcagcagccgcagccgccaacagcagcgctgttagtgagctaagtaagcactgacttcgtagaaaaccataacatcggccatcttggaaaagagaaaaacaatggagttacttatttaaaaaaaaagaaagaaagttatctcttcccaggagaggctagaagtagcttttctgtcttttggccagtgccgagtggaatgcctggtttgggggaggaggagggactgggttcagctgtggtgctttgttgtaaaaggcagcctggcctttgctactgaggagaaagatggagcctgggtctcaagcccaccttcgctgtacctttgccacatggtactgtatgcttgccagctagaaggagggtcagggattttttacagtctgagaatgagtgtgtgtgagtgaggcggtatccacattctcaacttcaagtcattgcagtttctttttcccagaaaacaaggggttagatgttgcatttcataaaactaaccgaagttctgtctactgatgcagcacaagagatgtaaaaaaaaaaaaaaaaaaaaaaaaaaaaacacacacacagaggaaagacgctctttaggttttgttttgttttttttttttggttttgttttttgttttttttactctagggaaaacactgacgaatggtcagagctcctatcctgatcttttcatcaaggcgcctttcctaataatatggttcaactgtgaatgtaaaagtgggggggaggggggagaaaaagaaaactctggcgttagaggatatagaaaaatataagtacaattgttacaaataacgcagacttcaaaaacaaaaaaatcacaacccaaacaaaccaaaatttaaatgatcagaattggcagcacaaagaaaacgccctctcctgacttgtattgtggcagtctgaacgcccccagaaaattgtgccaaagagtttagaaaaataaatatacaataaaagtaaacacatacacacaaaacagcaaacttcaggtaactattttggattgcaaacaggataaattaaatgttcaaacaatctgataaaataaccatttggaaactgcttggccttctgttcttttatttgattgactacaatgcggtattggtctcttgctgcacttcaaaagcaaccaacaaaacaaaaacaaaaaaaagtgtgtgtgtgtgaatacacacacacactaactagaagtcttgtgatgaaaatggcacttggaaaaggttttatttttccactgaagttgaaggttaataaaatggtgtcaaacgtcccctggtcacacacttgaatatttttttagaagtgtgatgtggtatgattaccataaatcagacttaattattttcccttttacaagggaacagggcatcctgaattttagagcctttcagcaataagaagggatgttggtgagctttgatcctcttttggttttgcagttgttaggagtttttgctggcattttgaatatgctgctttcagaaaaaccaaggaagttttaaaattgcttcctggtccttagaggactaaaaacaagaccctcattcccactttcatttccactctagcaaaaactgggcttgcgtttttctccaactcctcgtttatatcctcccttccatgtccaagccttccattcctaagtgggattggctcagttttgcccatccatatggcagcatctctaatagctcttgtacagggtatcagatattgtgccttttggtgccaggttcaaagtcaagtgccgatctatgaaccagtgtacaaaaaaaaaaaaatccaggtatttgaaggagagacgctccattgtgaataaagagctcataccagctcctaagccctattaagaagaggcctggtcctctaatgccttgtttccatttcagttgttctttgagagacagaatgatgtactaaccattcgtgattattaagatagggttgggtcagggcttagggagggggcagaaatattggggatagaaaaaaaatctgatcattcctcagtgctacccatttctgtcctgtgtgggctgcttagctagacagcaggagaataaagtacaccgagaaccataatgaaaaaaccttccgtgtgttttgtcatgttttgttccagggaagcagttgatgagtgctgttactaatgctttctcccagatccattcagtggtggagaggaggaaaatgggctggttggatgtggtcttggtgccttgcagttactctgcactggttatgcatttaattctcctcttttctagttaaccttttgccagtgggttttccatagtctgggtatttgtccttatatcagttataccacctaaggcaactgggtgcaaaatgcattctgttcactcactgtctgggccttccccaccctagtcttggcacattccttcaagaatgtagttaccgtctgcttgggaagatgtcagtgcaaatgtgaagataatgggcatcggactaggctttggtttgccacaagtggcagctgcctgtatcaattacatttattaattttgcttttcatttttcccagttctcctcaccccccctttgttgaaatgttggacttgctgtcagaggcaactgtaatattgccttagggacttgtggagaaggggaattgctcagtgtagtgttttaactttcagaaccaagcaatctatttactcttacaaatatttaagaagtgtgttagtccaactttaagaaaaatccaaactcatcagcttttgatagcatcttggtttttgaaacaacttcaatctgtaattggcattcagaatgcccttggcatgccagtctgtgatggcatttaagacctgtaaaacacttgagcccaactcgattaaccaaaaccgataaccaccacctttatcttctaaataaagtccgctttatttttattttcaacat

SEQ ID NO: 2988 - protein, 860 aa, Homo sapiens
MELITIKTVSPDRLELEAAQKFLERAAVENLPTFLVELSRVLANPGNSQVARVAAGLQIKNSLTSKDPDIKAQYQQRWLAIDANARREVKNYVLQTLGTEYPSSASQCVAGIACAEIPVNQWPELIPQLVANVTNPNSTEHMKESTLEAIGYICQDIDPEQLQDKSNEILTAIIQGMRKEEPSNNVKLAATNALLNSLEFTKANFDKESHFIMQVVCEATQCPDTRVRVAALQNLVKIMSLYYQYMYMGPALFAITIEAMKSDIDEVQGIEFWSNVCDEEMDLAIEASEAAEQGRPPEHTSKFYAKGALQYLVPILTQTLTKQDENDDDDDWNPCKAAGVCLMLLATCCEDDIVPHVLPFIKEHIKNPDWRYRDAAVMAFGCIGPEPSQLKPLVIQAMPTLIELMKDPSVVVRDTAAWTVGRICELLPEAAINDVYLAPLLQCLIEGLSAEPRVNVCWAFSSLAEAAYEAADVADDQEEPATYCLSSSFELIVQKLLETTDRPDGHQNNLRSSAYESLMEIVKNSAKDCYPAVQKTTLVIMERLQQVLQMESHIQSTSDRIQFNDLQSLLCATLQNVLRKVQHQDALQISDVVMASLLRMFQSTAGSGGVQEDALMAVSTLVEVLGGEFLKYMEAFKPFLGIGLKNYAEYQVCLAAVGLVGDLCRALQSNIIPFCDEVMQLLLENLGNENVHRSVKPQILSVFGDIAIGGEFKKYLEVVLNTLQQASQAQVDKSDYDMVDYLNELRESCLEAYTGIVQGLKGDQENVHPDVMLVQPRVEFILSFIDHIAGDEDHTDGVVACAAGLIGDLCTAFGKDVLKLVEARPMIHELLTEGRRSKTNKAKTLATWATKELRKLKNQA

SEQ ID NO: 2989 - DNA, 5105 bp, Homo sapiens
cctccgcctcccgagcaccagcgcgctctgaccgccacctccgccatggagctgatcaccattctcgagaagaccgtgtctcccgatcggctggagctggaagcggcgcagaagttcctggagcgtgcggccgtggagaacctgcccactttccttgtggaactgtccagagtgctggcaaatccaggaaacagtcaggttgccagagttgcagctggtctacaaatcaagaactctttgacatctaaagatccagatatcaaggcacaatatcagcagaggtggcttgctattgatgctaatgctcgacgagaagtcaagaactatgttttgcagacattgggtacagaaacttaccggcctagttctgcctcacagtgtgtggctggtattgcttgtgcagagatcccagtaaaccagtggccagaactcattcctcagctggtggccaatgtcacaaaccccaacagcacagagcacatgaaggagtcgacattggaagccatcggttatatttgccaagatatagacccagagcagctacaagataaatccaatgagattctgactgccataatccaggggatgaggaaagaagagcctagtaataatgtgaagctagctgctacgaatgcactcctgaactcattggagttcaccaaagcaaactttgataaagagtctgaaaggcactttattatgcaggtggtctgtgaagccacacagtgtccagatacgagggtacgagtggctgctttacagaatctggtgaagataatgtccttatattatcagtacatggagacatatatgggtcctgctctttttgcaatcacaatcgaagcaatgaaaagtgacattgatgaggtggctttacaagggatagaattctggtccaatgtctgtgatgaggaaatggatttggccattgaagcttcagaggcagcagaacaaggacggccccctgagcacaccagcaagttttatgcgaagggagcactacagtatctggttccaatcctcacacagacactaactaaacaggacgaaaatgatgatgacgatgactggaacccctgcaaagcagcaggggtgtgcctcatgcttctggccacctgctgtgaagatgacattgtcccacatgtcctccccttcattaaagaacacatcaagaacccagattggcggtaccgggatgcagcagtgatggcttttggttgtatcttggaaggaccagagcccagtcagctcaaaccactagttatacaggctatgcccaccctaatagaattaatgaaagaccccagtgtagttgttcgagatacagctgcatggactgtaggcagaatttgtgagctgcttcctgaagctgccatcaatgatgtctacttggctcccctgctacagtgtctgattgagggtctcagtgctgaacccagagtggcttcaaatgtgtgctgggctttctccagtctggctgaagctgcttatgaagctgcagacgttgctgatgatcaggaagaaccagctacttactgcttatcttcttcatttgaactcatagttcagaagctcctagagactacagacagacctgatggacaccagaacaacctgaggagttctgcatatgaatctctgatggaaattgtgaaaaacagtgccaaggattgttatcctgctgtccagaaaacgactttggtcatcatggaacgactgcaacaggttcttcagatggagtcacatatccagagcacatccgatagaatccagttcaatgaccttcagtctttactctgtgcaactcttcagaatgttcttcggaaagtgcaacatcaagatgctttgcagatctctgatgtggttatggcctccctgttaaggatgttccaaagcacagctgggtctgggggagtacaagaggatgccctgatggcagttagcacactggtggaagtgttgggtggtgaattcctcaagtacatggaggcctttaaacccttcctgggcattggattaaaaaattatgctgaataccaggtttgtttggcagctgtgggcttagtgggagacttgtgccgtgccctgcaatccaacatcatacctttctgtgacgaggtgatgcagctgcttctggaaaatttggggaatgagaacgtccacaggtctgtgaagccgcagattctgtcagtgtttggtgatattgcccttgctattggaggagagtttaaaaaatacttagaggttgtattgaatactcttcagcaggcctcccaagcccaggtggacaagtcagactatgacatggtggattatctgaatgagctaagggaaagctgcttggaagcctatactggaatcgtccagggattaaagggggatcaggagaacgtacacccggatgtgatgctggtacaacccagagtagaatttattctgtctttcattgaccacattgctggagatgaggatcacacagatggagtagtagcttgtgctgctggactaataggggacttatgtacagcatttgggaaggatgtactgaaattagtagaagctaggccaatgatccatgaattgttaactgaagggcggagatcgaagactaacaaagcaaaaacccttgctacatgggcaacaaaagaactgaggaaactgaagaaccaagcttgatctgttaccattgggatgataacctgaggacccccactggaaatctcccatcttttgaaaaacctggaagtgaggagtgtgcacggatgctgaatgtttgggaatgagaggatgagtgagtgaggcttgaaaacacaccacattgaaaatcctgccacagcagcagccgcagccgccaacagcagcgctgttagtgagctaagtaagcactgacttcgtagaaaaccataacatcggccatcttggaaaagagaaaaacaatggagttacttatttaaaaaaaaagaaagaaagttatctcttcccaggagaggctagaagtagcttttctgtcttttggccagtgccgagtggaatgcctggtttgggggaggaggagggactgggttcagctgtggtgctttgttgtaaaaggcagcctggcctttgctactgaggagaaagatggagcctgggtctcaagcccaccttcgctgtacctttgccacatggtactgtatgcttgccagctagaaggagggtcagggattttttacagtctgagaatgagtgtgtgtgagtgaggcggtatccacattctcaacttcaagtcattgcagtttctttttcccagaaaacaaggggttagatgttgcatttcataaaactaaccgaagttctgtctactgatgcagcacaagagataaaaaaaaaaaaaaacacacacacagaggaaagacgctctttaggttttgttttgttttttttttttggttttgttttttgttttttttactctagggaaaacactgacgaatggtcagagctcctatcctgatcttttcatcaaggcgcctttcctaataatatggttcaactgtgaatgtaaaagtgggggggaggggggagaaaaagaaaactctggcgttagaggatatagaaaaatataagtacaattgttacaaataacgcagacttcaaaaacaaaaaaatcacaacccaaacaaaccaaaatttaaatgatcagaattggcagcacaaagaaaacgccctctcctgacttgtattgtggcagtctgaacgcccccagaaaattgtgccaaagagtttagaaaaataaatatacaataaaagtaaacacatacacacaaaacagcaaacttcaggtaactattttggattgcaaacaggataaattaaatgttcaaacaatctgataaaataaccatttggaaactgcttggccttctgttcttttatttgattgactacaatgcggtattggtctcttgctgcacttcaaaagcaaccaacaaaacaaaaacaaaaaaaagtgtgtgtgtgtgaatacacacacacactaactagaagtcttgtgatgaaaatggcacttggaaaaggttttatttttccactgaagttgaaggttaataaaatggtgtcaaacgtcccctggtcacacacttgaatatttttttagaagtgtgatgtggtatgattaccataaatcagacttaattattttcccttttacaagggaacagggcatcctgaattttagagcctttcagcaataagaagggatgttggtgagctttgatcctcttttggttttgcagttgttaggagtttttgctggcattttgaatatgctgctttcagaaaaaccaaggaagttttaaaattgcttcctggtccttagaggactaaaaacaagaccctcattcccactttcatttccactctagcaaaaactgggcttgcgtttttctccaactcctcgtttatatcctcccttccatgtccaagccttccattcctaagtgggattggctcagttttgcccatccatatggcagcatctctaatagctcttgtacagggtatcagatattgtgccttttggtgccaggttcaaagtcaagtgccgatctatgaaccagtgtacaaaaaaaaaaaaatccaggtatttgaaggagagacgctccattgtgaataaagagctcataccagctcctaagccctattaagaagaggcctggtcctctaatgccttgtttccatttcagttgttctttgagagacagaatgatgtactaaccattcgtgattattaagatagggttgggtcagggcttagggagggggcagaaatattggggatagaaaaaaaatctgatcattcctcagtgctacccatttctgtcctgtgtgggctgcttagctagacagcaggagaataaagtacaccgagaaccataatgaaaaaaccttccgtgtgttttgtcatgttttgttccagggaagcagttgatgagtgctgttactaatgctttctcccagatccattcagtggtggagaggatggttatgcatttaattctcctcttttctagttaaccttttgccagtgggttttccatagtctgggtatttgtccttatatcagt

SEQ ID NO: 2990 - protein, 860 aa, Homo sapiens; identical to SEQ ID NO: 2988

SEQ ID NO: 2991 - DNA, 5015 bp, Homo sapiens
cctccgcctcccgagcaccagcgcgctctgaccgccacctccgccatggagctgatcaccattctcgagaagaccgtgtctcccgatcggctggagctggaagcggcgcagaagttcctggagcgtgcggccgtggagaacctgcccactttccttgtggaactgtccagagtgctggcaaatccaggaaacagtcaggttgccagagttgcagctggtctacaaatcaagaactctttgacatctaaagatccagatatcaaggcacaatatcagcagaggtggcttgctattgatgctaatgctcgacgagaagtcaagaactatgttttgcagacattgggtacagaaacttaccggcctagttctgcctcacagtgtgtggctggtattgcttgtgcagagatcccagtaaaccagtggccagaactcattcctcagctggtggccaatgtcacaaaccccaacagcacagagcacatgaaggagtcgacattggaagccatcggttatatttgccaagatatagacccagagcagctacaagataaatccaatgagattctgactgccataatccaggggatgaggaaagaagagcctagtaataatgtgaagctagctgctacgaatgcactcctgaactcattggagttcaccaaagcaaactttgataaagagtctgaaaggcactttattatgcaggtggtctgtgaagccacacagtgtccagatacgagggtacgagtggctgctttacagaatctggtgaagataatgtccttatattatcagtacatggagacatatatgggtcctgctctttttgcaatcacaatcgaagcaatgaaaagtgacattgatgaggtggctttacaagggatagaattctggtccaatgtctgtgatgaggaaatggatttggccattgaagcttcagaggcagcagaacaaggacggccccctgagcacaccagcaagttttatgcgaagggagcactacagtatctggttccaatcctcacacagacactaactaaacaggacgaaaatgatgatgacgatgactggaacccctgcaaagcagcaggggtgtgcctcatgcttctggccacctgctgtgaagatgacattgtcccacatgtcctccccttcattaaagaacacatcaagaacccagattggcggtaccgggatgcagcagtgatggcttttggttgtatcttggaaggaccagagcccagtcagctcaaaccactagttatacaggctatgcccaccctaatagaattaatgaaagaccccagtgtagttgttcgagatacagctgcatggactgtaggcagaatttgtgagctgcttcctgaagctgccatcaatgatgtctacttggctcccctgctacagtgtctgattgagggtctcagtgctgaacccagagtggcttcaaatgtgtgctgggctttctccagtctggctgaagctgcttatgaagctgcagacgttgctgatgatcaggaagaaccagctacttactgcttatcttcttcatttgaactcatagttcagaagctcctagagactacagacagacctgatggacaccagaacaacctgaggagttctgcatatgaatctctgatggaaattgtgaaaaacagtgccaaggattgttatcctgctgtccagaaaacgactttggtcatcatggaacgactgcaacaggttcttcagatggagtcacatatccagagcacatccgatagaatccagttcaatgaccttcagtctttactctgtgcaactcttcagaatgttcttcggaaagtgcaacatcaagatgctttgcagatctctgatgtggttatggcctccctgttaaggatgttccaaagcacagctgggtctgggggagtacaagaggatgccctgatggcagttagcacactggtggaagtgttgggtggtgaattcctcaagtacatggaggcctttaaacccttcctgggcattggattaaaaaattatgctgaataccaggtttgtttggcagctgtgggcttagtgggagacttgtgccgtgccctgcaatccaacatcatacctttctgtgacgaggtgatgcagctgcttctggaaaatttgggggtgaaggttgtattgaatactcttcagcaggcctcccaagcccaggtggacaagtcagactatgacatggtggattatctgaatgagctaagggaaagctgcttggaagcctatactggaatcgtccagggattaaagggggatcaggagaacgtacacccggatgtgatgctggtacaacccagagtagaatttattctgtctttcattgaccacattgctggagatgaggatcacacagatggagtagtagcttgtgctgctggactaataggggacttatgtacagcatttgggaaggatgtactgaaattagtagaagctaggccaatgatccatgaattgttaactgaagggcggagatcgaagactaacaaagcaaaaacccttgctacatgggcaacaaaagaactgaggaaactgaagaaccaagcttgatctgttaccattgggatgataacctgaggacccccactggaaatctcccatcttttgaaaaacctggaagtgaggagtgtgcacggatgctgaatgtttgggaatgagaggatgagtgagtgaggcttgaaaacacaccacattgaaaatcctgccacagcagcagccgcagccgccaacagcagcgctgttagtgagctaagtaagcactgacttcgtagaaaaccataacatcggccatcttggaaaagagaaaaacaatggagttacttatttaaaaaaaaagaaagaaagttatctcttcccaggagaggctagaagtagcttttctgtcttttggccagtgccgagtggaatgcctggtttgggggaggaggagggactgggttcagctgtggtgctttgttgtaaaaggcagcctggcctttgctactgaggagaaagatggagcctgggtctcaagcccaccttcgctgtacctttgccacatggtactgtatgcttgccagctagaaggagggtcagggattttttacagtctgagaatgagtgtgtgtgagtgaggcggtatccacattctcaacttcaagtcattgcagtttctttttcccagaaaacaaggggttagatgttgcatttcataaaactaaccgaagttctgtctactgatgcagcacaagagataaaaaaaaaaaaaaacacacacacagaggaaagacgctctttaggttttgttttgttttttttttttggttttgttttttgttttttttactctagggaaaacactgacgaatggtcagagctcctatcctgatcttttcatcaaggcgcctttcctaataatatggttcaactgtgaatgtaaaagtgggggggaggggggagaaaaagaaaactctggcgttagaggatatagaaaaatataagtacaattgttacaaataacgcagacttcaaaaacaaaaaaatcacaacccaaacaaaccaaaatttaaatgatcagaattggcagcacaaagaaaacgccctctcctgacttgtattgtggcagtctgaacgcccccagaaaattgtgccaaagagtttagaaaaataaatatacaataaaagtaaacacatacacacaaaacagcaaacttcaggtaactattttggattgcaaacaggataaattaaatgttcaaacaatctgataaaataaccatttggaaactgcttggccttctgttcttttatttgattgactacaatgcggtattggtctcttgctgcacttcaaaagcaaccaacaaaacaaaaacaaaaaaaagtgtgtgtgtgtgaatacacacacacactaactagaagtcttgtgatgaaaatggcacttggaaaaggttttatttttccactgaagttgaaggttaataaaatggtgtcaaacgtcccctggtcacacacttgaatatttttttagaagtgtgatgtggtatgattaccataaatcagacttaattattttcccttttacaagggaacagggcatcctgaattttagagcctttcagcaataagaagggatgttggtgagctttgatcctcttttggttttgcagttgttaggagtttttgctggcattttgaatatgctgctttcagaaaaaccaaggaagttttaaaattgcttcctggtccttagaggactaaaaacaagaccctcattcccactttcatttccactctagcaaaaactgggcttgcgtttttctccaactcctcgtttatatcctcccttccatgtccaagccttccattcctaagtgggattggctcagttttgcccatccatatggcagcatctctaatagctcttgtacagggtatcagatattgtgccttttggtgccaggttcaaagtcaagtgccgatctatgaaccagtgtacaaaaaaaaaaaaatccaggtatttgaaggagagacgctccattgtgaataaagagctcataccagctcctaagccctattaagaagaggcctggtcctctaatgccttgtttccatttcagttgttctttgagagacagaatgatgtactaaccattcgtgattattaagatagggttgggtcagggcttagggagggggcagaaatattggggatagaaaaaaaatctgatcattcctcagtgctacccatttctgtcctgtgtgggctgcttagctagacagcaggagaataaagtacaccgagaaccataatgaaaaaaccttccgtgtgttttgtcatgttttgttccagggaagcagttgatgagtgctgttactaatgctttctcccagatccattcagtggtggagaggatggttatgcatttaattctcctcttttctagttaaccttttgccagtgggttttccatagtctgggtatttgtccttatatcagt

SEQ ID NO: 2992 - protein, 832 aa, Homo sapiens
MELITIKTVSPDRLELEAAQKFLERAAVENLPTFLVELSRVLANPGNSQVARVAAGLQIKNSLTSKDPDIKAQYQQRWLAIDANARREVKNYVLQTLGTEYPSSASQCVAGIACAEIPVNQWPELIPQLVANVTNPNSTEHMKESTLEAIGYICQDIDPEQLQDKSNEILTAIIQGMRKEEPSNNVKLAATNALLNSLEFTKANFDKESHFIMQVVCEATQCPDTRVRVAALQNLVKIMSLYYQYMYMGPALFAITIEAMKSDIDEVQGIEFWSNVCDEEMDLAIEASEAAEQGRPPEHTSKFYAKGALQYLVPILTQTLTKQDENDDDDDWNPCKAAGVCLMLLATCCEDDIVPHVLPFIKEHIKNPDWRYRDAAVMAFGCIGPEPSQLKPLVIQAMPTLIELMKDPSVVVRDTAAWTVGRICELLPEAAINDVYLAPLLQCLIEGLSAEPRVNVCWAFSSLAEAAYEAADVADDQEEPATYCLSSSFELIVQKLLETTDRPDGHQNNLRSSAYESLMEIVKNSAKDCYPAVQKTTLVIMERLQQVLQMESHIQSTSDRIQFNDLQSLLCATLQNVLRKVQHQDALQISDVVMASLLRMFQSTAGSGGVQEDALMAVSTLVEVLGGEFLKYMEAFKPFLGIGLKNYAEYQVCLAAVGLVGDLCRALQSNIIPFCDEVMQLLLENLGVKVVLNTLQQASQAQVDKSDYDMVDYLNELRESCLEAYTGIVQGLKGDQENVHPDVMLVQPRVEFILSFIDHIAGDEDHTDGVVACAAGLIGDLCTAFGKDVLKLVEARPMIHELLTEGRRSKTNKAKTLATWATKELRKLKNQA

SEQ ID NO: 2993 - DNA, 6193 bp, Homo sapiens
gcccttcgacgctgagcgcctggccagttagggattccgcgtggccaggacaacggccaatcgtcgtggagcgcggcgcctccgcggagaggtccggtccgaatatccctccgccttcctccctccctcgctccctccctgcgcgccgcctctcactcacagcctcccttccttctttctccctccgcctcccgagcaccagcgcgctctgagctgcccccagggtccctcccccgccgccagcagcccatttggagggaggaagtaagggaagaggagaggaaggggagccggaccgactacccagacagagccggtgaatgggtttgtgggtgacccccgccccccaccccaccctcccttcccacccgacccccaacccccatccccagttcgagccgccgcccgaaaggccgggccgtcgtcttaggaggagtcgccgccgccgccacctccgccatggagctgatcaccattctcgagaagaccgtgtctcccgatcggctggagctggaagcggcgcagaagttcctggagcgtgcggccgtggagaacctgcccactttccttgtggaactgtccagagtgctggcaaatccaggaaacagtcaggttgccagagttgcagctggtctacaaatcaagaactctttgacatctaaagatccagatatcaaggcacaatatcagcagaggtggcttgctattgatgctaatgctcgacgagaagtcaagaactatgttttgcagacattgggtacagaaacttaccggcctagttctgcctcacagtgtgtggctggtattgcttgtgcagagatcccagtaaaccagtggccagaactcattcctcagctggtggccaatgtcacaaaccccaacagcacagagcacatgaaggagtcgacattggaagccatcggttatatttgccaagatatagacccagagcagctacaagataaatccaatgagattctgactgccataatccaggggatgaggaaagaagagcctagtaataatgtgaagctagctgctacgaatgcactcctgaactcattggagttcaccaaagcaaactttgataaagagtctgaaaggcactttattatgcaggtggtctgtgaagccacacagtgtccagatacgagggtacgagtggctgctttacagaatctggtgaagataatgtccttatattatcagtacatggagacatatatgggtcctgctctttttgcaatcacaatcgaagcaatgaaaagtgacattgatgaggtggctttacaagggatagaattctggtccaatgtctgtgatgaggaaatggatttggccattgaagcttcagaggcagcagaacaaggacggccccctgagcacaccagcaagttttatgcgaagggagcactacagtatctggttccaatcctcacacagacactaactaaacaggacgaaaatgatgatgacgatgactggaacccctgcaaagcagcaggggtgtgcctcatgcttctggccacctgctgtgaagatgacattgtcccacatgtcctccccttcattaaagaacacatcaagaacccagattggcggtaccgggatgcagcagtgatggcttttggttgtatcttggaaggaccagagcccagtcagctcaaaccactagttatacaggctatgcccaccctaatagaattaatgaaagaccccagtgtagttgttcgagatacagctgcatggactgtaggcagaatttgtgagctgcttcctgaagctgccatcaatgatgtctacttggctcccctgctacagtgtctgattgagggtctcagtgctgaacccagagtggcttcaaatgtgtgctgggctttctccagtctggctgaagctgcttatgaagctgcagacgttgctgatgatcaggaagaaccagctacttactgcttatcttcttcatttgaactcatagttcagaagctcctagagactacagacagacctgatggacaccagaacaacctgaggagttctgcatatgaatctctgatggaaattgtgaaaaacagtgccaaggattgttatcctgctgtccagaaaacgactttggtcatcatggaacgactgcaacaggttcttcagatggagtcacatatccagagcacatccgatagaatccagttcaatgaccttcagtctttactctgtgcaactcttcagaatgttcttcggaaagtgcaacatcaagatgctttgcagatctctgatgtggttatggcctccctgttaaggatgttccaaagcacagctgggtctgggggagtacaagaggatgccctgatggcagttagcacactggtggaagtgttgggtggtgaattcctcaagtacatggaggcctttaaacccttcctgggcattggattaaaaaattatgctgaataccaggtttgtttggcagctgtgggcttagtgggagacttgtgccgtgccctgcaatccaacatcatacctttctgtgacgaggtgatgcagctgcttctggaaaatttggggaatgagaacgtccacaggtctgtgaagccgcagattctgtcagtgtttggtgatattgcccttgctattggaggagagtttaaaaaatacttagaggttgtattgaatactcttcagcaggcctcccaagcccaggtggacaagtcagactatgacatggtggattatctgaatgagctaagggaaagctgcttggaagcctatactggaatcgtccagggattaaagggggatcaggagaacgtacacccggatgtgatgctggtacaacccagagtagaatttattctgtctttcattgaccacattgctggagatgaggatcacacagatggagtagtagcttgtgctgctggactaataggggacttatgtacagcatttgggaaggatgtactgaaattagtagaagctaggccaatgatccatgaattgttaactgaagggcggagatcgaagactaacaaagcaaaaacccttgctacatgggcaacaaaagaactgaggaaactgaagaaccaagcttgatctgttaccattgggatgataacctgaggacccccactggaaatctcccatcttttgaaaaacctggaagtgaggagtgtgcacggatgctgaatgtttgggaatgagaggatgagtgagtgaggcttgaaaacacaccacattgaaaatcctgccacagcagcagccgcagccgccaacagcagcgctgttagtgagctaagtaagcactgacttcgtagaaaaccataacatcggccatcttggaaaagagaaaaacaatggagttacttatttaaaaaaaaagaaagaaagttatctcttcccaggagaggctagaagtagcttttctgtcttttggccagtgccgagtggaatgcctggtttgggggaggaggagggactgggttcagctgtggtgctttgttgtaaaaggcagcctggcctttgctactgaggagaaagatggagcctgggtctcaagcccaccttcgctgtacctttgccacatggtactgtatgcttgccagctagaaggagggtcagggattttttacagtctgagaatgagtgtgtgtgagtgaggcggtatccacattctcaacttcaagtcattgcagtttctttttcccagaaaacaaggggttagatgttgcatttcataaaactaaccgaagttctgtctactgatgcagcacaagagatgtaaaaaaaaaaaaaaaaaaaaaaaaaaaaacacacacacagaggaaagacgctctttaggttttgttttgttttttttttttggttttgttttttgttttttttactctagggaaaacactgacgaatggtcagagctcctatcctgatcttttcatcaaggcgcctttcctaataatatggttcaactgtgaatgtaaaagtgggggggaggggggagaaaaagaaaactctggcgttagaggatatagaaaaatataagtacaattgttacaaataacgcagacttcaaaaacaaaaaaatcacaacccaaacaaaccaaaatttaaatgatcagaattggcagcacaaagaaaacgccctctcctgacttgtattgtggcagtctgaacgcccccagaaaattgtgccaaagagtttagaaaaataaatatacaataaaagtaaacacatacacacaaaacagcaaacttcaggtaactattttggattgcaaacaggataaattaaatgttcaaacaatctgataaaataaccatttggaaactgcttggccttctgttcttttatttgattgactacaatgcggtattggtctcttgctgcacttcaaaagcaaccaacaaaacaaaaacaaaaaaaagtgtgtgtgtgtgaatacacacacacactaactagaagtcttgtgatgaaaatggcacttggaaaaggttttatttttccactgaagttgaaggttaataaaatggtgtcaaacgtcccctggtcacacacttgaatatttttttagaagtgtgatgtggtatgattaccataaatcagacttaattattttcccttttacaagggaacagggcatcctgaattttagagcctttcagcaataagaagggatgttggtgagctttgatcctcttttggttttgcagttgttaggagtttttgctggcattttgaatatgctgctttcagaaaaaccaaggaagttttaaaattgcttcctggtccttagaggactaaaaacaagaccctcattcccactttcatttccactctagcaaaaactgggcttgcgtttttctccaactcctcgtttatatcctcccttccatgtccaagccttccattcctaagtgggattggctcagttttgcccatccatatggcagcatctctaatagctcttgtacagggtatcagatattgtgccttttggtgccaggttcaaagtcaagtgccgatctatgaaccagtgtacaaaaaaaaaaaaatccaggtatttgaaggagagacgctccattgtgaataaagagctcataccagctcctaagccctattaagaagaggcctggtcctctaatgccttgtttccatttcagttgttctttgagagacagaatgatgtactaaccattcgtgattattaagatagggttgggtcagggcttagggagggggcagaaatattggggatagaaaaaaaatctgatcattcctcagtgctacccatttctgtcctgtgtgggctgcttagctagacagcaggagaataaagtacaccgagaaccataatgaaaaaaccttccgtgtgttttgtcatgttttgttccagggaagcagttgatgagtgctgttactaatgctttctcccagatccattcagtggtggagaggaggaaaatgggctggttggatgtggtcttggtgccttgcagttactctgcactggttatgcatttaattctcctcttttctagttaaccttttgccagtgggttttccatagtctgggtatttgtccttatatcagttataccacctaaggcaactgggtgcaaaatgcattctgttcactcactgtctgggccttccccaccctagtcttggcacattccttcaagaatgtagttaccgtctgcttgggaagatgtcagtgcaaatgtgaagataatgggcatcggactaggctttggtttgccacaagtggcagctgcctgtatcaattacatttattaattttgcttttcatttttcccagttctcctcaccccccctttgttgaaatgttggacttgctgtcagaggcaactgtaatattgccttagggacttgtggagaaggggaattgctcagtgtagtgttttaactttcagaaccaagcaatctatttactcttacaaatatttaagaagtgtgttagtccaactttaagaaaaatccaaactcatcagcttttgatagcatcttggtttttgaaacaacttcaatctgtaattggcattcagaatgcccttggcatgccagtctgtgatggcatttaagacctgtaaaacacttgagcccaactcgattaaccaaaaccgataaccaccacctttatcttctaaataaagtccgctttatttttattttcaacat

SEQ ID NO: 2994 - protein, 860 aa, Homo sapiens; identical to SEQ ID NO: 2988

SEQ ID NO: 2995 - DNA, 58806 bp, Mus musculus
  misc_feature (1)...(58806): n = A, C, G or T/U
atatctcctgcaaaaaagagggagcaacttgggtacccattgttaatatagttaagaccctaataaaggccagacagtagtggcgcacgcctttaattccagcgcttgggaggcagagaggcaggcagatttctgagttcgaggccagcttggtctacagagtgagttccaggacagtcagacagtcggggctacacagagaaacctggtcttgaaaaacaaacaaacaaacaaacaaatcctaaaaaagtaccaccctactttcctgacctgtcctacaaccaatttaagtttgtccctgactagcttaaaaataactgagactcagactatggttattttatttggctttgataattattgggggtgaggggtcacccctgatctccttttctaactgctggcctggctgcctcaccagtggtatctcagatactcgatggttctcctagccacctgctcatggtccattggccctcctttcactcttcctatgtcttctcctggtgtctcctctctcctctctcttccccacccggaaaccaggtaagtcaaaacccacccacctctaatccctccggtagctggctgtagtgaattttacttaagaacaactttacatccccttgggtggaaaaacagatctctgtgaagtcagcctggcctatataatgagttccaggccaatcaaggctacacagtgagaccttatctcaacaacaacaacagcaaaccatagtgacaattttggaattttgtttctttaacaaacaaacaaaaaaccccacggaaatataagcgtatgtttttgttttaactgcaggtatgggatatggggcagcttcagattgtccacagcagctgacaaggatttgcctcatgctctggtgggggtgatagggagtgaggggggtggaaatggcaaaattttgccaggtgcagatagtttctgcgatcatgtgatctttggaattctggaacttttgagaggttatataaatgctagggcccagagaaccagggtgggttggtgttggttggtgttggttttttaagtagtcatgtgtaaagaagaagaaattggatatcctgatggtaaagatcaaacttgccagactggagagatgtctcaatggttaagagcacaaactggggctggtgagatggctcagtgggtaagagcacctgactgctcttctgaaggtcaggagttcaaatcccagcaaccacagggtagctcacaaccatccataaggagatctgactccctcttctggagtgtctgaagacagctacagtgtacttacatataatcaataaataaatctttaaaaaaaaaaaaaaaaagagcacaaactgcccttctaagggtcctgagttcaattcccaccaactacatggtggtacacaaccatctgatgacctcttctggtgtgtctgaagacagctacagtgtattcatataagtaaataaatctaaacaaacaaacagaaaacaaacaaacaaaacccaaacttgccataagaacttgaaatcattaatcagcaggaagcaatctaatgataatgtcatccctttttgacctctgactttactcaaagatttctttctttttttttttttttttttttccgagacagggtttctctgtatagccctggctgtcctggaactcactctgtggaccaggctggcctcgaactcagaaattcgctgcctctgcctcccaagttctgggattaaaggtgtgtgccaccacgcccggctactcagagatttctttccttccctctttatcctttttttttcctcttttatctagtgttagggggttgaaagggtgaaaaaaaaagaggtggagaagggtggaagaaaaaggaacacataagaagcaaaagattggctgtgatgaacaaacaaaacaacaaaaccaatatttagatggatttatttctatcatttgcatgtatatgtacctatctttgcatgtatatgtaccacatgtgcacctggtagaagaggcatcagaggccctgaattggagttacagatggctatgagtcaccatgtggatactggaactgtgtttgggccctctgaaatggaaacaaggagcttttaattgatgaaccatctttccagtccccatagataattttttaaaaattgcctaggactttaagtgtactgtacaagaccaaaacccaaaatacctaacacccagtttactgacattaaatgcttcccactaaggaaattgtagagccaagttgtctttagttagatttccttatttatttatttttgaggcagggtttttctgtgtatcctggctatcctggaactcactctttagactagcctggccttgaagtcagagatccacctgcctttgttcccgagtgctgggactaaaggtgtgtgccaccaccgcctggctttatttatttatctatctatctatctatctatctatctatctatctatctatttatttaaagtacttgcctgttgaattagcatacttataagaccatattgagtcccaagtagctatggttctccaaacattttcttctttattgccttagatagtggaggagcagtaagagaaaatgtctgtgtacaaacagaaaggtcagacacccaggatgctgtcaaacagaaaggataccttcagccaaagctctgaaagcaaaagaaaaggtatccaatacatccatcctaccctgccacctcagaaccaaaatatggccgctcaaccgaatcccagatgtgacgccttgaaaagagcagcctcctaagacagtgctgggctgctggacactgggagaccacgctggtactggatgctgatctggggtactcctccggtgaatggcagattttcccaggctttgatggctaactagtgagactgttcccaagtgttaaactgaagaggagtggatgagaaggaaggaaggaaggaaggaaggaggaaggggagggagggaggaggggaggaaggggcattgtctttggggccctactttgagcaccttaattaaactgtgaaaaaagccaacatcattctgacctcaaaaggattaggagagagtattcaagagacaaacacgagagaccatggccgggaacacagtttcagttcttctgtttgccatgtgtccatgtgttcaatatgataacaattctataacgcttttatagaaatacaacaagccaggtgttggtggcacatgcctttaatcccagcactcaggaggcagaaggcaggcggatttcaaggctagcctggtctacagagtgagttccaggacagccagggctacacagagaaaccctgtctcgaaaaatcaaaaaagaaagaaagaaaagaaaaggcctgcaatgttttctgataacctttttttaaaaaaaagatttatttactatatttatgtgagtatacataatacagtccgtgaaaactgttgctgttcttagattcaccagaagagggagccagattctaattacagatggttgtgaggcaccatgtggtttctgggaattgaactcagtgctcttaaccactgagccatctctccatcctttctgatgacattcttagccttcaattggtggggtttattcctgcattccataggggtttatctaatagtcacaaggatgtgtggtcaagatgtgtagcccaggctagcccctatagagatctgccagtctctgcctcttgaaattgctagaattaaaggtgtacagagccttttttttttttttttctcctagacagggtcctatttattccaggttgaccttaaactgtggacttgaacttttggtcctccagcctctgtcttccaagtgctgggattgctgctgtgttaccctggagctcacttctcagggttgttttgtgtatttgtttagttttgagactgttacttagttacaacctttcgtccttcctttccttccctcctaaccctctcttactccctccctgctctatttcaaactcttttgcctctttttccattattattgcatgcatgtgtgtatttgtacatacattttaattcctaaatataacctgttgtgtccagcccatgcaatgtatgcatgtttttaggcttatcattttgaactggccaacccattactttgttcatccctggggaggtccacccctcccgcctccagctttactcctgctgtttgttctctgtgtatggttgaggtcttgagtgctttttttttcctactcagcttggcgtacttgccggtgggtgtccttgctcagttcacatttaggtggtcatattggtgagtctttatgggtatagcttctgatgttgctaaggagacatgagctcacagcaaactccccgctcctccggctcttacaatctttccatctcctcttctgcaacattgtttcctgagtcttaggtgcaggggtgttttgtacgcgtatccattggcactgggctccacaatgctgcatttggattggtagtgctttctgtaatggtctctgttgcaaagagaagtttccttgtgtaggggtgaagactacactcctctgagtaaaagcctatgagaacactggccgagcatgccccgagcatgtcccagctctgagttcaactcccaggacaaagctttgggctcatagctctcatcatcaaagacctgtctaagatgtcttctctgcattttgcttttggagtacttcttatgtggaacacatatcttgttcactattttaaagtacattgagagagagagagagagagagagagagagagagagagagagagagagagagagagaagaggtgtgtgtgtgtgtctaaatctgaggacaacttacagaaactgaatctttccttgcactaagtggctcccaggggttgaactcaagtcttcaggtttcacgggaagtacccgctgagccgtctgaccacctcacctctaggtggactgtgtgtttcttgagcagggagatcacactgtgttctttgtgtcctccgaagtccttgcttggtgcactatctggttcacctagagcattaggttgtgcttccttgccaatctgaaggccaagtaacttgaattataatatcattccacaatcacacctagctgctgggctgaggtagttgggggaaagcacttgtctgtgccaatctgcctatgtctaaatgttttatttagcatccctacgcctctttcacccaagtatgttcatctttttcctttccaacatgaccatcccacagtttctcctgtcttgtgtctaccacactcttccctcttcctcttgcctctctcagctgaagaccttgccagtagctttctgcagaaaacagatgctgcgctgcgctgggctgtgctgtgctaggttgtgctgtgctgtgctggtaaacagtaactataaagaaccaattggtaaggttgccagcattttctgtgtgttagaaataacacagcagccaggcgtggtggcgcatgcctttaatcccagcactcgggaggcaagcagagttctgagttcgaggccaccctggtctacaaagtgagttccaggacagccagggctacacagagaaaccctgtctcgaaaaagccaaaaaaaaaaaaaaaaaaaaaaaaaaaaagaaatgcaaacagcttgccagttttaagctacnnnnnnnnnnnnnnnnnnnnnnnnnnnnnnnnnnnnnnnnnnnnnnnnnnnnnnnnnnnnnnnnnnnnnnnnnnnnnnnnnnnnnnnnnnnnnnnnnnnnnnnnnnnnnnnnnnnnnnnnnnnnnnnnnnnnnnnnnnnnnnnnnnnnnnnnnnnnnnnnnnnnnnnnnnnnnnnnnnnnnnnnnnnnnnnnnnnnnnnnnnnnnnnnnnnnnnnnnnnnnnnnnnnnnnnnnnnnnnnnnnnnnnnggtttctctgtatagccctggctgtcctggaactcactctgtagaccaggctggcctagaactcagagatctgcctgcctctgcctcctgagtgctgggattaaaggtgtgtgccaccaaagcccagctgataacagctttcttatcaagtaaagtattggaaatgaccagaattctacttttggaccagaccttccaattgaactccaactgtattctcaacatccgtccccagtgtctacccaatgtctgctctgtgcagatttttggacagtggtggaaaattcatgctgaactcctgagtttgaaccccagtctggctcacattggtactggatgctgatctggggtactcctctggtaaatggtgaatatttccaggcttttgtggctaactagtgagactgtctccaaactttaaaaggaagaggaatggagaggaagggagggagggagagagggaggaaggaaagaacgaagcgagaagaaggaaagaagatgtgtaacagctcagctatggtgatgcatgctttaatcccagcacttggaagacagaggctgatctctgagttggaggacagcctggatccctgtctttccatgtttatccaacttgaaatggccctgtggtactttcctaaaaatcttgcttttagtatattcacgtatagacagggttttgctatctagacaaggctaggcttgaactcttaactttctgtctcagcccacctaagtgctaagtactcctcccaggcaccaccgcaatcattttgtgtgtgtgtgtgtgtgtgtgtgtgtgtgtgtgtatgtacgtgtgtgtgtgtgtatgtacatacgtgtgtgtatgtgtgtatgtatgtatgtgtgtatatgtatatatgtatgtgtgtgtatgtacgtatgtgtgtatgcatgtacgtatgtgtgtgtatgtatgtatgtacgtatgtatgtgtgtgtgtagtttctcattttcactactgagtatttacttgttaattcactgtgcctttatttttagtctgcctctcggacactaatagcaagccagaatctggttttgttgaagctttgtgctgcctcttgacggggtcaccgagtgcgctatgaattaatgagaagaatctgggcagtctgtaagctaggaaacaaatctcagcaaatgttctgatccaagtggtgattgattctgcagagagcaggcgacagttctgcaaattcataatttaaattcacggtttcaaattattggtgatttttttttgtttttatctttttattgtttaaattcaatacaatttagcaaaacgttattggttctaaatgaataaacaagttttggtgaaaagcaaacaagtcatgtaaaaagaaatttgcagcctcttaccgccagagggggtatagctcagtggtagagcatttgactgcagatcaagaggtccccggttcaaatccgggtgcccccttggtgggtgcatatgtttttcctatgagaacactcagtttctccactcagttatttccaaatccaaactctaccttcctaattttccccctttgaatgttgaatcagcatcgaggaaggaggaaggagctatctctcctaacagaatggcaagtgaggtatggaataaggaacattttttacctcgtttgtatcccgacccaaaaagctaaggatgaatccagaaacaatgtttataatacttgccgattttaaggtatgttacagccaggtgttgtagaacatgcctgttaatctcagcacttggaaggaggcaggaggatcagagtccaagagagtttaagagcagggcgtggtggcgcatgtctttgatcccagaactccggaggcagaggcagacgaagttcgaggccagcctggtctacagagtgagttccaggacaaccagggctacacagagaaaccctgtctcaaaaaaaaaaaaaaaaaaaaaaaaaaaagagtttaagattagccttggcctatatatcaaaatcaaggccagcctgggctacacgaaactctgtatgggggtgggggtgggggtggggcgcggaagacacagtgtaaagagataaaaaacgaatgtcttgtctgagatgttgaggctggagaatgtacaagttcaaggcccagcgtctgggaacagagactcgcttctctggtatctctgtgctttgccccaagctctgctcagtccccttccttgttccgctcagcagagaactgtaatgggaactgggagggaatgcatgtgaatattcccctggggtcctgggatgacacaaccagattccatgtttaaaatatcacagccacaccctgacacgggcagcatgcctctgtctgtctctttttcctttttttgggcaaaacctagctgaggggccgcccttgcttccctgttcacacttagagatttcttccagaccagataccttaaagcagctagatacctgtcccctgttgaggatttgaaacttgatagcgttgtggtaataatattctggtgatcctcaaagagcggtccttgcgtccttgaatgatttacctgacaaatccgccaaagagctaactgccaaggccttcctcagcatctacacaatcggaaactggggacgttttaatgagcccccccctcccccaggtcactctagagcacgcacaagttgtgaaaaccactgcattcatttatattacttggctttggggtcttgttcttttgcagtgaagggagctgacgagtgctcctcccggtttcacggtctcggagcgcttttactcggtccacgtcaccaagtcacaatgaaacgtgaggatatagaataataaggatcatagaatgaaacgaaaaagggaaaggaaagcttaggttggagaagggctatgtccgcaagtttcccttttttgattgacccttgaccctcaacggacacacaccgtcaacctggggagtgaccttggcttccgaacccaaagtgtggaacaatccaattcaaattcacaagcataccatgggcagaaatctccaggactctggcgccaatcaaataaagtcgtgcaacttctgcttggtacgaggcaaaacgaaggcttttctgctcagatttaaaaggaggagtggcctttatctttttacctgttttaatgacccagggtcgaatcaagatcatacttgtattgaaacgtatttttattgtcattgaagagaggaaaagactctgagggggcacccggatttgaaccagggacctcttgatctgcagtcaaatgctctaccactgagctatacccccgcaccgacgcgcagcttgaagcaatctcttttcagtcttaagatgctgtcgcagctgctacacaggtagaataggggcaagagaaaagaatggaagagcaaaggcggccaagctgaaagcagaggatgcctgaatccgaagaatccatgggaaagctgcagcgcagaggggcggggagggtgaacgtacggaggtgctgagtccaaagggaaagggacaggtacctatgtgggagaggatgtgggcgggaagggaactagctggggggcggggcggggcaaggggtggtttccccgcaggttgatgctggggacccacgggtttaaggaaagtcccccagtctagagaatctgtactatccccaccatcgtcgggtgcgtggggttgccccctctcatgggaaatcgggctctgccacactcgcgtctgtttctccagcgcgggaagggccatggcccgggcccgtcctcggtcgcggagcccaggggcacgtgcaccccgagagctcaggggctcctgcactcccgtcccgcagtcctccctggaacccgcccccacgcagccccacgtcgcccggggagcgcgcctggtcgcgcgcgccttctttccgcgcccgaggcgcgttcccccgccctagccagtgcagcccctcctccccactgtgtttattaggggaaggagggcggaggcggaggccagttccccagttccagtcgccgtcgcctgcacagttgcagccgccgcctcccaccagctcgcccaaggaaaagggaacgcgcgcgaatacgggcgtccccgccccagtctttccccggaaccatgaaccctaactgtgcccggtgcggcaagatcgtgtaccccacggagaaggtgaactgtctggataaggtgagctcgggtaccgggcgctgcgagctagccagtgctagtgcagctctccatcaggggaggaaagaggggccgggtctttgcgggctcttccctgcgctccccagagcaggtaaggaaggcgggaggcgacttggggtgtggggacagaccccagtctggaacctgggaggtccaaggcgaggtggtgagcagccaccgctggagatgggtggcctctgtgcatcgaggttaggagggctggaaggaagggcggaagagcaccagggaaccgggttccccgggtgtgtgcaggaggttagaggtgcagtcccgccccccgggccgggagtgagaggggagacggccgctccctttccccgcggcggccagcgccaagtaggcggaagcgcggggcgctggggggagggggcggcgggggcggggcggaggctggggccggcgctacccgcccggcttgggctgccggtagcctggcttcctggcttggaagctgcgtcgggtccttcgtccagcgagtgtcaattgtggtgaaagggatttaggggcagcgccggaatctcactgcgagaccccctctttttgaacgacctgctggtcccctccttgctttttttgtggttggggaacccgcagacctccttcatagcttccccaacccccaattcaaattgcaagccactccgggtgatcggctgcccagtcggagctgggcggggtagggagtggggaggacgcttcttggagatctgaaattgtgctcagcctggagaccagcttagagaacaaagagctaacttttcagagctgttttctccgatggagggtgggattggccgagttctgaggaagcagacgaaaaggagttttttaagaggaggggggtagccttctggaaatcagctggcccctaggggctcttacgcatcccccggcccaggctggacccgatcatctgtttgccattacacttttgcaagggggactgaagggtagatctgggtgtttccgctacagtttgagatgggacccttctgccttgttctgaaccccataaagtctaagacaacccgtttcttctcttgtgaccccctctgcagggaagccttttggctcctcatagatacgttgtacctggctctccaagctggatctcattctccacgtttatggctgaactggacagaagcaggcgccatgaggcgatctagttttgttggaaaaggatactttgtttctccgggctagggttagttccttcttaggaacctttggacatcccccgcacaccctcccggtcccggtcaggaggtagggacttgtagttttgaaacatttgaactttttcttgaggaaagagatgtggggcttggctaggtaccaggataggaggagcttaagggaaggtgatggcctgcccagtcactgtaccggcctctggacttgtgcttggcactcctagatgaagacaccccacccccaaaaaagaaaccctgtccttacatgagggtctttgtcgtccctgggaccagatattttgagccctgcatttgcggcattctgggccagcaaatgggctccccttttggtccccagtaatgaatggtgaggggcaatggatgatggaaggatttgctagcttgggggttgggaaacttgatcttagtcccaggtctgtgcccatcaactttatgaatggttctgggcctcagtattccctgtctgtcaccagatgggtatggatgatgtcattgccttaggaggtggacagtgcagggagtgtggtcaagactggccatttctctcttttctgtcccgcatccaaccactccccttgtaaagaccttcagtgctgtgtgtcacagggaagggggtggggattttatgtgataacttgtccttgctagaagaggatattcaggtcggggttgccctgggaagagggagtgggtgatttcttcctggttttagaactccccctagcggaagtggccctggagagccatctgcctttcacacccctcccccacccagactggaaaatccaggtattctgtctcttcagtccgtggcctgcaggcagtaggaagctagagttggaactctggagaatgctgggcagagacctgggtgtgggcaaagttcaatctcataggcatggttgctacccaactttccaaggcttctctacagtcagggagaatccacttagactggcttgatttactgcggtccccgatgatggcatgcagcctgctgaagctggagcgtaagctgttcttaatgctcagtcttttctcctccttgagccttatctctcaaaggcattagtgggtaaaccttgtcaccaatgaaggccagtctgtccccaacccatcgaaccagggtgctctgcctgctggataaatatgcagtgtttgaggaaggagggtgaggtttgtttccctagagggtttctgggattagagcaggaaagagaaacagggtgaccttattcatttgacaaatatttattgaacacttactttgtatctagtgacctacactgttgagaatcttgccacatctttctctttctccctcagcttttaaaaccaggtggggactgaaaggaaggctagggacttgttcactggcttgctttggaatgtccagttacagagggcctcctgccctgaatggctctgtgaatgtactaagtcggtgtagctgagaataacatttttgtttttgttgttgttgtttgttttattttacatggctggatgtttgcctacatgtgtgtctgtgtaccatgtgtgtgcctggtatctgagaaggccagaagtagtgttggatcgcctgggactggagttgcaaaatcctgagaagccaccatgtgggttctgggaatggaaccaggatcctttggaagagaagcttttctttggaagagaagctttttctcttaaccactgagctgctgttccagtgctcccccccgcctccccccgccccctcctgacctcgggtttttgttgttaaaagtttagaataccctggtcactttaagaccaggccattcatattcaggtactactgaagtgtacggagctggccagcctcagagacccgaagggatagctccagtaatgtgagccctataagtcagtgtgtccagtcttttgatattgggacatgacattgtcatctacaaagttctctatagagaatatacaaccacactgcacaaattgcaaaaaaaatttttttcttaaaatattttaagtaagttataatgttgtaatattgggctactttctggccgcacccaatccctgactttggtttgaaatatgcctccctagaatgggaggctgatggatgggatgtccccctccttttagccaaattttatctttctttttttaaaatcctcctactacctcagcttcctaagtgctgggattatagtcatatgtcactatgacttacaaagtggttttttttttttttaatttttttgcaacagcggcttgtatagcccaggttatttttgaattcccgatcctctcttacttccgcttcccaagtgctgggctgacagatgagttctgccgccacatccagttttgctttggctgaggattaaacccagggttttgtccttgcctgttaggcaaagccctttactactaattaaactcctgttctagcttccgaacttctggctgtttaggtcttctgctggaatatttgcaaaaaaaaaatatatatatatatatatttttaaatttatattatcttttccaaaagtgggtcctactcaggcagcacggtggtatatatctttaatctcagcatttgggaggcagaggcaggaggatctctgagtttgaggccagtagcctaggctacatatatagtgtatttctaggccagccagagttacataatgaaacctgttgtgtgtgtggtaatggggggaactatgtcccacccttcctcatcctgtctggaggaatgtgttgggtgggatcctgaggcctggcgctctgggagcctcaggttactagaaagtaattgtggaagtgtgcgtgaagcctggcctttctaagctggagaccctgagttaagttgataacctggtcagggtggtgctggtgttgaccttaaagaataaacaaaccctgaccctaggctacaggaagggaggtgtcccatactctagccctgagtcaccgccaccctagggagcagatgacaggctgtaggtacagagacctgaatgaagctcctccccttagagtgatggagttaacagagtctggctcaagtgagccggatccttgaggggcttctgtccccactgcttgtttgtctttctgcagtatctgttttccaaaatgcatttcaggcaggtgaagggagggagggagcgagggagggtgggtagttgttctctggtacctggggtctgactgagcggcctgacagacccgtgactagggaatttgagctgcatggctccaggtgtgggttgcttcctcagtcacaagtcctaggagtgtgtctctgtctgggaccttgtaagcaggtccactcttgatgtgaaccaaggctcttagagtcaggggaagaaggcagaccctcttgggatagtactattttctttccttatcagcatccttccctgatacctgacagagacaggatgaagttctcttatcctggagttggatcccctgcactactgaatgaatgcccattttctgtccccctgaaggagtggctttctggttctcttatggttccctggggagataacagttgtgacccctctttacacagtgcccagcagaccctcaactatttctgatttccattctgcccttgatggatgtccatcgtccccagtcccagactgatgttaccacattgagaacactagatccctaaggatccctgggagtaaactgctaacaggagcaaactcttggggtcagcctcaagggtggtgtgttgaagtgctggtctgtctatatactactaccccctttctccacgtgacttggctggagggtgagggtctggccatctgctcaagatctctttcctgatccagagtcaatcaaccaggaggtggccttggcggtccctaggcctgggacagtgtattcctgcgaaatgtgtgcgtgaaagtgggtcatggtctggattctacagaatgtttttcctggcgggcccctgcgggggtggggggaggcaggggcccaggcaggggcatgcaggcagaggctgcagactagctggtgacagagttagggcaatctgccaatgcctcccagtcaggggaatctatggggaaaggaccaccctgttttcttctgggggtttatatgttggggttatgtgccatccccaaacagtaaggattccggaagttactgagggtgggggtgggggcagtagctctaggatgggtccaggtgggggtggggtcaagctcagactagcgaacccttccagacttacagctggctttcttcccaaagagtggtttcctcctttgccttgttaatattccctgctagatttttttttttcttttgggtctccttgataggaaaaaatgtcccattagagggcaattgcccccagaaatagccctgatttccggtttggggtcccactgtctgagcatcttttcttctggcccctcctccaagtgtgtctgaagctttcttagtttgggaaacatgttttaaaaatcaccactttgggggagttctttgacagatggctaagaatcagtcttaactgcttgctcagtcaagcactttctgaggtcttccccgggtgtctctctggcctctggctacctcctttgggggtcaggagtgtctccgttgactgctgagaagcaggcagagacaccccgtcagcctagatttttggaatggagttagctcacatggtttctccgtccctctgtcaaccccccccccataaatcttgatggttcagttctagaaccctgagtttactggggtcacccctcagtcccatatagccttgttggagctcaagctgggctctgtgcccgcctctagcctccagcaccagcatggaggtgccaggtgctttgccaggggcagaggatttctcatgaatctttaacagtctaggaggataggcagtattctctgcagtcggtagacagaaagtagaaacagactcccaggcatggtgcggacagaccaaggccaaggtcatctagctctctgggtggggctgtcatacggacacacctgaggtctagctgctgggctttgaatccgagttctcctgccttcaccggtgtctcccacccttatccagctgtcggtgggagagactgtccagaccggatatgggtgtggctgaggcacacaccagttcttctaatcccaggtctcttgggaagtgggagcctactgaactagaacatcatgtagggggagctgagagggtcagaggcattagagggggtgttagatgtaccctggtctgggcctgtgtaccaggggcgaggctctcttccgcaggcttggtggcagaaggaccagctctttccatgtgctgcttagcaacagagtgccgctttgcataagcaatgaggctcatccagttctgggctggagtggtctgtggaggtggagctgacctttctgggggctgctacctcctttttaagtggcttctcccctttactctcagatcagacccctctcctgacagctaaataatggtctggtggggcacggggagggtcatgtcctgtcattggctgtcagagcttgtgacctgaagtggccctgttcaccaggtgttcttacagccttggctgtgggacccgcgtggagaacttggatacccatccctagggaagctctgttgtctaatcgttgtctttcgtttgtctccacccagtactggcataaagcatgctttcactgcgagacctgcaagatgaccctgaacatgaagaactacaagggttatgagaagaagccttactgcaatgcgtgagttttggggacacaacagtgttgggggcacctggcttccctccctaattctttcccccctctgatagcccaaggtgacgtgggagcgtatgcacaccctgcttgagatattgtgaccacattgtcccttcgtagcagaggactcgtcactgtccccattttacagatgagagaccacaggaggggactttcttaagatcgcatggcaaggccaatgtgaggctggttcctggacagcctctggatggtgaagccagttgtgcaaagttgtgcacagttgtgcaaagaacccagcgggaattaagactgttctgtgtctgctgcaagggatccaggcttgggactctctccccttggcttcttttcatttagtgactctttgacattgtcccttctagaaggttctagacacctcttgattcattctctctctctgtcttttctttctttctttttttttttttgcgaatacaaaacatttattttaggtgtatgaatgttttatgtacgtgtgtgtatgggtaccacttgtgtgcctggtatatccatggagaccaggaaagggcatcagatcccttgtcattggagttataggtggttgtgagcttagatgtaggtgctgcaaactgaacccacgtcctctgcaaaagtagccagtgctcttaaccaccctgccagctccttttctgccttggaagggagacggacattgaccattatcctgagagctgctagcttaggtcctgttctggccagctgacaccattaggagatgagtctcctgcagttttggagagagctgagacaccacttccaagggggctcatgagtagcaagtacaacctcagcatgaacgccagagttccaggcttattggcccggtttcaccatgaccagctggtctcccagtttaattctacttagccaaagtttaccaggaagggaaactggagacccagctcgttgagggccgcctatcatggcctatcatctcctgcggggtttgaacatttaccagacacttgctgcctgccctctaatctataccaacttctcaggtgctggaaacctgatttctgataacatccagagcttaagaggcagcgtaactatggttccttccgaaggacctgtctcaggcagtttggagtagaggaaggaccacagctttttttgatcccttagttctgatttccatggctcctctgcctcccccaccccaactcccagccagtccagccccaagggaaatgggacattctttgaattcttaagggctcacacaaaccctgattctctgccacttcctccccccaacccccctttggagagtggggtgaggttcagaggaaaaaaaaaaaaaagcccagggcatttaaccctttgggtgctggactgctttaggctgctctgccagcctcctttgggcatcttcaagctgggcctccacttcctggcagaagtctgcctggcagaagtctttgctcgcttcttctccagttggcttatcatcctgtgagcatcgaaagttggagagagaatgttttctgtcagaattgctggagttctaacttagtcttcttggggagacctgcagcagttgggggggggctgggtgaagtaggagatgaggtctttcctgcttggagagtcaacagctctctctccttcctgacattcagctaggggagtgggttggcatctccttttgcctctccagtcatttttacagactctgatttcagtcctatccaggtgaccttttgacctttgacccagtgtttgttgggaaggacgtgcactggggtgtgggtgtgtgtgtgtgtctcagctgtgcttcattccagctgcagcagcctcttgaccaccgctgatgctccctggtgactttgtccttggcgctgtctgctgaactcctcatctaaagccaaatgcagatacgtggcctctgcacctgcctgaacttgggtttcccctgccttagaccagaatctccactacatgccagcgccaggccctatggcaaacttcattccctcctgtttctttccagctggtctctggcactagttttcagtggcattaaggttcctgaatcttggggcttctggggaattgttccccctgcaccccagactccttccaaccccagctgtgcttgtgggccacaggccaagcctccttctgcagagcagtgctcccctcccctaggctaagcctgcctggggcaggacatacagagccaggtgacatctcctggcattttgccagggctctaaggccacccagagagtgtgactctggtgtgcagggaacttctgtgtgctgcctgtttctggccagtgtctgagcctgagggcagctaggctcttgtggaggaagaaggaatgagagccccctgtcctctccgtccttccagaattctagaaagtgatcagtgaagggcttctgtttccctccttacacccgacaagtgtgaggggaagtcagggtcatgaacacaggctagggctcacagccagcccaccgggtggtgtgaagcacaggcatgcagttacatagttctggagtggcctcatcctcacctggggacctactaggctcccactgagcttcctgcagattccttctggtcagctctctgctgtaaggcagaggccacacacactgacctgcacagtagcccaaggacccccacccatccaccccctcacctcttctttcactgcaactttcaggtgggtggggtgggcctgatctgttggctagagaaatatttataccctgagttatttgttgtgtaaattggattattggagccctagttcatgcaaacctgtttcactgggaccatgccaactgtcatagagggtggtgctcagggctggttttgggatggagatgggaacaaagtgccttggggacctgcagactagaggcccactagggctagaggaaactctctggggaaggaagagggacctcagtgtgacctttctcctcagactgacaaaagacatctgagttcctgattcagttttcctgagctgtggagtaaggaaggggctgagtcgggaagtgtgaaaaatgttctttctgctggggactgaatctacccatttccagggccttaactgagagtagggtagagtcttagtcagtgtgtccgtacattcattctagcatactgatcgcaatcgcagtttgtttggctttggtttgtgagatagtgtcaggaagccaggtctggtcttaagctctatgtagccaaggatgaggttgaacttacatagtattaattaattaattaattaattaattaatttattgtgtatatgtgaagggggaaagagggagaggtcggtgtgtgagtctaggcaatcacaagccaaggcgtgcatacaatacaggtcaagtcaggagttggttctctttctccactgtagttttggaagttctcaggctgagtcatcttgctcccttgaacttctgctcctcctacctccaccaagggctgagatgacctgcgtgtgccgccacacctggttaatctgggctggaggtctcgggcttggtgcgagctagctaggacaaacactctactggctgagctacctcttggcacagatgggtcttgctgtgtatgtagatctggttggccttgccacggtcctgggcggagcatttgtggcatttgaggcttatctacctctttcaagttctctgcctcttacggggaagtttgaatcaaatgtctcagggagctggaagcaacagaggtgagggcaagtctgttacattctgggtgaaggaggaaaacaaaaacaggcagcccgagtgtcaaagccagccatcaaacacctcctgtctcatgcaacccatagtagctccacacatagacatgtcgggacctcaaggaattttggggatcacttccctctcacacctgggccctatttattgataagaaagttgagacccaatatttccatgccttatttagcttggcagaatcttttaaaatatcaccaacagggagaaagtgtagacattgtttaaagttgttagcaaaggaaagaagaaaaaaaaaagaaagaaaaggccatggtttttcatcttgtctgcaaagcctaagggttggtaagttcttcctccagtctacacttaatcttttggactgctcatttgtgcccgtctggccaaacaatgcctccttgttttttcttatccttgccacattaggcctgaaggcctggagctgggcttgtaagaatcaaggctaacggagcctgccctctctcaccagcctgtgggcagtgttcctagcaggggattggggatccacggttgtaaccagagggtcaggatgttaggtcttttttcttctcccccttccttttggccaaaccaacagtttcttatttttggctgatatatttttattcctctttgaacacaaagctgtggtggttttttttttttttgggggggggggtgttttttaaaagaaggtcccagcctggaaggggtaatgttccctgcaaaaatgagcagctgggcattcaggatcagtgagcctgtccttgttctgccccaggatacagctcctgtgcaccctctccctgtccctgtccctgtcccgcacactcccccctgtcaagcaattcataaaagtcttcttgccttaaagcagcgtagcccaggccctcggggttagcttatctcctgggatggaggttgcttctcttgattccttaggccattgtcctcgcaagggtttcaaaggtcgggctgggcttcaaggatgaaggactttgtttggcagtcactgctctgccaattatacctttgtcgttggatctggagcggagccagagcccatctgccccaacaggtccacatgtcctcatctggctcagcagctgtggggcagggtaaagtgcactgaactaagtctctgcccttgaatccaagcctcaggttccctatatgcaaaatgggcactctgatagtgctgacttttccagcctagagcctgtggggtgtttggggaggtggtacacctgatagcttacagaggagctgaacagtgagagagcctgtagggtttccccagccgctgccctgctccccgcctaccttctggctaccacaggctctttctgcttttaccttcctgatgccaggtagcttccttgtccctccctctccacccagctctctgtcccattggcctgtgtcctccaccccccccccccccgctatcattggcaaagacaggtctatgacgaggcccctatcgaaggcatcacactctctgggaatgattaataagaggctagcccaggaagggacaaagagcagctgttctctgtagtggactcagctctatctctgactcttaaactgtcgcctcattttgtttctgtgggggcctgaaggtctggctggggtggaggttaggtgagtggacctgtggtctaaactgtttccaaagctacactggtgtgtccccattgtgccccccctcgcgccccagccccctaaatccgaaggtgaaggcatggcttcaacctggggtctaagagggcagaggaaggtcgaattctgagccatcagtttctgcaggatcatgcaggatcacctggagtcctcttcaaagaccaccctgttgggggaggggagcagcgcggatggatactctggtatcctgccttctagagacaaatctgaggacagctgtctgcaagaaaccagcccaggccccttgggcatctccttggtggaggatactcttgtagtctgtcttcccctgcccccatacccctgtagacctctccctccttcccctctccctttctctgctctcctgcctggagctgagaatgaggttgccatgggaacctgaagcacagcagctagcaggagaagggaaaggcagggttgtctcacccagggttgggggctgtgtgtgtgtgtggagggggcactaagctgacccatcaggaggaatgtagtcctttggtgcgcttcctctgcctggggctgggcgtagcggttccatggagtgtcttaacccactcgaccagatacaggattaaattccttccccatttgtggcactctagagttcacatctaggctccccccccccattaatattcctgttctaaggggttgagaagataatggtgaagagcctggattccatctgaagcaagcacctggtgcctgggaccttctaatggggtacagggtgtgacaggggcagggcgagtggaggaggtgtgagcgtggaggttccacagctaccagctcagcgtccaggaaacgcttggcagtgtggagggcacaccttcgtagtaatcactcccgagggaggcagaaactgtgtgagcaggagctgaggacctggggagagggtgtggcagtctgcacgtgtctggctgtccttgggccaatggagatggctttctgccttacatctgtaggcagccatatgagaacagtctccccagggtttgtggatggcttctgaggatggatgcttcttgagtcttcagctcttcaggctgccttcgccctgtgcaacataacaacttgaccttgcacacgtggccagagctgcctgaatcctggatcccttccctgtgtgcatctctattgactgacagaggcgcagtttgtgttccacttcccttcagagtgggcccagtttatatggaggtcctttttgaagccctgtctcctggggtctccagatcagccagctcttctagagatctctcttccaatccctctgttcatgtcttgtcttctaggaacagagtccgtcttaatcctctctgccctggatgggagtaggaattttggataggctcctgagccgtgtgtggcttggctgtgcagggcaccgggccagacctgggggtgggaccttgcctttgcttgtcttcatctgtgtccgtggctgctgccagctgcgggcacctgcaggtgtttgcttttctcgtccagctccctcattttgctgagggagttgtttatctggctgactggaatggccggaactcatcgccgaggcctaagacagtgacatcagcatggaggtgaagttggtcgcctaggaagagcccatcacgtgtcccttctagtcatgccttctttggttgagtccactctaccctgggtgacccagagggatataaaacattcacagggtggtgcaggcggctagagagagtgcccagtacacaagcaggtggcagcttatgacttcctgtgggcatgttggccagctggggtgggtcatacttggaaaaaggaccatcaagggccgtcgttttcttacccggtgcttgtgagtctgtgagtcagggcgtctgcactggttacagctgtggtgggtgcagtcacccagaactaaacatggccaggtcaggcttttcaatacagtgtctgcttggagaagccacccatcaggtccctgaggtgggtgaaggtcatgtgggccccagctattccatattctagcactaaacacagacctgcctgtcctctgactggtttacctaaggatctcggggggggggggggggattcaaagggtaaagagctccctggtcctaggtcaacttccgcgcctggtgtgacaattgttacctcaagtgtttgttgagcttcaaccagcctcctttccggaagcgtggataattcaatggacatgatcaaaagtctctctgctcaaggagaatcgggaagagagcgtccatgtgataagaacaggaactcagagacggcttagtgacaagggacggctgtgcatagtttactacctctctgtgcagtaagggtgacatccttcaagtccctgcaggctacattctgggccacctctagaccagctttttctaggggtcagaattctcatgtttctgtgtgttgacctctctagtgtgtctgttctcctgcctgtcaaaagggggacagtagcaacgctgaggtaaggtgataactaagtcacagaagtaagccccttagcacagggtaaccctagctgctcttacctgtcacttaagtgtgactggacacacacagatcttcccagctatctgtgagttggatgatgttggacagacaaggtattccctctgtctttctttctctcccatttttcttggtttcaggtttttctctgatttcctgactgtcctagaactcactctgtagaccaggctgccctcaaactcactgatccacctgcctccgcctcctgagggctgggcttaaaggtgccatcaccctcctgcacatgtattgttctcttattccaatgacagggagcttcctgtatttttgtccatttttccttcagtcttgagtcgctcatgcgcctttgtgtgtttgatctccactgctgtagaagtctcagctctgaccctgtgtgtacccatctcctgcatgtctgactaggctggctctcctgggtggcctgtccctgggatccactgtgggggaactccaaggcgtggattctctgaaacaagtaacctgaaatcctcagaagcctccctgtggggccaggaccgttttgtctgccaggcagctactcagacctgccgtgtcttgccctctgagccggcctaggctgtgcctgggaaggcccccattcgcttcagcattggcaggccagcaggggctgctcagtgataagagaagctcagaattccctgtctttgccctgagtgacgcctgatccactctctgtcccacagacactatcccaagcagtccttcaccatggtggccgacactccggaaaacctccgcctcaagcaacagagcgagctgcagagtcaggtgagaaccctgcgctctggggctggtggaaggggaggggggttgtgtaacaggattgagccagggcatttgtggtctctgtaaggcctgcggtgctgaaatcccaggctggcctgtcgtctccccatccccacccttgctcagttacttcacacttcctgacttctgcagaggtcagggagggcggaaataccgccttcatacctgaaattggttggggaggcgtggacatatgtttgactctcctgggctcctagagccttctgttctgttcctttacacgtgacacagaagagctgagagccaaccagaaaactatactagtctgtgatgcacagcctgtcctctgtaaccttgtcttgagacctttggatgtctggagggagggcggtagaggggcccatcnnnnnnnnnnnnnnnnnnnnnnnnnnnnnnnnnnnnnnnnnnnnnnnnnnnnnnnnnnnnnnnnnnnnnnnnnnnnnnnnnnnnnnnnnnnnnnnnnnnnnnnnnnnnnnnnnnnnnnnnnnnnnnnnnnnnnnnnnnnnnnnnnnnnnnnnnnnnnnnnnnnnnnnnnnnnnnnnnnnnnnnnnnnnnnnnnnnnnnnnnnnnnnnnnnnnnnnnnnnnnnnnnnnnnnnnnnnnnnnnnnnnnnnnnnnnnnnnnnnnnnnnnnnnnnnnnnnnnnnnnnnnnnnnnnnnnnnnnnnnnnnnnnnnnnctcacgtgcgtttacgtgcacataacctcatggaagcacgcacctacatataattaaacacacacgaaaaaaatcttaggaggaaaaaaaaagagaatagcattgattccctcctcatgtctccatctcccaagtgccaagattgcaggtcataccacatctggcttatagtttcctatctactacctgaagggaacagtttcctctccttaagaagcacagcagaccccgaggctgctgagaacgtgggaaacctaaaagcggtgtgatagcttctccttctgggccttgatgccactccaagggcaggtttgggatcagtcccccacgtccctcttggaagcgagccctcaagagttcaaggccatattgagcgagcgaggctgcctgccgtatctgggctcttcactcccacacaccagtgtgtgccttgagtgtgtagccctccagtgtgtcccacagcacaggcagctgcttgccccttagcatttcctggggaagctgctctgaatgactccagatgacgatggaatggtccagcaggcagggagaggggtcagagggccagatgcctgggccaagcgagagattgcctccttcttctccactcgtcttccttctcctctctcctcctcctcctcctcctcttcttccttctcctcctccttttctttttttccctccccttttgtctttttcctcctcttcttttttctttctttctacattctactttaaggagaaacccaacccacttgcccttgggagcccatgagagctccacctcagcttttttttttttttgcttctggaatctgacccctgtagggcggggctgatatcagaaggcagccagccagccctactacccgtgcctgtgtacaggggcatcagggctgcccttgctgtttgtagggctgccctgctctccacacacagactcggaggttcctagactctagggtctgctgtgggctgccataacgttctcttagtttcttactgagaggcaggaggccctgtgtgtatcagttctcacaatcgtattgtcaaaaagggaagagctgcttttgtggggctccctctttggttgttggcttctcttttttttttttttgtcttttgtcttttgttgttgttgttgttttgagccgggatctcactgtatccttggctgggctggcattacctatgtagtttgagatggaattctcctgcctcagcctcctgggtgttggtattttaggtgtgagtccctactcctagattaagaaggggctgtttttattacgtaggtggggtcactgaggtttggagaagccacgctgatgaaagctcaccatctttcttatctagccacggccccctgactgtcagtccatccgtccggctgggactctaactccttgtctctcaggaccacttgcccagcccacaggcaggcagattttgagcttagctgatggggcctcagtgcacagctggagctgttctataggactgactgcccatcacaccagctcaaaggaggttaacccaggccggcctcaaacccctgctaatccttccaactcagcctcctgggggctgggattactggtgtttgtgcgcctctgcccaaaccaggcctggtgccctggagacttcctctgcttgggctgctaagttaggtgctagcagggtagagctaataaagccaacaggtggtagcctcgggatggtgacacactggagggtctgtgtgatcccagtcaacggggtgggaggtgaaggaattgaccgtctgcattgggggcacagatctgttcctggacctgcggacctgcaggaccatgtggaaaagaaagctttgggtggtgtgtctctcccactgtctaccatctgtgcagtctgagccctttgtttgtttgtttgtatttctttccccctcatagtttttttcctccctctgtagtgaaatagagatggagacccatttgcctggaagttgggggctgggcctgtcgctaagggcttggcaggaccggcctggctagtgatagatctgtggctgctgtgggggcagggctagctagggctttgtgtggctggctggaagcaaagtgggaacctttctccccttccctgccccactccagcagggcagggcatcctgggctccttccagggctgcctgcttcctggcctggcttcatgtgtgggctctttcctttggggagctgcctgggccgtttctgccttgttcccccactgctgcattggtcccgagactggtgctttgggtgtctgtaacctccccaaccacagagctgcccagaagtaacactctgagccttgctgtcaaagctggcagttgtccccagctcccctcttctcactgtacccctactaaatagagacagtatccttgggttggagttgaaatagagaatgtgtgtgaccaagtccaggccctctccctggcagatgtgctgggagtctctctgttcttctgttccttgtcaccttcatagagtgttttaggaaatgccggtgtgtgtgtgtgtgtgtgtgtgtgtgtgtgtgtgtgtgtgtgtgtgtgcacaatgcctctccctcactcatcttggggcagggttctcactcctgccttggatcctgtgacctgcatggcagccacgcaccctgacaagtggcactcttactgagtgtagtagcactatgtgtaatcgagaatgaaaaagactagggaagacttggtaaagctcctgccccctcaattctcagcacctaggtaaaaaaacaaaacaagaccataatccctctgtggggacgttaagaccagaggactctgggggctctgtctagatcagtgagctccaggcttacttccagacaagaagccctgtcttaaaggtggtgggtagtgttcctaaagaagacatctgagctttcgtgcaatcataaacaatgaagatatgcatatgtgtacacatagcttaaaatactctaatagtctgagccaggtttgacaatgtgtatattcattcaggaatccaaagccagccttgtttgcatgataagtttaagagaaggctaggatctatctatagatgtctatctaaagacagacagacagacaagtgtcaggtttttattttcaagatagggtttctcagtgtagccctggctgtcctggacctaactttgtagaccaggctggcctcgaactcaaggatccgcctgcctctgcctcccaaacccagggattaaaggcgtgcgtcaccgctgctaacactaccacctggcagcccttattgccagaaccagcagcctaaagttgaatctcagattatcacctctggctgtgtcttcggtgttgtcattgagcactctgccccagggcagggcctccatgtgtaaaatggcagtgacctctccggtttgcctgtgggacattagcatgcattaggtgtttgccgctcctggcctagtgtcagagcttagcacatttccctttcctgtcctctgcgaagggagaggaagtggaggcaatgatttgacctccactcctggctctgctctgatctttcctcagctcctcacatctgtgggcctgatggaaaatccagttgccttttcagaggggaattggctacacagtaaggatccaacacaagtagtttctgcttgcattttttggtagagtggttttgttttttgtttgtttgtttttcgagacagggtttctctgtatagccctggctgtcctggaactttctctgtagaccaggctggcctcgaactcagaaatccgcctgcctctgcctcctgagtgctgggattaaaggcgtgcgccactgcttagcttgtttttgtttttgacagcttcactacatatccctactggcctgccacttgctatgtagcccaagagtgcctggaactcaaagagatccacctggcctctgccctggaatagaggtgtgcacctccccctgctccccttgccccccttctgagagagagaagtgtttttgctctgtagcacaggctagcctagaacttctcaatcctgcccatgagcacaggctagcctagaacttctcaatcctgcccatgtctcactggtcatactgtgtgctgccaagctactggctgcttctgctggattccaagagatgatgggtctgctgtggtgtgtggctgctctcagcaggggtaaacgagagagggtaatcaaacctactcagctaaggtagatcttcacggatactggctgtctgggcatcacgcccagtgctgctgtgggaatttccagaaagggaggccctggcagccccaagcagggacagagtcatctggccaaagttcaggccctgttgtggccaaactgataagaggcttgagtgacctggcaggtcctgtcacagctggtgagccatccaaatgcaagcactcttgtgtgggggaagggacagtctgattgggggcctccaggctgcaccccctccccacacacttctttagcaaaatcgaataataagataaaaagttctcaaagaaatgtctccaccactattctccagttaaatccaaaaactgcttagatatagggtcatagactccagatccagtgggcttttagaggctagctagcctgttctccttccctacacaccaacctcaagaggagcactggcttgccttggaacctgtggccactctgtgtggcacccaggcttccctgcccccgcccaccccaccttctctgcctcctgttagtttgaaatggattatcctttcctagtgaggaggaaggaaagcctgggaagcagttgatggcattgcagcattgccatggtaactgttccctggattaagggcctgacccttgccaagccaggagactggagggagcggggcttggcattggatcagcacagtcaccctcatgtggtgtgcagcacaggacttccgcctcagcacagttgaaaccattgctttcccatttaacagatgtggaacctgaggcttcagaggttaagtccctggcccaagataacacagaaggttggagattaggcctatcagtccaagctccttctggtcctaggcccatatttggtgatgggaaaatctcctgtcttttgacatgagagagaggggggaggagagaggaagggagagagggggagagaaagagactcagactctgatcacactgcctcaaactcatgctcttcctgtcattagtcataagagtataggcatctgtcaccgtgttcagactgtgtatgtgtgtatgtgtgtatgtgtgtatgtgtgtatgtgtgtgtgctcacgtgtacgcgcgcatattttgaaacagtctcatgttgtagcccaggctggcttcaaatatatatgtatatacatcatctcacagattgtcctctgcctccctagtgttggcattctaggtgtgcattaccatcctgggtttcttgtggccttgctttttgttgttgctgttttttgtttggtttggggttttttgttttgttttgttttttatttttgtttctttgagacagagtttctctgtatagatagccctggctatcctgaaactcactctgtagaccaggctggcctcaaactcagaaatccgcctgcctctgcttcccaagtgctgagatgaaaggcatacactaccactgcctggctttgttttttgattttcgagacagggtttttcttttgtattaactaggctggcctcaaagtcactaagatcagtctgcctttgccaccaaaactctgaggttaacagcattcaccactactgcctggcatttttttcatgttttcactagtatctgtgatgactctgtaacagaaaactgaggcctggtgggacccttctggattcctgcagtctccattctttacagatgtcttttttttctgaaggattttttagtagtttgggggccttctaggagggtagatgataggctaccctctgggtggttccaagggaggtgaagcatatgtcagtccgggtccacatcccagtctctggcttctaatgtgaaccaagtgcattgagacccctggatctttttggtctcactctgtggctgtgtcctaatttagcagcccgttgaatgccggattacaggcctgagctcccaaacccatctccatcaaaggaggaaagatccagccaagtgatgatcctgacccttgagggcctgactggagagagagctcgggagctctgagtcctcggtgctgtgaccaatgcctcaggctccgcattctggaaactcccaacatcctggcccccgtgtcccggactgacctggttcaggacagtgcagccgttgtagaggaaaaccagacagctggtgaggcctgaaacagatggttgctgaggtggtggacagtgacctgctacagccaagaaacggttcccagcctcggctctccaaatccccagagtaggatgaacgatgagctgagcctttccttagacctgacttctgttcgtgttggagaagccctttctgtagtgtgtttttcatagagttctcaggagagcggggcagcagtgcacggaggggctctcctccgagctcggacctctcttctgaggttctttgctgcagaactgcttctcagaggccggcttggcgggctccggagagctattctggctcgtcagaggctcactgatggactcacggctcccttgggcagcggctttgtcctttgacccacacagccttagctcagctatttgctttgaaattcccccacactcttggtgggtcaggccatctcctggctgggatgcaggctgctaacactcagatttggcaagggctttttttttatagttgtagacaggaagagtgtagggctaggagcccagcatccctacgtctccggacatgtgctgctaagccatgtgaccttaggcagtagaaatgacatttttaaaaaaaagtgactcccccaccccccaactatttatttatttatttatttatggttttttgagacagggtttttctgtgtagccctggctatcctggaactcactctgtagatcaggctggccttgaactcagaaatccgcctgcctctgcctcccaagtgctgggattaaaggagtgcgccaccattgcccagcttatttattttcttatgtgtttattttatgtatgtgagtacactgtagctgttctcagacacatcaaaagagggcatcagatctcattacaggtggttgtgagtcacagtgtggttgctgggaattgaactcaggacctctggaagagcagtcagtgctcttaaccaagttgacccatctctccagcccagaaatgacctttttactcaaaactttattttggctccctcagagactctaagagggcttcagaccttctagagctggagttacagatgactgtgagttgcctcatggcgctagggattggacctgcgttacgtgtcacagagaggtgggcagtctggtgtctgttttgaatgtccagtttgttcatatgccccactttaagaagaaggaaagaaacgtgaacgaaactaacaatctagctccaagccaatgccgcagctatctagagacagttcactcccagacagtgagtgggtagagttggcacgagcagattgtaagtcctatgcaaacccagttggtgcacagcaagccatcacgtccatgttcactaccactgctcgcaccaccatgcccagctaatgctctctttgggtgtatttggatgtcaggattttgagccgaagtgactccatctttgtttcctttcttttgtgttctacgtaattattgcaggtcctctggaagagcagctagtatttgtaaccattgagccatctttcccctcataagatactgcttctttataggcattcaacgtgtggcctccctttagagccctctggatatgacttaatggggctattattgctctgacaccttctgtcttaggcttctgcattgtgtgtacgtgtgggtgtatggggggcttgtttctgaccaggggcctcaggccgggcaagctcatcttcatgtccacctgaacccaagctctccttttcctcttggcctccaggtgcgctacaaggaggaatttgagaagaataagggcaaaggtttcagcgtggtggcagacacgcctgagctgcagagaatcaagaagacccaggaccagatcagcaatgtgagaccctgccctgatgcccaggctaccctctgccctcccttctcatcctctccctgacaacctcagcaaaggcccacgccgcagtggtcagatcagaggcaagggggagggagttgaggtacccgggagccttttctttgttctccctctttggtgggcactctgcccaaatggcatttcctccttaaagagactgctcttttagaggcagacagacagacacacaaacacatacagagtgtctaagtcaccttccattctctggagcagaccccgttccctggtcatggtggggatggggtcggagtgcagattagatgcttgtttttagcaccagggtcaaagctggggttgggggttgagcctcctgtctgcctctgggtgctaacacagcagtcatttccgccctccctcgactgcctcccacctcagtttgttcttccttcctgtgtgaaaacccagctggctttgcccacaggccctacaccccctccaggccctttcaggcccagtcagggactggtcattggtgtctggttgtgagacataggcgtggagagtgggtggcggagtgactgtctctatatggttctgtagagcagctggggttagggatcatcgctcagttccacccttacatagccgcagaccagcagcttgtatggctccgggtttgcaggggccgggttgggagtatgtgggtaggtgctgctgggcgtgacgtcacagaacatgggcacaagcctgaatgccgagttatagaacatgccccgtcattggcaacagactccttataaatgaaggatgaagcaggccgatacgataccctcgtgtctatcacaggaaagggtctaccagtttgcctgtgtcattctgggctgagggactaaggatggggaagacaggatccagattcaggtggctcgccttgcacacaccctccaggatcatctctccccattctgtcgctggacaagtctcatagctcactggtctgcgccgccccccccccccccaaacacccggcacagaagcaccctcttgcagggtggttaacgctctgattctgccctctgtcttgtttagtggcacacacctgtaactcccaacatttgggaggctgaggcaggagagtcatggattcaaagccacttgaggctgaggcacgatcaagaggttgaagccgtcctgggctttataataaaacacacgcatgcgcacacacaccctctttcccatgcacacgaaacaaagaaaacttcttaaaggagggagggctgaagtttagtgatagagcgtgcacagggcccagagtcccctccctcgcactacaaagaggaagcataagtgactgctttttgggggggtgggggtggaaggggggacttggaaagttcattcagtattttctcttgtttcattaaaaatgctgggggcagtccaaccaagtgggctttgcaacccagttgttgggctgaagtttaaaatgaacagcctgttgaatgacttctcctgagctggagggcctgcctcagaaggctgcaaacccttcttggccccccaggaaagcctgctgcagtttgccctcttccagtctgggcctggctcacaccctggcgtttcctttctgcctcagatcacacaaagggtaaaagggtgtgcccggagcgcctcagatcgaaagaggggaagtggtgtggtcttgggtgattgggaaactgggatggctcacaaaggtggaatcatgtggctttgtgtcttgagacgcttccggtcaacctttgggacatttcattcattgatttaccgggttagtttggaagagagaagtagccctagccatctctgccttactttcttggaaggtttcccgagtgtcctaacacccagtctctttcacctaccttcctgcaccctgttactcgacgttgggcacattaaatgcctgaggagttctggtaacaaaagcctacagtagccaccgtatctacactaccgatagcatcttatcagcctcttcggagaggcaattagctgattgccttggttcgaggctgggggaggtgctttggatctgcctgagctggcaggtgtaaaagccggaagtctttctcctggttttagggagtgtgaccagggtctgtctctgtcaagagtcccgcacagtcagctgggctgcagagctccaaggaagagggcttagcatccacaaggacccatgggttcagttttctccatacacaaaggatccccttctgtcatctgggcactgaatgaaaactcaggcctctgtctcccagcattccagattggcacccctggaccggagcctaacattcagcatcatcagcttgcctcggggcttactgtggtaccgactgaaacttatcgcttaaactcatacggtcttaccaacccctaagtccgaggacactgggcatgactatgtcccagaaccctgagggaactttaaaccacaggcagaactgtggcttagttgggccaacctccagcatccctctctgagaaaggtgccgttcagagccacactgtatttttggttccaaaatagcatccttgttcgtggctcatctcttcccagtttagcacctaatgactagtggtcaattctgaaggtcagacttgtcttctagagatggggactggcttccctggagaaatcacttcagacaaaggactttcaccggccagagcagctgaaaactaagtgactattttcctggagtggtcatctttgcttggggatgtgaagtctacctcagtcctgtgtaaggcaagagagtgagagagagacatgtggtcttgttccaggcaggctgggctcccaccttccgtcccacagatgctagaatgctcgggaagtgccgagtgctttgttagtgatgtgtcatcaggagtgttcaaggcagggctatctgctacttgcatagagcagagtcatgcagagcctggggtacagcccagtgacagaatgtggatttagcatgcatggaagccatgaggctcagctctaggggagagggaagagagggaattacatatttgttataactctgtcttcatgtgctatgggcgtaagagccttccatttgcagtctttgtgtttgctccagagcgctgagggcttgagtggataagaaacgcgttagctggcacccttagtgtgagccttccttccagtatacatgtctacacatgcagcctcaacttttgtgcaccccctgtgaaccagacaacagtataaagctcttctctcactttgcaaatcaaggaccaggtgtgtctcagggtggtggagcatttgcctcacaggcatggggtctcagggttaatcttcagagtcccttaaagaaaaagaaagaaagagagagagagaaggaaagaaagagggaggaaggagggagggaggggaaagggaaggatattcgattcctgtcccagctctaaggggtttgtagagccttagttctgggaccctcttagcccctatcccaggtttatcagtagctagagactcctctgggccagagagaggccgaggtggggccaagccttgctggttccacactggctaatgacccacaggacggtaaaaccataaaatctgcagacacttttgctccaggtgagaatcctttgctttcctgttagctaaaaataatccacattctatgcagtaaattagttttagtcttcagtgttggggcctgatcaataaatagtagttagttggggggtaggtattgtgagaattacctgtaatttagtgccctgtaggctgaggcaggaaagatgctgagaattcaaggtcacctagactacactctgagaccttggatggatggacggacagacggatggacagacagccaggtgtacagacagacagacagaagagaaagagagggagggagggagggaagaaggaaggaaggaaggaaggaaggaaggaaggaaggaagagaggtaaataattgtaaattttcatttcctccccagagttaaatggtcaggaggcaggctcattagatcccttagatttctcagttatagagatttgctttgtttttgtttatatgcatgtgtttctatgccccttgtgtgggatgctctctctcaggctggatgaaggtgtggattccttagaactggacttacaggaggttgtgaaaccacctcacaggaatggaggctctagggaccaaactggagtcccctggaagagagagcagcatatgttcttacccaccgagccttctctgtggtcctaattctcaagtttgatttttgaaaggccacgtttgtccatagctacttccatctttcaagatctgtcgttatggaatgcttgcttgcctgtgtacctgtgcaccacgctgtgtgtctgctgctctaagaggccggaatgggccagggaaatctctagacctgtagttttcaggcaactgtggattgtctgtggattgtctgtggacagtgagaactgagcctagaacctcagcatgagcagtggacactcgtaactgccgagccatctcacgtgccacatgaaccaagtttggcgtcaaactggtcctgcctgcttgagtgctgcggttacatgcccagcctatgtgtgttctaaaaataccaagagtctctcaccagttgcctttaatcccagcactcaggagacagaggcaggtggatctcttgagttccaggccagcctggactacagagggagttctctggacagccacatctacacagagaaaaggaactctgtctcgaaacaaaacaaaaccaaaaacaaaccatgaatctctaataggaagccaggctgtgtgttagtggagaactaaggctcttaagtactaacagtagattcagttatgatccatttaacccagcccttcttcagccttggttttcccgtctataaaatggggacaatagtgacatgttattgggctgggtgagaaaagagggtgctatataaggccacaaagcaggggttcagccctcagccctctccccctcctcaagtgggctggctcgtgagagtgagctgctcattccatttaacgcttcatgttagtaagccgtgacgaagcatcatgtggggagggatgtgtgtggcctggtcaggctttttgtcaaccacagacaggaagcagggagtcagaaagcagaaactgagcctcaagggcacccgacccagtcacacagaaggcctgcctgacagccgtcctcaggggcacccggcctagtcacacagaaggcctgccgggcaggggtccttcagccccagtctctgaaaccttgtgcacagagacttgatggtgcaggaagggttggctcccttctgtggaggtccagcatttggggactggagaactgactcagcacgggagaacacttcttgctcttgcagagaacctaggttcagttcccagcacccatgtgctggctcgtgagcagagccgagtcctgactgtcaggaccctcgggagggtaaagaaacaccctccatgtttgcttaggaagctgctaggtgggccaggagaaatcaccctgcttccccttcttgctgagggggaagtggagggcaggggcagcctgaacagagcctcctaacgtttcagccactataccccatgcttctgggtcctccccagggtagggtagtccggtgatcatcccccatttttagggggcctgaagtactctagatgtttggacagagttgagagaacagggaggggtgtgtggtgctgcctcacacttagcctaaggcttgtctgggtggggctttgtccactgttccagtgaaaggtcccgcatagagctctccaggtcctgcttcctcttgcttgaaatgaaagcgtgcatccggcttgaatgatcacttatttagtgcttgtgttatcgaggtcagggataacttgcaagtcagctttctccttctgtgtttgttctgggaatcaggctcaagtcatcaggcgagtgccctgactttctgagtcgccatcttgccagccccctccttccttatagttcaggggagataatgtgtggaatgtgcttatggccttggtgttaagggctgcgcagatgttaaggttgttaacactgacagtggcgagtacactgatggtggtgagtggcgtctgtgggtcaagggaggatgggattgtcttccactgttcaagatgccggagtctttggggtcttgttttatacgcatcttccctcgagactctgactttgttagattgggccttgctatgtagccctgtcaggcccaaagctcactatctagaccaggctggccttgaaagttcgtggcatcctgcatctgcctcccgagtgttaggttcataagcatatgccacccttcttggccgcacacagggacttctaagaagtgaggtgggtggagctaacctggaaatactcctgtccacatacctgccctcagaactgatgggcgtcctcagggtcacaggggaataggtagtaattagaaattaaaaacaattttttttaaaagatttatttattattatatgtaagtacactgtagctgtcttcagacacaccagaaaagggagtcagatcttgttacggatggttatgagccaccatgtggttgctgggatttgaactctggaccttcggaagagcaatcgggtgctcttacccactgagccatctcaccagcccaacaattttttttttaatatgagaaggttgtagtcaaaaatccttggaagagcagttctcttgtgaaccttacaggcggcattctccactgcttcctattggccacagagcagggtccctaaggagctagagaggtcccctgcgtctgtgcgtacctcacacctgtgtgtccttccaggcggtgtgagaggttcacccctgtgaaatgttagtccagctgccttgttccaggctgtttcagcatttggatgtgtgtccctgcttggtcgtgaaggataggacagagaaagggagagagaggtctgactctacccagactccatgagtgggcggctctctgcttctagacaacacccttcccacactccattgtcgcgctggctgctgccctgcctgtccgccagcccagactacagcaataaccattatttagccagcggtagtgacccaggtactcccagttggccgcagccctgtgcttcctgccgactatgcacagagaatgccaagggtggggaaagcctgggaaggggataacctaagccctcactaggactcttgggtctccagagctctgggtttggctccttccttttctgttgttaagaacatgagtgagttcgcccaactcccttactcatcccttccgctgccgttctccagggttgagagggcaggccagagtcctggtaaacaagcaagaagcaacatctcgggcagatgctgaagcctccagagaatgggacagtcaccatgctgttgtctctgtgtctcattccttctacccaaaccctgggccttctttctttccccttggttgatctcctcccaacccccagtttcctctgggggaacagggagtggacctcatggaggttcttcaggcagggagggtgtgccccctgggggtgcaggaaggacacccagactctctgcctgccgcttctctgcctcatgttttgtccatcacttaagtgtgcattttacactatgtgttctgcatttgtacagtgacagtcctgtatccttattctaaagtactatgtgctttgtggggattgcgctaaagtcacccaggggagtatttggcctgtctttcggcaatccagggactggcacagtcattgtatcatgtgctgaccatataaaatgagcagcagcctagggccgtaagtaggagcggctgtggtggttactgttgactgaagggggagcgaaaaagggtcaggccctgccaccgggaagcaagctctcccttctttctcccctttctccctcctcgtcttctgtctttctttctttagagatagggtctcgggtagccaagccattttgcactttctgttttgaggttgggtctcactgtgtagccctagatggcctagaactggctaagtagaccaggatagccttagtctcagatctgcctgtctcagcctctgaagtggtgacgtttatataccatgcctgattttgtgcagaatatggggctttgtggccaaccagtcctcgcatggatttcttatagctggtatctccttgtactgtgcaatagcattaaggaggtgaatgtctgagttgaagggcaacctggtctacatagtgagacgttctcaccaaaaaaaaaaaaaaaaaaaaagtttagctgagcttgtcatggtcaaatcacttagacacacacgcacacacacaacacggtctcgctatgttgctcagactggccttgctctccccgctgcctcagtagctaggacggtgggtggtcacttcaccaccacaccctgcttgagtggcaacaggagagaactggttggctcgcaacggaacccttcacccacccattccttctgccccacagatcaaataccatgaggagtttgagaagagccgcatggggcccagtggaggagaaggggtggaaccagagcgccgagaagcccaggacagcagcagctaccggaggcccacagagcagcagcagccgcagcctcaccatatcccgaccagtgcccccggtgagtgccagcgagggagccggggatgggaggagggggcctgaggtcaggagagtggggcggtaagaaactggctacatacacaggcgtctatgcatgtggggctgctccccaaaatctcaaccccatccctggctaaggtgagagagcaggagatctggaaaaggtctggatttatgtgtgaggagcatacagccctggcatgaagtctgagacactaatgaatgcgcatgcctagccacaagcctttgctttgggggggcggggggaccagtgctgagcaaggcccaaggtggggctggaaattcatacctttgacctcataccggggtgagggaatgagtttggcaagacactttctgaagtgtctcttccatcttctagtgtaccagcagccccagcagcagcagatgacctcgtcctatggtgggtacaaggagccagcagcccctgtctccatacagcgcagtgccccaggtggcggtggggtgagtaactgtctggaatagaggggctctgggtggaagaggtcacagccgtgtgcacctgtgtacagacacactcacacacacacactcacatgcacacatacgataaaagctaaggatatagctcagtggtagagtactcgcctaatatgcacaggatcttggagttcttctggtccctggtaccatgtcccttcccccagaaaagggttatactgatttgtgtcctgctctgtgtgagcaggaagtagcttcacgctgctctcttgagccagcctatagtaggactcgccagtttcgctggattgagaaaatgagcacccaccagtatgctgggcggccctaggtgtgaagttctagcctgggggttccgggatacgttcctccggggatcgtgtgccagccaggctcatctccacgctgggattcaaagcaattcatgtcagcgtagaagagagataaagcggcctgggagaagtgacctctctttagggaggaggcaacaaaaggggctgcgtgaagggtaaggtggtgaatgacctgacccaggcagggtaagagacatagagcagcagagtcagactgtgacatttatggtatgggggacaagaggaacagctgatgcaaagaccctctaacagaatgtccttggagggtcagtaccctgtgggaaggctcaggttcctggagacaggaagagcaagtagatgaggttaagccctttggggacttgtgggcccaggagaaggaaagcctttgagactagtaatgtacactccactccactgcgctcctctaccctgtactacatacactacactgatgtttggcttttgatttatcgaaagtcaccctggcagttgggtatgggtgtaacctcagcacgtggaggggtgtgcggcaggaggatcaccacccgttcaaggctaacctggttatatagctagactttgtcttgaacatttttctcttttttaaaaaaagggaggcattcaccatgtggggtagatagaaagatggcagactgagggagtgggtgtgttggggcgttgtatagaggatagccatagactgcagtggcagcttggctggagatgaagatagtatacagaccaggatctgctggtatctcataataggtttggcatcttagaagccttttgttccccatttgggactgaagtcagactaataacggtttcagaaaacattggtactaatagccggtcaaataacagtgattagattatacctctttttttgttttgtggtgttgaggatcaaacccaagacccaaggatacaagggtttttatttacaagttcaggctggacttgaactcagggtgttgtcttgttttgaatttcagtctcttgagcgctgagattcaaaatcctatgttaccatgccgggtatggcagatcacatttttttcttatgtgtgttagcgtttttgtctgcatgtatgtcagtatgagggtgtcaagtcccctggaactgggattacagacagccatgagctgccaggtagtgccaggaattgaactcaggtcctctagaagaacagtcagtgctctcactcactgagccatctctccagtccctgtgtatcacattttaaagccactatttgtgtcaagcctatgggactttactgctgctgtgtggaaacaggtccaagagactctaccacacagcccaccccaggctgcatcttccgattcattattactttcccccaagatctctgagaggtagagaggaacctggggcctgggagtgacttggtagagccctcgcccagcacaggagaaggtctcggtgtgggcgagcctacatccgatgtctacatctgatgcccaggctaactattggctgtgctccacagaaacggtaccgtgcagtgtatgactacagcgctgccgacgaggacgaggtctccttccaggatggggacaccatcgtcaatgtgcagcagatcgatgacggctggatgtacgggaccgtagagcgcaccggtgacacggggatgctgccagccaactacgtggaggccatctgaaccctgtgccgccccgccctgtcttcaatgcattccatggcatcacatctgtcctggggcctgacccgtccacccttcagtgtctctgtcttttaagatcttcaactgcttctttatccccgcccctccagcttattttaccatcccaagccttgttctgcccctgtcatgggctccttcctctggcaggttttcccttggaccaatcaactgattgatttttctctctggatggaacaggctgggcactctggggagggcaggattgttctgagctaggtagactcccagggctgggctgaactaggagacccactaaggagatcagtttagactgggtgcagtggcaaacacccttaatcccagcgaagggaggcagaggcaggcagatctgtgactttgaagccagcctggtctacatcgtgcgtttcaggacagccagagctatgtagtgaggccctgtctcggaggaagagtgggggttggttagctctcagcttcacttcctgccttaggctcctcagaacccctggcccagctcccccgactcccttcctcctagagctggggtgagctgtgtcctcctcatacctccaggtgtggctccacacatccccagggggtcggtattaaggcctcgtgctgacctttgccctagtccatcttcctgactctctgcctcctcgggacatccaaaggagagcagagttcctgcttcagactgaatccttgcccctctgtgcagtcctccacataacagagtgtgcccattctgcccccacacacacctagggtggccagggagcgccccagaaatcccagcttgggtcagattcttgccttagttctaggggcagcagcagaaaggaaggaacagggcgctctccctccctgggcctgtttgctccctgcctcctctggccctcccggggctctctttatctccctggctgggagcctgcagtgaagggtagagcaaagggtgcctttggggcctgactgagctgtttgttcctgcttccctgggaaaaggtctccgcgtctctcctgtggccttccttccccagaacaaggctggactggctgagagctctgccaagccagaaaatggccagagtcttctggagcccaggaggccctcccgcctcgctggggaggtgggagaaggcttctgggttagacatgtgcttttctgtcgtcgtgtctgaggctacagagcccagtaccagaagggccgagtcacccacactgtggttggtacctctcacctgaggctctcctatccttgaagcaaaggagagtccagggcttcaaagctggcggcaccatctctgggctggtgctaaactcaagttccctctttgcctctggggcctgggacagtactcactctgcttcattcatctctgggttttcttgtccctcctcctgggtcccctgattctcatctttaccttgagtgagcctgatgtcaggttcctttacatactcagaccctgctacaggtgaggtttgaacctgaagactttgatcaggccagcaacgtggttgtcatgagggcttgctagagtttgcctgcctggtcaatccctttacttccgaccctcgcctgagtgaaggcagggcgtggtctggtgggcagcatggggaagagccttgtgggggcatctcaggagccacggggtggggggaggtgccagcccattccatttcctcttatctcaaagcacaatgtggttctggggaccagagggagcttgctcttggagggcctgtgttcaggaggtgctgcgagcctcctggttcctctcagctgaacctcccttcccaacgtcaagtcagctgttctagtgccctagaaatgggggagacttacaaacacctgaagaggggagaggaactacctaaggtgctgagggccccaagcctgctggagtccatacttttccagaaacatctacccctagaagagcacagaatcccccaagcccatagtctcttcctctgtaaaggtcttttcagccaatccaaacccaggaaagaaggcaccttggctagactgtgaacttaacttttgtggaccaaccccataatgcaagaagccccatggtgagcgacataggttctcccccccgggctgcttcctgttctccctcctcacgtcccttcggggacattttatttcctaatagctggacataagacaaaaagtaccaccccacagagcctatatttaaacagaaacagaagtgaccctgtgaagtccgcctctgtccaacatttcatctgtgtatgaatgtgtgtgtgtgagagagagtatgtgtgcgtgtgtgtgtgtgtgagaagccacccactcatcttttatatatcgggttgtcatctttctttggtcccctccctcctggccttgtccttgggatcatttctttctggcctgttatgattttgaacattgacttgaaccacaaagtgaatctttatcctggtgagtcaaataaaaatgtaatttttacctgcggactaggcttcttcctctttgacttctgaagtaacttctgtgtgtgtcccgtttgtcagggggcattgaccttgtccctcaccgtgaaccctgctaccattcaaagagagcaggattgctctagaaaccagagttgctcactcttcctaccctgacacttgctttctccttgaggacatagcccggcccttcagtgacatcaccagtgacagctctgcccaccctggggtactgtcacactcgaggctggcattccctgagttcagagggcccctcacactgtcctccctcttcagttaagcatcttccttctagccaccagtgtcctcctggacagttgggaggtgtcattcattcaagttcctgctggccttgggaagcaggctactctgcaagagttcaagccaaccagtgagctcagctcaggctttctagcccagagtgtactgccacgtttgacttgtaaattgatagcaagtaggacagcccacagagccacggagcctggagaaaccctccacagggtagtctggcaggcagcgggaggcagtcttccctctcccgtctcccagctctgggatggcccgtccccagccagcttgatggcaaacactgcagcctctttgctcctgggaaggcatctgtgctgagcaatacagcaccgctggaccctgactcctggtcggcagccacctggccagaggctttgtggagaggggcatttcctacctgggtttcacgtgaaagcattctctggactccctccggaacagcagggagaggcaagggctaagtgtaatctgagtgagctgagtgtggggagtgctccaggcaggggaaggacctagcagcgttcgagtttcccaagagcagcccaaaagcctgtgacccagtgtggccttgtctgctggactcgcctgctcaggagggctcccctcttgagagtggactaagttcctgttagaaagggtgttactggccgggcgcagtggtgcacgactttaatcccagcactgaggcagaggcaggtggatttctgagttcgaggccagcctggtctacaaagtgagttccagggctgcagggaaaccctgtctcaaaaaaccctaaaaaaaaaaaaaaaaaaaaaaaaaaaaaaagaaaagaaaaaagaaagggggttattaagatctcaaggtctagacccttcaaagaaaatatttggggagagtctaagaatgccagaccttagaaactgacctatagaaatcctttcctttttaataaacagttggtacacaacacaaagcagaaagaatcaaaatacatcgcagtgggtgtgggttttttttttttaatgtgattgtttatgtatgtgtgtgtacaccaaagggcatgtgtggacatcacaggacaactaacagaaaggagtccttgtctttccactgtgggccccagggattgaactcaggtcctcaggtttggtgtacaacaccattaccccttgagccctatcattgagtttttgtaagattcggtccctcagaagaaaccacatgaaagccagctgtaatggcagtgctcagaggctgagaggtagagtcaggagaatccagtcaagggccagcctgggctaactgagactccctcaagacaaaataaaacaacaacaataattaataataatacaaaaagaaacaacaaaaccatgcttggatttgcatctctagacactaggagcgggtgtgagtgggttttttgctgttttctctgatgacgacacgaggtaaattcagaagatccagagaaaacaaacgggggaaactggcaccacagaagggaaggagagacctcatgtgacacaaatgagcttgggctctgaggatctcccagaccaacaaggcaagccagcgtctggtggaatgtgagaggctcgctttgactcctgccccctattgacaagttgttaaatttatcacgcaagctcctgaccacccttgagctcaggctttaaaagacttcagactggttgaaatgacccccagcacagtgagaaaactcagatccatgcccagggtcgccctacccccacccctcgcctcctgagactcacatgagaccttcctctatgttctctgaactaggtaatggcccacaaaactggcaacaatttgtcttctgagatagattaccagagatgtgtgagagggagaaggaaaaaggaaggcagaaaaatccattcctaaggagtctgtagagatcctccgctcacaccttccggagcagcccactcagtgcagaaactgtatctaaatagagatagcggtttttttgttttgtttttttttttccacacaaaggggcggggctggcttcctgggaagaaattaaacctctccggttttgcctggtctaaaagtagctgttccctggttacccaccgtggactttgtgattggctggccgtgatggtggaggtggagagtaagttgctgatggggttgcagcatcccttagcttcaggtccccgggagggggagggaacaggaagcgggagggaagaggagccatttctccgcgctgaccgacctccacgcttgcagctcccacttccccggaatcgaggggactcctctgcttgtactgagccatgctggatattttcatcctcatgttctttgccatcataggcctggtggttctgtcctacataatttaccttctctagtggcctggcgctgcaggggctgcgaggggaaggatggagctgaagggccgagcatcctgcttgctgacgcaccggtggagttttgcttctggtcattattcgggtattgattaaaaaaaaaaaatgaaaagaaagcttgtttttgtatctatttgtcatacacattgacgtagcatttcttggatcaatgtgaaaagaataagaaaggccagctttctttgggaattgatttaaaatgttatttcttaaaaataaacatcactacaaataagtaaataaataaatataaataaaatgcactaggttttaggtaggatgggagggagtgtgctggggggtggagggggacagactattatttcctaatttccttccaggtagatgcaaaaccaagttgtccattctctcctgacaatgactacagtacatccttatgtgtggacaaggcagttttcaaatctgctggcataattgtattcattaattcactgctgcgccataactgcattcattagttcactagtgattaactcccacttgagaaaaaatagcaaatgaaacctacttggggtaaggggtgagggagatgcccactttccccagttgtgtagaggaatggggaggattctcagaactcctgctagttcctgaccagtaggggtacccctgctgcagtttgcagctgaccattgtttttgggtttcccacagctcctgtgtcgggtccagcaagaggcctctcaccaccagcagcaatcctgaggcccaactgatctcttccagtgtatccggatgtggctgacccttggcacgaaggcattctgtgaggcaggggcactcctggggacatcaggagttagtccaagaatgccagccactggcagctgctgcatgcgattgagctgtagacagggactattcagaatatggaagattggaacagtgaagtcagagtggagactgcccaaacattcatatggacagcctttccttaggtctaaatgcaactgcacacgatgctaaaatattctttgctttctgcttcacaagcaggcgttcccttgtaacctcaagggcaaacactgatcagtaatttacagtttgtacagcctgaggttgcgtggtttcccttgacttacaacccatcccccaccctcaaaattcccgttatttgcattctttaaggtttatcatttcttccctccttttctcatttgttcccagctccttagttgactagaggcgcatggttgtaaagtccttattctttgtgcttacctataaagcattgaaacaaaatggctatattaatttaggagaaaaactttaccctaaatggaagggtttgaaaactttaaaaaaaattttaaacgttcctttatctttaaaataacaaagctgttatttccttgtccaattagggttcaaacaaacaaacaaacaaacacacaaacaaactgtgttttaggatacagcatggatctgaccccaaatccgtgttatctattattcccttaaagactctaccataattgctctgcattgattttcttttttaggttaaaataaacaagaaaaaaagaatgaatgaataatttcttgtaataatattttgttcaattgctgtttcaagaaggaacgagctgagtactgtagcacacgcctgtaatgctagcacttgggagtagagacagaagggtcaggagttcaaggccggccttgactacatgagatcctatcttctagagaggggctggagagatgactcagctgttaacaacacttgttgcttttgcaagggaccccgttttggttcccagcacctagatagtggctcacagtcatctgtaactccagttccagaaattttgatattttctgggttttgcatgtactatacacacaagtggcgtacagacatacacctgtatatataaaataaataaataaagagagaggcaaaaattgagattgtataatttatgctacaagtttgcatcttaaattccttcctggacaaaccttgtggttaccctgtagttctagagctgaggcaggaggactgccaacagcagcagggatagagctcacctcttcccattctttatctctacagtgctcgggattgaacccagggcctcccccgtgctagccaagtactctaccagccccagcccaagacccttacatctgaaattaatggtgatagccgggcagtggtctttaggcccagcactcatgagacagaggcaagcagatctctgtgagttccaggccagcctggactataaagtgaatttgagaacatccagggctactcagagacactgtgtctggaaaaaaaaaaaaacaaaccaaaacccaaacaaacaaacaactaaaaagatacaatccagagaagaaagaaacatcaattctacctaggtcacagtcatttaagcgttacagctctagtttattcccagactggaaaagatttcctatctcttcccatgttaaaattctaaaacagccaggtgtggtgacatactcaggaggcagaggtaggcagatctctaagtttgaggccagcctggtctacagagtgagttcaggacagccagggtaacacagggaaaccttgtcttaaaacaaaacaaacaaatctaaaactctagctaagtaactgtggacagccgtgagtcgttaccacgctctcagcctttcccacttggccttatttgttctgggtaggatcttgctgtggagcccaggctggcctcgaattcacagtcctcctgcctcagcctcctgggtgcagaaattacaggtgtgtgaccatcttcacataagactttatagtgaaaattcaactgagagataatttgaggagaaaatatatttatttactgcaaacatatatcgctggtaatttgtcgagggtgttagaacatattaagaaatctaatactatgtgacaacgttgcattaagacaagtaatgggcagattcactgctgtgatgagcatgccctgagcgttgatatacttaagggtaatcttcaggggcaccctgacatttctcttatttctctctcaagtatttctctgacttattattattacttattattattattattattattattattattatgaaataatcttattatttcaaactccagttccttccttccttcctccctccctccttccctccttccttccttccttcctctcttcctttcttccttccctccttgagaggaaagtgctcttatgcagcccaggctggcctcaaacctgaaatcctaacagcctccactcccacagggctgggacaggcctgggctctctgcctggttcaaactacaattttctaccaagatagcagttctgtatccttacctaagcaactaccaaagtttgaagggatgcaaagtacagagttaattatggtgattaaatctttacggtaaagtctctctaatcaagtttcactctgaagttctatgaaaccgaagctcttcagtctatatccatataaaattgaaacaacttgtcagtaagcccatgaaagggcaaagagctaacctcagagaaggtacatatgcctccagacctgggcacaaagtaagatcagacaaattatcctttcattttttttttaaagatttattttattattatatgtaagtacactgtagctgtcttcagacacaccagaagagggagtcagatcttgttacagatggttgtgagccaccatgtggttgctgggatttgaactctggaccttcagaagagcagtcaggtgctcttacccactgagccatctcaccagcccccctatcctttcatttttaaaaattgtattttatcttgtatttatgtgttgcaagcctgagtgtatgtttatgtaccaggaactgcaggaacccataacctcagagaaggtacatatgcctccatacctgggcacaaagtaagatcagacaaattatcctttcatttttaaaaattgtattttatcttgtatttatgtgttgcaagcctgagtgtatgtttatgtaccaggaactgcaggaacccaagaaggtcagaagagtatgtcagatcccctggaacaggaatccagttggctgtgagcctccctgtgggtgctgggaactgactgaacctgggtcccctgcaatagcagtaaatactcttaaccattgaaccatctctccaggcctagactggcctttaaaaaaaaatgtaacttataaaatatcatagtttaaaaaaacattttgtgtgtgtgtgtgcatgtgcgtgtgcgtgtgtgtgccacagtatatggaggtcagaggacaacttgtgaggagtctgttttctccttatattatatttggatccagaggattaaataggtcttcaggcacaggcaccttcatgtctctgtagggttttttgtttgtttgtttgtttgtttgtttgtttgttttgagacacagtttctctgtgtagccctggctgtcctgcaccaggctggcctcgaactcagaaatccgcctgcctctgcctcccaagtactgggattaaaggcgtgcaccaccacacccggccatgtctctgtagttttaagaaataaacttggagaattgttttgtgcctacacaccctggcaataacacatccagaaataacagtaggttttctgttctgttgtgttgtgttatgttgtttttgatttctcaggacagggtctcactttacctgagactggtctcagcttgccatctttctgtttcgacctctccagcgttagtattgtttagtttggtgaatgtatttgctttaacattttttattattattcaatgtatatgtatatgggtgttttgccagcatgattgcttgtgcaccacacatgtgcctggagccagtggagcagaggccgggagaaagtagactctcctagacttctgacagccgactgtgagctgccagatgggcataggaattgaacttggtcctctgcaagagtagccattgtttaggggctggagagatggctcagcagttaagagcactgattgctcttccagtgctcctgagttcaattcccagcaaccacatgatggctcacagaatattgtaatgggatctgatgccttcttctggtgtgtccaaagacagctacagtgtactcatataaaaatacatagatcggggctggtgagatggctcagtgggtaagagcacctgactgctcttccgaaggtccagagttcaaatcccagcaaccacatggtggctcacaaccatctgtaatgcgatctgactccctcttctggagtgtctgaagacagctacagtgtacttacatataataaataaatctttaaaaaaaatacatagatctttaaaaaacaatatcatatatatatatgatatatatatatcatatgatatatatatatgtatcatatgatatatatatatatatatatatcatcgtttttaactgctgagccatctctccaacatcttttttttttttccccaacagcattttttttttagatagtctctgagtgatgctcaagtgggtctcaagcttctgggttaagtcagccactcaaatagagaaaaaaaattttttttaattctagctggcctggaatccactgttgtgttgatttaaataggtttggcccccctatagactcgtgtttgaatgcttggcccacagggaatgacactattaggaagtgtgtccttgttggaggaattgtgtcactgtgtaggtaggctttgtgggttcctagtgttcaagctctgctcagtgtggaagagacagtctctcctagctgtcttcggatcaagactgcaaccatgtcggcctgcacactgctatgcgtcctgccatgatgataacggactgtaagccagccccaatgaaatgtttgcccttctaagagttgccatggtcatggtgtctcttcacagcaatgaaaccctaagacaactgtgtacctactgtatgctggccttgaacgtacagcaatgctcttgcctctgtctcccaagtactggaattacaggcatgagctactatgtctagctagaacatgttttatttcatatttaaactacatgtaaattgggattttcaagcacaataaaatattaaaaactttatttgtgtaatgtaaagtttgtattcatgtcacacatctccattacagcaccatcatgtaaaatggagcttatatttggcttatgccagggtaataaaacgtatctaaataactctaaactatgctgcaaaaactaagatgacagaatgctaagaatcattatgctaatatttttgatgaaattatagaagtgatataatttattttaggaaaattactaggatacattttgagaatgttaaggagaggagcgaaacgctgtaaagtcagactgtatttttctcagtgtgtggacacagactggaagtttaatcttgaaatggggctgaaaaaaaatttattaaatttcaggaaaaggccaggtggtggtggtgcacacctttaatcccagcacttgggaggcagaggcaagcagatttctgagtttgaggccagcctggtctacagagtgagttccaggacagccagagctatacagagaaaccctgtcttaaaaaaaaaaaaaaaaaaacaaaaaacaaaacaaacaaacaaaaaaaacaacaacaaaattcaggaaaaaaagaccttgcttttcaaaatggtttaaatttagcattattcaaaatgtaaaacttcttatcatttaaatttgaaattacaaataacattttccttaagcatagccgaggtggaaacttctattccttgctccctcagactttttgtaaggttgagaaccactacctcctccctctctcctctttctctcattcttggttttttaagacagggtttctctgtgtatccttgcctgtcctggaacttgaactcagggatccacctgtctctgcctcccaagtgctgggattaaaagtttgtaccaccatgccagctatgaacacataaggataacttacctatcttggacaataccctgggttgtatctgctccctccatgaaggagaaagggagggagggagacactggaatcatgacattgggaagttgctggtaacaacagtaacatttgcttacttagggatttggaactggtgttaaactgataattataacatctattttagcagcatctggaatcatgcttggggcctctctctttgaatcaaagagaaccttgtaca

SEQ ID NO: 2996 - DNA, 3375 bp, Mus musculus
ctcgcccaaggaaaagggaacgcgcgcgaatacgggcgtccccgccccagtctttccccggaaccatgaaccctaactgtgcccggtgcggcaagatcgtgtaccccacggagaaggtgaactgtctggataagtactggcataaagcatgctttcactgcgagacctgcaagatgaccctgaacatgaagaactacaagggttatgagaagaagccttactgcaatgcacactatcccaagcagtccttcaccatggtggccgacactccggaaaacctccgcctcaagcaacagagcgagctgcagagtcaggtgcgctacaaggaggaatttgagaagaataagggcaaaggtttcagcgtggtggcagacacgcctgagctgcagagaatcaagaagacccaggaccagatcagcaatatcaaataccatgaggagtttgagaagagccgcatggggcccagtggaggagaaggggtggaaccagagcgccgagaagcccaggacagcagcagctaccggaggcccacagagcagcagcagccgcagcctcaccatatcccgaccagtgcccccgtgtaccagcagccccagcagcagcagatgacctcgtcctatggtgggtacaaggagccagcagcccctgtctccatacagcgcagtgccccaggtggcggtgggaaacggtaccgtgcagtgtatgactacagcgctgccgacgaggacgaggtctccttccaggatggggacaccatcgtcaatgtgcagcagatcgatgacggctggatgtacgggaccgtagagcgcaccggtgacacggggatgctgccagccaactacgtggaggccatctgaaccctgtgccgccccgccctgtcttcaatgcattccatggcatcacatctgtcctggggcctgacccgtccacccttcagtgtctctgtcttttaagatcttcaactgcttctttatccccgcccctccagcttattttaccatcccaagccttgttctgcccctgtcatgggctccttcctctggcaggttttcccttggaccaatcaactgattgatttttctctctggatggaacaggctgggcactctggggagggcaggattgttctgagctaggtagactcccagggctgggctgaactaggagacccactaaggagatcagtttagactgggtgcagtggcaaacacccttaatcccagcgaagggaggcagaggcaggcagatctgtgactttgaagccagcctggtctacatcgtgcgtttcaggacagccagagctatgtagtgaggccctgtctcggaggaagagtgggggttggttagctctcagcttcacttcctgccttaggctcctcagaacccctggcccagctcccccgactcccttcctcctagagctggggtgagctgtgtcctcctcatacctccaggtgtggctccacacatccccagggggtcggtattaaggcctcgtgctgacctttgccctagtccatcttcctgactctctgcctcctcgggacatccaaaggagagcagagttcctgcttcagactgaatccttgcccctctgtgcagtcctccacataacagagtgtgcccattctgcccccacacacacctagggtggccagggagcgccccagaaatcccagcttgggtcagattcttgccttagttctaggggcagcagcagaaaggaaggaacagggcgctctccctccctgggcctgtttgctccctgcctcctctggccctcccggggctctctttatctccctggctgggagcctgcagtgaagggtagagcaaagggtgcctttggggcctgactgagctgtttgttcctgcttccctgggaaaaggtctccgcgtctctcctgtggccttccttccccagaacaaggctggactggctgagagctctgccaagccagaaaatggccagagtcttctggagcccaggaggccctcccgcctcgctggggaggtgggagaaggcttctgggttagacatgtgcttttctgtcgtcgtgtctgaggctacagagcccagtaccagaagggccgagtcacccacactgtggttggtacctctcacctgaggctctcctatccttgaagcaaaggagagtccagggcttcaaagctggcggcaccatctctgggctggtgctaaactcaagttccctctttgcctctggggcctgggacagtactcactctgcttcattcatctctgggttttcttgtccctcctcctgggtcccctgattctcatctttaccttgagtgagcctgatgtcaggttcctttacatactcagaccctgctacaggtgaggtttgaacctgaagactttgatcaggccagcaacgtggttgtcatgagggcttgctagagtttgcctgcctggtcaatccctttacttccgaccctcgcctgagtgaaggcagggcgtggtctggtgggcagcatggggaagagccttgtgggggcatctcaggagccacggggtggggggaggtgccagcccattccatttcctcttatctcaaagcacaatgtggttctggggaccagagggagcttgctcttggagggcctgtgttcaggaggtgctgcgagcctcctggttcctctcagctgaacctcccttcccaacgtcaagtcagctgttctagtgccctagaaatgggggagacttacaaacacctgaagaggggagaggaactacctaaggtgctgagggccccaagcctgctggagtccatacttttccagaaacatctacccctagaagagcacagaatcccccaagcccatagtctcttcctctgtaaaggtcttttcagccaatccaaacccaggaaagaaggcaccttggctagactgtgaacttaacttttgtggaccaaccccataatgcaagaagccccatggtgagcgacataggttctcccccccgggctgcttcctgttctccctcctcacgtcccttcggggacattttatttcctaatagctggacataagacaaaaagtaccaccccacagagcctatatttaaacagaaacagaagtgaccctgtgaagtccgcctctgtccaacatttcatctgtgtatgaatgtgtgtgtgtgagagagagtatgtgtgcgtgtgtgtgtgtgtgagaagccacccactcatcttttatatatcgggttgtcatctttctttggtcccctccctcctggccttgtccttgggatcatttctttctggcctgttatgattttgaacattgacttgaaccacaaagtgaatctttatcctggtgagtcaaataaaaatgtaatttttacctgcg

SEQ ID NO: 2997 - protein, 263 aa, Mus musculus
MNPNCARCGKIVYPTEKVNCLDKYWHKACFHCETCKMTLNMKNYKGYEKKPYCNAHYPKQSFTMVADTPENLRLKQQSELQSQVRYKEEFEKNKGKGFSVVADTPELQRIKKTQDQISNIKYHEEFEKSRMGPSGGEGVEPERREAQDSSSYRRPTEQQQPQPHHIPTSAPVYQQPQQQQMTSSYGGYKEPAAPVSIQRSAPGGGGKRYRAVYDYSAADEDEVSFQDGDTIVNVQQIDDGWMYGTVERTGDTGMLPANYVEAI

SEQ ID NO: 2998 - DNA, 71772 bp, Homo sapiens
ctcggcctcccaaagtgctgggattacaggcatgagcctccttgcccagcctcctttacactcctaaattattaaagacctcaaggagtttttgttcatataggttatatctgatgacatttaccatattataaattaaagttaagaaagttattacttcacgtaaaataacaataaacccattttttgctaaagtaaataacattttagaatgaggaataggtcaagtttggtggctcaggcctgtaatcccagcgggaggatcacttgtcctcaggagtttgagaccagcctggacaacaaagtgagatcctatttctacaaaatatcaaaaaattagctaggtgtggtggcgtgagcctatggtcctaactacacaggaggcggaagcaggaagatcacttgagcctgggaggttgaggctacagtgagccatgattgcgccactgcactccaacctgggcaacagagaccctgtctcaaatataaaataaaataaaataaataaatgtaactatatttttccaaacaaaaataatttagtgagaagggtgactttgctttacttatttttttttaaatccctttaatacctggcttgatgaaagaactggtttttcatgtttttacactaatctgttgtgatttcacacatttaatctctggaaatctccactgtattctcatgaaagagcaagagtaagacagaaaaaaaatgacattattattaaaataattctttcctctgcacagaaagggtctcactaatattatcaagaaaataggccaggcgtggtggctcacgcctgtaatcccagcactttgggaggccgaggcgggcggatcacgaggtcaggagatcgagaccatcctggctaacacagtgaaaccccagtctctactaaaaaatacgaaaaattagccgggcgtgatggcgggcgcctgtagtcccagctactcgggaggctgaggcaggagaatggcgtgaacctgggaggcggagcttgcagtgagccaagacgccaagacggcgccactgcactccagcctgggtgacaaagtgagactccatctcaaaaataataataataattattattattctggctgggcgcgggggctcacgcctgttatcccagcgctttgggaggccgaggcgggtggatcacctgaggtcaggagttcgagaccagcctgaccaacatggagaaaccctgtttctactaaaaatacaaaaattagccgagtgaggtgccgcatgcctgtaatcccagctactcgggagactgaggcagaagaatcagttgaacctgggaggcagagtttgcagtgagctgagatcaagccattgcattccagcttgggcgacagagcgagactaccttaaaaaaaaaaatcctttcttgcacgcagaaagggcctaaaggacacccaggatccccacatcacacttacaactaccagggattcagagaacactccaaagttgcagataacacatcctcctataacttaccagtttgtatgttgatatactttgtagaaggtgaagtctatgaaggtgaaaagggggtaatacgtagtttattattttcccagtatccaccacagaatgctccgagagctttatctttcttgcccgtcactgtgttaaaacggtggctgtgagggggcacccggatttgaaccggggacttcttgatctgcagtcaaatgctctacccctgagctataccccctctaccaaaaaaaggaagactgcgtcttaaatgtagtgttttctgatcagacattgcctgcagtgattcagaatagtttggtgtctatgataaactatttagagtgatctggacccaagtaaagtggtgggagagaaaagagaagtctaagtcctctctgattctggcttgagggtcttgtacggatgtgcagtgggatccctcttttccatcactatagcgcccccttttttttccactacagccttttttacctctggcatctgggaattctcttattttattatttatttttattatttttttgagatggagtctcgctctgttgcccaggctgcagtgcagtggcgccatcttggctcactgcaagctccgcctcccgggttcacgccattctcctgcctcagcctcccgagtagctgggactacaggaacccgccaccacaccgggctaatttttatatttttagtagtgacgtgggtttcaccatgttggtcaggctggtctcgaactcctgacctcaggatctgcccacctccgcctcccaaagtgttgggattacagccgtgagccaccgcgtccggctgcatttgggaatgcttcaagtcaattttttagcctctgtgcctgcaacgtgagctgcagtgaatcctcagccccgtgctttgcacacaagaggaagtacttcccttgtccttcccaagaccatctctgcttccgggccaggtgtgtctccgttgtctccattttctccagcatcttcaatcacttcctcttcccctggctccttcaaacatcaacaggtttccattaggaaagtattcttctttttttttttttttgagacggagtttcccacttgttgcccaggctggaatgcaatggcgtgatctcggctcaccacaacctccgcctcccgggttcacgcgattctcctgcctcagcctcccgagtagctgggattacaggcatgcgccaccaccccggctaattttgtatttttagtagagacgagggttctccctgttggtcaggctggtctcgaactcccgacctcaggtgatccgcgcgcgtcggcctcccaaagtgctgggattacaggcgtgagccacctggcccggccagaaaagtcttttacctgtgattgcctgttcattttcttccttctcactaccaattttttactttttttttggtctcgctctgtggtccaggttggagtgcactgacaccatctcggctcactgcaacctccgcctgttgggttcaagggattctagtgcctcagcctcctgagtagctgggattacaggtgcgcaccaccaggcccagctaatttttgtattttttgtagagacggggtttcaccatgttggccaggctagccttgaactcctaaattcaagtgatccgcccgcctctgcctcccaaagttctgggagtagaggcgtgagccatcacacccggccaagattgtgcattttttgagggtagggatcatgttgcattatttcttgcattttccaaagtagtcggcgcagtgcctggttcatggtaatccctggtcgtaatcaccaaactacagcctagttaaactcaccgatgggattccaccaaacctgcacccaagcagctgaatgttgctgaagaaaaaaggtgcacaagtttgtgccaatcaatgtaaaacatgctttctgtctagcattgcttcactattgcccaaatatgtttactttttcatgctccaaaatgactatttcacacagtctctcctttcttaaaccttccacaccttctttctcctcttgctgtcagatgaagagcttgcctcttcctttttttttttttttttttttgagagggtgtctcctctgtcagccaggcaggagtgcagtggtgcggtctcggctcactgcaagctctgccccccaggctcatgccattctcatgcctcagcttcctgagtagctgggactacaggcacccgccaccacgcctggctaatttttttgtatttttagtagagacggggtttcaccgtgttcaccatgatggtctcgatctcctgacctcgtgatccgcccaccttggcctcccaaagtgctggggttacaggcgtgagcccccgcgccaggcttcgaaacgcatactcttaaatatcagttaagcaccttaaatgaaacatgttcatcccaatactggaacatgatgtctgtgaggacatggggctgtactttgttactttcttttaagagttttaaaaataaactcattttttttcccctaaactcgcccctttctcagtgggatttttctcttttctttctttctgttttttttccctccaagactaagttttgctcctcttgcccaggctggagtgcagtggtgtgatcttggctcactgcaacctctgcctcctgggttcaagcaattctcctgcctcagcctccggaatagctgggattacaggcacccacaaccatggctggctaattttttgtgtttttggtagagacgtggtttcaccatgttggccaggctggtctcgaactcctgaccccaggtgatccacccaccttggcctcccaaagtgcttggattacaggcatgacccatcgcgcctggcgtttttgttttttttttttttttttttttttttagatggagtctcattctgtcacccagggtggagtgcaggggtgcgatcttggctcactgcaacctcccacccctgggttctattgattctcctgcttcagcctcccgagtagctggaattacaggtgtgtgccaccacacctgggtaatttttgtgtttttagtagagtggggttttgccatgttgagaaggctggtctcgaactcctgacctcaggtgatctgcccacctgggcctcccaaagtgctggaattacaggcgtgagccattgtgcctggccacctgcattcttctctagctcggctgttctacttgttcctacttgtaatagactaaataatgacgctccaaacatgtctacatcccagtctccttgtgaatctatttgtgactatgttacctctcatgataaaagcaactttacagatatgattaaattaaatatcttgagatgtgaggttatcctggattatccaggtgagctcagtgtaatcccacaggtccttacaagagggaggcaggaggatcagagtcacagagagaggagatggtaacatggaagcatggaaaccaaggctagacggagacaggatgatatgctgctggctttgacaactggggaagaggcaatgaggcagcaatgtagcggcctctataggctgggaaagtcaaggaaacggattctcccctaaagcctacagaaggaatgcagtcatactaacattttaattctagccctgtggattttttttttttttttttttaagatggagtcttgctctgtcacccaggctggagtgcagtggcaccatctcggctcactgcaacctccgcctcctaggttcaagcgattcttctgcctcaatttcctgagtagctgggactgcaggcgtgagccaccatgcctggctaatttttctatttttggtagagaagggatgtcaccatattggccaggctggtctcgaactcctgacctcgtgatctgcctgccttggcctcccaaagtgttgggattacaggcatgagccaccgagcccagccagcccagtgaaattgattttgggattctgacctccagaactgtgaagataataaatttctgttgttttatgcaaatagactgtaatttgttatatcagcaatataaaactaataaaacactgtagtctaagacatcaccaccatctctgacccgtattattacaatagattcccaactggcttctctctctctctttttttcttgagacagagtcttgctccgtcaccctggctcactgcagccttgacctcttgggcacaagcaatcctcctgcctcagcctcccaagtagctgggactacaggtacacaccaccatacctggctaatttttaaattttttttgtagagatgggaatctcaccatgtcgcccaaactggtttcaaactcctgggctcaagtgatcctcttgccctggcctccaaaagtgctgggattatgggcatgagacaccatgcctggcagaccctcttagattttcaactatacaatacagtattgttaattgaaggcaaaatgttgtacagccgatttctagagttttttcatcttgcagaactgacattttagacctattgatcagcaactccctccagcccctggcaacaatcgttctactctctgcttctgggagtctgactatgttagaaacctcatataagtggaatcatgcagtatttggtcttctgtaactggcctgcttcacttagcataatatcctcaaggttcatccacgttattgcatattgcaggatttctttcttacttagttttttttttttttcttttttgcaacggagtttcgctcttgttgagagcgaaacttgttgcccaggctggagtgcaatggcgtgttcgtattctttttggagagaccaaggaaaaactttatccagttttgcaggaggttgttctctgacttgctagcggggagagatgagtgggattgtggataaagaattgagcctaggccgagtgtggtggctcacgcctgtaatcccagcactttggaaggccaaggtgggcagatcacctgagatcgggagttcaaggccagcctgtccaacatggagaaaccccgtctctactaaaaatacaaaattagccagacgtggtggtgcatgcctgtaatcccagctactcgggaggctgaggcaggagaattgcttgaacctggggggcacaggttgcggtgagccgagatcgcactattgcaatcccgactgatcaaggagagcgaaattccgtctctgggcaacatagggagacggcctccttcacccaccacctgcccccatctccacaaaatggaaaacaaacaaacaaacaaacaaaaattgaaccaagcagggtgcggtggctcatgcctgtaatcccagcacttcgggaggccaaggcgggcagatcatgaagtcagaagttcgagaccagcctagccaacatggtggaacactcatctctactaaaaatacaaaaattagctgggcgcggtggcgggcgcctgtaatcccagctactcgggaggctgaggcaggagaatcgcttgaatccgggaggccgagattgcgccactgcactcactccagcctgggttacagaggaagactccgtctggagaaaaaaaaaaaaaaagaactgaacctagacaaagcagattggcacctaaattcacacgcttttcaaactgccaccacgtcttggcctagccttttttttttttttagatggagtctcgctgtgtcgcccaggctggagtacagtggcatgatctcggctcactgcaacccccgcctcctgggttctgggttgcagcaattctcctgtcttagcctcctgagtagctgggactacaggctcccgccaccgctaccggctaattttttgtatttttagtagagacggaggtggggggggggggtgggtttcaccatcttggtcagtctggtctcgaactcctgacctcgtgatccgcccgactcggcctcccaaagtgctggggattacaggcgtgagccactgtgcccggcctatcttggcctagtcttttaatttctccttcctcattggtaatttcagtataatctagcaaagagacactaattttgaacgaatggtgaaagtatgaaaattttgggatcaatcgatgtaaaaacaatttaccagagagccaccgccagagggggtatagctcagtggtagagcatttgactgcagatcaagaggtccccggttcaaatccgggtgccccctcgggtttctttaagtttttttcacagccatccaggaataacctgagtcagcgagttctgaatgcaaaactcacgggaggtgtcgtttgtatcttccacctacctaattttcaccttgaaaggattcccgtaccctagagggagagaacagcaaccagaggctgcctttaggtggatctgagccctcataccccaagtggcgataagcgcaccagtactctcagttggagaacaaaggcgcgtatcgatttccatctccgatgcccattggtttaacgttaattataatttgttttggggtaaaaaatatgtcttggacggggcagtagttcgtacttgactatgaaaactaggagaagtaatccaaattcagaggttttcatatactcgcgaactcgaacaggacagggcacacagatagaaggtagacagcgagcaattttcccctcttccttcttgactcagctcataggcagggctttggcttgataagctatacatggaaagttcaaggcctaaaggagaggtaaaactggttcctcctgggttttgcacggaaccgcagctctgctgatctgtgatctctctgttcagcctagagatacagctcacagtaataggagccaggagaaaaaaatgcgcgtttccccggggtccgaggaatgacacaaccacattccgggtttaaaatatcgcagctgccctttgacccaggcagcacgcctcttcctttctcctttatttttcctttttttgggcaaaacctagtcgagggggacgcccttgtctcccgtcacacttaccattttcctccggcccaacagtgaccctgtcaggcacgcagccagcagatacttgtccccatctttaggttatgaaactccatggccttttattcttacttcagtggttcttaaaatgtggtccccacaccagcagcaccagaggcacctggaaacttggtagaaatgcaaattctcggggcccccttacagaatcagaaactagcagtgttttaacaagccctgcaggtaattctgatgcacgttcaaatttgagaaacactgtgttcgtttatctcagtttgcactgggttataactttacttttgtacattaatagtcaaggatgaacacagcacgtccatgtcaccattaatacagaaagttgaagttggagaagggctgtgtctatgggtttccctcgcctgacccaccctccacccccaaaaggaacgccaagttgaggcgttcccctgtctccctacccccattggaaacatcctgtccctcaaacccggcacctcgaactgtctgacccatctgaggctggcgcccgtggccgcagaaatccctacacctctggcgcgagtaatgcggtcgcgcagcttttatacccaccccctcctcccgctgagcacaaagtaaaaccgaaagatttctgctaaggttgaaaaatgaggaagatactttttcttttttttttttttttttttttagtcaggacccaatgttaaaatgtgagtcaagaatgaaaaacagatggttaacaaggggaaggaaaaaccaagccattgagggggcacccggatttgaaccagggacctcttgatctgcagtcaaatgctctaccactgagctatacccccgcgcctctacagcgcctggaggcggctccttgggtgctaagcattgttgcagctgctacactgtgagtagtggtgtaacagaaggagaaaggaatgctggagaaaaaggggtcaagctgaacgcagacggtgcccgcatccggggaaccccgggaaggtgcactgcaggggctcgagagggaagcactagcccgggcccggcagcgcgcagggtccaagagggagggacgggttccgccccacaaatgtgggaaagggtgtgggccggaagagagctaagaggggcagggtagggggtccccgttcggtccgcagattcatgccgggtagaaagtccccgaatgcggtgaatcagttccagcgttcaggaggatccaaccccaccctcgacgggcttgaggggttagcccgcctcccgcagcccgggcgccccagatgtgcagcctgctcgcctctgcgccgcctccggctggggaagggccctgggcaccgggcgcagtcagcctgagagcgctgaggcgccagcaccgcgggccccgccgtccccccaggaacccgcccccgcgcagccccacgtcgcccggagagcgcgcctcgctgcgcgtgcccttgcccgcgcccgaggcgcgtgcccgccccagtgcagcccctcctccccgctgtgtttattaggggaaggagggcggaggcggaggccagttccccagctccagccgccgtcgctgctgcctgtgtagttgcagccgcggccgcctcccgccagctcgcctcggggaacaggacgcgcgtgagctcaggcgtccccgccccagcttttctcggaaccatgaaccccaactgcgcccggtgcggcaagatcgtgtatcccacggagaaggtgaactgtctggataaggtgagcccgggaccgggagacgcgtctttgcaatcccccgcagtgctccgaatccagggaggagagaagggccgggtctttgccgccttatccccgcgatcccaggagaatggagggagggcgagcgggcggtgtcatggggtgtggggacacatcccagtctgaaaaccaggagatctggggcgaggcgggaagtccacgcgtagcgggcagccgctgctggagaggggtgggctctgtgtcccggggttgggaggacgggagaggagcagggaagtcaggcgccggggtgtgttgggggaaggttaggggtgcagtcccgccccctacggcctggagagtgagaagagacggccgctccctctccgctctgcgccgagcgccaagtaggcggaagcgcggggcgctggtggagggggcgggggggcggggcagaggctggggggccctgcaaaaccgtccgctccggcgggggtggcctggcttcctggcctggcggggcgggggctatcagcctgcgagtgtgtggcatctgatgcggggggttttgggtaaggacccgggctctgccgcaagagccccgtttttgaacgacctgcacccccttggattcagtcgttaaaggactcgcagacctcctccacagcttcccaacccccacctccaattaaaagccaactcccggtgctgggccgtccagcctgagccgggtggggttgggtggcagagtagggtgggtggagggtgcttagctgagatctcctgaaattgtgctcagagccaggagaccgtgtggaagaacaaagagctaacttttcaaagcaggtttctccaatggagggtggggttggctgagttctggggaagccgaggaaagggggaggtattggggggaggggagggtggccttgtggagattcagtgtcccctgggggccctgtctccccaatgctggacttgttcatctggttgccattagacttttggaggggggttggagagtagaactgggtgtttcccgtacagtttagggtaggatcctgttctcttgtaagctccgtaagatcctaaggtaaaacctgcccctctgcatcccctccccagtctggaggggaggcctctgtgattttgtgcccttcctcaccgcgtctttcatccaccacccaaagctggctccaagtccaagtattctgtcctttccatctgaactgggagggctgggaggactggatggaagagaggtgcaagggtgggaacactagatgaaagaggggtatagagccctggggccaagttcattactgacctggagccaggttttgttcaggagaggatagtttattggacaccttatctctcccctcccccttggtgtgtgagcttcctcagtgacctttggcctctgagtcagcgtgaggaggtggggttggaggttctgaaagatatttgaacttgctcttggggagtgtgggcatatggggccgctgctgtgtcactgttcctcctggtcctgggcttgactgggcaggaggagaggagggggtatattgtgggcacgaggaaagttgttgatctccccatgaccatgccagccgctgttgggcaggacttgagcttagagctatcagataatgaagtctccccttgagaatgtacctgtccttgcacactggggtttcgcccgcccctcgtggcagagattttggcctctgcatcttgagttccctgtggtccccttcttctccacagtcatgaattgggaagaggcagtgggcacttgacccgtataaggaaaaagcaaaacatgaaggcaggattgccactccaggagttgggaaactgggtccttgttccaggtctgctcccaccagttttatgaatgtctctaggcctcagtattcaccatctgtcagatgggtatgatgatgtcatttccttaaaggtggggcagtgcactaaagtccctgagtgctaaagagggtgctgtatagactatgccctccctacctctctgggatgctctgttcagctccacaccactccccttggaaagaccttcagtgccgtgtacccgaggggaggggagcagggatgggcagggtgccctccccagttctcttaccctagctggaagaggacgttcaagtgggggttgcccagggaagtgggagttggtgattccttcctctttttagaactctccctataggaagtggccctggagagacctcgccccctgtactgagcaggagacctgaaatatccaggtatcagacctattcctctccacctgctccaggcagtaaggataggaccaggaatggggagccagtgcctggaggatgctgggctgtgaccagggaggaggggaaaccttcagtcccataggcagcttcagtcccatagttgctaaccaacttcccaaggcctcccatttacagcaaaagagtcaaattagactcacccgtttctctacaatcccccatggtactcagcccactacgtggcccaaagcacagggtgtgtccttggtttcagccttttctcctccctgagccttatctcccaaaggcataggtgggtaaaaaccttgtcacctctgaaggccaccctgcccccaacctgcagtacccagcatgctttgcaagctggataaatatgtattgctgatgacagtgtttgaggaaggaggtcgagatttgcttctccagaggacttctgggattagagctgggggagaaacagggtgacctcatttgctcattcaacaaatatttattgagcacctactttgtgcacctgctttgtatctagggagctgtgttgtcaagaacctcgccacgtccctctttcctggcttgcttccccaggtttctgaaaacaggtggaggtagaggattggtctgctgccagttcccctggaatcccctgttagggtgggctctctgcctctgcttgtctcagcgctccctccccactcgagggggttgaagtcctcacagctgtggtgccccgttttgctagctgaagcttagagtaccccaccatcatcttgtgaccatcccttcataatagctactagttatcacgatatgctgggctcagtcttcacagcagcctcacaaagtaggtgtattcgctcttgtaaacgatgcactccataaacggaggctcaggtagcccatgtggctcatctccctctcttagagctgaaattcacatccacagttctttctgctcagctcttctgccagtgtgtttgcagaaagtacttttatttatacatatttatattttatttacatctcatttgtgccaaaagtaggtcccatcccttcctgaccctatctggaggaatgctctgggcctggggtcttgtatgggggcgtggggccactgggaataatcctgtcctcctcggaatttgtggaggtgcagcaaagatctatgcctttaagccagcgggtcaggtggccaaccaagctaggctggtgccccggccagggtggggctggcattgcctctgcaggagggagaaactgtaaccctgggcaacaggaagggaagagatggtctcataatccatccctgagtcatggccaccccaggtagcctgggttcagaggccaaggtgccaggctgcaggcacagtgacacgaagcttgccacatcccccccaacccagagccacagagggacaggctgtcccaagtgaggggtatccttgcaggcttctgcccctaccagcctgtttacctttctttagagtgggttgcaggtaggcaagggaagatcaagatgaccctgccttggagcctcggatccaggctgagaggcctctaacaggcagcagaggtagggtctgtctggtttctgtgaacagggaagccatggactttgcaggcagcaggaaggggcagaggtgcatgcctcgaggtgcagtttccttgagtcctgaggcccaggaatgcttcgctgaaatcatcttgcctggggcctttaaaagaggggggctcttgctctgggacagagcccatggggcagggcagaggcagacggggtcactgtggggtcctctggacatatttccctgacagtgtccttccccagaccccattgagacaaggcaggggttctttcatcttagggtccaggcttggctcacagcggttgtggagggactggccattttctgcctcccctccccacaattttcctaccccaaaaaggacacagtggaaggagctggtgggttttcttgaaccttggggccttcctccagagagggtaggggagtcgcctgaagctgctggaggtgccaagcattaggggtggaacggcctcctctcctgaccttccagcactctgggagacagtggctgcagctccacttgacacttgtgcttcatagtaactggtttccatgtttctgctcagagccccctgcagggggacaggcgaccaccctcctctgccccacccttgggtgtctggatgagagtgtggggcctgtgagggaggtgggaaggagctactgatagaaataggtgccatcccctagaagaggggctctgcttcctccgcgtggcagcctggaggggtctttggaaccactgggtccagtgttggccctgtgccccctgcctgctcagtacaccccaccctccttctccaaggggcttggctccgggtgcaggcctggccatctggagtaggggtctctctccctttgtctccccaacgtcaatcaggaggcagccttggaggtccgtggtcctaggacagtgtgtagcccttcgtgtgtgtgtgtgtgtgtgtgtgtgtgtgtgagaaagtgggtcatggtctggattctggagaatgtttttcctggcaggcccctgtgggggtagggggaggcaggggcccaggcaggggcctaggcaggggcctgtgcagctaagtaggcagaggccagcagactgggtggtgaccaggctggggcaccctgccaatgcctcccagttactcggggagggagtggggctgtcacttcaggggcctgtgggggcagggaccagcctgtcttagtgtccctggtgggttctgtgtgttggggtatgcaccacttcaggggcctgtgggggcagggaccagtctgtcttagtgtcccggtgggttctgtctattgggttatgcaccagaaggagtctttaagttgcctcataggagtttgggggccctgggtcactgggataggcccaggttggggagggggccaagcttagacccgccacttctttgcttccagacttccggctggccgtcctccccaagagtggttctcctagcattctgtttaatattccaccattaggtttttcctttgggtcttcttgatagggaaccagtaccctattagaaggtgatttccccctgaaattaccctgggggtctctggttgaagtgggccatggtagggaggttgaatcccagattctcagccttctttctgctatcccctcctcccagtgtctcagaagcacctctccctccgggggtttggagacaacattttgaaaagcatcgccttgggggaattccttgacaaatggccaagaaccagctctgtggctgggctccttcaaaagtccccctgggcctgcctcctggcctccttcttttggaatggggaatgtctcccttgactactgggaaatggggcagggacaggccagccaggtcactcaggtggcctggattattctggggtcctggcagtggacccctgtttggtggtgatccagcgcatcatcctgggcttctgggggtgaatttagatcctgttgtcatgggtttgcctaagcatcaatacttctcaggggttccacaaagacccctccaggctgccacgtggagcctgttagatcgtttctcttttttttttttttttttttgagacagagtcttgctctgtcacccaggctggagtgcagtggcacaatcttggctcactgcaacctccacctcctgggtttaagtgattcttttgcctcagcctcccaagtagctggaattacaggcatgcgccaccatacccggcctatttatttatttatttatttatttatttatttttgagattaagtctcgctctataccccaggctggagtgcagtggcatgatctcagctcaccgcaatctctgcctcctgggttcaagcgattctcctgcctcagcctcccgagtagctgggattacaggcacgccgtcactgcacccggctaatttttttgtatttttagtagatacggggtttcaccatgttggccaggctggtcttgaactcccaacctccagtaatccgcctgccacagcctcccgaagtgctcggattataggcgtgagccaccgctcccggctagatctgttctctttctgtcatcactctcttccctccgtcggccaccctggatgggccctgtgtcccacattctcttttttttttttgagacggagtcttgctctgtcacccagactggagtgcagtggcctgggttcacgccattctcctgcctcagcctcccaagtagctgggactacaggcacccgccaccacgcctggctaatttttttgtctttttagtagagatggggtttcaccatgttagccaggatggtctcgatctcttgacctcatgatccgcccgcctcggcctcccaaagtgcgggattacaggcgtgagccaccgtgcccggccgtgtcccacattctcacacgcatgaatggattggagctgtggttggcacagtgaagcccctctgcaccccaacacacacaatctccagtgtgagccctgaccccctcggctaaggttcacacctgctgtgcccagcacctgacatctgagtgctcagaggtgccaagtgctgtgctgagggctttgaaggtgatttctcctcagtcctggacaatcccaggagggccaggtgttattacatccattgtacacaccaggaagtgggctcctctgaggtgcagggccccgcccaaggccatacagttagtggggtagagctttgatgtccactataggggtgtccaccttcaaggctttgaagtagagcccttcagtgcctcagtgggagacccgctgccgggtgctctcctgccctcctcctggggtgggagaggatgagggaagggtagaaaggatgtgttgtgttgacagagcctgggacacccagcccactcctctggccaggcatcccacaggaagtgggaggtatcggagctgtagcaccacctggggctcatgtggggctggtgggtgtgctgggccctggtacaggagctaggagcacctgggttctgggcctgggtgtgtgggggctgggccttcctcttctgaggccttggtgccaccagaggagctgctccttcatgttcagcggctgctccctagcaacccagcgcagctttgcataagcaatgaggcctctccagctctgggcaggaggggttccctggggagggtggagctgacttgggggctgctgccactgctataactgggctcttcccccctgtccttcatgcctgcctgtctcttcctcctgggttcaaatggcccattggtggaggatgaggaaggagagaggggaggggagtgccaaagcctgtgacctgaaatgcccccagctcacctgggatgattccatgttctccccacagccatgggcctaggacagtcccagcagctcctgagtgccccttcctagggcctgagcccctttttcagaagtcctggtatctgatgtatgtcctcctgtctccatccccagttctggcataaagcatgcttccattgcgagacctgcaagatgacactgaacatgaagaactacaagggctacgagaagaagccctactgcaacgcgtgagtcctgttctgggcagggggctgggtgggcaccttggctccctccccgagtgagttcttcctttccttccaataaccgcaaggtgacattggcgaacacttccatcccctacttgaacatcacagtttgtcctcacaacagctgaatgaagcaagcactttttatccccatttaaagtgcttttatcccccatttaaagtgcatttaaagtacagatgaggaaactggggcttagggaagggaagagactctcaaggtgggatggctagggcaagacaggctctaacccaatttcgggcagtaaggcgagcacgtttctttccactgtcccctgctacaaaagagggggctttcctcgtggtctttcaagaatgagtgacctgtctgttgtatttggggttgaggactttgttctgtttaccttcccttatttctctcctcaaaatcgacagtttccttctctcacctgggtacttctaggctttgggggctccttcctccagtggttccttcaagaaaactctctggaagcctcatgccagcccttttggtgttcattttttgagaatgggcaggggtgcataaagggtgttgcctgggccagatagatctcttccctgcctggtgagggaggctgtggagactgtttcttttgagtatagtcatcttgagtatagtgcagctctgttccttctgcactgggacctgcagcagctgacggtagggagggagtatagaggtggggtcccccatcccagagcctggaggaatacctcccctcccatcccatcccatcccatcccatgcaatcccagaaagtacagcaattttccatcttccaattgaccttgtgagtagcaagtacaaactcagtgttggggcctcacagccgcctccacctgcgaggtggaggctttggaaggtcaagtcacttataagtaatgatgtaatgataatttctttttcttttaatttgcttttttttttttttttttgagtcagaggactcatcacccaggttggagtgcagtggcgcgatcttggctcactgcaacctccgcctcttggattcaagcgattcttgtacctaagcctcctgagtagctgggattacagatgcatgctaccatgcccagctaatttttgtattttttagtagagaccggggtttcaccgtgttggccaggctggtctcgaactcctgacctcaagtgatgcaccgcctcagcctcccaaagtgctgggattacaggtataagccacctcgcccagccttaattcgattttttttttaattttaacttttttttttttaacttcaaccaactcaagtaatggtaatttcagtgttcacatgaatttaggatctgacttgagtccagttttttttttttttctcttaattctcagtcaggaggctctttgcagctgaagttcacccagggaaaaaaaaatttgggacttgtctaaaaagggggcttaaacctccagccttacccctaaccttaccccaaaccttccttgcttccttaccccctcccgttccctggctaagaccactctttcatctttttaggggctcgctcattcagcagacatttattgcctgcctgctgctataatacatactaacctgcaccaggtgctgggaaaacagattcctgataaaaatctcaagcccaagaagcaacatgaagttgtcccttctggaagaaggagggcactgggcaggttatctgggtaaaggaagggttgcagctctgtcctggcccctccttcagctgccccttctcttctattaatttctactgttcctcttccccctaccaacccctcccacccccacaagggaaatgggacattcttcgaattcttaagggctcacacaagccctggttctctgccacttcctccctccattgggtagtggggtggggttcagagaagccagggcagttaacccctccgttgctggaccacctcaggctagattctgagcctccgccccagcacgcagaagtctgaccgagccttggagcccagtgactcaagtagcctagaattcagtgagcactgggagctggagaaaaatcagaggcttgtccttgttttctctgcgttttatcagcctcatccaaagttccagcttactgtttttactgtcttcttgggaagctgccacaaggttgggtggagggctcctgcagggactgggggagccagaagaggcagatcaaggtttcttctctgggtgatgcttccaacttgcagaggcagaggttcccctgtctccctcctggcctccagccaaaagaagcaggttggcctctccatgtttcctccagcttttgtagccctagcctctgccatgcctcattgacctttggcccagttgggatgtttcctgggaaggagcctagtgagagagacctgggggctttgtgacccagctgtgtttcactttagctgtagtagcacctcctcgcccaaggcagtcattctccctcccctgcatccactgggccaagaagttacccgtggggattctgggatgaaccaggtgtggcgcccgcttgcaaggagtgctctctggacgtgtctgagccttggtttccccatggttaaaaattcctgcccaggaggcctggcatagtggctcacgcctgtaatcccagcactttgggaggctgaagcaggtggatcacttaaggtcaggagttctatcagcctggccaacatggtgaaactcgtctctactaaaaatacaaacattagccagatgtggtggtgggcacctataatcccagctactcaggaggctgaggcaggagaattgcttgaacctgggaggccagggctgcagtgagccaagattgcctctgcacttcagtctgagcgacagagcgagactccatctcaaaacaaacaaacaaacaaactaaagataaaaaaaaattcctgcccagggatgttggaccctagaccaaagaggatttattgagctcttgctatgtgccagacgctaggccgagtgtttgctgtcattccctcctgctttcttactttttttgtttttattttgctttggttttttggagacaaggtctccaaaaaaacttcgtcctgctcagtcacccaggctggagtgcagtggagtgatcatggctcactgcagcctccacctcctgggtttaagtgatcctcctgcctcagcctccctagtagctgggaccacaggcatgtggcgccatgctaatttttaagttttttgtagagaggagggcttgtcatactcttggcctcaggtgatctacctgctttagcccagcctcctcctgttttcttcctgcctctggtcttatccttgagtgacattcaggttcctgaatcctgggtttaccagggtacagctttctgccatttctgttctggtcttgctttgtggaccacaggcctggcttccttctctgaagcatcacgtgctccatgctgggccaagcccagtgcaggacccgtaggggcacgtggtttcttctggcactttgccagggagttgggcccacccagtgagtgtgtgagtttggtgtgcagggaggcctctatgttctgcctgtctctggctagtctctgaggggagctaggatcttgcagggggctggtcaagaaagaagaaagctatctttccctgtggtttctcaagattcagatttaagctctagaaagtgactgtaaagtaggcagtgaaaaggcctcttctgtttctgtccttgcatcagacttgtttgggggagaggcaggggagagaacataggccagagctcactgccagcccacctggtgtggcggacccccacatgcgtgcagttacacacatgcctggtgtgtaggcagacacccacgccggtgctggggcgggggaggaggacttgggagctggactgaatgggctgtgtttgtgtttccaccttcaggactgcagccatgcagccaatgctgtggcaaggttgagggtgcactcccggcttctgcacaatagccagtggtggaggaagaactgctaatagaattctttttgtttgttttttttgagacggagtctctgtcgctcaggctggagtgcagtggtgcgatctccgctcactacaacctctgcctcccaggttcaagcgattctcctgcctcagcctcccaagtagctgggattacaggcacctgccaccatgcccggctaatttttgtatttttagtagagatggggtttttccatgttggccaggctgatctggaactcttgacctcaggtgatccactcgcctcggcctcccaaagtgctgggattataggcatgagccactgcccggcccgaattctttcttgaagcttctgggtgggtggagtgagcctgctcttggtgagagagatatttaagagagatatttatgccctccattacttgttttgtaaactggattttccaaaagtggggcagatcagtccacacgcccaggcttagcataaacctgcatcgttgtctccctgcagatagtctagagtactgcctgttccctcctctttagggccctactgacaggaggcagggttgccagccagggaaaccagcttgtgaggtgtcaagtgggaggtgggcatgggctggggaaggaaaattgggggacttggttgcacctttcccctcttctctgactgcacatatttggggttcattctccagtttccttgagctgtggggtaaggactgaggagggtaaagatgtccctgattctggggagccaggaactatgtttctgccccttcccttaggcatcagatgggagtagggtgtggtctgtgtcagacaaggctgggtgcttaagtgtctctggattctagcaaactgtctttaatcccagctgcttttaaaaggtggggcagggttgggtgcagtggtttatgcctgtaatcccagcactttgggagactgaggagggtggatcgcttgaggccaggagttcaagaccagcctcatctctacaaaaaatgaaataaattagccgagtgtggtggtgtgggcctgtggtcccagttacttgggaggctgaggcaggaggattacttgagtctgggaggttgaggctgtagtgagccctgattgcaccacagcactccagcctggcaacagagggacactctgtctctaaaaaatgtaaaaatgaaaataaaaataggtggagcaggagtaggcaaaccccgcactggggcccagggctttccctccttcccaaaattgtctgcctctaactggaaaaatggggactagggatgacagtgtgggggagggcaagtgcaaatggccagcccaagtagccaaatgtggcctccaggtagccctcccacctcacttacccccaaatccctgtccttcaggcctcctggagcctgagggatcactttgcttcctaacacctacgttttacagatgaggaaacaggcccgcgtttccatgccttactcaacttgcagaattgtttctcttctatattaccgacaggggcaggcttttttttttttttttttcttttcattttgtgtgcaatctgatggctggtaagttcttcctcaagtctagccttgatctttttgactgctcttttttttcctctgattgaacaatgcctccttgttgcttcctatcgccaccacttcagccccttaggcctgaggggatggacgggtgagaaactgggttagcagggagccctcccttcccgcctgtgggcagccttcccagtaggggcttttggaatccgcagctctttctagaggcaggatgtgggggctgttttttttttttccttttggtaaaaccaaaagctccttgttgcttttgttgatgtctttttgttcctccttgaacacaaagctgtggtttttgaagagatccaagcctggaacgggcgaggctctgtgtagaaagggcgctgggctttcgggttcgctatcctgttcttctgaccctggagtgtggctgatggcaggactggagagtgaggctggtggctgacaagctgtccctgtcacctgtgagcccggaaaccttgcccctgtagtcccaccaagcaggaaggccacccagaggtcctcacagataacccctctcctgggacacagggcctcttcagtatcatatccttttttttttttttttttaatttttattttttgagacagagtttcgctcttgttgcccaggctggagtgcaatggcgcaatcttggctcactgcaacctctgcctcctgggttcaagcggttctcccgcctcagcctcccaagtagcggggattacaggaggccgctaccatgcctggctaatttttttgtatttttagtagagacggtgtttcaccatgttgtccaggctggtgtcaaactcctgacctcaagtgatccgcccacctcagcctcctaaagtgctaggattacagcgtgagccaccacgtccggctttttttttttttttttttttgagatggggtctctctctgtctcccaggtggaagtgcagaggtgtgatctcggctcactacaacctccgcttcccgggttcaagggattttcctgcctcagcctcctgggtagctgggactacaggcgtgtgtcaccacgcccggctaatttttgtatttttagtagagacagggttttgccacgttggccagactggtcttgaactcctgacctcagatgatccgcccgcttcggcctcccaaagtgctggcatttcgtgcccgacctgtatcatatacctttgaaaagttcagagggataggcagctcctaagcaggtgtggctgagaggccccagaatatctctcataatggccgagcttggaaacgagttgggtttgaaggatgaagtgctttgttttgcacccaacctgccaagcacatctttccccagaactgagtgctggaggtggctggggtccatctggcctccccttcgctgtctgggcagctgtggtgtagaggagaatgccttgggcaaggtctctgtccttgacactggacctcagtttcttcatctgtaaaacggcacaatgagaatgccagcctaaagctgtgtggtgggttttgagagagaatgtgcacaggactcagtgtgccaagatgttgctttgtgtctctgtaaattgtcctgaagcccgaggctgctgccaatagctgcctgtttgccctgccctatccctgtccagtccctgttcctgccccgcttcttcctgtcctacatgcctctccctgcaaactccccagagcagctgatagcagggaggaagggtgggtggggcacctgcagagagcccaccacccacttggaatgattaacaaggggccagtacaggctggcctatgggacaaaggacagctgtgctctggactctgccctgcacccagctgatcaccctgtccctcattcctcgccatggcccagtctgtcatggggttgggttccagcggagtcaccagctgggacgggtggcccctggtctgtcttagcacccatgttggcatgcacacatttccagccatccctgctgggatctaggggtaatggatgggatgggcaggaagggaaaaggtagaattcccaaaaattgtttctggagggaggtcaaatcagttggagctttctttgaagcccggcatgctggtggggggaggggtgcagcactgatgttctcatgcctttgcttctagaaacaaacccgtgacacttgtcctcctcacctaaattatccagaaagatcctatagacacagtctcctgactttgccctcatgggcttctccttagttgaggacccccttgctgtctgtgcctcttcctcaacccccgtagacctctctctctctctcactcattctctctcactcgctctctcactctcactctctctctctctctctctgtctcgctctcgctctctcctcactctctctctcactgttgctgctctcctgcctggagctgaagatgaggttgccatggaaacctgaagcgtagtgagccgggagagggaaaggcagagtcgtctcgccagggctgggggctggggactggggactgtgggctgtggggaggggacagggttgacccagcaagaggaatatagcccaagctgtctgcctgccttcctctgcctggggttgggcttagtgggcaggggaaggagcttggaggctctggagtgcctctttaatctagttaatctgatgcaggattaaaatcctccctcactcctgccaaattaagctgagctcacatctgggctggctcacccccacttcccttctgatgggattagcactccagctgtcgggggctgagactagggggaagggtgcttctgaagaggatgaagtacctgccaaccccacccaaggtgcctgctgcatgttggaggggctcccgagaccgtctggtgggtgtagggtgagcagagggacacagtgtggggtgcagggggtgtgtggacatggcctcaatgcagctgctgcctgggtgtcttggaggcgcccatcggtgcagagggcacatctatatattcatcgtgtgtgaggcacagtgcagtgtgtgtaggaacttcagactgtggaatgggtggggcacgtcaggtgcacctgtctggcggtctttgggcactggagctggcctctgttttatttatttatttaataaaaacaggctctcgctctgtagctcaggctggtctcaaactcctggctcaagaaatctgccctccttggcctcccaaactgctgggattacaggcgtgagccactgcacccagcctggcctgttttaaccctgtgcattctggccaatgagaaaccccagggttttgcagaccgggtctggaggatgtgtttgccctgcttgcctctagccctccccatcaaatgctaaccagcctcatcttctcagaattgagtcttcgagtgctgggccagagctgcccggaggtctcctctcccccaccctgcttttgccacatgtgcctctacttccatgtgcttgcctcaccacagcccctgcccatacagtctgcagaatggctctgatgttgggaggagggtcgtctcgtctctgaagcgctccctcttagggcctcagggcctgccagccctgctagagatcttccctttctggtctctaggaacagactcgtggttgatcgtcccttggcctggaattgtacaggaactttgaagggagctcctcagctgtgggtggccctggctgcacggggacgaccccagacttggccacgtattcatcacaggccacgtctgttgccagctgcggacacctgtgtttgcctttcctcatcttcccttcctctgctggaggaactgcgagtctgggctgacctgggtggccaggacccaggtgagggctgggggacgggcaccgctaggatcatctggatccgggacagtgaaactggcccaagggaaaaaggatttgccaaggtcacccagtaagtcagtggcagggccagagccctgcactgggccctgtcaagttatgctcccttgattgaggtctccaaatcctgagccctgcccttcacaagtggtggcctcaggggaagtcgcctgtttacaggtagctctgatgcacggccatgtgggcggcaggagaacatgccgagcagaggggcagctcgttcttagctctcgagtgtgtcagttttgggtggaacgtgcctaggaagaggtcccaggaggccatctatggcttacctgggtgcagcctgtgagtcagggatctgcaggggtcatagctgtggtgggctgtggtcacccagggctaaaaatggcctgacgggctccggcttggagaagccacccaccagtccctgaagtaattggggcccatgcagacccccagacatttctcatagcagcacatacacacaaaccacatggctcagagctgcctgtctctcctgcagctggtttgctaggggaccttgtgatgagagagggatggagaagggctgagttctagtcctgcaccagcttcaattcctggcgtgacttttttttttttttgagatagagtcttgctctcgcccagactagagtacagtggcggatcttggctcactgcaagctccacctcccaggttcaagtgattctcctgcctcagcctcctgagtagctgggattacagctatgcgccacggtgcccggctaatttttgtatttttaatagaaacaggatttcgccatgttagccaggctggtctcgaactcctggcctcaagtgatccacctgctttggcctcccaaagtgttgggattataggcgtgagccaccatgcccagcctgacatttgtttattcaacaaatatttactgagcatcgcctactattctaggaacttgagataaatcaatgaacaaaagagaccccaaaatccctcccttcatagagaagtagtggagagagaagacaatacattgatgtgataaataagttaattatgaagactgctaagggagaagtgcctggtgccagcacaccgtttcctcctctgaaatgagggagttggaccagagtcttctggaggtctctgcaggctctgagggttgccgtggcttcggctgcctccaagccaggccctcttcctgggaccaggctgtgctgggcctggaaattggcggctaagttcagcatgaactgaagaaatcgtctgggcgcaaatctggatccctgtgtgtcttggccatgttgtttaacctctctggcctcagttctcccatctgtcaaaggggtacgctgaataccagtcacacaggtggctgtgagaattcggtgaactagggcacataagcccttagcacagggagaacattcactgtttgtttttttttgttttgttttgttttttctttttgagacgtagtctggctctgtcacataggctggagtgcaatggcaggatcttggctcagtgcaacctctgcctcctgagttcaagcgattctcctgcctcagcctcctgagtagctgggactataggcgcacgccatcacacccggctaatttttgtatttttagtggagaccggggtttcagcatattgaccaggctagtcttgaactcctgacctcgtgatctgcccgcctcggcctcccaaagtgctgggattacaggcatgagccactgcgcccggcctaattcactgttgttactatagattgagcagccctaatccaaaaatccagagtctgaagagctccaagatgcaaagctttgagtgccgacgtgatgccacaagggaaaattccacacctggcctcatgtgataggtcataggtcaaaaagcagtcaataattttgtttcatgcataaaattatttaaaatattgtataaaattaccttcaggccatgcgtatgaggtatataggaaatggtcccatccccaagatgtctcagtatggatattcaaatattctaaaatctgagaaaaaatccaaaatctgaaacacgtctggtcctgagcatttccaataagggatactcaacctgtattttacctgtcaccctcaggtgacctccttttttgtcctcaagctggccttcccacctaccctccagttaggttggaccttgttaaccgtttgaaataccactttaaccgtgtgttttctctctcaccacttcctccaggaagtccccctggatatgtgtgtccctttgtttttctgtctcccccttgctctcctctgcatggtcggtctccacttctggtcttagctgaaagcttagtcctgactcacctgtgcccatcttcccccagccgggcccagttgcctcgacctccatgtgtggtaggcacaaggcatggattatccccaaacaagggtaaccttcaaccctcagagagtggcccagtggccatcctttcgctcaggacagttctccttggctggcccatcactgatgcctgctgcgtcttcccaggtcagccagtcccagctgagtctgagaaacgcttgtctcccctcggccttggtggtggacactgaagtcctcctgtggggccgggccagggcgtgcccaagcataggacgaagttcccaggagggcatgctctgtgagaagcccagaggctcctgcccctcccccagagtcacccccactctgttttttctgtcctgcagacactaccccaagcagtccttcaccatggtggcggacaccccggaaaaccttcgcctcaagcaacagagtgagctccagagtcaggtgaggggctgggcggtgctggggcctggcagggagggatgctggggagggaagttgtaaggtcggcatttggcaagagtaccttcccctgcggttactctgcaaggccaaggtgctgaaatcctagcattgcctttaatcttgaccccacccctgactttatcaaaggagcagggtagagcgttctcccacttcctacctagagggggttggagaggtgtgggtgtctatttgagcccgctctggggctccctaaagcctacctcctccaggaagccactctcccctccctcttccccattcacactcacccacaaaggaggggtttggggaggaccagggaatttgcccctccaggtcatgccagtctgaggctgggcaaccaaccctctatagccgcgtcccaaacctccacccactgaagggcaaggtgtgaagggggccctgccatgggggcacaggatagggggctgttccgcctctgtctcctttggcttgactttccagaacactgctgagtgggaggtgtgtgcccctgtaggaggggaggacgggttccaggcctagggagaacttggtctttaggggacacggaggaataagcaaagggtctggagtcctgagaacagaacagctgacccaccctgcctgggggtgcgagggctcctgggacaaacctggccagtgatgaggtggggtggggtggggcggggcttcagccgatgaaggattaggcgcgagaatacatgtaggggaatttaccacgtgggcagcgcgcccaggacccactcaggatcgggagaagactgcagaggttccacccgggccacagaggggatctctcccagttcctccagaggggactcctgctgcctgatcttgatgtgactgcccgggtccatcagggagaaccgaccctgccttttgtcaggctttccatgcaccctctctcagcatcctcccagcagccctgtgaggaaggtgctatcttccccattgttacagatgaggcgactgaggcccagcgactttgagggactagctgaggtcctgcgggtaggagaggcaataataatattcacagctgacgatggagggctcagtgctcccggcgtgtgagctcgtttaatcctcacccagccctgtgcagctgtagcatcacttcacttcagagaagaggaaatagacactggcagctttgaatgtaggtttgtctaacccagggactatccactccccaagaaacagtctctaccttaataataaacatgatagttccttatgctgttgagaagttttgtagtttagggctgggagccatggctcacgcctgtaatccctgtgctctgggaggccaaggtaagaggatcacttgagcccaggagttcgagaccagctggggcaacatagcaatacctggtccctaaaaaaaaaaacgagcagagatggtggtgtgcacctgtggtcgtagctacttgggagtttgaggcgggaggatcacttgagctgaggagttggaggctgcagtgagccatgatcgcaccactacactccagcctgggtgatggggtgagaccctgtctctaaaaaaaggaaaagcaagaaattgtgtagttcagcaagtgcctttagttagttcccctgtttatccttgactgggttctgggggaaggtaaaagacccagcgtctctgtcttacagataggggaaccgagtgagtgaatgcggatccaggatttgggccctggtcttgtcactcccaagtctggggcccttgatgctgcacagccctggtagggcctgaggctcacagaggaagagagcagcagctcacacctgccacccacccacctgcggcacagaagctgaagttactaggaagcagggaacaccacagcctgcctggccatattttacagattctagccaggccctgactcctgccttcaattccctgccctgtggaagggccatgggggccagaggtggaggggctcagaaggacctcggagaagaggtgctgggagcagatagcaggtctttggagacacacacacacacacacacacacacacacacacacacccttctcaggggagaaattcaaacccctcagcctttgtcagttccacaaaagcgtggctgcagctctttttgccccggcaccctatccccgaggggtggggtttgaggaggaagcacctccacgttgttccccctgcccaggatgggcagcaagtgggcagggcatgctgttggcaggggctgcttctgccccccacaggggaagccagcaccacgctctgggtttgggggctcctgtccctggcctgtgccccctgcttcccagggtcatagcctgctgggttcccgggggggcctcttgggagatgaaaatggcggtcactcttcattagggcctcactgagggccagagcgtgtccgtgtgtgtatgtgtgtgtgtgtgcgtgtgcacgcatgcacgcgtgtatgtgtgtgtgtgtgtgtcaagcatgcacgcatgtatgcgtgtatgcctgactttgtttaatccttacagccacctgatgaaagaggggctcttattatccccatcatacagatagggaaactgaggtttacagaggctgccctgcttgtgcagagcccagggacaggggcagacatcaagtcccatgacctggccctggagcccgttgctctgaacagtgctgatggcacaggcaccgagccctgtgctcccaccctgcaggatgcaccagtcagcagcaagtaggatgggcttgttggaatgcagattcctaggccccacccaagggacttctgcttggcagctctgggtgaggcccaagaatctgcattttgactcccccgtgattctgataaggacttttggccccactttaagaagcttagagatgggtccatgggcaggagtgtaccgaccctgtttgtatgctctgaggggtgccacattagggtagggctttgcactaagggcacggctctgttcccctgaggtgggggtcctcgggggttgggggctgagggcaggataggcaggggaggaaagggtactgccctttttgcaggcctgttctgtctcccttcccaccgcccaccagctgtgtggtctgagactggcctcagactgtctttcctctcatagctttgcttcctcaccagtaaaatgaggacagcaaacccagttgcctcaagctgggggctgggcctgatgctttgaggcttggaagggctgagccggccaggctggagcagtgacgggttctggttcctgtggctgccgtgggggcagagctggagagagctgcctgcggctagcaggaagggaagggggagcctcttctgctcacccagcttcaccccacggggtcagctggcttctctccatgccccttctgggcctgccttgcccttccctgtctctgggaagctgcccaggctatttcagctttatttattttcccatctctatattggtctccaaaatggcactttgggtgtctgggacacctggagcctcccctgtggaggaggtaaccacagaactgtccagaaatgaccctctcggtggtcctgcccaggcctggctgaggcagggggctggcagctggacccccagccccccttctcacttgctgctcctatcccacccccaggctgagcagaggcagtggctttggggtgggactgagctggaggtgtctgtatggccctgagcccaggcagaagtgccaagtgccagtagactgttcttccattttttccttcatcaactcaccttgatggggtcgtgggaaattacaggggggtttctatcctcctcggatcttgtaagcagcacgggtggtagagtatcactcttacccgaactagctggcctgagattgaatctcgcatctgctgccaccagctgtgtgaccttgggcaagttgcttaacctctgtgcacagtgccttcgtctgaataatgtggattacctctctccagagggtggtgtgagataggaggatatgttaagcatttaaagattcctgacgtggagtcagcattcagtgtttgctactactgttctcccggaaaggagaggaaatggaacttggacatgaagaagctgggaaatacacacagcaaccttttgaccatgacttccagccccggccctttccatcagctctcctctccatctgtgtgtgtctaattttttttttaaatttgtatttttttgagacagggtctctctctgtctcccaggctggaatgcagtggcgtgatcttggctcattgcagccttgacttcccagactcaagcgattttctcgcctccacctcctgaatagctgggactacaggcgtgcatcaccatgcccggctaatttttgtatttttagtagagacagggtttcgtcatgttgcccaggcttgtttcaaactcctgacctcaagtgatctgcccacctcagcctcccaaagtgctgggattacaggtgtcagccaccgcgccctgcctaaattttaaaaactagtgtttcttttttgttagaaggggatgggttacaaagtatgttggcccaacacatggtaggcacataatagtggaaattgtatttcgctcaataaattttgtatttttttagagatttttattaattttttttttttttaaatagagatggggtactatgttcccaggctggtctcgaactcctgggctcgagtgatccacctgtcttggcctcctagactgctgggattacagacatgagccattttgttttttaagtccagcctaatttttgtgttttttttttagacggagttttactctgtcgcccagcctggagtacagtgtcaccatctcagctcactgcaacctccggctcccaggttcaaggaattctcctgcctcagcctcccaagtagctgggattacgcccaccacgcccggctaactttttttgtattttttttagtagagatggggtttcagcatgttaggctggtcatgaactcctgacctcaggtgatccacccacctctgcctcccaaagtggtgggattacaggcgtgagccaccgtgcctggcataatttttgtttttaagtaatgatccttcttcttatattgggtcatcaaggcagttgttttcccaattatgctgctttgtttggagattacgtgtctgcattcaattcattcatgatccaacaaatgttgatctgcacctcctgtctgctgggatgagaagcaagatagatccagggagaacaactaagaactgacagaaaaattagagtttcacggatggtggttgtttgggtgtcaggagcctcagatgtcagtcagtcctgggcctgacagcagagtttccaaaatgggagcccaggtatctcccaggagtggggtcctctgggagcccaggcatctcccagaagtggggtcctctgaccgaagcgctgagttgcatcctggcctgagcgacaactgggttgtgaccttgggcaggtcccttcctccacagggacccccacagcaccctggtgagccatcctagacaacaggggcaagcactcctgccagggcaagaagggagccctgaagaggggctctgggctgggccctccctacacccctggccccccacccttcacttctgccaccccttccatacccaaagacctttcaaagagcctccctgtcttgattatccatagtcagggtctgaaggtgctttaaaatggtcacagactccaaatgggagggattttagagatcagctagccagctcccttcaggggacccagagaggggaactgacttgcttagaaacacacagcaaggtggtgctgatcccaggctccctcccttctcagcccctacccctcacccctaccctctgtgggcctcctatgttagcagtgaaatgaatgatccttccccaacagggagggggaggcagaagcagttcccgatcctgggaacctgctgatgtcattgcagcgtcgccatggcgattattcccctggattaggggcctgacccttgcaaagccaggaagcaggggacggagtgggggactggcactcgttcagcacttcattgctgacagagcactttcacactggccctccacagtgcgctgctgctttagagccactgtctgtatcgtgggttggagtgactggcgttatggtccccattttacagatgtgggaactgagtcttgagatgtgaagtcgttggcccaagatcactcagaagtgggagactgagcctgcgttagtgctagctccgcctggctttgtgcccagacttggtgataagaagccccctccccatattatacctgatttctgtcacaactcttttacagatgaagaaactgaggccaggggcttgagatgcagggcttctgtatctggagctacatttctctgcctctgagtgccctaccttccccgatgcccgcttcccaaagggcctcccactaagagtcaccgtgctggcccagggcttccaggactgaggaagagctggtgctaggcaggttctggactcttggggtgggttggtgcctctatccactgcattcacttctgaactaatggggaacagcacatccaagcccttcttgtctggatcagaacagagaaggagagggaaccacatggatgagtgactgggggcttcaggagacaaacaaggactctgacccccacaggcatgtgcagaggacctgacaggtgtggccgtggctgcatgcgcatgcgcagtcgctccagtccaagcacagctcggtgctgctgccagatgattccctgccagggaactgcctgggtttgtgtcctgggctgacctgtgtccaggacagtgcagcccccgtggaggaaatccaagcagctggtggggtctggaacagatggctgatgaggtggacagtgaagtctctggaagccaaggaatagtttcctgttccatgagttttctcagcctcattctgttcttcaaaaccctcaggggaggacaagctgttcctcatatttcaattcctttcgtgccagggaagtcctttctgatgtctgacttgagtccctctagtactgtggtggggtggaagggttcttccctggagcttggagacctgctgagatgctgtctgacccccgctgctttcctcccctcctatggcggtggcctctgaagccatcccggcaggctcccagaatccgcggggcctgtcaaaggcgcactgatggagccttccctggggctgtctcaccaccctcctttctgggcaccaactctgtcctttggcacagccctcactcagctggttgctgaaaagctcccccaggcgtagtgggcagggccacatcctggctaacatgagggctggggccaccctgggagccctggaaagaacctttttcctataagcttccagacaggatgggcagggagtgaagggtcaggagtcaggcagatgagggtttgcactctggtagtgccggacattgactgctaagctctgtgaccttgggcaggggactttgcctttctgtggctccgtttcctgatccgtaaattggagctgttaattgcgtggctatatgtatggtgggatctaaatgagatggttcatgtaaggccctggactctgtgcctgccattcactgtgcaccaaagacttggtagtggcttattattacgagtctaacaccttttggctgaggcctctgctttgagttggggacttctgatcagggtctttctgctgactccctgtccctgtctcctgactggttgctgcctcagaggggccccaagccgaggccctttcggctcctggcctgactccaatccctcttcctcccctcctgcaggtgcgctacaaggaggagtttgagaagaacaagggcaaaggtttcagcgtagtggcagacacgcccgagctccagagaatcaagaagacccaggaccagatcagtaacgtgagctcttgccctgccctgcggcatccctgctgccctctgtttggtccccttcctgccagcctggcagacgcaagcctggcagatgtgaatgaggccagtgcctccactgcccctgccctccagggtgggcctggggaagagcttggggttcccagatgcctcttctctgtgtacccccagaccaccagcacgcatagcattttcttcttgaagggactgtattctgtgggggcctgtgtgctaaatcagcccccactctctctgactgttgttcttttttctggatatcgtgggtatcggtgaagactgcatgtctcatcttagcacaaaggtcaaaactggggggcggggagcacctggcctcccctggtctgcgcctgggtgctgacattgcagtcatttccgcccttccttggcctcctcccccacatcagcctgctcttccttcctgtgtaaaaaccccagccagcttcacccgccagccctgcaccccctggctcacaccccccgcctccctgatggtcagtggcatctggctgtggcaggggtgggcatggagagtgggcaggggatcaactgtccccagcatcgtgtgccctccatggcacctgtggccagagaacaggcctcagtttcctgcttggcagagccacaggcaagcagcctgtgtggctttaggcatgcgggggcagggcactgcggtgagcagcaaccatgggggatgcgcacacagaactgcaggggctgcccagccagcctggcctaggaggtcctgccagggagggtttaggcaggcagctgtcttcgtgtctggaacaggaagggatcagtgagctgcccattgttgctctgggctgaggaactggggatagagattgccgggggagcctggctttccggtggtctcagcacccactccctgggctccacatcccttcctaccctccacctggccacctcagcagggcgctcctttaagagcttggctgggccgtgcatagagtgggctgcagtggtgggtcaggtggatttcagaagcgcaggcagcccacagacagcagaaccagccatgcccaaaatggtggctttcaaactctgacttcagcctacagtaaaatatacattgtacgtcttgacccatctgacaggcatacatttatgtagagggaaaacagaatggaagctttcatgaatgagtacttcctacttagagggcgttcagatcttttttttttttttttgagacagagtctcactctgttgctcaggctggagtgcagtggtgctccgcctccagggttcaagtgattctcctgccttagcctcccaagtggagtagctgggattacaggtgcacaccaccacccccggccaatttttgtatttttggtagagacagggtttcaccatgttggccaggctggtcttgaacacctgacctcaggtgatgtgcccgccttggcctcccaaagtgctaagattacaggtgtgagccaccgcacccggccacattcagatcttttctaaagatgctggttgcaggcccctatacaccctcacataatacagcccctttgaggactgtattcccaacactttgggagactgaggtgggaggattgcttgagcccaggagtttgagactagcctgggcaacacagcaaaactgtttctacaaaaaaaaaaaaaaaaaaaaaaaaatacaaaaactagccaggcatgatagcacacgcctgtggtcctagctattcaggaggctgaagtgggaggatcacctgagcccagaggtttgaggttatagtgagccgtaattgcaccactgcattccagcctgggaaaccgagtgagaccctgtttccaaaaaaaaaaaggaccaggcgcggtggctcatgcctgtaatcccagcactttgagaggctgaggtgggcggatcatgaggtcaagagatcgagaccatcctggccaacatggtgaaaccccatctctactaaaaatacaaaaattagctgggcgtggtggcgtgtgcctgtaatcccagctacttgggaggctgagacagaagaaccgcttgaactcgggaggcagaggttgcagtgagtcgagatcgggccactgcactccagcctggcgacagagcaagactccatctcaaaaaaaaaccaaaaagatgctggttgcagacttactgtgaatgggttttgcaactggactgttgacctgcagtttgaagttggtggcctgaggaaatggcatgcttccctttggctagcaggggatgcctagggcgggcactctaatcctccttcccctccaacttccagaggcctgtcacagttgactctttatatgctagggcctggcctcacgccctggagcttccctttggctcagaccctgcaaagggtaagacccttaggtctgtgtttcagagctctcggcttggaaagtgggggagggggaagatggtcttagattatggggaaaacccggaatggttcacagaactggaatgtcggctcttcagcctctgcggcttttcatgtagaggctctagtcttttatcagtgacacttgctcccaatgtgcaaccccagctccctggctgttcactcattgcttcaccctgtgggttttggaggaggggagacaagcccagtcatccctgcttccctttctggaaggcttccagaacactccacactcagcctaagccacctcctcttcttccctcccccagttagaggtgttaatatcctagtgacaaaactcaccaccctggccaagccatccgcatctcaggagataaccatcttttacccttctcgcggtgctgcagtgagctaatggtcctctgcaggagctgggggaagggatcgaccccgacctgctagctgcttttgcagctttagcagagacctgtagggtgtgaatgcaaagcctggagactcttggttttaatgaaagcaattacagtctgtcggatatgggcctccagacagctgtagcacagtcacctgtagggttgactgaaaatgcagactcacaggccttctcccctggctgccagaatcagcgtctctgggagtggggcccaggaatcagcatgttagacacattccctgggtttctgtggtgctctctgaagtttgagagccaccacctaaaagtctgaaaaagcttcaccaacccctaagtcagagggtgccagatcaggctgtacctcagaaccccaggggagctttatttttatttttatttttttgagacggagccttggtttatcacccaggctggagtgcagtggcgcaatctcggctcactgcaacctccgcctcccgggttcacgccattctgctgcctcagcctcgtgagtagctgggactacaggcgcccgccaccacgcccggctaatagtttttgtatttttagtagagatggggtttcgccgtgttagccaggatgatcttgatctcctgaccttgtgatccacccgcctcggcctcccaaagtgctgggattacaggcgtgagacaccgagcccagcctatttttatttttgagagagggtttcgctccgtcatccgggctggagtgcggtggtgtgttcacggctcagtgcagcctgaatcttctgggatcaagccattctcccacctcagactccgagtagctgggaccacaggtgtgcaccaccatgcccagctaatttttcttttttttgcagagacactatcttgctatgttgcccaggctggtctcaaactcctggattcaagttatcctcccgcctcagcctcctaaagtgctgggattataggggtgagccacctcacctggcctcccaggggagcttttttttttttttttttttttaatcagagacagggtctcactatgttgtcttaaactcctggactcaagtgatccgcccacctcggcctcccaaagttctgggactactacaggcatgagccactgcgcctgggagctttaaaccacacataaaaccattgctaagttgtcccaacctcctgaagtgttttggaaaatagggtgtttagagccacaccttttgttttgtatccaaaatagcattcctgttcctgtatgtagcttgttgctttgcttcccagattagcaccaaatgactccagttactttatttatttatttttaattttagttttattttatttttgagatagagtctcgctctgtcgcccaggctggagtgcagtggcgtgatcttggctcactgcaacctctgcctcccgggttgaagcgattcttctgcctcagccttctgagtagctaggactataggcacatgccaccacgcctggctaatttttgtatttttagtagacacagggttttgccatattggctcggctggtctcgaactcctgacctcaggtgatccacctgccttggcctcccaaggtgctgggattacaggtgtgagccactgtgcccagctgactccagttatttctaaaggtcaggccatcttacaaaagaatgaggatatgcttccttggagggatatgctgcagactagggctttttaccagccagagcattttaaaaacaagtgtctgatctcctctggggtgtctgctttggataagtgcagtctgtcttcagtcttgctaagtggtgagacagtgaggtaggaagagatggtaagggcccagatcctagcttctgtcattctggggccaggcagggctctttgagcctcagtttcctcatttgtaaaaatgggacagtaggccctactttgacaggtggttgcaaggaacatgccaagtgcttggcatgggataaatgatatcactcttattatcatcattattatttttgagacaagattgcccaggctggagtacagtggcacgatcataggtcactgcagcctcgaactcttgggcacaagtggtcctctcccgtcaacctcctgagtagctggtactacaggcatatagcaccatgcccagctaattgttattttttttgtagagagagggtcttgctatgctgcccaggctggagtgtagtcacgtgatcacagctcactgcagccttgaactcctgggtttaagtgaaccctggcctaagactcccaggttgctgggattacaggcacacgccatcacacccagttatgttgtcaatgttatcaatactttaaaggcacacttgtctgctttctacactgttgccggagaagggtcataaagtgaagtttggcagaaaagtttggccattgtctagtactgagaatgtgtggaagtgaggaaaggggccagtatattacacatctatggtgagtagttgtgtcatcattaaaggcatctgaagagttgccttttgatgggtccatgctatgggataaaggttacatgttaggaatcctggccttttgtcatgagctctagcagtgttcaagtatggaaaactttagtcactttactggagcctcttcttttatttacttacatattgattttctgtatacaattttgtgtccttaaaactttttttatgtgtgaaatatgacacatagtaacatatacaataaacacctgtttcaccaggcaggtataccatacattgtattactgtatgcctgtcaagagcccagtgttcacagtgttaaaaatataactcccatgtagtaagtacttatcatatctttatttaattatgagggaaccagctagagattaaaactggggaatatgagaggcagaggtaaatgctagtctgtgaaagaaagtgctggggccgggcgaggtggctcatatctgtaaccccagcactttgggaggccgaagcgggcagatcacctgaggtctggagttcaagaccagcctggccagcatggtgaaaccctgtctctactaaaaatacaaaaattagccaggtgtggtggtgcacacctgtagtcccagttacttgggaagctgaggcaggacaattgcttgaacccgggaagtggaggttgcagtgagctgagactacaccactgcactccagcctgggcaacagagcaagactccgtctcaaaaataaaaaaaaaaaaaggaaaaaagagagtactggatacatttagctacagaaatggttaagggcctaccattagttacacattggctattgtcctacaggaaaataaaaccataaactttgaagatatctttgctgcaggcagaaatgctttgcatctcagttggccagaaataatgagcattttatattctgtaatgagcttcagtctttagagtctgggcctaatcaatagtaaatagtcaaacaaagttttgtccccagagtaaaatactctgaaggcaggtttgttggacaatcctctagtttgattttgaaagcatgtatttttcattataattttagtatgtaattatgtattcttaaacactatagttttgcttttcctgattttgaacacagagtaattttgtgtatcttgcttctcttacacaccattgggtttaaagattcatccatatgtttgtgtgtagcggtagtacatcctttttcattgctatatagtattccattgtttgtttataccacattttattgattctgttgctggtggacatttgtactgtttccagttgctatggacatttttgtacatatctcctgaggtctatgtacattggaactgctgcatcttagaatgtgtgctccttgggccgggccgtggtggttcacacctgtaatcccagcactttgggagaccgaagtgggtggatcatgaggtcaagagatcaagaccatcctggctaacacagtgaaaccccgtctcaactaaaaatacaaaaaattagccgggcgtggtggcgcactcggtggcgcaatcccagctgctctggaggctgaggcaggagaatcactgaacctgggaggcagaggatgcagtgagttgagatcgcaccactgcattccagcctgggcgacagagtgagactccatctcaaaaaaaaaaaaaaaaaaagtgtgctccttcaactttacgagataatgcggaactattttccaagtggctgcactgatttaccctcccaccagcagagatgagtttcatttgctccatgtgctcagatatgttcactttagcattttgatcgtgtagagtgtgatagccgatggttttagattgcatttctgtgattactaatgaagttgagtacagacttttgtttgttttaaaaataaaatactggggcatggtgggctcacgcctgtatcctaacagtttgggaggctgtggtgggaggattgcttgaggccaggagtttaagacttgcctgggcaacatagcaagataccatctctacaaaaaaaagaaagaaaattagccgtgcatggtggcatccacctgtagtcccagctactcgagcggctgaggtggtaagattgcttgagcccaggagtttgaggctgcagtgagccatgatcacgccaccgcactccagccttggtgacagagcgagaccctgtctctaaaaaataaataaataaaatattgtgagtctctaatggggagcagtattgcatggtggttgagaactgaggctctgatgttagaactggattctgacttaacccactgtttgcccacatcttgagccttggtttccctatctgtaaaatggcagtattctcgggctggctgaggaaaggaaatgaggccaggcgcggtggctcaggcctgtaatcccagcactttggcaggctgaggcaggtggatgatttgaggccaggagtttgagatcagcctgaccaacatggcaaacccccgcgtccactaaaaatagaaaaaaatagctgggcatggtggtgcacccctgtagtctcagctacttgggagacagaagcaggagaattggttgaacttggaaggtggaggttgcagtgagctgagatcgcaccactgcactccatcctgggcgacagagcaagactgtctcaaaataaataaataaataaataaataaagttaaaaaagaaaaggaaatgagtaatgcatgtaagggcacccaaaaaaagaccctagctggtgagctgatgattccacccagagcctgctgttccctcgttcactgtgatgtataatcatgtgaggagcaccgtatggagagtcagacttttattttccaccacagttgggagagcaggggggtcagaaaacagaacatcagctagcagagctttgtcatggaccctaacttgtcatcctggagtcccagctagtagggtcctggctgagtcgggagggtccttaggcctggacccctgaacccacatgtacttggacctcatgggcacaggtagagtgtggcctgtgtccacagaggcccaggacagcttccaggctgggggctgtgctgacatgtctgggcttagggcgctcctcactcagggctctctgaaggccagaactttgcagagcttggagcagggatgagccaggcccttggaagctgggaaatgtttccttgccttctgaatgtgctaacatccccctcatgtgcctatttgcttaacaaaccagtaggtgggtcaggaaagtaataacacaatttcctcatttgctggcgaggggaaggagaggaagctgagggtttggaaattttatccaagtgggcccaggctggaaggcgctgagcctcactttttctcagcccatttagccgctctgtgccgcctgtcctgagttgcatgcctggtgtccctctctctcgagttagggtgactttctgattatcattcttgttgagagtgaaaaggggtgcattgaaatttatccctgagcagcagacatgaactgggacttgggcgtgtggtcaccctgctccacacctgttctcaggaaagggcctgtctagctgtgattttgtccttgtgtcaccagccttggctgttactgagcaatgaaagctctgcctcgggaagtcatttaatttctgagcctcatgttcctcttctggaagatgggaatgaaagtgtgcgtgtccggcccattttttagggcaatgattgtcagggtatgaagagcttggtcaagctgtgtgaagagctgtacagctgcagaggttgttaacattgatagagccacccaggaagggtgtcctgggttcaggcagctactcctccagccgtcgggtcagccagccgtaactttagatacacttatccatgtgtaatgactttttaagaagcaagatcagtttccccagccctttatgggaatacccatgtgtccatacttgctttcagcttagagtttgctcaggttcctagagctggtcagggtttgcaggaccgcctgggagcagatggtaccatggccttatttacagatgaggaaactgagacccagaggggaaagtgactcccaaggtcatgtaggtaagcatacggctcccctaaggatgaggcattggtctggtgacagtgcagcccatcataagggactgagcctgtggggtccagacctgctctcctcccagaggaaaaggctccctgtcaccccatcactaatgcagatagcgtcatgtccagggaagctgtcacacattcatctgggcccccaacatcaaggacacctgtccctgcaggccccctgctggcaccttcggggcccagggcaggcccctgtccattccgtgtctgcacttccctccctggtcacaggttctcaggggcaggctcttttccttagcagaaaggaaacaagggaagctgacctttcccacctcagaacaaaagttggaagggcaggtgcctcgtgagcctggaggcctcaggaggggtgtccccttcccttgtgccctccccgccaccaacaccagtggacaggggtcactaagagagtggggctcgggagactcaccttctgcgctgggtctgtgagaacatcacctggagtgcccctcccagcggatgctggggtcggttggattttcagcctggccagggttggctgcctcacctcaggaacaggcttagcctgtgctgccacgtgggtgccggtccttgctctggcctgaagggagggggccgggaaaggagggactgatcctgacccaaacccctaagtaaactgccctctgcgtccagactggactcctcccagactctgtccaggcccttaccactgccctccctgtgcccccagcccgggctgcaggaactactggctgttcagccagcaggagcagcaaccatgcaggtgtttccagctgttaacgtgtaagccctgcctggccacgtgcttgctcttgccttttgtgcacagccagtgccaagggggagaggaggcagcagagacgttgtgcggaggggatgcccaaaggggactgcccaggctgggacagccctgatggggcaggggcgttccaggaaacagcaggttttgcctctcctcctcttcccaccccactactcccaccccattttcccggatcaggaaaaggcaggccagcattctagggaacaggaagtgaagttggcttccagctaggtgcctgccagggcctggaggaaattcctgcaggcctgagcccgtctgggaaggaccagtttctctccttgtcctggtgtcctgctttctgagtttcccctgagggtgggggagagctgtcactctcttcactctatgtcccgcttcctcccccatcctcatggagcactcaaaccctgagccctcacacctttctatggttgtacccgtccccaccagtttcctctctggaaagtgaagaggaggctgggcacggtggctcacggctgtaatcccagcactttgggaggccgaggtgggcagatcacaaggtcaagaagttcaagaccagcctggccaacacggtaaaagcccgtctctactaaaaatacaaaaattagccgggcgtggtggcagttgcctgtaatcccagctactcaggaggctgaggcaggagcatcacttgaacccgggaggcagagggtgcagtaagccgagactgtgtcactgcactccagcctgggcgacagagcgagactccatctcaaaaaaaaaaaagaaagaaaagtgaagaggatagagcccactaggggtcatcaaggtgtgggacaggcagcatgttcctacaggaagaaaactctaactcctggttctggttctttttcatctcattcattcattcattcattcattcattcatttgttttgagatggactcactctgtctcccaggctggagtacagtggctcgatctcagctcactgcaatctccgtctcctgggttcaagtgattctcatgactcggcttcccaagtagctgggattacaggtgcccaccaccatgcctgattaagttttgtattttcagtagagacagggtttcactgtgttggccaggctagtcttgaactcctgacttcaagcaatctgccaacctcgacctcccaaagtgctgggattaaaggtgtgagccaccgcacctggccatctcatactttcacaattcattctttggtgcaagttttacaatatacattctatatttgtcaagtgataacttccatgtaacttataaaatacacataattcaggaagattgtgctaaaatacatttaaccaataggagtatgccgtcggaatattttggcaaacaagggtcactaagttttttctgtaaagggccaggtaggaggtatctcaggctttgtggccatatggcctctgtggcagcagctcagttctgcagttctgccatgaaagcagccacagataagaggtaattgagtgggtgtggctgtgttccaataaaactttatttctggaggctgaaatttgaatttcagagaaatttcatgtgtcatgaaatattattcctcttttggttcttcttccccccctccaccgccccctgccaagcattaaagaatgtggaacccgttcttagcagccggctgtgggctggatttggtccatggaccatagattcccagcttctgctctagaccacccattctcagacttgaagcctgcttcagacttacctggagagcttttttccaaaatgcatattccagaaccccagccctgattttgtagattttctggaaggccccagaacccgcattctaacaaggagcccagttgagtcagacacaggtagtctggagtccactttttttttttttttttttttttaaacagagtctcagtctgttgcccaggatgcagtgcaatggcgtgatcttggctcactgcgacctctgcctccaaggttcaagcaattctcgtgcctcagccttccgagtagctgggatcacaggtgcctgccatcatgcccagctaatttttgtattttcagtagagacagggtttcaccatgttggccaggctggtctcaaactcctgacctcaggtgatccaccagcctcagcctcccaaagtgctgggattacaggcgtgagccaccgcgcccggccaggagaccacatgttaagaagcaaagctcaagggtctccaggatcctggtctgttctcttcagccagtcctgaggcctggggtgtgtagtgctgtgggagacccctgcatcagaataactggctccttcactaccttccaggagcttccatccagtgggggtgggggacaccacccgccaacagcacagcccagtcccaggtgctatggaagccctgggttcagcctggagccagggccagcgtcccgaggatgaggtgccgagatggaccttgaaggatgagagaagcctggactgcccttgagtggcgagggtgggctgcctccaggttgaccttaatcccttccctccctaccaccatgtgtccagatgaccttgggcaggtcccttagcctctctggatatcgggatatgacattgacttacctcagagacttgtggggaggattcggcgagctgatatgcatgaagtgtatcaactagggctgctggctggtatctccttcccttgtcttcccccaccaccccagccaggggacagggtgctgctgagggagtgggctgggagagtcacttctggccttgtcttagggatctgagaacagggcatgggccccgtgtctgggagtgccctggtgcccttcctagtggggttgggcgtggtcagtctggccagggctggctccctcccccataaataggctcacctggaggtcttttcccatttgaggcaatgagatatgtatgtgaggctttatgacttgtcttttttttttcattttgagacagagtcacggagtctcactctgtcacccaggctggagtatagtggcatgatcttggctcaccgcaacctctgcctcccaggttcaagctatccttttgcctcagcctcccgcgtagctgggattataggcgcccgtcaccacacccagctaatttttgtagttttagtagagacagggtttcaccaagttggccaggctggtctcgaactcctgacctcaagtgacccacccaccttggcctcccaaagttctgggattacaggcgtgatccaccgtgctcggcctcaccacccacctttcttgtggtgtagttcttgctgcctcaagaactacatatatcaggcctcaaaacccacctgatatatgcgtgcctgggaatagggaccttgacttttcccctgtcccatatgggcccaggggccggttctgggctggcccaggtggggctagagcagctggatccaggcacatgagatgtgaaagtgtgggccttacgccgcatggagcggctggaggaaggagagagggagcaagggtgccgcagggtcagattgccacagggccagggtgccacagggtcagggtagggccagggtgccatagggtcagagtagggccagggtgccacagggtcagggtagggccagggtgccgctgggccagggtgccgcaggatctggttgccacagggtcagggtgccgcaagcacaaggagtcacccgtgattctccagggtctggctcttgggctgagatccaggagaccttggcaggcctgtctttgggagtctggcacagccccagaaggccatctggacagttttcagacctgagaggaggaaagggcttgtgtctggagaaggtgccatggggtatgggaggtggaggaagcctggggccaatcaggatctggatctagcagggaacaccgaggccggtgttctcgtcccaccatgggactcagcctgaagaagacaaggtgaatgaacgaccatttctctctaactcagttggctaagaggactgagctggcgccgaggctctggacacaaatgggccagttgaccctgaggtttctttctggtagtggaggtggggcttcctctggctgaccctgcttaggtctctgatggaggtagcaggggctctggttcccccaaactggccaagtcctccaccatagcacccaaggggtctgggcagagtgcagcttccctcccctccccagcttggcttggtgggcacctgcctcccctgccctcctgaccttgatggctaatgcagccagccccaggcaggcacagtcacagccctcaaacaacatgaggcccagctcaagactcctgggtggtggtggtcaaggtgggggactctgtagccagtagagcactgtgggggcaagagactgacttgaaggcttggagcctcacatgcccgcctagtggggtggtcctgagggatatgacttctttgggcctctctgctcatttttggaacctgacccgagaaggagcccatccaagacaatgtcccgccctcagggagggtctggcagtttttatccctaaaggctgggattctcagcggagcatcctaggctgtagtacccacgacatcttgcacacaagaggtggaatcgcctgttgatgaagagcaaggctctggaatctgtgatcttgggccactcacttcacttatcaatcccttcgcttccttcttgcctgttacatggggtctgcaatctacccctcaggggcgctgacgagctcacatgagcctgtgacataaaacacctagcacggccctggcgcagtaagagctcaggaaacgggctgctgctgtggttactgtggacccaggcggaaacagagcagccccgcccctgccgcaggcatataaaagtgaccacttggccggtcacggtggctcacgcctgtaatcccagcactttgggaggccgaggcgggtggatcacctgaggtcaggagtttgagaccagcctggtcaacatgatgaaaccctgtctctactaaaaatacaaaaaattagctgggcgtagtggcaggcgcctgtaatcccagccgcccaggaggctgaggcaggagaatcacttgaaccctggaggtggaggttgcggtgagctgagatcgtaccattgcactccagcctgggcgacagagccaaactccgtctcgaaaaaaaaaaaaaaagaaaagggaccactcactttggtctgattcttcagttctcatggtccttttacatcggtcatttcattgcattctccaacagtgtctgagggagactggtgtctcattttgcagaggtgaaaactgaggcttggcaagattaggtagcttgtccaaggacacacagctggtgcttccagagcgagacctggctttctgtacccaaagctcttgggtagtctctcccatcctgggatcttgagggtcacgggaaggaactgggtggtttgcagtgggacccttcacctagtgccttctgaccttgcagataaaataccatgaggagtttgagaagagccgcatgggccctagcgggggcgagggcatggagccagagcgtcgggattcgcaggacggcagcagctaccggcggcccctggagcagcagcagcctcaccacatcccgaccagtgccccgggtgagtgcgggtcctgttggtgcagatgacctgaggcgaggccagtggggtggggaggaagccaggagaagacagacagacagatacaccttccggagccttgctcttaatcaacaggcgattatgcctcttgtgtgcaagaggggaccagaggacctgaggccgggccagctggggtggggaggaagtcggcgagagacagacacacacacacacacacacacacacacacatgcacgcacgcatgcaggcgtggaaaggactgcttcccaagaccccaagttccattctcatccagaatgaggacgtgagcaccagggtcaggcctgtactgggccaagaggattgaaaggagaggcccccaggtcatggggctcagagcccctgcgtgggatacaacacacaggcaaatgtgcacacgtggacatcagcctttgagctgtggggcttgagctaggttgggggcggggtggaagtgcatggtatggacttctcgggagctctgggaggggctgggtttggcaggacagtttccaagccctgtctcctcccatcttccagtttaccagcagccccagcagcagccggtggcccagtcctatggtggctacaaggagcctgcagccccagtctccatacagcgcagcgccccaggtggtggcggggtgagtaaccctggccggaggggagaggccagaggcagggggtccttcgggaaggcttggacacagctcatggattctcctgacctttgcacccaccctctgttgtgtgtgatgataaggatctcagccttgtgagcagagaggaaattggttggcgtagtgggcagaggctggctgggactggggccctgcgttccagccctggtgtaccatgggcaggttgctcaccctgctttgggtggggtttccttaccccagctacctgggaacacacaaggcaactttctgcatggggccttccagcactgggcgctgctctcctcgcttcatgaggatggcccccacatccttcagctctcaggctgcccctgcctctgaggggcctccccagccatgtcgtgtaaagcgcatcaccctgatgctttgcatcactcgactccgctggctgccttcagagcactttttccaactaaaaagagctcttcgtgttggtcaccttctctgtgtcccctgctgggctggggaccctggcagcgtccgtctggttcacctactctgagccaggcctagagcaagtgaataagcccagcaggaacggggtgagatcaggcttcctgagccctcagagctgaagtcccggctctgtaagtcctgccactcactccacccatgggtgccgctgagccacccttaccaagctcctggcaggctcagcgcctccaggctgggtgcctgggaattcaaagtagctcacgtaggagcagaacagatacttagagagataaaatcgcctgagataatggctggctggagtctgatgctctgggcacacaaacaaagggatgttaggactgcccagggcactgtgggcgcaagagttagtctgaagtataaggttccaggcagcccagccagtccctccctcctcaatgggtctgtcctggatgtgtagggtccatctctgaatataaagccacctctctgccctctgggggcttacattccagtcagggggacaaacaagaaaacaataagaaaataggtgtataacataaggtcagcggtgacacgctgtgaagagaaagacagcagggtgagggatggatagaaagcagctggattaagacatttggccgggggtggtggctcacgcctgtaatcccagcactttgggaggccaaggcgggcaggtcacttgaggtcaggagttcgagatcagcctggccaacatggtgaaaccccctgtctaccaaaaatacaaaaattagccaggtgtggtggtgtatgcctgtaacctgtaatcccagctactcgggaggctgaggcagtagaattgcttgaacccgagaggcagaggttgcagtgagccaagattgcactattgcactccagcctgggtgacagagcaatatctccaaagaaaaaagacatttggccgggtgcgatggctcacacctgtaatcccagcactttgggaggccaaagtgggcagatcacctgaggtcaggagttcgaaaccagcctggccaacatggtgaaaccctgtctctactaaaaatataaaattagctcggcatggtggtgcatgttcataatcccagctactcgggaggctgaggcaggagaattgcttgaacctgggaggtggaggttgcagtgagccgagatcacgccatttgcactccagcctgggcagcaagagcaaaactccagctagaaaaaaaaaaagaaaaaaaagacgtgacatttgagcaaagtcctcaataaaggaaggagtgagccgtgcaacgaggacaggaagtgcaaaggctctgaggcaggaatattctaggaaagttcagggagcagcaggaagcccgaattgactagagtgggagagggtgggaggtccgattatgcagggacttgtgggccccaggaaggcctctgtgacctgtgatctgtgcagagcgacataggtttttggaagaccaccctggcagctgtgttgagaagaggcagtggtttgagggtagaagcagggagaccgtcaggaggctgttgcaggatataggcatggatgggagtggctcagcccaagatagaggcagaattggtgatgagagagactgaggttacttcatgggaggtgtgacttcttatcccatagacctgttggtttcaaactgtcctgtggagcctcagagaccagtcaagggcagtgaaggtcaggggaggtagaatgttgtctatagctataggatttatttttcttttttttttcctctttctttttttaaactccatcctggtagtaggtggcgctgtaggtttttgtgtgccttactgaacattacctagatctagggcttaagcggcagattttggctgaggcttggaaggtggaacctgatagactcgtcttctgtcctctgaagatttttctcccaaggaaagatctttgtcctgaacttggacaggactcatcatggcttctaaaagaaactactggtgcttataatcatacaaataatagcatacagggcatgttttttctgttttttttttcttttttgagacagggtcttgctctgctgcccaggctggagtgcagcagtggtgcaatcacagctagctcactgcagccttaacctcctgggttgaagccatcctcccacctcagcctcctgagtagctgagactacaggcatgtaccactaagcctaactaattttttattttttgttgagatgggctcacgctagtactttgggaggccgaggcgagcggatcacttgagaccaggagtttgagaccatcgtagccaacatgatgaaaccctgtctctacaaaaaagtacaaaaattagccgggcatggtggtacacgcctatagtcccagctacttgggaggctgaggcaggagaatcgcttgaacccgggaggcggatgttgcagtgagccaagatcacaccattgcactccagcttgggtgacaaagcaagactccatctcaaaaaaaaaaaaaaaaagagggagttggggggtcttactgtgtttcccaggctgatttcaaacttctgggctcaagcagttctcctgccttggcctcccacagtgctgggattacaggcgtgagccactgcacctggcctgcatgtcgtatttttagacattactctgtcatcatggctggtggaccttactgcagtcctgttcagggaggtggggcagagctgatgtgacccggtccctgctctgcctctggcccttagtagctgccaaaggttgtaaaagatcgattgctctcagaaagcaagacacagaggttaagaatctttgcagcagagcctggtgctccatttctgagttcactgctcccccaggctctgctccagggtcgtggagagttagaaaaaaatgctcagacccaggtgagccggcatgcagggccctaggctgaccacacttcccccacagaagcggtaccgcgcggtgtatgactacagcgccgccgacgaggacgaggtctccttccaggacggggacaccatcgtcaacgtgcagcagatcgacgacggctggatgtacgggacggtggagcgcaccggcgacacggggatgctgccggccaactacgtggaggccatctgaacccgcagcgcccccatctgtcttcagcacattccacggcatcgcatccgtcctgggcgtgacccgtccattcttcagtgtctctgttttttaaaacctgcgacagcttgtgattcctacccctcttccagcttcttttgccaactgaagccttcttctgccacttctgcgggctccctcctctggcaggcttcccccttgatcgacttcttggttttctctctggatggaacgggcatgggcctctctgggggagggcgaggcccgtggggcagggctggaatgggagacctgttggcctgtgggcctcacctgcccctctgttctctcccctcacatcctcctgcccagctcctcacatacccacacattccagggctggggtgagcctgactgccaggaccccaggtcaggggctccctacattccccagagtgggatccacttcttggttcctgggatggcgatggggactctgccgctgtgtagagaccagtgggatgggctctacctctctttctcaaagagggggctctgcccacctggggtctctctccctacctccctcctcaggggcaacaacaggagaatggggttcctgctgtggggcgaattcatcccctccccgcgcgttccttcgcacactgtgattttgccctcctgcccacgcagacctgcagcgggcaaagagctcccgaggaagcacagcttgggtcaggttcttgcctttcttaattttagggacagctaccggaaggaggggaacaaggagttctcttccgcagcccctttccccacgcccacccccagtctccagggacccttgcctgcctcctaggctggaagccatggtcccgaagtgtagggcaagggtgcctcaggaccttttggtcttcagcctccctcagcccccaggatctgggttaggtggccgctcctccctgctcctcatgggaagatgtctcagagccttccatgacctcccctccccagcccaatgccaagtggacttggagctgcacaaagtcagcagggaccactaaatctccaagacctggtgtgcggaggcaggagcatgtatgtctgcaggtgtctgacacgcaagtgtgtgagtgtgagtgtgagagatggggcgggggtgtgtctgtaggtgtctctgggcctgtgtgtgggtggggttatgtgagggtatgaagagctgtcttcccctgagagtttcctcagaacccacagtgagaggggagggctcctggggcagagaagttccttaggttttctttggaatgaaattcctccttccccccatctctgagtagaggaagcccaccaatctgccctttgcagtgtgcagggtggaaggtaagaggttggtgtggagttggggctgccatagggtctgcagcctgctggggctaagcggtggaggaaggctctgtcactccaggcatatgtttccccatctctgtctggggctacagaatagggtggcagaagtgtcaccctgtgggtgtctccctcgggggctcttcccctagacctccccctcacttacataaagctcccttgaagcaagaaagagggtcccagggctgcaaaactggaagcacagcctcggggatggggagggaaagacggtgctatatccagttcctgctctctgctcatgggtggctgtgacaaccctggcctcacttgattcatctctggttttcttgccaccctctgggagtccccatcccattttcatcctgagcccaaccaggccctgccattggcctcttgtcccttggcacacttgtacccacaggtgaggggcaggacctgaaggtattggcctgttcaacaatcagtcatcatgggtgtttttgtcaactgcttgttaattgatttggggatgtttgccccgaatgagaggttgaggaaaagactgtgggtggggaggccctgcctgacccatcccttttcctttctggccccagcctaggtggaggcaagtggaatatcttatattgggcgatttgggggctcggggaggcagagaatctcttgggagtcttgggtggcgctggtgcattctgtttcctcttgatctcaaagcacaatgtggatttggggaccaaaggtcagggacacatccccttagaggacctgagtttgggagagtggtgagtggaagggaggagcagcaagaagcagcctgttttcactcagcttaattctccttcccagataaggcaagccagtcatggaatcttgctgcaggccctccctctactcttcctgtcctaaaaataggggccgttttcttacacacccccagagagaggagggactgtcacactggtgctgagtgaccgggggctgctgggcgtctgttctttaccaaaaccatccatccctagaagagcacagagccctgaggggctgggctgggctgggctgagcccctggtcttctctacagttcacagaggtctttcagctcatttaatcccaggaaagaggcatcaaagctagaatgtgaatataacttttgtggaccaatactaagaataacaagaagcccagtggtgaggaaagtgcgttctcccagcactgcctcctgttttctccctctcatgtccctccagggaaaatgactttattgcttaatttctgcctttcccccctcacacatgcacttttgggcctttttttatagctggaaaaaacaaaataccaccctacaaacctgtatttaaaaagaaacagaaatgaccacgtgaaatttgcctctgtccaaacatttcatccgtgtgtatgtgtatgtgtgtgagtgtgtgaagccgccagttcatctttttatatggggttgttgtctcattttggtctgttttggtcccctccctcgtgggcttgtgctcgggatcaaacctttctggcctgttatgattctgaacatttgacttgaaccacaagtgaatctttctcctggtgactcaaataaaagtataatttttacctgcggacttggtttcctctctggctctgagctgctgttgtgtgtgtctgtgtgtgggtgtgtgtctctagctgtaaggtgctgctgtgtgtgtgtgtgtctagctgtaaggtgccactgtgtgtgtgtgtgtgtgtgtgtcctgtctgcttgggggcactggcctgtggccctcctgggacctctgctgcccctcggggagagaatgacttgtctggatgccaagggggagtttgctgctgtctgtcaggcccttggcccctacttcctccttgctgagaactccccaccaacctacttctggctttccacccgctcattcctctctgcccaacttggtgatgctcccggaagcttccctgagctccgtctcgtattactgtgtcacttcctcagtgacatatctgtctccccactagccagagcccttggggcaggtgatgagtctaattcatctctaaatcccgggtacctgcccaggagcggtgcggagctgttgaattaatgaatgagcttggctggggagcagttctagcactctgccgctgccaggcagagagcaggagctccacgcatttgaggaacgagatgacagggcattccacagtgggacgggacctggataaagctgtctgtaaggtggcctggcaacccaaagcactattcacagtgccttctgaatgtaatctttaatacacatcccctttcttccttcttcctcacaaccctgtgagagaagtaactacttatagaggggctcactgaaacccagaaaggcaaagcagattggtggcagtcacagctagtggcagagtggggcctgagacccccatgtgatgctcacagtctggtgctgtgccacctggccatggcaggccgcgtgcctgtgtctgtggcagctcttagatgtgtgtctcctgggctccatgttttgctccaggtgcccagggtctgtgactggccagaaggccaggcggcctcccctcttgctcattgggcttgggaagaggacagtggtagagaggggaatctggccctgctcagtgctgccaatcagcctcaggtccagctgcttgaggggcatttctctcttggggctcagaactaaggaattctccagcctcagaatcacagcagggtggagaggaggagggctctcctgagctgagcatttgtaatctggagaatgacatggccagagtcagctgagctggggcaatgtggggagcatccaaggcggccctgggtggtataattagagacagcactgacacctgctcccctccaggggtgcaggcagcccaatactttcccaatagaagggaattagttggcaaagcttgcctcatgtcggcctgccccactccccgggaggcttcattcaccttcagatctatttgatggaacagtgctttgggggacattgctgccaagtctccactccctgctcacagaaagctctgcctcctggaaatgggccaatgggaggagtttctggatttccttctggcagtggcctaagttcctgaggtcttgcattatgagggggttaccaatatatcttaaccccaggcctttaaaaaaaatattatttggggtgggggccaaggagactaggcctcagagacgtcctagggaatgatttaatttaatagaaaataattgaggcttataaaaaggcacaaaaatcctggctaacacagtgaaaccccgtctatactaaaaatacaaaaaataagctgggcgcggtggcgggtgcctgtagtcccagctactcgggaggctgaggcaggagaatggcgtgaacccgggaggcagagcttgcactgagctgagatcgtgccactgcactccagcctgggtgacagagcaagactccgtctaagaataaataaataaataaataaataaataaataaataaataaaaagaataaaataattctcttttccccctcagaagaaaccacttgaattttttaaatttcagggatacccctggggaattcttcagtgtcctctctgtgtacaacactatgctgagcttttggaagaggataccaaagaaaacaaaactaggccgggtgcggtggttcacacctgcaatcccagcactttgggaggctgaggtgggaggatcgcttgagtccaggagtttgagaccagcctgggcaaaatggcaagaccccgtctctataaaaaaagaaagaaggaaaacaaaacagtgggtaatgactgcaaagagacgaaggagtgggtggaggaggggtctctggtgctcgtcctgtaggtggatctatgtgaaagcagtccactgcaagctgagcagtgcacgtggggtgtaggggccttccggaccaacagggggagcagtgtggcgcaagaggaagaatatggactttggtgtcagcatgcctagttttgaatcctggtctctgacatttttaattaattaattaattattttgagacggagtttcactcttgttgcccaggctggagtgcaatggcacaatctcagctcactgcaacctccacctcccaggttcaagcgattctcctgcctcagcctcctgagtagctgggattacaggcatgtgccaccatgcccagctaattttgtatttttagtagagctggagtttctccatgttggtcaggctggtcttgaactcctgacctcaggtgattcacctacctcagcctcccaaagtgttgggattacaggcatgagccaccacacccagccttttactttttattttatttattaatttatttatttttgagacggagtctcgctctgtcacccaggctggagtgcaatggcacggtctcagctcactgcgacctctgcctgccgggttcaagcaattctttagcctcagcctcttgaatagctgggataacaggcacctgccaccacgcccggctaatttttatttttattttttttttgagacagaatcttgctctgtagcccaggctggggtgcagtggcgcgatctcagctctgcctcccgggttcaagcaattctctgcctcagcctcccaagtagctgggattacaggcatgcaccaccaagcctggctaacttttgtatttttagtagagacagggtttcaccatcttggccaggctggtcttgaactcctgaccttgtgatccacctgcctcggcctcccaaagtgctgggattataggcatgagccactgcgcccggctggtctctgacacatctaagctatgaaccattagggtaagtttctgaccatctctgagccccatctatgaaagactcatagggaggttgaaattgcaccacatgtacgatatctggcccagtgtaggaaatgtataaatgttagcttcatccctcagggaagcccactgagatccacacgaaacttttgtctgtgtctccccataatgtgacctttagaagttgccaatggcccacccaatacccaaccatgatttttctgagataatctgcccgaggtgtgtgagaggaaacgcgaagaaggcagtcaggaggattcactcttgggggagctgggtaggatcctatctcctcctacatccagagcatgcaggctccatttagatacaaaggggtgggattgggttcctggggagaaattgagcccctttgattctgcggttctgtgggtctaaatctggcatctccttggctatccacccccaggctttgtgattggttggctgtggttggtgggggggcaggaagctgctggtggagctgcagcatccttcagtctcaggcccctgggagggggaggggaaagaaccagggctgagctgtggagtgaaggggagccatttctctccaccgactgcaacctccgtgctcacagctcacggttcaccagaatccaggggcttggtcggcctaggaatccacaatgctggatattttcatcctgatgttctttgccatcataggcctggtcattctgtcctacattatctatctgctctagtggcctggagctgcggccggagcctgctggagaacagctcagaaggaaggatggagctgaatggccgagtgccctgcttgctgacgcaccggtggatttttgcttctgctgttatctcgggtattgattccaaaaaaaaaagaaaagaaaaaaagaaagagtttgctttcctattttttttcttagaccactctgaaaagaataagaaatgccagcttctttctttgggacctaatttaaaataagactttaaaaattacaaataaaatccacaatgtaaacgatttttaggcagaacgggttgggaatgatggatgtggtggggagggactattatttcctaatttcttcttcaagttaggtgctcaaactcaagttgtctattttcttctggtaattaaaggtaaaacacatctttgcatgtcagcatacttgcaatatagttgtttacaactatgcttgtataattgcattacttaatgattgactcattcttatttgagggtgagacggcaaataaattttacttggggtggggttttcggggagatgtccaactgtgggatatggtggagaggagggaggaactcctggtactttgcagttgtccccatctgagactttttatttctgggtttcttacagctcctggtctctccagtccaacaagaggcctctcatccacagaagcagtcctactgcccagcagacctctttcagagccttccagacatggctgacccctggcaagcaaggggctttttgagctgagaggcacttggctgggacttcaggaattcatggacagggctggcagatactgcatatgtttgagctgtagatgggattgagaacagaaagttgaaatggagacttattaaagttaccgtggagaactgctcaaaaattcattttgaattaaggaaacttaaattcattttaagtttccttagatctaaatgcaactgcacattacactcaaatatgttccttccttctcacacacaggactcccttgtgaaactcaaggggaagttcaagttgtccatcttcatctatgaagtagtcactttatcactgtctttacagattgcacagtctggggttttgtggtttctcttgtctcactctccagccaggaagaacttgtcatttgagtttttaaaatgtatcatttcttccccacctcaaaccacttgtatcccagtttctcatttaaagggagaaatggttatatagtcctctctttgcacctgattgaattataaatgatagaaacaagatggctatacttatttaggaaaaatctcttaccccaaaatgagtgtgtgtgtgtgtgtgtgtgtgtgcgtgtgtgtgtgtgtgtgtgttttaatcaaagatcttttctggaaaaaactttccacatagttctctgacccattagagttgaagaaactatgtattttgggattcagagtagaattggcctgcaaatctggggtgtttattccttttacaagtctatcataattgttctacatttaattttcctttcttgcttaaaagtaaacaaggagagtcaggagtggtggctcatgcctgtaatcccagcactctgggaggccgaggcggatggatcacctgaggtcaggagttggagaccagcctggccaacacggtgaaaccccgtctctactaaaaatacaaaaattagtcaggcacagtagtgcgcgcctgtagtcccagctacccgggaggctgaggccgaagaattgcttgaacccgggaggcagaggttgtagtgagccgacatcatgtcactgcactccagcctgggagacatagcgagattccgtctcaaataaaataaaataaataaataaataaacaaggagaaagattagtttttagtaataacattgtgtccaatttccatgttttaaaacaaaaattgaggcattatatgtcacaactgaaatggaaaagttgtgtttaaaaattatggacaaggccgggcacggtggctcacgcctggaatcccagcactttgggaggctcaggcaggaggatcacttgaggtcgggagtttgagaccagtctgaccaacgtggtgaaaccctgtctctactaaaaatacaaaaattagctggtgtggtggcaggtgcctgtaatcccagctactcaggaggctgaggcaggagaatcgcttgaacctgggaggcggaggttgcagtgagccgagatcacacctctgcactccagcctaggtgacacagcaagaccccatctcaaaaaaaaataataataaaaacataaaaattatggacaagaaaaaacactattctggaagctttgttttggcaacaaattatatgacctgacctttcataagtcatttaaactttagggctaggccaggtgctatggcgcatgcctataatcccagcatttagggaagtagaagcaggaggatagcttgaggccaagaattccagaccagcccaggcaatatagcgagacccccgtctccacaaaaataaaaaataaaataaaaataaataaatacataaactttaggtcctctgtttattctgtcaaatgaaagtgttaggccaaggtcgcattatctctttggaaactacatcgagaacagaattcccatggaacgaactcttaatagttcactggtagtcccccttttctgaatattcttcccaacatgacactttataacaaaaatttaactgcaaaactctttttttttcaccaacagccagattttgatgagaaaatggccatatttatttactccaaatatatattatgtctgtgataatttgcctaaactgtttaaggaatattaacaagtatgatactgcatcgtggtatgtagcaaaaagataggtaatctgacatacatggatgcaagcagcatggctgtgaacctggatatatttagaaatgatcttcagtggagtccttgatgtgacattttccactaaaacattcttctaactctggtatatcttagtgtttcgaactataatttccgtcttcaagccaagacagcagctctacatccttacctaggtaattcaggcatgcgccagtattttggaggggtccaaattagagttagttatgatggtatagatctttaaagtatagtctaaccaagcttgctctggtcttttgtgacatcaaggcttctcagtctgtattcacataaagttgaaacaactaatcaattcagtgaaaaaaaatcagcagatttcactcatacactggtgatatataccactggtattgggtacaatgtaaggagagaggattacccatctcttcagttacttgtaaaatatgattttaaaaaaataaatcaatacattttggaaaaattatatgactttgtgcttatatttatgcaacaatatgctagcttataacagggttttactgtgttattttgatagttgtttaaattttacatttaaactatttgtattttggcatcccaaaacataataaaacactgcaaaaagttacctctgtaatataagattttgtataaattttataaatttgtgtcatagggtaattttgtccaataaaatgtcaatgagataaaaaccactctgaagaattataaattacttagaaaaaaatcaagtgacaatgctaagaatcattacactaatacctgctttcttgatgaaaacagggggtttgtggggaagaatgatgtattttatttattttattttttggtttttgagacagagtttcgctcttgtcacccaggctggagtgcaatggcacaatcttggctcactgcaacctccgcctcctgggttcaagcgattctcctgcctcagccttccgagtggctgggagcacaggtgtgcatccccatgcctggctaatttttgtattttttaaagtagagacaggttttcatcatgttggccaggttggtttggaactcctgacctcaggctatctgcctgcctcagcctcccaaagtgctgggattacaggtgtgagccaccgtgcctggccaaaatatcattttgattttaaattactcaaaaataatgggacttttccttaggcatcgaagtacaactgaagtggaaaattgtctttgtaaattacatgctttggctttatcaaactatagatattttcaaagcctagagtggcctcttcttttttttttgttttcttttattattattattatttttttttttattttttattttttattttttattgatcattcttgggtgtttctcgcagagggggatttggcagggtcataggacaatagtggagggaaggtcagcagataaacaagtgaacaaaggtctctggttttcctaggcagaggaccctgcggccttccgcagtgtttgtgtccctgggtacttgagattagggagtggtgatgactcttaacgagcatgctgccttcaagcatctgtttaacaaagcacatcttgcaccgcccttaatccattcaaccctgagtggacacagcacatgtttcagagagcacagggttgggggtaaggtcacagatcaacaggatcccaaggcagaagaatttttcttagtacagaacaaaatgaaaagtctcccatgtctacctctttctagacagacacggcaaccatacgatttctcaatcttttccccacctttcccccctttctattccacaaaaccgccactgtcatcatggcccgttctcaatgagccgctgggcacacctcccagacggggtggtggccgggcagaggggctcctcacttcccagcaggggcggccgggcagaggcgcccctcacctcctggacggggcggctggccgggcagggggttgaccccccctacctccctcccggacagggcggctggccaggcagaggggctcctcacttcccagtaggggcggccgggcagaggcgcccctcacctcccggacggggcggctggccgggtggggggctgacccccccacctccctcccggacggggcggctggccgggcgggggggctgacccccccacctccctcccggacggggtggctgccgggcggagacgctcctcacttcccagacggggtggctgctgggcggaagggctcctcacttctctgacggggcggctgccgggcggaggggctcctcacttctcagacggggcggttgccaggcagagggtctcctcacttctcagacggggcggctgggcagagacgctcctcacctcccagacggggccgtggccgggcagaggcgctcctcacatcccagacggggcggcggggcagaggcgctccccacatctcagacgatgggcggccgggcagagacgctcctcacttcctagatgggatggcggccgggaagaggcgctcctcacttcctagatgggatggccgccgggcagagacgctcctcactttccagactgggcagccattcagaggggctcctcacatcccagacgatgggcggtagagtggcctcttctaagtcagttttgtgcccatctattttaaacaaaaataaaaccaaagtcatatattaacaggggaacagaaaaagccattgacacaacttccattataaaatcaaacacaccaaggcagatacattagaaatgtttaagaacatctttgtacttaaaatttaaactgtgagactgccaggtgtggtggtggctcacgtctgtaatcccagcactttggaaggccgaagcaggtaggtcacttgaggtcaggagttggagaccagactggccaacatggtgaaaccccatctctactgaaaatacaaaattagccgggcaaggtggcacatgcctgtaatcccagctactcaggaggctgaggcaggagcatcacttgaacccggaaggtggaggttgtagtgggccgagattgcgccactgcactccagcctggacgacagagagagattcggtcttaacaaaacaaaacaaaacaaaa

SEQ ID NO: 2999 - DNA, 3962 bp, Homo sapiens
cgctgtgtttattaggggaaggagggcggaggcggaggccagttccccagctccagccgccgtcgctgctgcctgtgtagttgcagccgcggccgcctcccgccagctcgcctcggggaacaggacgcgcgtgagctcaggcgtccccgccccagcttttctcggaaccatgaaccccaactgcgcccggtgcggcaagatcgtgtatcccacggagaaggtgaactgtctggataagttctggcataaagcatgcttccattgcgagacctgcaagatgacactgaacatgaagaactacaagggctacgagaagaagccctactgcaacgcacactaccccaagcagtccttcaccatggtggcggacaccccggaaaaccttcgcctcaagcaacagagtgagctccagagtcaggtgcgctacaaggaggagtttgagaagaacaagggcaaaggtttcagcgtagtggcagacacgcccgagctccagagaatcaagaagacccaggaccagatcagtaacataaaataccatgaggagtttgagaagagccgcatgggccctagcgggggcgagggcatggagccagagcgtcgggattcgcaggacggcagcagctaccggcggcccctggagcagcagcagcctcaccacatcccgaccagtgccccggtttaccagcagccccagcagcagccggtggcccagtcctatggtggctacaaggagcctgcagccccagtctccatacagcgcagcgccccaggtggtggcgggaagcggtaccgcgcggtgtatgactacagcgccgccgacgaggacgaggtctccttccaggacggggacaccatcgtcaacgtgcagcagatcgacgacggctggatgtacgggacggtggagcgcaccggcgacacggggatgctgccggccaactacgtggaggccatctgaacccgcagcgcccccatctgtcttcagcacattccacggcatcgcatccgtcctgggcgtgacccgtccattcttcagtgtctctgttttttaaaacctgcgacagcttgtgattcctacccctcttccagcttcttttgccaactgaagccttcttctgccacttctgcgggctccctcctctggcaggcttcccccttgatcgacttcttggttttctctctggatggaacgggcatgggcctctctgggggagggcgaggcccgtggggcagggctggaatgggagacctgttggcctgtgggcctcacctgcccctctgttctctcccctcacatcctcctgcccagctcctcacatacccacacattccagggctggggtgagcctgactgccaggaccccaggtcaggggctccctacattccccagagtgggatccacttcttggttcctgggatggcgatggggactctgccgctgtgtagagaccagtgggatgggctctacctctctttctcaaagagggggctctgcccacctggggtctctctccctacctccctcctcaggggcaacaacaggagaatggggttcctgctgtggggcgaattcatcccctccccgcgcgttccttcgcacactgtgattttgccctcctgcccacgcagacctgcagcgggcaaagagctcccgaggaagcacagcttgggtcaggttcttgcctttcttaattttagggacagctaccggaaggaggggaacaaggagttctcttccgcagcccctttccccacgcccacccccagtctccagggacccttgcctgcctcctaggctggaagccatggtcccgaagtgtagggcaagggtgcctcaggaccttttggtcttcagcctccctcagcccccaggatctgggttaggtggccgctcctccctgctcctcatgggaagatgtctcagagccttccatgacctcccctccccagcccaatgccaagtggacttggagctgcacaaagtcagcagggaccactaaatctccaagacctggtgtgcggaggcaggagcatgtatgtctgcaggtgtctgacacgcaagtgtgtgagtgtgagtgtgagagatggggcgggggtgtgtctgtaggtgtctctgggcctgtgtgtgggtggggttatgtgagggtatgaagagctgtcttcccctgagagtttcctcagaacccacagtgagaggggagggctcctggggcagagaagttccttaggttttctttggaatgaaattcctccttccccccatctctgagtagaggaagcccaccaatctgccctttgcagtgtgcagggtggaaggtaagaggttggtgtggagttggggctgccatagggtctgcagcctgctggggctaagcggtggaggaaggctctgtcactccaggcatatgtttccccatctctgtctggggctacagaatagggtggcagaagtgtcaccctgtgggtgtctccctcgggggctcttcccctagacctccccctcacttacataaagctcccttgaagcaagaaagagggtcccagggctgcaaaactggaagcacagcctcggggatggggagggaaagacggtgctatatccagttcctgctctctgctcatgggtggctgtgacaaccctggcctcacttgattcatctctggttttcttgccaccctctgggagtccccatcccattttcatcctgagcccaaccaggccctgccattggcctcttgtcccttggcacacttgtacccacaggtgaggggcaggacctgaaggtattggcctgttcaacaatcagtcatcatgggtgtttttgtcaactgcttgttaattgatttggggatgtttgccccgaatgagaggttgaggaaaagactgtgggtggggaggccctgcctgacccatcccttttcctttctggccccagcctaggtggaggcaagtggaatatcttatattgggcgatttgggggctcggggaggcagagaatctcttgggagtcttgggtggcgctggtgcattctgtttcctcttgatctcaaagcacaatgtggatttggggaccaaaggtcagggacacatccccttagaggacctgagtttgggagagtggtgagtggaagggaggagcagcaagaagcagcctgttttcactcagcttaattctccttcccagataaggcaagccagtcatggaatcttgctgcaggccctccctctactcttcctgtcctaaaaataggggccgttttcttacacacccccagagagaggagggactgtcacactggtgctgagtgaccgggggctgctgggcgtctgttctttaccaaaaccatccatccctagaagagcacagagccctgaggggctgggctgggctgggctgagcccctggtcttctctacagttcacagaggtctttcagctcatttaatcccaggaaagaggcatcaaagctagaatgtgaatataacttttgtggaccaatactaagaataacaagaagcccagtggtgaggaaagtgcgttctcccagcactgcctcctgttttctccctctcatgtccctccagggaaaatgactttattgcttaatttctgcctttcccccctcacacatgcacttttgggcctttttttatagctggaaaaaacaaaataccaccctacaaacctgtatttaaaaagaaacagaaatgaccacgtgaaatttgcctctgtccaaacatttcatccgtgtgtatgtgtatgtgtgtgagtgtgtgaagccgccagttcatctttttatatggggttgttgtctcattttggtctgttttggtcccctccctcgtgggcttgtgctcgggatcaaacctttctggcctgttatgattctgaacatttgacttgaaccacaagtgaatctttctcctggtgactcaaataaaagtataatttttacctgcgga

SEQ ID NO: 3000 - protein, 261 aa, Homo sapiens
MNPNCARCGKIVYPTEKVNCLDKFWHKACFHCETCKMTLNMKNYKGYEKKPYCNAHYPKQSFTMVADTPENLRLKQQSELQSQVRYKEEFEKNKGKGFSVVADTPELQRIKKTQDQISNIKYHEEFEKSRMGPSGGEGMEPERRDSQDGSSYRRPLEQQQPHHIPTSAPVYQQPQQQPVAQSYGGYKEPAAPVSIQRSAPGGGGKRYRAVYDYSAADEDEVSFQDGDTIVNVQQIDDGWMYGTVERTGDTGMLPANYVEAI

SEQ ID NO: 3001 - DNA, 3528 bp, Homo sapiens
cgctgtgtttattaggggaaggagggcggaggcggaggccagttccccagctccagccgccgtcgctgctgcctgtgtagttgcagccgcggccgcctcccgccagctcgcctcggggaacaggacgcgcgtgagctcaggcgtccccgccccagcttttctcggaaccatgaaccccaactgcgcccggtgcggcaagatcgtgtatcccacggagaaggtgaactgtctggataagttctggcataaagcatgcttccattgcgagacctgcaagatgacactgaacatgaagaactacaagggctacgagaagaagccctactgcaacgcacactaccccaagcagtccttcaccatggtggcggacaccccggaaaaccttcgcctcaagcaacagagtgagctccagagtcaggtgcgctacaaggaggagtttgagaagaacaagggcaaaggtttcagcgtagtggcagacacgcccgagctccagagaatcaagaagacccaggaccagatcagtaacataaaataccatgaggagtttgagaagagccgcatgggccctagcgggggcgagggcatggagccagagcgtcgggattcgcaggacggcagcagctaccggcggcccctggagcagcagcagcctcaccacatcccgaccagtgccccggtttaccagcagccccagcagcagccggtggcccagtcctatggtggctacaaggagcctgcagccccagtctccatacagcgcagcgccccaggtggtggcgggcacattccacggcatcgcatccgtcctgggcgtgacccgtccattcttcagtgtctctgttttttaaaacctgcgacagcttgtgattcctacccctcttccagcttcttttgccaactgaagccttcttctgccacttctgcgggctccctcctctggcaggcttcccccttgatcgacttcttggttttctctctggatggaacgggcatgggcctctctgggggagggcgaggcccgtggggcagggctggaatgggagacctgttggcctgtgggcctcacctgcccctctgttctctcccctcacatcctcctgcccagctcctcacatacccacacattccagggctggggtgagcctgactgccaggaccccaggtcaggggctccctacattccccagagtgggatccacttcttggttcctgggatggcgatggggactctgccgctgtgtagagaccagtgggatgggctctacctctctttctcaaagagggggctctgcccacctggggtctctctccctacctccctcctcaggggcaacaacaggagaatggggttcctgctgtggggcgaattcatcccctccccgcgcgttccttcgcacactgtgattttgccctcctgcccacgcagacctgcagcgggcaaagagctcccgaggaagcacagcttgggtcaggttcttgcctttcttaattttagggacagctaccggaaggaggggaacaaggagttctcttccgcagcccctttccccacgcccacccccagtctccagggacccttgcctgcctcctaggctggaagccatggtcccgaagtgtagggcaagggtgcctcaggaccttttggtcttcagcctccctcagcccccaggatctgggttaggtggccgctcctccctgctcctcatgggaagatgtctcagagccttccatgacctcccctccccagcccaatgccaagtggacttggagctgcacaaagtcagcagggaccactaaatctccaagacctggtgtgcggaggcaggagcatgtatgtctgcaggtgtctgacacgcaagtgtgtgagtgtgagtgtgagagatggggcgggggtgtgtctgtaggtgtctctgggcctgtgtgtgggtggggttatgtgagggtatgaagagctgtcttcccctgagagtttcctcagaacccacagtgagaggggagggctcctggggcagagaagttccttaggttttctttggaatgaaattcctccttccccccatctctgagtagaggaagcccaccaattgccatagggtctgcagcctgctggggctaagcggtggaggaaggctctgtcactccaggcatatgtttccccatctctgtctggggctacagaatagggtggcagaagtgtcaccctgtgggtgtctccctcgggggctcttcccctagacctccccctcacttacataaagctcccttgaagcaagaaagagggtcccagggctttcctgctctctgctcatgggtggctgtgacaaccctggcctcacttgattcatctctggttttcttgccaccctctgggagtccccatcccattttcatcctgagcccaaccaggccctgccattggcctcttgtcccttggcacacttgtacccacaggtgaggggcaggacctgaaggtattggcctgttcaacaatcagtcatcatgggtgtttttgtcaactgcttgttaattgatttggggatgtttgccccgaatgagaggttgaggaaaagactgtgggtggggaggccctgcctgacccatcccttttcctttctggccccagcctaggtggaggcaagtggaatatcttatattgggcgatttgggggctcggggaggcagagaatctcttgggagtcttgggtggcgctggtgcattctgtttcctcttgatctcaaagcacaatgtggatttggggaccaaaggtcagggacacatccccttagaggacctgagtttgggagagtggtgagtggaagggaggagcagcaagaagcagcctgttttcactcagcttaattctccttcccagataaggcaagccagtcatggaatcttgctgcaggccctccctctactcttcctgtcctaaaaataggggccgttttcttacacacccccagagagaggagggactgtcacaccctggtcttctctacagttcacagaggtctttcagctcatttaatcccaggaaagaggcatcaaagctagaatgtgaatataacttttgtggaccaatactaagaataacaagaagcccagtggtgaggaaagtgcgttctcccagcactgcctcctgttttctccctctcatgtccctccagggaaaatgactttattgcttaatttctgcctttcccccctcacacatgcacttttgggcctttttttatagctggaaaaaacaaaataccaccctacaaacctgtatttaaaaagaaacagaaatgaccacgtgaaatttgcctctgtccaaacatttcatccgtgtgtatgtgtatgtgtgtgagtgtgtgaagccgccagttcatctttttatatggggttgttgtctcattttggtctgttttggtcccctccctcgtgggcttgtgctcgggatcaaacctttctggcctgttatgattctgaacatttgacttgaaccacaagtgaatctttctcctggtgactcaaataaaagt

SEQ ID NO: 3002 - protein, 321 aa, Homo sapiens
MNPNCARCGKIVYPTEKVNCLDKFWHKACFHCETCKMTLNMKNYKGYEKKPYCNAHYPKQSFTMVADTPENLRLKQQSELQSQVRYKEEFEKNKGKGFSVVADTPELQRIKKTQDQISNIKYHEEFEKSRMGPSGGEGMEPERRDSQDGSSYRRPLEQQQPHHIPTSAPVYQQPQQQPVAQSYGGYKEPAAPVSIQRSAPGGGGHIPRHRIRPGRDPSILQCLCFLKPATACDSYPSSSFFCQLKPSSATSAGSLLWQDLIDFLVFSLDGTGMGLSGGGRGPWGRAGMGDLLACGPHLPLCSLPSHPPAQLLTYPHIPGLG

SEQ ID NO: 3003 - DNA, 3729 bp, Homo sapiens
cgctgtgtttattaggggaaggagggcggaggcggaggccagttccccagctccagccgccgtcgctgctgcctgtgtagttgcagccgcggccgcctcccgccagctcgcctcggggaacaggacgcgcgtgagctcaggcgtccccgccccagcttttctcggaaccatgaaccccaactgcgcccggtgcggcaagatcgtgtatcccacggagaaggtgaactgtctggataagttctggcataaagcatgcttccattgcgagacctgcaagatgacactgaacatgaagaactacaagggctacgagaagaagccctactgcaacgcacactaccccaagcagtccttcaccatggtggcggacaccccggaaaaccttcgcctcaagcaacagagtgagctccagagtcaggtgcgctacaaggaggagtttgagaagaacaagggcaaaggtttcagcgtagtggcagacacgcccgagctccagagaatcaagaagacccaggaccagatcagtaacataaaataccatgaggagtttgagaagagccgcatgggccctagcgggggcgagggcatggagccagagcgtcgggattcgcaggacggcagcagctaccggcggcccctggagcagcagcagcctcaccacatcccgaccagtgccccggtttaccagcagccccagcagcagccggtggcccagtcctatggtggctacaaggagcctgcagccccagtctccatacagcgcagcgccccaggtggtggcgggaagcggtaccgcgcggtgtatgactacagcgccgccgacgaggacgaggtctccttccaggacggggacaccatcgtcaacgtgcagcagatcgacgacggctggatgtacgggacggtggagcgcaccggcgacacggggatgctgccggccaactacgtggaggccatctgaacccgcagcgcccccatctgtcttcagcacattccacggcatcgcatccgtcctgggcgtgacccgtccattcttcagtgtctctgttttttaaaacctgcgacagcttgtgattcctacccctcttccagcttcttttgccaactgaagccttcttctgccacttctgcgggctccctcctctggcaggcttcccccttgatcgacttcttggttttctctctggatggaacgggcatgggcctctctgggggagggcgaggcccgtggggcagggctggaatgggagacctgttggcctgtgggcctcacctgcccctctgttctctcccctcacatcctcctgcccagctcctcacatacccacacattccagggctggggtgagcctgactgccaggaccccaggtcaggggctccctacattccccagagtgggatccacttcttggttcctgggatggcgatggggactctgccgctgtgtagagaccagtgggatgggctctacctctctttctcaaagagggggctctgcccacctggggtctctctccctacctccctcctcaggggcaacaacaggagaatggggttcctgctgtggggcgaattcatcccctccccgcgcgttccttcgcacactgtgattttgccctcctgcccacgcagacctgcagcgggcaaagagctcccgaggaagcacagcttgggtcaggttcttgcctttcttaattttagggacagctaccggaaggaggggaacaaggagttctcttccgcagcccctttccccacgcccacccccagtctccagggacccttgcctgcctcctaggctggaagccatggtcccgaagtgtagggcaagggtgcctcaggaccttttggtcttcagcctccctcagcccccaggatctgggttaggtggccgctcctccctgctcctcatgggaagatgtctcagagccttccatgacctcccctccccagcccaatgccaagtggacttggagctgcacaaagtcagcagggaccactaaatctccaagacctggtgtgcggaggcaggagcatgtatgtctgcaggtgtctgacacgcaagtgtgtgagtgtgagtgtgagagatggggcgggggtgtgtctgtaggtgtctctgggcctgtgtgtgggtggggttatgtgagggtatgaagagctgtcttcccctgagagtttcctcagaacccacagtgagaggggagggctcctggggcagagaagttccttaggttttctttggaatgaaattcctccttccccccatctctgagtagaggaagcccaccaattgccatagggtctgcagcctgctggggctaagcggtggaggaaggctctgtcactccaggcatatgtttccccatctctgtctggggctacagaatagggtggcagaagtgtcaccctgtgggtgtctccctcgggggctcttcccctagacctccccctcacttacataaagctcccttgaagcaagaaagagggtcccagggctttcctgctctctgctcatgggtggctgtgacaaccctggcctcacttgattcatctctggttttcttgccaccctctgggagtccccatcccattttcatcctgagcccaaccaggccctgccattggcctcttgtcccttggcacacttgtacccacaggtgaggggcaggacctgaaggtattggcctgttcaacaatcagtcatcatgggtgtttttgtcaactgcttgttaattgatttggggatgtttgccccgaatgagaggttgaggaaaagactgtgggtggggaggccctgcctgacccatcccttttcctttctggccccagcctaggtggaggcaagtggaatatcttatattgggcgatttgggggctcggggaggcagagaatctcttgggagtcttgggtggcgctggtgcattctgtttcctcttgatctcaaagcacaatgtggatttggggaccaaaggtcagggacacatccccttagaggacctgagtttgggagagtggtgagtggaagggaggagcagcaagaagcagcctgttttcactcagcttaattctccttcccagataaggcaagccagtcatggaatcttgctgcaggccctccctctactcttcctgtcctaaaaataggggccgttttcttacacacccccagagagaggagggactgtcacaccctggtcttctctacagttcacagaggtctttcagctcatttaatcccaggaaagaggcatcaaagctagaatgtgaatataacttttgtggaccaatactaagaataacaagaagcccagtggtgaggaaagtgcgttctcccagcactgcctcctgttttctccctctcatgtccctccagggaaaatgactttattgcttaatttctgcctttcccccctcacacatgcacttttgggcctttttttatagctggaaaaaacaaaataccaccctacaaacctgtatttaaaaagaaacagaaatgaccacgtgaaatttgcctctgtccaaacatttcatccgtgtgtatgtgtatgtgtgtgagtgtgtgaagccgccagttcatctttttatatggggttgttgtctcattttggtctgttttggtcccctccctcgtgggcttgtgctcgggatcaaacctttctggcctgttatgattctgaacatttgacttgaaccacaagtgaatctttctcctggtgactcaaataaaagt

SEQ ID NO: 3004 - protein, 261 aa, Homo sapiens; identical to SEQ ID NO: 3000

SEQ ID NO: 3005 - DNA, 56919 bp, Mus musculus
  misc_feature (1)...(56919): n = A, C, G or T/U
aagccccccaagtcctccagccagcataacaagctgcagaagcacacagcactggctgtgagtgttctcaaggtacctgtctctaggaggaccatggtctatatgggagagaggaggaggcagggccagctgaaaggcttggggtgtggcaagagggaggctgctggtcctgcagctgcctgagcagggacagggttagggggtggaggtgggccatacccagaggaatttcctgcgggtgggctgggcctaaggtcataatatgaagggcaaaagccaggggtgggtgtgcttatcctagagaccatctcttcctacccctcacagtgcggcccgtcccgaggctgtccatctgctgggcaggaagacagctggcacagcaaggccccctggcatgactgtttgggggcgggagggaggaggttagacttagaactctaaaaggcacgtccccgaggcaaaaaggctcctggatgtgtcccagggagggggcgggcttctctggtatcagagaccctctccatttctgtttttattgtagtctaaattggccttgcagaagcaactcaccaagacgctggcagcccgcttcctgcctggtccgctgcccaccacagctgctgccatctgtgccctgccagggcccctgaccctccggcctgctgcaacagcagctgctaccctcttcccagctcctgtcctgggcccagctctgtttcgttctccagcaggagctgtccgccctgctgcaggacccatcctttttgctccctattagtggactcagaatggccacatcctatctcttccagtcagacacttgtctccacatcccacagagactgccttttgcagtttctgggttcccacccaacctgggtagctgcccttcactcagactggggttctccagtcccctggctctgaggaccaccactaccctcctttcctgggccagccctaggctgccctgcatctatgatttaacaaatcccaaagatctatgcaaaaaccacagccccagtctcatggtgctctcatacccagaccccaactagagacgtacacagagctgacagcattttagctcccaagggccagcctctcctgccatgttctagagcggtctggacaatcactagagacagggatctcaaactgaagtgggctggaacctatcaggcatatttaccatggggtagccaggtatggtggtgcattcctgcaatcctagggcctggattacgagttcaaagtcagtttgagccatatagctagacactgtctcaaacaccaaaacaaccacaagtagactacagggtatgtatggcaaagggccatagagataagaggccccaaagttcttaaaaaatgtactgtgaaagtgaggcagagttgagatgacgcgccatctgctcgtgggggtggggcttgaagggaaaagtggtgttcaggctgggcctgactgtgtcatcctggctggtctgggactgtatgctcaggctggcaaactcaaaaaatctacctgcctctgcctcttaagtaacggaactaaaggcacacaccaccctgcctggtctggctttgacacaatagccctggctgtcctggaactcactttgtagaccaggctggcctcgaactcagaaatctgcctgcctctgcctcccgagtgctgggactaaaggcgtgcaccaccacacccggcactacagctcttcttatcttagcctttcagtggtttctcttgaaccccaactctaaaggggctctgggtctccctcagcctagggactctccattccacactgggtctggccatcccaagtgtggcgtttcgggctggtacatggtccagtaaaccctcaagatcaactttcatgtcaccaaagccagtgccattcccccattcgacatgggatttcaccaggatccacctatatccccctttttttgaaagatatttccaatgggacaagaaaaggggtaggggacgggaaactttttgataatagcagttgtggttttattgtgtccaacacatcaataaatgaacttcaagcctgagcctgtaggtgcccagactctccttgcccaggcctgggcaccagccccccctcgcctgttctaggaggaggagagggtattggaggtggcctggccatagtgtttaacccgtgtgaggtgtgcacatcagaagcacggagtgggcaccgcaggttgtgggtgataagctcacttgatagcacaagcctctgatggaaggcttgtcagctcctgggaagctgctactgggctgcctggttctcttcaggcatctgaggtaagaaagaagggctgggggcgcggcttatcccaccttcaccagagcagcaggtgcataaatacagagagagtataaatataaagtccagctactagccaaaaccaaccaggagggatggacactaccctgttgggcaggttaatagacagccgctcgctcgcagcactgagcagagtgcacccctgccccctggtggttaagagaggccgtccagcctccagggccggtaggtgtagcaccttaaagagggtggagcaggggcagaagacacacaggaggcccaagccaccagctttagaaaagtcacagcgctacccgtggctctaggtgacatccaagcttctgtcaactcacatacgagaagactgacgctcaggggagaagagtcttgctaagtctcagggcatgtgacagcccagtcatcactccactctacctcagccaataagacctctgctcctggaacaggaagaggaagtgaaacaactgggagatgggtagaggtcaaacaggaaatgccactcccaggagcctgactttaccaggccttgaacaggccagaggaaaggtcagggtggaggatgaggaaccaaccctaagccagctcgcacaaatgtatgcttacagtacctagtcttttgttttaaggctggtactgtgtgtatgttagtggcaggaaattcagagttgggatccctgataggaggcagatcctggactgggcgcgttggcatgacggccctgcttcctgcaccaggcagatggaagggacactaacccataagtgtctaggtgacagtggagaaaatatggtcagctgggggaggggtgggaactattatggaaggtcaagggagggccaacaatcaagttcacttgcacttcttggagttaagagaggacaaaggtggcactggcctgggccagcccagcttcctgtcctagagggtcactcccctaccgactgggaagaacagcttgcttatgcaccctgtgctcgccacccatcccggaatgggcttggaatggtgaagcaagaagggcagctattcagccatccaaggagccgctgcccttgttcttgcggctgagggggaaggcagacttgctctgcggctgggtcatcttgctggccaggtagatgaaaggctctaggagggagcgtcggtcagccaccgacacctcccatagcttcaccttctcggacttggcccagtgctgggccacgtcagggtctacgcgacgctgctcctgcaggtcacacttgttgccaaggaccacgatggtgacctggagaggacagatgagaacagggactgtcggcatgcagtggctcaggaccaggtgtagccatcagctgtttctggccaacagctggggaggatgcagttcccagaggacttctggaggactagcaagaacacagagccccagagaaggaaaactagaccgcgcttcatgtgctaggagggaacctagtaaaccaagaagaagactcagcgattgagctctcctatcatgtggcccactacctcttgtgtgggttgaagaccctctccaatgatcttcccggccttctagctcctaaactacctcttggcaaatgcgcacaactgggaatcatgccagcaccctgtctcagtcagggtttctattcctgcacaaaacatcatgaccaagaagcaagttggggaggaaagggttgattcagcttgcattttccacattgctgttcatcatcaaaggaagtcaggactgaaactcaagcagggcaggaagcaggagctgatgcagaggccatggagggatgttctttactggcttgcttctcagcttgctttcttatagaacccaagactactagcccagggatggcaccacccacaaggggccctccactcttgatcactaattgagaaaatgccccacagcaggatcttatggaggcatttcctcaccttaagtgcctttctctgtgctaactccagctgtgtcaagttgacacacaaaaccagccagtatacacccgaaagcataccgaggacccacgctcatgctctcctaccactgggctcccagcagaagtctaggacatgtacctccttcttgtccttggacttgtcgatctccttcttgagcagctcgacgcgctggaacgactctcggctgtctgtgctgtagaccaggacgtagccatcggtgcaggagaagcagtgcttgggcagctcggccccatcccggagaccccgtgtatcatagaaacgcacctgctcccgcacccctcggtctgtctcgatggagcctacatagatgtcctcctgggtctcgatcatctcagaacctgggttaaaatgagtcaagagagatgggagatgggagcaaggtagatagcctaacaagccgaccagacacagggcataaggaatatgggggctcgggagagaccagacttgagagtgagaccgagtgtcatgtctttatcacaccaagcaaaagggcaacacagaactgggtgtggagacacacaccttgaattgaagctcttggaggaggggaggcaggggcagagacaggttgatctgtgagagttcctggccaacctgggccgtacagtgaggccctctcaaagacgataacaacaaggcgggcagtaatagaagcagacaccctacatccacctctggccaagtgctgtggggtgggaatgggcttcttcctatcttggctttgggtttcttccttctagatttgtacaatgtcatagaacttgggtggtacaatgttttattttccccctccattgtggggttcaaacccaaggactagtacatgttagaccagggctctgacagtcagccctgcctccagccctaattgggagggtgtgaaagcagctggtgtcctttttagcttttggattcaggatgtgaccagatccttcactcaaggtcttctgccagtctcccgggcccagcaacactcacccacgacatggttcccgtacagaagctgctcaaggattgaagttttgcccacagatgcctggccgcacacgaccaccttgcagctcttccccatgcttagctttcaacctaaaaggacagaagccgtgtggtgagggaagacagaatccaaacagcaggccagggagcatcagggagttagcaccaccctgatgtttaccgaactactgagcagtgagctgtaattaacctccttatcccatgagtggccaggatttggcacacagccagggtggggttaatggcaccacaaagggaggggcttagagagtggggtgacaaaaacagctggccgggtttgttcctgtgcacaagatagggcaccaaatactgaaggaagttccacaaatactcctgttctttttgtttgattttggggggagggggttgttttgagacagggtctcatgtaccccaagctggctcccagctgatgaaatagttgaggcatatgcacaccaggctgttttctccttttaaccatgacttccgtgaagaaagaagcagggattttagattcttcttgacatcttttcctcagggagagtgtgcaaatatggagaaaaactttctttctttctttcgggggggggggggcggggtttctctgtatagccctggctgtcctggaactcactttgtagaccaggctggcctcgaactcagaaatctgactgtctctgcctcctaagtactgggattaaaggcgtgcaaccaccactgcccggcataacttgctttcttgaatgactaatttggatggcaataaattccatttaaccattcccagttgaatccaccggtaaaataaagatctgacaagaaacagaataaagagaaaagtgcttccgaaagatggcttttacatcccttgaactgacaggcacagagaaagctcagatttataaactctcttgagactgcagagagaggtccttctaaagggaaacttcctgacacaggcacccggggagcgccagtaatcgccccttcctcctccccccagaaagcagagatccagaggtaagcctcaaaggggtcccaagcagaaacctctccaggagagtttcctgtcgctcatctccaccccgtggtgtgagccttttagtaagcgacactcgagaggctgccagaggccgccgccacagagtacccctgaagggcacccctcagaatctcagaggcaatcacaggacaaccaaagtgaatccgagacagaggccgcgctgagccctgcctcccagctccatacctcccgggtccccgcagcactcccgctgaggtgccccccggagtgggccggaccatgggaggggcagctcgaccgtaaagacggccctcttcctctgggtggaaggactgacccagaggtcccgccccgcaacggccagccttcaagacaacttccggcggcgtaaagtgagcgcggatcgcacagcgcccccagaggccggcggggaaatacccaccagaacttgtgtctggttattaagccgatgttccaggctctgacactaaaatgttctctctctaaaagacagtgaccagtgacgtttcgttctatcatctatgcgacaagttttctttttcttttcttggctatgctatgctatgaatggaacccaggatcgtgcacatactaggcaaatgctctttgagcctcaatttttttcttttgattttcaagacagggttcctctgtgtagctttggctggccttgaaatcactctgtagaccatgatggctttgaactcacagagatccacctgcctctgcctcccgagcgctgagattaaaggcacatgccaccacgctcaactaaccatgcaatttttttgaacttagaatggaggctcacatttgaatcccagcacttgggagggtgaagtagggagattttctgaagacaacatagtctatacagagaccctgtctcaaaaacaaacagacaaagaaaccaaacaccccagcacctactttgtcttgtttgtgccttaagtagggccatatacaaaggaaaagctacaagttagaatgattgaaccataaattcattgtctagaataattagccagccaaagtaacaattaaaaccaaccatgatgaatgctgttattgaagtggggtgctatgggcatggcagaggggcatttaacttagaggtgacaggtaccaaagaggagggaggaaaggggggtgtctgtgttcatgtttgaagggccgaatagcacagagatttctgaagcagaggaaatacaagaaccatgacatttcttgtatcagtctgggttctctagagtcacacaacttatggaatgtctctataaattaaggtgatttactgtaattacttacagtctgtattctaactaacccaatagtgggcagctgtgaatgagaagttcaagaatctagtagttctctcagtcccacgaggctcgttgtttcagctggtcttctgcctaagctggaatcctgaagtagtaggttccaacagatgtgctggcaagtaagtgcaagcaagcaaagaagagtgaatcgctcttcttccaacgtccttatgaaggcctctagcagaaggtgtgtcccagattaaaggtgtgtgccaccaggtctggatctggaacttgctttgttgcaggctgaccttacactgagatctgcttgcctccatctcctgggattaaatgcatgtaactaccttacctgggtttaagcttttcctggtcactattcctcaagatctccatgtcaagatccaggttagaaacctgtgttccaacctcaagatctggatcacaggtgtgccctgcatttctggattgtagttcattccagattcggtcaggttgacaagcagggctagctattacacagaggaaatacaacaaggttcatgacagttctggagccaggaatccctaggggctcagtattgattgcagagactagccaaataatgaagatgtgtgggaggccagggaccaaacaccacaatagcacgccattggtaagtttattacagggaaatgacacactccatccacttttgcaagaaaggtcattctctcggaagagccaaggcttggcaaagatgaaactgaggatcagttaggagactatttgcagtctctaagtttattgtttaagagtttgggatgaaaagacttgggggatgtgtggtgtggggacaaaaagcattgatgacaaggtttcaagctaagggcagtgggtctgtgtgatttaccccaggtttcatgttgaacagatgaacagaagaaatctaacataagaaattcaggaaggaagaaaaaaattgtttccccccccccgttgttgaaaaatgggtgaaaaattaaattcgttaattaaggcagtggttctcaacctgtgtgggtcatgactttttttggcaaacctctatctccaaaaatatttacattacaattcataagagtagaaaatttatagctacaaagtagcaacaaaaaataattttacggctggggatcaccatgacaggaggaaccatattaaagggtcacagcatttcaattcactgaggtccagctatcattctctatccagtggcccaggtagtttccactccgtcagtaatgataaggacctacaaataaggttagggactttgacacacactttccttaagggaaatttaaattccattgtcttattttcgttccttttggctttaaattacaatttcaaggtcgtctcctccccacatttaacctcagagggcctcaatttaatccaacactgttgtgtgtggtagtggtactacaaagataattatgctgtcttcccaatccagacaacatctggccagacaagcgtgctgggtagagtttatgagaagtaggagtacaggggacactgaggaaaagggacctcaccccatgagctgccttataaactccggggcaggggctggcgcgccatgtcatcctttctaggcttaacgctgagatggcactcccaagcggctgacatgaaagcagcctcataaaagggtccgcgtcattggggtgatgaaccagttggtgcttagagatccgtggaggatgaaaggagcagggtgaagacgccctgcgttcccctcgcttggttgggcagggcttccaggaactgatgaagctggggattgggctcaaagtagctcttcatgcctttccagggaggaagctgtggacacactgcaaagtcaggaaggtagtcttgggggggcttttcttcctcaagtgtcttggggaccccgtctccacccaccagggactcccaagcgttaccggaggctctctaggattgctagttgttatggcaaccgggctgtagggatactgaggcaagcttaggcccagagaggcaacctccttctgtaccctcctcctattcacgggtaaagtggcgccccctacgcacaggaaccgtccctgggcccccgccccagcgcggagaccaccgtggacctccagggatggaaggccgctctggccccaagcggagcctctcgttggtagacgggctcgagggagtccctctgggcgcggcgccgcagagcggctcgatgctccgaccggaagtgctctacaccgtctgcctcccacccggctctctggtcccggcggtaagatggcggctaccgcggagtgcgatgtggtaatggcggcgaccgagcctgaactgctggaggacgaagacgccaagaggtaaccaaccgggtggtagagtcatggaggagacgagcttgcagctcgtggcttggggcaggtggacccgccagcgaggcagcccccagatgcagagacgatggctctcctgcagacaccccccgcccccatctgagctggagtcgaccgagatccctctgaaggggtacacttagggggtctgctgtccccttctgcttccgcctagcagggagcttgaggcatggtcttgttctgccgcggggaggaaggtggacttcatcgtggaggccgggttcccgggcgggggcggggggaagggtaggaaccccagaggtcggctgcagagtgggggaggcgtcgcggcgacaatgacgacttccttaacagagccccgacctccgcccgctctggttaacttgtgtgcattgttgcccgtcctgactggtcgtctccgaagcccgcattctcctcctcacttccctttcctcactaatgacccttagtggtctttagtgtgaggctgagaaaattggatgctcactgtatggacctggtcgccccccactccccgatagccgtagaagttaagaatggatagacagaagggcgaatgaggagcttgtctcttgcagtacgggggcagacgcttcttcgccattcctcccaagagcattcttaagctcaaggagaacagctgtttaaatgcagttggcactgctgggcagctgcagtggctcgggattgctagtctggcctagcctagggaggtgctgagtgagtggtttttctcgaacacttggtgaattccgacaccagcttaagaacgggttttcaaagcggggtggggtggggtggggtgggggggttagagtacgcttgggagcgggcgggacttgttctgataccaaaggtgaactgattcttttatcagtagcatgattaatttgatccttttcttaggatggactacagtccccttactctccttcccttgtggttcatgttcataccaagcctgtagggaatgtcttcaggctgaataatttgaacagagtcagttcaggaggtctagaaatcaggattctgaggggtttactgtccaagttagacttataagcggtactcggagagatacggggaatattgtagtcatcaggtgtatggtagtacctgacttgaaagctgagatgctagacaaagtgtagttgatcaagagctatcaagtttagccttgcctcctcctcctcctgtttgagtttccatgtcattacagtgtctggagttaagcatcatccgctcctatataacttaaggtattgccaaatgagaacggaagcccctcgctaacacaaacagagcttacattttattttacttatatttggaaagaatttagtgcttcttactgctataaatagggactttggctatatgtcatttgaggaatctatcctactcaagtgtaaatctcctgtagagagtgtcactgattcggacttgaaacaggtctctatgtagaccagccagtcttgaactcatagagaaccgttcatctgcctctgcctcccaagtgctggactaaaggtgtgcaccggttacactaggctaacttctgtgtcccctctctaaagcaactcctccttaaaagaccagattagctttagagggtattttgtcataaatggtcataaatgtttatggacagatatattaaacaaaggctgagtatggtagcacacatctgtaatccttgcacttgggagtcaaaggcagaaagagctggaattcatcagtctgggttttataaaaagaagctagacgtggtgctcaccataatccagcacttggaggcagcggcaatcggacaaggtcaagggcagccagatatccacagttttaggctaggcaggggtgtgtgtgtatgtgtgtgtgtgtgtgtgtgtgtgtgtgtgtgtgtgtgtgtgagagagagagcgagaacataaaacaggaaaacaaatagtgttacaatgcagccacatcatgtaaagcatggtatttggttaactgattttttttttttttgtggaatttaatgttattgattataaaatagttattgggactggagaggtggctcagtggttaagagcattgacaacttttccagaggacctgggttcaatttccagcacccacatggcagctcacaactgtttgtaactctagttccagagggtctggctctcatagacatacatgcaagcaaaacatcaaggcacaaacaaacaaacaaacaaacaagcagttatctactaccaagtcagtataactgtaaataaaagtgaaaattgcattcttttttttgggggggggggggttcgagacaggtttctctgtgtacccctggctgtcctggcactcactttgtagacctggctggccttgaattnnnnnnnnnnnnnnnnnnnnnnnnnnnnnnnnnnnnnnnnnnnnnnnnnnnnnnnnnnnnnnnnnnnnnnnnnnnnnnnnnnnnnnnnnnnnnnnnnnnnnnnnnnnnnnnnnnnnnnnnnnnnnnnnnnnnnnnnnnnnnnnnnnnnnnnnnnnnnnnnnnnnnnnnnnnnnnnnnnnnncgctaccacgcccggctgaaaaatgcttcttgctgggcggtggtggcacacgcctttaatcccatttagcacttaggaggcagaggtcagcagatttctgagttcaaggccagcctggtctacaaagtgagtgccaggacagcctttgctacacagagaaatcctgtctcgggacaaaaaaaaaaaagaaagaaagaaagaaagaaagaaagaaagaaagaaagaaagaaagaaagaaagaaagaaagaaagaaagaaagaaaaatgcattcttaacagacgtgtaatatatattatggagtttatattttagacgtactaaagctaattatttagttttatatgttcattatagaccagttctgtatataatataggaagaaaataacttaaatcacttagacctctactgtgtcagacctccttaggagagtgagcattaagatctattggtatggaaaacgtgtcattttccattgttgaagacagagtagggaagctgtagcaggtgatggggaaggacgtagcaggtgatggggaaggacgtcccccgaagcgcccctttgttgtctggcattgttagaaccctttggctaagtctctggttatatccttctactgccagttcactgaggaacacatcagcctgtgaggcccttggatggttttttgaggcccaacagagatccttccttcctgatatcttgggatctaaatggatcttactgctgctgaattgtcacagtcccacagaggggtcagatgagaggaacctcgagacacaagacctcacgactgcagccttttctgaggctgcatcttatttctttagttttaatgtgtccagagagaaagagaccttaggtgtttgcatgtgttagtttgtcacaagtcccacagcagccacaaaagcagagtaaaagacgcattgaaaaagtgtagagcagtccagaaaaaaaagcctccactcactcgtgcgtgcatgcgtgagcacaccacgcacacacgcacgcacgcacgcacactcgcacactctcaggtcccactgagactccatttgtttcttatttcactctgccccttgttagtgttgagtatggaagtcacgtctggttcattccaggtagtctaagcacactccaaaatggaagtgtgtgtgtatctgtgtgttggacaactttggaggctaaagaacaacgtttgagaatttcaacattgacctaacttgatgcctttgatgttcctgggaagctgctggacactttttctaatatacaaaacctgtcttgagttaaaggtctctggtttttggtctctgtagataaagcttttatcatgacatattgattgcaagcaggtcactaaagaggaagcgtgtctgttattctgagtctggtgtgactggacatagaaatccaaaagagggctggagagatggctcagcggttaagagcactgactgctcttccagaggtcctgagttcaattcccagcaaccacacggtggctcacaaccatctgtaatggggatccgatgccctcttctggtgtgtctgaagacagcgacagtgtactcaaatacatgaaataaataaatcttaaaaaaaaaagaaaaaagaaaaagaaatccaagagaaccagggagccacagatgggaaaataaataggacatccttaatgacttctctgagctgatttcttttctttaaattattttatatgtatgcggttttgtctgcacatacatgtgtccatgggggccagatgagggcattggattccttgaaactatagctacaaatggttgtgatccaccaggtagtcaataggaagtgaactcaggtcctctgtaagaccagcaagtgctttgaatcactgagccatctctccagcccaacaatctgttctctatacatatttttattttcactaatgtgtgtgttttgcctgcacgtatgtatgtgtaccagatgtgtataataatgcctgcagaggttggagagggccttgaatgaatgccctggaactatagatggttgtgagccactgtttgggtgttaggaattgaacctggggggggggggggctggagagatggctcagagcactgactgctcttccgaagggcctgaattcaaatcccagcaaccacatggtgcctcacaaccatctgtaatgagatctgactctctcttctggagtgtctgaagacagctacagtgtacttacctacagacaataaatcaataaatctttggggggggggcgcgggattgaacctgggtccttctttgtaggagccagtgggctcttaactgaaccatctctccagcccctgaactaacatttctatatctgttttaatacacgtaagcaccattttttattttacactgtgtgtgtgtgtttgtgtgtgtgttttcagttttctccttccactgtaggggttccaggtatcaaagtcagattgtcagacttgggggcaagctgctttatctcctctcctctcctctcctctcctctcctctcctctcctctcctctcctctcctctcctcttttcttttttctcttcttttgtttgctcttctcttctcttctcttctcttctcttctcttctcttctcttctcttctcttctcttctcttctcttctcttctcttctcttctcatcaaggccttgttagatagtcctggcttgcttaaaacttgcagtatagaccaggctggcttccaactcacaagagatctgcttgcctctgcctccagaatgctggcattggaagagacattcctgctaggctcttgttatttagctctcctgattcctttgtggattaggactctgtcttttatttctctgtctacagtgctgagtccacgtcccagcttttgcagtagttattattggtttgctattgctttttaagcctttttgaacttcataaccttacttaatcaaagagttgataggaatgctccacccctttcaacctgattaacattagggatttgttcaccttctcattgagttctcgggcaaacagctaggcatttcattaaatctgaaagctgaatgggaatttatctttgactttgaagtcaaattaatgagaaaaacaactcataggcatgctttaagggtgactcagaagaaagatggaagaaatgaattatgtctaaggaaggggataaatttaggaatacagaatcctgaatatagtaagttattatatttttaaagatttatttatttcatatatgtggttatactgttgctgtcttcagacacagcagaagacagcattggatgatcgatagagatggttgtgagccaccatgtgcttgctgggaattgaactcaggacctttgaaagagcagtcagtgctcttaacagctgagacatctctccagcccaatcaggattattttaatcctgatattaacatgtagaagattgttaaatagtcattagtagaacaaaggtagaatataggaggtttctttccctgaatttaatttagatttatttattggccagcattgagtaaaatgagcaattttaggaaaatactgggcctggtgagtggcagttgctctagtgcttagtaacttggcaacaacaggaattctgattggcttgaagcctagccttattgtacattccagccaatcagggcttgtcttagtcgttgaagctagtttttaaaaacttgagtactggactcttgtgttgctctaggactttagaagcctggagaacagtggtgggctgctgtgtgggcaccgtcgcctgtcacagtgctgctgaggactcattgtttcttcttacaccaatgcttcctcctcattctccagtgttgagtgatgtggaagttatgtagacggcggtccaggtattcttcagagccgagtctcatcagtaggaacagggttcagagtggtttttcccgggggccattgtttgtactggcgtggcagttgctttttccccagtagacaaaagctgtagttctggtttcacaccatgacgggcagaagtgtgtgtggatgagttgagagtattggtgtgtagcagatacgacttacgacttttccagttttaagaccttttctgttggtgtttgacggtggggaagctaggtggtcagataagcagtgttgaccatctctgtgaatctattaccttttgacaatagtgggagcaggagtccgctgtttcctgcttgggcagcttactctgagaaagttagcacctgttgaaatgaggacccaagagaactttgtaaaagtgccactgcagagtccatactgccctctgtttccatatgtatattctgtatcctcccaaacatcagtgcttgaatgtgtgtgagcatgtgtgtgagcgtgtgtgtgtgtgtgtcagtcagttttctcctttcacctgtgagtgaggtgatgaaactcactcaggtcctcaggctcagctgcaagtctttacccacggaaccatcttgcctgccctggaagcagccgtttcttaattgtagattgttgagagacaccactgtctccatcaagatgagagatgttaccagcgctgttaaggtcaagcctgggcctggcagtgctaacagctgagctcagccaccatcctctgtagccagttaaagagccaggtctgtgagaacagagagaggaggtttattcattggaaccatcttgggaagaggagcagatgaagaagttcagtaagagcatgcattactaagcagtcttggtgaaagtgtggtcccttccaaagctgacccatcattctctctgcaaagtagtctgatctctgagagacaagttcctcttctggctggcactaggccttagcattccttcccatggcttacagttcctggggggttctaatccatgagactatgtttcagcaaattgatagctgcagagtggggagcaatatctctttagaaaatactcattcactagaggatatctgtgttgtcatagaagagccacaagatggaaggtagtgggttcagggatctatgaacagcagcctcaggctgactgacaagtggatggctgtgctcagaatggcttcagagaggcccactactctggagctctccttcccaagcgtgaagaaaggagaaggaaatgccagagccctgcggtgcctgtccttatgccttcactgatgggagttctgtcaagatgcggattggaggggttggttcatcacagccctgcttcccctaagacgtagccagctccagccagtgcctggtgcctttctctcctccagcagtagagagtgctgctgccttgtgaagactttgccacagctccccgtgatgtatttggccttctggttctgtctctgttgaggtttctccttgaatgttcagagtacgttttgactcatctgttcaggagtttacatttttgtcttccacctttcctctttgggaataagagggtttttttttttttttttttaataatttatttttgcctccatgtgtctgtgtaaggatgtcaggttccctggaactgaagttacagttgtgagctgccatgtgggtgctgggacttgaacctgggttctctgcaagaacatctagtgctcttaactgctgagctatctctccaaccccgaatttttattttttattttttttgatttttcgagacagggtttctctgtgcagctctggctgtcctggaactcactttgtagaccaggctggcctcagactcagaaatccgcctgcctctgcctcccaagtgctgggattaaaggcgcgtgccaccatgcccggtgaatttttaatttttgagacagggctgcacagcatagcgtagtctagcctagaactcactgtatagtccaggctggccttgaattttgtagcagactatctgcttcagtatcctaaataagccactttatcttacctgagcagttttagttattcttgaaagtaaaaatggagttgctgttggatctatgccagcttcccacaccgccgattgcctgacactcaaaatccatctcagtgcatctctactgaacctgaaaagaaaaaggttgaccctggaatataaagaaccttgggatttaaaaagaagaggaagaggaggaggagaaggaagaggaaaaggaagatagacagctactgggtaaaggtggctttccagtggctagtgctctccctgtctctagctggttggaaagcatccagcacacagtacctcgcaggcaccccagtatttataaatgtttttcacaagtcatatgactttcacttacatatatgagtgttaaattgaaattttatttgtaggttagaattgatttaatttttaaatatttgttagaaaaataaagtgaccttgttggtggcgtggagtaaacatgcagctattgggctcttttactttattttcatgaaggtcagagagagtacaacatgaactaggccttgtgacatgccattggggacaagaggtccgcggaagggggaggaggaaagaatttctactctaagactggccaagatcctgcaaattctgtagggtggaggatgtgtccagatcaacaagcagctcgtaagtttgattgactaaaagaaaggaggtgtcgcagtctagagcaaggtaacattgtagaggacagtgagcatgagagcaatgtgtgtgtgtgtgtgtgtgtgtgtgtgtcccgacttcctggcatgcggcacacactgcagtcctagcaaccccgaggagaagggaagtattcctcacccactaggtttttctctcaaatcaaagtcttctgaacatttctttactctcaggaaattcgagcattttgtccttagctgtaattttagcaaaactggatgttttgctacagatattacctgagaattggggctcctttgtgttggttttatggcttcatagatgaaagatttagaaacagggtggagtcagaagaagctttaaatttgagagagaaatcacaggttaggcagaaaacacagagtaggcaagagaagcaatagagatctctgaagcagtcggggtggggtgctgcacactattagtcctagctctcaggaggcagaggcagacctgttctacgttgttcaaatatggccagggctgtgttagagaaaccccgtctcaaaaagtccaaagcaaaaacaacaaacctctgaagctgccagaggaggagggtgtggaagagcaagagagagaaagccatgccttttgagctagggcccaaaaacagccagcaagtttgtgggtggctggtggcaagcagccacatggcattgcaggagggtctttgtaaaagaatgacagtgtccagagtgacatggtgagcatacttgaacagtatccaaataagagatttaaaataagaagaaaaggaaaagtacacttttgaagttagaactcagaacaacatagaggcttagcagtaaagacccacaagtgcgctggacaaggggcctctgtggtgtaaattctattttaagggtagttattctccccttttagcatggccagtgagtcagcttgcttgaggtgtgttctctgggcagtccctcttggattaactcctaagagaaggtacagcagtgtcagcgggcaccctataatggcaaatgtcctgagatacaactcaaattctgttttgacttgcgagaagtagttttcccataatgggtttcatttaagccctgttaccttcacctttttgtatggtattttaaattaaggagaggcaaagctgatcatgagggagaaggcccatcttcaatgacttctaacttgctaatatgtctgtctagctacttaaccagaataaaaaatataccaaggagtgcaaaaacccagcaggtcagaaaactctggagtgtgtgtgcctcatttaaaccaccatatctctcttgatctgagtcattattaatataattggagaagttcaacttgattaaaaaatgtttgccccagtttatttcctgttgatgtcataagtgcctgactgaaagcaactcggaaggaaggaggtcatttcactcagcgtctcccaggctacactctgttgctgagggaggtggaggcagaagtttgggcagagccgtgcactgagtgctgcttactggcttgctcagcctttttaatacaacccaagagcaccagcagtggcgccactcacaaccttgcctacaggaaagtcttaggaaggcattttctcagttcaggttccctcctcctagatgactttagcttgtatctagttgacaaaaacaaaaaaagcctaacccatacagtattctagccaaacacttgaagtaaaagtcaagttgcagtgtttcctgggttacaaacgatcacagtagtttccatgcagtgcctgaagtaatttttcccttcctccctccctttagggaaaaaaaaatcttaaaatgatacagctgatgaagagtcttatcccatagacatggttcagtggttaaaaacctcggctgcttttccagaggacacaggttctgatcccagcactcagatgacagcctgcaactgcccataactccagctacaagggatcagaactctcctggcctctgagagcaccaggcatacaagtgacgcacaagtacacatgcagatgaaaaaccacctttacacattagaaaattaaagagatcttacctgtggggtagctgtggctgtgtgtaaacacatttgtatatgtatagtctgtggctcacaggtggaagtcagaggacaactttggggagtcagttgtttctctccacaatgtgggtcccagggatcaaaatcagacttggtggcaagtttttaccccctgagccttcctgatagcctaaggaggtttttaaaaactgctgctcaatcaatctagtatctgaggctggctgaagtttttgaatgtttttgtaattgctaaaaagttaagttgatctaaggcagaattgcttaagcatttatcttggaggtatttagagagaaaataggcatttgtatagggcatctgtgttaggatatgttacagtgtcagccatgtatttttaattaatgtatttctaatttgtcaagctgtaaatgtgcaaagttgggtggggatcataagcttaagttgtctgattcaatcacatgctcctgctaggagctttgtaatgattctttggcagtccttgtgggagtaattagtagcagcaatgaatgaacagcagattcagagagtatacctacaaactccggcatacaaattttaacagatgtagcgtggatgcagtgactggtagaaaaagaaaaaacaaatacatattaaaacaggaatgtatacaaagagaagactattcagtttgcccacctttgtaaagaagggtactgatctggggtgacgatatgaatgcatgcaaagagaatctgtttgcagccgggcatggtggcacacactggggaagcagagtcaaatgaatatctctgattaaagggtaagcccagtgtacatattgagttccaggccagccaaggctacataatgaggccttattccccacccaccccccaaaaaaaagaagggggggggagaaaattgtgtgtgtgtgtgtgtgtgtgtgtgtgtgagagagagagagagagagagagagagagagagagagagagagagaaacacgccatacatcggtataagtgtcacaggaaatgcttctctccttccgcgtattcagcttggtggtaagcacccttactggatgagccatctcactggccccgtgttttgattctgtagccattttcaacagaattggtccttagtgattcacatcagaatcatttccagcatccttgaatcagagctgttgtgcttataatgtttgtcgttgacccaagggttggatgggaaattggataagctaattttatgtagccaggtctggtgttgaaggcctataacctgagttggagttgaaggccaacttgagcaattagtgaaatcctgactcttaacaagtataaggaaaagtgtgatatagctcagtggtgcaatattttagttcccagtttaaaaaaaaagttgtatggtcattgcagtggtatatacaggtattgaaatattatgttttacctcatacatagttatcttgggaaaaaagtaaaacgttgaaaaagtaaaatttaaaaagacaggccaagcagtggtggcgcacgcctttagtcttagcactcgggaggcagaggcaggcggatttctgagttcgaggccagcctggtctacagagtgagttccaggacagccggagctacacagagaaaccctgtctcggaaaaccaaaaaaaaaaaaaaaaaaaaaaaaaaaaaagaccaaacaaaacaagagaaccaaggacagagactgggttctgcatgcacatggtactgagttactgagtttaacccagcataaattaagaggggtacagtggcacaacttaggaggttgaggtagaaagaccagaaattcagggtcactcttggctttgcagtgaatttgaggtcagcctgggcaaagcaaataaagcaaaggaaaacaaggacctgcaaaggcttcgagaaactgagagctgtgcggttactgtggtacctccccgcgtcacggcggagcatgactgctgttttcattgttgaaagacaagtggaaggctcgccacacacagcattgcttcagaaggcctgtgcgtgtcttgattgaaagtattaaaagcacaagcaatgtattacagttgttaacaccatcagaccagttctctggatcttttgctttaatattttagggtctaatctgaacttaattttgggtttttattgtttcttttttgttgtttgctttatttagtcttttttgagctaagatttcactagatagccctgactggcctgaaactccatatatgtagaccaggctaccctcaaactcataagagatccacatacttttgcctgctgagcgctgaaaatttaatgtcatgtccatagaaaaggatctctccaggtggggtggcgcacaccttttatcccagccagcactcgggaggcagaggcaggaagaaaggaaggaagggagaaggaaggaaggaagggaggaaggaagagagagagagagagagagagagagaaggatctcaagccgtcctttctgggcactgctgtattttagcaggttcatactgaaagctcagttaccaaagaattaataactctggcagcagtgacagctgccacctccagggtgccctcagtcccagggttaactagctcttctttgacacttcatcctgcagtctctttgctgtaagggcagcttgaacagcttcagcttttctcaggatttgttcctgacgtggccctgacagatggcgaagattcccgttttcctctgctagtctcagagctggtggcaggccgctggtcttgtgtgtttggggaggtccaaaatgaagatgattcctctttggacgtaagacctgcatacagaaaaataaataagcatccggcccaaaagcaccaagtgcccaagccggttgtctcggcagctgccaatcagccgcgtttctgtgaaaataagtccttttcatgaagctgggggaatagctaattctggcccgatatgcaatgtgaggttagaaacatggcaacttgtcacaacgcgattcttgttctttttgctgtgggctgactctacattacttgctttgtttgctctagaatggaatctactcaccatttactaaaatgaaatgcctttcttgggggaggcaaagtccatcccctgggtcttgcatcttagaagggaactccattcctctgtgactgagtgttatgggcctcgctatgcgttagcaaatgcagatttcagtcctaggacagattcttcacaccagagctgttttgtgtcttggtttaaagtttttttttttttggtttttttttttttttttttggttttttcgagacagggtttctctgtgtagccctggctgtcctggagctcactctgtagaccaggttggtctcgaactcagaaatctgcctgcctctgcctcccgagtgctgggattaaaggtgtgtgccaccacgcccacctaaagaatttttttaattgtccttgcctcacttccagtagtacagatcagttctaaacttctcagtatcacagaagtgagcattagaaagcttagatagtatattactttggattctgaccaacttggtcactccctgaccttgagcaaattatttaaactcaagacttactcaagggagggtggagcacagtgaaatttactaacttggctagttgagcatggaactcccatggctcacataatagtgatgtccactgaaatcatcatttggtttccattagaagccagcagcacactaggcacatgggagggagcagtgttgaggaaagaccaccaaccagtagtccataacaactactagctctgggtcctgttttttgttactaataagctttgtgctgctggcacagtgggggtgctttggttttcctcaaggatctggctattcttagtcactgctgactgacgaagcagctagattttagttgcagatgggttagtatctatgccagagtttactacatttcttcaaagtgctttttttcagcttctggaatcctgtttagggaaagcccatggaatctcttggcatgtctgctcttaaaacatacgcttttcctagagtttttatagcactttgcttaatttatgtttcaaggaattttgtatattgcattgaaagatttcagttgagactcttaagtgttgcaggtgagggaggctgttcctgggttcttgtagtagcagatggcctttttatagcattgtgacagttagtataatgagatttttcaggccgatttccacccagcagagtttaaatctgtcagcattagtaggtcaccccattttcctcctcctttctcccagcagtctttttatgtcagtggggcttaccagagcagtgttggggacgaatggaagtgaagggagctttgccagtttgtcgtttgaaacatgtaagaaatgaaccacaaatctctcctgtgctgtgtcacaggatcaggctgcagtcagtcccctatcatcgccatgaactgttgctgccagggatgcagtcagcgacgcagtgatgtccactggcctggcgtgttcagatccccgggtttgatccccagttctagagtgggacaccaaaaactctgacttctgtctctcctctggcagccgtggactggtttcccttttgcatagatggctatggcaagtaggaaaggaaacaaatccttaaaagaaacatgcttcaatagttaggctgcagtaaagaatcatctatcattcagtttgggaaataagatgttttgaggtacttcttgtattttttcatctctgagacaggttcttctgtgtagccctgactggcctggagcttcctatgtgctgtacagaccaggctggcctcagagtcacagagatccacctgcctctgcctcctgagagctggaaataaaggtgtctgcctccacacccagcgactttgggtacttttgatagagttctcttgcttgttcttttcaatactgtttgtccagtcttgtcttgacgccagctggtgggtggacagcacagcgtggtgggcggacggcacggagagataggcacttcctccggcatctgactccctgctgtcaactttgctctgtcttccatcttacacagcacactgtcactccttggctatacactttgactgttcttccagtgacaaatgggcaaatgactctcaggaaacggaattaagattctcaaggctgtgtcccgtttcatactgagaagtcagttgtccccagtggaaattacctacaaatgtagacgtttgcaaatattgacgtatcacaagtttataatcctagcacttggtaggctacagcagaattgccacaaattcaaggtcagcctgggctacatgttaggacactgtctcaaactcagcccttcaaaaaacaaaaaagaggccggagttgtgacattctggaaaattcagtgctgcctttcagtggctcacttactaagtataagtgtgtgtttattttttaaagacttatgtatatgagtgcacggttgctgtcttcaggcaccagaagagggtctcagatcctattggttgggagccaccatgtggttgctgggaattgaactaaggacctctggaagagcagtcagtgctcttaactgctgagccatctctccagcctgtgtgtttggtttttttaaagatttatttattttatatatataagtacactatatctgtcttcagacacaccagaagagagcatcagatcccattacatatggttgtgagctaccatgtggttactgggaattgaactcaggacctctggagtcctgagttttaggagcagccagtgctcctaaaagctgagccatctcttcggtccgtttttagtttctgggttttttttttttgtttttgtttttttaaagattttttaaaaaaattttatgtgtatgagtattttgcctttgagtatggatgtgcactgcttattcctgatgcctttagatgtcagaagaggatagtggacctcctgcagctggagttacaggtggttgtgagctcccatgtgggtgcttggaactgaacctaggtcctctacgagaggaccatctctccagcccctggttttggtttttgatactagatctcaggtaatacagatatcctcagacttgatgtgtaaccagggttggctttgaaatcctgatctcctgactctacaccccatgtgtaggattgtaggcatttgataccataccttgtggggtttgttttgtattactgtgttgtggttttgacacagtcttgctctgtagcacaggctggccccaaaatcacagaagtttttttgtctcagcttctccaaactctgggatttcaggtgtgaactaccgcgcccagctgagaggagttttcctgatatttttttaatgtctctgaatagattgtgaatggattggattatttcattggtcctcttttgggtcgattggcctgttgggcagatctctaatcatttccagtatatcacactaacatgaagctggcgcttctgagctcacccctgaggtatagtgatgtgactctccttttccttttcagggaagcagaatccttcaaggaacaagggaatgcatattatgctaagaaggactacaacgaagcttataactattacacaaaagccataggtaagaagggttacagcaggtgagtcacctgccagacattgcaagtggtccctgcctaagaagcagctcttagtgagctgagctcacagctcactcctccccaggatcagtgattctgcccaacacttgcatccaatgattggtgcttccttctctatctcaggaaacagaaatgtcttatctccatgttcttaacatgccagcatattttatttacctttaagacagtttcatgtagaacaccattgaacttgctaataattgaagatgaccatgaacatagacagcattgagctcacgtatgtcacaaacacaccatagttcacgaaacacattggccccctctaccccctaaaggcagttcaaagtcgtaactttgataacaagtgcctttacctgctgaggctggctctggtttttaaaattagtttcattgttttttttaaaaacgaaacccaaaaacacttggaaataaagaacgtaccgttgaaattaaccagaccctataggtacaataggtattctgaagctgcgggacttcacattagatttttatacttttgttgtcaaaatacattaataacccactaccaaaaccaaaaaactgtgtgatacatttagagctagaaaagaacgaggctcataccctcttctatagctcacgtattacttgcattcagtttctattatgtgcacatttgtttatgtgtgtaagtaaattataaattaggatcagcatgtgagggaacccacagttttttctttttctgagattgtgtgaccgggtattacacattataagatcttccatctttgtgactgcatttttcttaggagtgaaacaggatcccattgcattcgtgtgtgtgtgtgtgtgtgtgtgtgtgtatatgtatatatgtgtgtgtgtgtgtgtgtgtgtgtgtgtgtatgcaccagatttccgttatccatccgtcctagatggatatctgggtttaatccagttcttttctgtggccaagtaagcaataataaacctgaggacacacacctttatcatgaaatgtagagttgttctctgggtatacatatgcccgggaaagaaagagctggggcttgtagcagttacgtttttaatttttttcagaactctccaaattgatttccatattggctatattaaattgcaccccacccacagggaacaggttttctccaacagtcagtgtccgctttgttgatgacggccactttcactaggataaggggatatctcaaaatcattttaaggttttttgtttgttggttttgtttttgtttttttgagacagaatttctccacatttaatagccctggctgtcctggaactctcaagagattttcctgcctctgcctctgagtgctgggattaaaggtgtgtgctcctggctctggtatttcatttgagacaggctgacctaaaactggcagaaatcttgctttagcttcctatgccctttcccttcaacatgtttatgtttgtttgtttgtttgtttgttttgacataattctcttactctttttctccacacttttttggtgtggtgtggtttgctgtgtgtgtggtgtgtgtggtgtggtgtgtgatgtgtgtatgtgcgtgcgtgcatgcatgtggggggggggtgcgtttgtgggggtgtgtgtgtgtgtgtgtccgtgtccatccatgtggaggcccgaggttgatgttgggaccatcctatattgtgtttctgtgttactcacacgaaggctgtgtctcagtcgaatgaatctggagctaattataataactggggttactcttgatggctagttcgtttggaggtccccttctcccttcaaggctggagttccaggcaggccaccatgcttgcccagaatttacttgccccctggggcccttgatgtgtatactcagactacattacaagtttacctactgaaacgtctctctaggcctcccatgaaatagtcctttgagaggtagcctgtatgtaaggtcagtagcctgtgctgaactttgttttgtctcactatgtagccttggctgccttggaactggctctgtagaccaggctggtcttagacttctagaggcctgctgcgtctctggaatgctgggattaaagtgtgacccactatacccagatgaacttgctttttacacagttgatttttttatgtgttttgagtgtttggcatgtatgtatatgcaccacgttcgtgtttggtaaccacaaacatcaaaaagggagtattggatctcgtagaactggcattacggatgcttgtgagctaccgtgcaggtcatgggaatgtcgagtcctctgtaagtgctcttaaccactgagccatcatctttccagctctctgcgctgaactattttatgtcctattatctgtcctgtagatatgtgtcctaacaatgccagctattacggtaatcgagcggccacactgatgatgcttggacggttccgggaagctcttggagatgcgcagcagtctgtgaggttggatgacagttttgtccgggtatgtaatggagctctttggtggagaatgttttacagtatctctgccctagagctgctaaccattaggagcatttcctcttttcattgtgacagccacaaccatctcctaattgtgacaatgtcccctcaagatcaagtgctccctctgagagcattgttctgccttttcactgcatgctggtgtgtagactgtttttttggttttttggtttttttggggggttgttttttttgttgttgttttgttttttgtttttcgagacagagtttctctgtgtagtcctggttgtcctggaactcactctgtaaaccaggctagccttgaactcagaaatcctcctgcctctgcctcccaagtgctgggattaaaggcgtgcgccaccacgcccggctgtttgctgttgtgttgacctgtgcagtcatatttctttcctccctctgtgctttcttctagggacacctccgagaaggcaagtgccacctctcacttgggaatgcaatggcggcatgtcgtagtttccaaagagccctagaactggatcataaaaatgcccaggcacagcaggaggtaggtctgatctgttcctatgagaggtggtggtgcggtgggtctggaaagaagagtgaccaataaggcaggactgacagtctcacttcaccagcagccacacttagccaactttaggtaaatctcatagtctctgcgactgttaccttaactgttaaatgagttttcagtatgtaaaaagtggaaagcttcagagatgactgggtagacgcataatgcttcaggaaggaagctaaggaacgaaattaaagcatttgaataaagtcagagctagggtgtagctcagttacagaacattagtctagatgttctgagtctcggtttcagaccttgggtttgtcagaaagaactggtctatgctcagatgtggcttaagctggtagcacacgtctttcagttccacctttgtagtaggtgcctggacacatctgagtgagcatctcaaaactgcccaacccctggcttatggtggccatattttatgtctcctgtcttcctgacaggaagtcaacattaaacaagaaacttgggtcttgaccttttctgttttcttttaaaagatagggtttcaagtctggaaatgcacctcactggacagtgctggcctagcgtgcgtgaggccctcgtctcagtaaagccttctgtggtagtgcacactttggaatcccattacttagacaatggaaactgaaggacaagttcaagaccatctgcagctacataacaagtttaagctagcccaggctacatgagaccttgtctccaaacaaaacaaaaaatgggtctccatgtagcccaggctaactggtctcgtctgtcttggtattggaggggtctatttgtcactaattttatgtgtattgctatgagagtatcagaccttctggaactggagttacagacagctgtgagctgccatgtgagttgctgggaattgaacccaggacctctgaaagagcggccagtgctcttaactgctgagccatctctccagcccgtcaccagctttttaaggaaatgtttaattcttattttccttggagtgggggtttggttttttgaggcagggtttctcagtgtgtccctggctgttctggaatttgtactgtacaccaggctgacctcgaactcacaaagacctgcctgcccctgcctcctgactgctgggattaaaggcttgcaccacaactgtggctccttttgttttgttttttaaatttatgtgtatatgtactcttgtgctttcgtttgtatgagggcagacttgtactggctgtggcagtgatgttggagatcagggttattgcctggaagatcatgtctcctgttctgtcttgcttaaaacagtctctctagtttttttgtctttgagacaagagtctcacatgtctgtgaatgccctggagctggatgtatagagcaagctgccctttgcttctcaagtggacattacactgaccagcaagataggatctcttgcttgcttgctccatactcactctcagctaactgacactccagctactggagagtcttattcccagtccatcttgccttggcagcactgggtttatatatacacactgccatgtctggtttaacatgggttatggaatttgatctcaggtcgtcacacttgtatggcaagtgtttacacacagagtcatctccctcaccttgattttgtttatatattgtatgcacgcatgccacctgtatacctgtgtctacagaagccagaagagggcatcaaatccccctgaggctggtgctaggactaaactcagtactgtggaagagcagcgagagcccttaaacactgagccatctctcatgtgtcctaccctatgagtccacacaccccctttactgggtttctagatcaggtctctatctgatacactgtgtaatccaggttaaccttgccctcgctattcccctgagtgctggcgttacagacatgtagcaccatgcctgctgctttgatgtgattctttttttccttctttctttttcgagatagggtttcactatgtagctgtgtagctgtggctggccctaaactcacaggaatggacctgctctgtctctctctgtgttagggttaaaggtgcttgccaccatgcccagcttctgtggtttgaaaaagttgtgttgttgagaccgtcttactatatagccctggctgttctggaactcactatgtagttcaggctggcctcaaactcaagagatctacctcctgagtgctgggattaaaggtgtgcaccaccatacccggctccagtgatattcttgaaagaaggaattcatcagggtcttagtgacttttatgattgttcaacctaaacttcatttttttcccatggtgtagttcaagaacgccaatgccgtcatggagtatgagaaaatagcagaagtggattttgaaaagcgagatttccggaaggtaaagtagaagcgactagaacctaccctcctctgtgctgtgataatacagagcggtctagactagtacattgtcattcaaatttggctttgaccttttctctcttaaaagtattttttgctaagttgctttatttcttaattttatttggcttttcaataaggagcaaaaatcagcttgcttatattcccgttggctatgtcaggtagtgtatctcagatctgtgctaattaatgaaagaaaagtcagctggaaataaatactggggctgagtaatccatatttatctgattaacttgcttctgatggagtagatgctataaataagggtgggagacggaaaccctcattacatttttggagtgtgtgtaacctgttacatcacctctctctgccgtctgtcagcctcggcttcaagtgctaggattacagcatgagcccctgccacctttttgatgttattttgggtcttgtgtgtagctcaagctggcctgaaagttggcagtcctctgctgccgctatacccagcttggtgttagagtttaataaacttcacagtatgtggtaggttttgacaatctgtatgttaaaggggttgatgtatctgaaatagggaacaagtatggaagttccaggatttttctagaacttggagttaagcctgaagtatagatctccctatagtagatagtagtgagaactagctttcactaaagaatcgaagtaggaagcagaggattggcagaggtcagaaatccgcatcaggagatttatgcgctccttcaaccaggtgatttcagtccaagggaggagttgttgcatcgtatgtagggattcgcgtagggctttcagtagcaggtgttcagaaatgtttgagggggacaagtaagcatcttttttgagttttatactgtgagcgcttttatttgggaataaatatatcagactagtttatgcagatttgcaacattaactgtcttctgcccatgggttttgataattataatgtttttgtagttcattcgtgtgtgtgtgtgtgtgtgtgtgtgtgtgtgtgtgtgtgtgtgtgtggttggaaagcagttctaactactgtcacggctttgtcctgaaaggcagtcttttgggtttcttttctctcttgctcactctggagccagaatcctgagtttgtgacagaatcctctgtttgtgacatcccagcccccccactgtagctcatggtgatgtcacaaatgaagaattatgatcctggcaggggaaacagatgaacttagaagaaacaaagatcttctttgcctgcagctgtccctactggggacgtggttgggggtggcagtaagcattgctgagcctcaactgatgttcctcacgatgagcagagccagctctgcatagaacgttgagcttgtgaggccaagggcgtggctactccgctgtccctggcttttcctcgttgtacctcagttgtcattactgtccttagaacttccagtgacctgtgccactaaaggagtgccattgttggattggcagggctgaaagtgtcagtgagcggctcagtgttttctttcttgcttgcttgtgggttttcttttttgagacgaagactctatgtagctctggctgccctggaattagctgtgtagaccaggctggccttgaacttgcagagatctgtttgcctttaaacccatcttgcttgtgtttttaatctcagttttgaaaaggccctcggtgcaaataaaaagcatggaaagatatttagtgatgagtgctccttcaagcaggccctctggtctctctgctccccgtctccagtgctagggtagagctcagggtcaagttctaccactgaatacatcaaatacagattgttggatttgtttgcatgaaaggtagtgcactgttttccctcctctgaataaggcttggaggtctttctacagtagtaaatggaatattagtgcattctttagagttatggagtatgtcattatattagtctacagcgatgaaagttacctttccttgcttttagaattcatacttggagtctgagaggtaatggtgtcccttaattgcagatttctcctctggtccgttattcttagggagaaggggattgagggaggatatcccaggagtagcagctaagtaagaatgagagctcagagaacaaagttgtggagaaagggatgagtttctgagagctgtgtgactgacagggagcacgctgtagctttcgtaggtatgagtgggaaactggcttggcatttacacagagcagcccagtggtagtagtcatgtgacatccattagaatccttatagatggctagttcactgtggaatttctatactgagtgtaacggaccaacccagtagtaagatgtgctttaatcccagcacccaggaggcagaagtagctagatttctgtgagttcaaggccagtctgaactatatggtgattttcaggccacctagagctgcacactaaaactgtcttttttatttgtatgaatattttggccccacatatgtctgtgcactatgtgcatacctggagcccttacaggccagaggagagcactaaatgccttttgtttggatcccttgggactttgcagacaattgtgagccaccatgtgggttctgggaattgaaccgaagtcttctggaagaacatccagtgctcttaacatctaagccatctccaggctcaccccttccctgttgtcacgggaaaaggaggggcgcagcagtttctgttctgtgtgcagcgctgattcttgctggtgttcttatcgtacttaccagctaaagcctgacagataatgaaaatagtaaataatggtgtttgcaagaagaatgtgagctctgatcatagtcactgtgggctcaccatggaggctgctttctggttgaggttagtgctctagcgtcctactgtatttaagatggaacttggtgacctagagccttgctttgttctctattcattagtctctcatcactaaaagaaaggtagtgatattacttactaactcgatggggtattggtgtacttactgaatgaacgaacgtgtagaagctttgatattgcaccaataagcaatgatgtcttgagcaaactcaagtgaagacatttctggagtcccagttgaagagctcacttgctttcctcttcccttaggttgttttctgcatggaccgtgccctagaatttgcccctgcctgccatcgattcaaaattctcaaagcagaatgtttagcaatgcttggtcgatacccagaagcacagtttgtggccaggtacgcaatctggccaattcatgactgagacgcagagtggacttctgactgctggctggctgcttgctacacgggggctgtgggtgtcggttagggttgttgttcatgccttcctggagcttaaagccaaaggttaaagcaggttaaatccaagacccacaaggtatataggatgcagctgtgttgccggtgctcgagccttgtgcgagagagcttaatgagtctgagtttgtttaacctctgttttcatgtactctgtgggagttcattctctccttccatgctgcagaaggttttggggactgaatttaggtcatcaggcttggcagcaatctcactggcctgggtttgtttgaatgcagttctttctactccaggaaactctttttatctatccatattgtaactcttgtatcctttcttggtccctggtctctactgcaactgcttagctctgtcctatgccgtagtgcagaagcagccacagataacagctgagttagtgtaaaccagattttagggacctgacccaaggttgggatatagctggattggaagatgcttgtgtagcctggtttcattccttagtaccatggggtggtacagaggcaatggtacaagtgctggcctgctgtgtgcctcattggtagagtttgtgcttagcttgtactgagccttcaatccagtccctattacacatcacctatcaccaaaatatgaggagaaaatggaatacaaaacagtaccagaaaggacttagccctgagggcggtactttattcacccctactctaattcaataaagattgtgaggcatagccaggaatggtggtacacgcttataatcccagtgcttgccagaggcaagccgatgtctgtaaattttgtaggctagcttggtctacagagcaagttccaggacagccagggctatacagataaccctgtgtcaaaaacaaaaacaaaaaagaaaagatgatgagacacaaggaatgtattgggctggattggtgggggagagggggtattctcatcagtaagttcttgcctgtcaggtcccaggccctgggtttaatcctcaacactgctaggtacggggagaatgaaaaaagaaaaacatagtaaagatatataggtagtttattttaacaaggcttgttcttgagaatctagtcacctgtggatgaactttgagtactagagccgtgatcaagaaacagtttgactccagatggtgggaatggccaagacattgtacaccacagctgaacgtgtcctctttatttcagtgacattttacgaatggattccaccaatgctgatgctctgtatgtccggggtctttgcctttattacgaagattgtattgagaaggcagtgcagttttttgtacaggctctcaggatggctcctgaccacgagaaggcttgtgtcgcttgtagagtaagttctaagcctggtgttctgcacgtggtggtagagcttcctttcatgtctcatggtacgagtgaggctagggctgcagctcagtggtgaggtgaggtgaggtgtcacgctgtcattcctgtggccctggattccgtccctcctagcaaagtcgggagaaaagaaaataaagagtagaggaagactcacaggaatgtgacagctccacttgtcagtgtgttaaaccttccctgtgggggccgggcatgcaggggcctgtgtcccgccagacagctgggattgaagagagaacggtgagaaagaaagactgagctgaggttttttgcactgaactgaccgtcccttgcttctctccagaatgccaaagcccttaaagccaagaaggaagatgggaataaagcctttaaggaaggaaattacaagctagcatatgaactgtacacagaagccttggggatagatcccaacaacataaaaacaaatgctaaactctactgtaatcggggtacggttaattccaaggtaagtacttgatctggggtgtcagaggtcttcagagatgtgcttagcaagagcaagccagataaaagaatggtgtccctcatcctgtaaggaactgccttctgagaaacgaacttgcctttttgtgtgtagtgttgagaacttgagaggcagcttggctgaccgttccctcctgttttccccagttgtctcttgtgagagcaactagcaagtttgtgccattttaacaagtgttgtcacttctcatttgagcaagaacttgtttattattcaggacaaagacagagaaggttgacagcattaattaggcttttataaattgctgaatacgtgtaactgagaatgaagctgggcagtggtggcgcacacctttaatcccagcacttgggaggcagaggcaggtggatttctgagttcaaggccagcctggtctacagagtgagttccaggacagccagggctacacagagaaaccctgtctcgaaaatcaaaaaaaaaaaaaaaaaaaaacgtgtagctgagaatgaccatagttgtcccgcgtggccgtgtgccccataagagagaaaggttctgtagaatcctagtagttaaaaattgcagtctttctggtctttgtagttggttcatggaagagtggacttccatgaacaacaaacaaaacttctgtttgttgttttggttaaacaggcgacacaaagaggcactttaatcagtgtgtgtggcttttatcacatagtaaagaaaccagtttgaaatttggtgtccttagccctctgattttcccagggaacaagaatatagtaggacaggaatctaggcgtgttcatattgtgtagactccctccgtcagtggcaatatgaagtgtgattgctctctctctctctgtcctgaagcttaggcaactggaagatgccatagaagactgtacaaatgcggtgaagctcgatgacacttacatcaaagcctacctgagaagagctcagtggtgagtgctctggaggagccaggggggctgccactggttaactaggggaattgcgttgtgattgacaaaacagacccagggatgttgtgaggtcatttggtccttccccctgcctctaggtgggattgttccagtcctagactatctttatagacctccagcggaggagattgcacacgctccctcagtctcccatgcctgtgtctaacgcccctcacggtcagtaagtttcctctgatgcctgacccaaattcctttcattaacatatgagtccatttcctttgagactttttttgtgttgttcacttctgctctaacttggcacagtgcttggcacgtctgtgcttgcccagtaagtgttgttgaatgaatgtgtggtgctcggaagagggaagaagaagaaagtattcttacagttgaggagtgcctgctgtttaccatgagcagggagagtacagttgaaagcaatttcacttactcagtggtgcaaatatatatattaaagaaatactcttctttgatagacccaggataaatagttcatgccaagtattcagagccaagagggctctgtgaaaaggatcgtgcctgtccggatttttcccagatgctgcccagcctttttgttcattttgctctttcatcatccatcctccacagaattttcttcagacagaacagtaccaaggactaaacctctcaaaaagcgtgtcttctgacacacctatgtctaggtgtggggacatagcctgtatgtaactctagcacttgtaaggttgtgcaaggccagtgtgggctatagaatgaattccaaaccagtctgaactggtggggagatgccagcccagtggggacctgagatcagatctccagaaccaacataaagtctgatgtctgtaatcccagctcctccacagtgagatgcagacagacaggagagttcccagcagctcacaggccaactagcctggtgcattatacagtgctaaaaaagaggccctgtctcaaagtggaaagtgaacaccaacattcaaggtagtcctcccgtctccattatgtgttccttggtgagtgtgagccttcgatcccacagaagcattcacacaccagtctgggtttagcacctggctcagtggacagaacaagtcatttcatttcctcctgctctctaagcaaagaacttcctgggtttggttttgttgtttcattttcttgaaagtgactaagctggccttgctagactttctgttgtagatagtgatgatgacattgaacttctgatcttcctgtctccacctctgacaagtgctaggattggaggccagcatcagtacagctttattgtgtttttatacaggctaggaaagcagtatacatgccaagctacctccccagccctgtggggtcccccaccccacccctgtctcagcctggagcagtgatactggttttagagatcctaaaggaaaaggaagttcttggttatcgtttttccaatgcccattttatttctaattataaactgtaaaagtccacaggacaagcactacttaactaatgcttgagccaaaacttcctggtcagtagtacagagcccctcagatcctcaccactaagatataagaactgctggtatgtgtgattttttttttaataaaattaagtggaacaacaacaacaacaaaaatagccgggcgtggtggcgcacacctttaatctcagcactcgggaggcagaggcaggcagatttctgagttcgaggacagccagggctatacagagaaaccctgtctcgaaaaaacaaaaaaatagaaaaaataaaataataaagtggatgactaagtctgtccagtgaaaacatacgtgaattgtattatcagttctgagagactagcccttattcagcccagaatcatatgcactgtcacacagaaatggaagcttgggctggagatatagcttaattgtatagaccctgcctagcatgtttgagggcctggatttactgtctccctgccccttaccccacagaagagaatggaaattggtagggcgcttgcctagcgtacacagatgcagtagctggcactctacaaatggggtcacgtgtctgtatccccacactaaagagggaggtcagaggatcaggagtccagggctgggctagagagatggtttactgggtaaaggagcctaccaccaccaggctggaccacctcagtgccatccacaggaccaaatgtgctagaaagaaagaattgactcccaagagttaatgaactctgacctctacacatactgtatagttaagcacacgagcacacagacagacacagtaaatgtatttgtttgtttatgttttatgagactgggtttctctgtatagccctggctgtcctgggttagacttactgtgtagaccaggctggcttcaaactcacagagacacacctacctttgcctcccacgagctgggattaaagggatatgccgcaactgcctggccagatttttaaaaattgacagttcagccaggcatggtggcctacacctacaccttaatcccagcacttgggtaccagtggcaaagcggatctctgattccgaagccagcctgcctggtctacaaagtgagttccaggacagccagggccacacagtgagtctcaaaaaaaaaacccaaaatgttcaaggccagtctgggctgcatgaaactatatctcaaaaaattaaattaattaaaaaacaaaacaaaaacccaaccctttgacccaactgaaggctttaagcaacacaaaatgtacagaattccttgcaattttttctaacagcaaaagaacagaatcctctggcacctacagccccaattctctgtactatggtaacaggaaacatgaagagttgttcattcttagtttgctagaagacagtagaataggatgtgtgtgtgttgtgtgtgtgtgtgtgtgtgtgtgtgtttacagtcaacaaaaatgagaagttttactgacggttccttgttttgtgtctgagtgtctttgcctctgaaactccaccccagtgtggggcagtggacacttgggcacagtgggctgagaatgtagcagtggtccccagaggcactgatctgcttgaccaccatccagctgggctcagccttcaagtgcaacagatgagagctgtttgtctcttagcacaggctccggctcttcctctctcaaagccctaagagatggggaaagatttcttgagtttatgtgaaatactgcagatcctcctgtgcagttcacacctgcaatcctagtacttgggaagctaaggtatggccagttcagggccaggttggactacaaagtaagttctagttcagcctcggctacagaatgagaaagacctcatcacaaaaaagaaaaaaacaaaaaaccagaagaatgcaagtcagtgccctggtacttgtttattacgctacgtagaggcctagtgatcaaggcaatcactcagatgtcaggttcggtgttgtttgtttgtttcgggacaggtttctccatacagccctggctgtcctggaactcactatgtagaccagactggccacaaactcacagagatccacctgcctctgcttcctgcgtgctggcattaaaggtgggggccaccaccacctggcaatgtgtgttaaattactgtatttcagattatctgacactttgacctgtaaattagttctctattatgttcctagttaccctgtgtctgcagggcattgtgttttttgtttttatttggcttggttttattgagaccaagtctcacaatgtcaagctggccgtgaactcagagatcctcctgtctctgcctcctgattctacaattaaaggcattgtgccaccatgcccagactggacattgttttggggggtgtgtgtctatgtgtgctttattttttataagtcaaagatgaatgaatgtatttccagaaattcagagagcctaattatcacacttctctttggccagccacattggtatcagtcttcctgccctggtctccaaagctgatgtgcgttaagatggactagtgtgatggaagtgtggaccgcctcggggtgtagcagctagctgcactgtgttgactctgcccattcttagcagatgtgtctgttagatggagagatcaatcttggtgccatcacatggttcgaataccacgtggttctgtgggaagcagcacttccagagtcctggtaccctgcctgttccaggcactcttctcattctggcccagagtttcctctttgcttttgtgctatggaaatagaaacaagactgtgctgcgagtcccttcttctgtctcacctctacctctgagatggattgatcttagtggaagcatttgtcagcagcttccaccctgaccttgatccttctagtggctcaactaaccccacttgtagccttggttggaactggccctgcatgtctggcacggaaggtgtcaaagctctttcacagcagtttgtctcacatggtcatttttctcttgttcagagcagtcaagtaggtgctgtcacagtgtctttgctgttgggcagcgctgtgacaccgagaactcctccttagcccttgcctgcttagagcaggggactgctgactgggtgcaatgccagccttgaggcactgagagttcattcatcttctttagataagggattctgctgtttgatgaaacatcctaccaaaagtgtgtatctcttgcatgagccataccttctccctagaaggtcccacaggccgttactatttatgtctgagtgctgtattaccctgtacttccttctcagttacatggacacagagcagtttgaagaagccgtgcgggactatgaaaaagtgtatcagacggagaaaacaaaaggtacgaggacaaaggggcagagacgtgttgctcgggggggctgtggtcttctcggttgttggtcgcagcacttaggaccattccatttgctcactagcctggaagccagcagttcctgggaggggctcaggcacctgtgttctggctctgtctcctccctgttagtctcacttcctatatattcagaagaaagcaccaaaagagtccctgttgtggttaccaaagtttctaccccttaggcaggcagctgggctgtctgttgatgctgcctttctccctccagaacacaaacagctccttaagaatgcacagctggaactgaagaagagcaagaggaaagattactacaagatcctgggagtggacaagaatgcctctgaggacgagatcaagaaagcttaccggaaacgggccttgatgcaccatccaggtgagcgctggaggaggtgcagcagagcccacagcgcagatgcagtgggcacccaggagatcgctcttcagtgggaaggagggggtgctggactccctgtcctacaggctgtgggaggtgccacattccaaacttggacaataatagactttgttttcctgtgtccctggtttcactgaatcctctagatcggcacagtggggccagtgccgaagttcagaaggaggaggagaagaagtttaaggaagtgggagaggcctttaccatcctctctgatcccaagaaaaagactcgttatgacagtggacaggacttggatgaggagggcatgaatatgggcggtgagttggtttgggcatctacaatgaaaatggtccctgtaccagaaaagcccccattgaagttaccaaggcttctgccctcggggcagctgggttgggacaccccagaggggaggtctacaagtactcagccagcgacataagccaataaataggctgttaaaaaaaaatgagctagggcaggagccatcagaactgttgtgacctggactaaagcgtcagggtctccaggactggtacagtggctttggtaacactgaatttgagccttctcagcacggccccagcattataggagggcagatgcagatggcgttcctagctaggtaagaagcccactcggaggcaggggaagcttcccttctagacttcacccggaagggcacagatcccagaagcagggtcagcaggttctgcctggctgacatggggagaggcttgctaacatctaggctgaaatggaagagcagagtgagcctcagaagtcttctgcatcaggttcctcagatctttctgatttcccccttttttgccctttccttcctaattaccagattttgatgcaaacaacatcttcaaggcattcttcggtggtcctgggggcttcagctttgaaggtaggtttgcctgctgctcgctcttaggagctcccaggtgacagaccagcactggcccctcactcagcagcacctggggaatctgagtggagacagctggatccttgttcagcaggacaggtgtctatgctcgtgtggctgatgaggctcctgggtttatttttcttgggaccattctcagtgcagttagcaaagtcagagaagcatccccaagccccgtagtgtcatgccttctccataagagcaggggtgttgagaagctacacacaaagtgcgcttcagcccagtggtagggcgctcaccctgcatgctggcccttgtgctctaggcttagactgcctgatacccttggagtctctgtttggattaagctgctctttaagactttggtataacaacagtggttttcctaagaaaaccacagagccaactaacaagcctttctttttcctttcagcatctggcccagggaatttctactttcagtttggctaatgaaggccaactacttaaaacccagaaaatgcagacttgcttggtttaaccatgagtgtggacagttcacttcctccatcatgtccctgtgtacttagagcagtttcgttttctcagtcgggtgccctgtgtctgtatgaggggtgaaggaaagggggccagtgctgaggactagggagggagggaagccaggggtagacagggaagcaggcagcttgtgaatttttgttgtattgtttaactttattaaaaaagaaaaagaataaaatgttttgaccgttctttggtccttggctttggcagctgctctgtacctgaggttcttccaagagcataggcaccaggtgttgtatgagtgtgtgtgtgtgtgtgtgtgtgtgtgtgtgtgtgtgtgtgtgtgttttctcactatgtaggctcaggctagagcagtcctcctgcctcagccctctccagtgctgggattaaggtataagtcaccacactgtccggctcctatagcagggcactggagcttgagggatatggacaagaggacaaaattctgctcctgcctgccagtggtggtgcatgtttttaatcccagcacttgggaggcagaggcaggtggatttctgagttcaaggctagcctggtctacagagtgaattctgggacagccagggctacacagagaaaccctgtctcgaaaaaaaacaaaaaaattctgctctttcaaagcatggcaggcagctcctggtctcgggcctttgctggcttaaggctcaaactgttggaaagtgttctctgcaaatgcatgactggtctcctcccgcttacatgaggcaacataaagggatctgcacactgctcagctaagttgctgttctaggcagacacaagaggctctgaagctggactgcaggtgctgatggcacagatagctagggagagagaggccttgaaccagagcagcaggagggactgctgaatgtgtctactcttgggtgtgaggagcaaggttgccttccccaagtaccccacaaagcccaggctgggaactctgggccttgctgagaggtctttgggacatggccacctgcatgtggtcggttgccttagctgtcagataaaggctttgtgctccaagtttctggctgccagccaatccccaccttctctatgtgtctgaagccagcctctcctttctgcttcatgaaagccaacactgttgccctacccagcctcgtcacagctgtgcccagccagcagaagggagacaggaccgatggccccaagctgtgggacaaagctggtcttaatgtacgcagccctaaccccagggaagactgggctggacatagaaggccaagagtgatagcacacagctgggattaacatgatttatttcagtatcagtcttagtggtggctgaggtgggcaacacagggtgagggtaggagcatacatcccagattctcgggtgacaacccaattagcaaggtcctgttactgagcagaaggcagagtgaggtactccaggagccaggctttgccagagcaggagatggggcttactcttgccagctcagggtcccctccactggttcttggtacctaccaccctcctttaaagacccagaggcaccatgcaggcaagatgggctgggcagaaagcaaagctggagcttctcggggcatctttctgaccttggcctccatccacacagcagagacatgctgctggagatggcctgaccgaaaccatcaccctaggtacagtgtgaaggagataggaacttaggaatgaccaaaggtgagaggtaaaccccttttaccgcccagtaaatagcccaagccttcccaagggctatagtgattaaaaaactggcacccagggatctgagccctctctaagctaccactgttttcctgtggcagtagcgtttgtccctagcatgtggcagctctgaggcgtgtgcccagctttggatgggcaggggctaagggagggttaacaagttcttggatgcatctgggcagatgctgctgcaggcccaatgacccagcccttttattaccacctctggtccaggttcctgaatggtatcttcctctgcccacccgcctgtgttgagagctgagtattaagaggaaaagaaagggtgggcacaaggaactggtagttattttatagactcctaaaaagttacaggtacgttagctttgagtaaaaaaaaaaaaaatcttaaaaatcaggtggaaggcatgttgctgtgtccacccacagcagtggtacagtggtacagcggtgtgaaccctcagatgatggtgcagatctgcatggcaccccccttccggctgccatgtatgggcacaggtttgcccttcccatagtaccccgtgaagatggccttgacctccatcttcttagtcaggctcagcatccatcgccctttgcccagggaatagagcttgccccgggggagctcacccaccgcctcaccttggctgccccccttcacctgttgtaaaatatctaagaggtcaagacccgtctgcactggctgcacgtcggccgcacagcctagggtgacgtgagctcggctccctgggggcaggccctcggaggcagatggcttgtccagatcactgggccacaactgcagctcctgatcggtcagcaccacctgggccccagctgtcttgggtgtcacaaagagagcagagatggacagtttgaaggccttgccatacgatctcttcaccacctagggaaggagagggggcccacgttagagggacaaagctaatgagagtggtccatccccaggggagaaaatgagtgtggtgtgaggggggtcttgtttttgtgttgtgttgggtttttttggttttttgagacaaggtttctctgtgtagccctggctgtcctggaactcactctgtagaccaggctggcctcgaactcagaaatccgcctgcctctgcctcccaagtgctgggactaaaggcgtgcgccaccatgcctctctgtagcccaggctgtcctggaactcagtagaccaagctggcttctaactcaagagatcctcctgcctctgcctccagagtgctggggtaaaaggtgtgcgccaccacggcccagctttgcaggggtcttttttaaaaaggcaaaccaaacaaaacacacagcacaagccattcaagctaaggttagaaaaaacgctctcagagaggcaccagatccaaaccccgtttactgctagcctctctgccttggctgttcccttggaagagagagagaacactagagcctccctccaagcaaacaggattgacagagtggtaggtgaagaactactgttgctccacggctccctccaccaacacgctggggtctacatctggttacctctgcctaccctgagcctcttccgtgagttcatgtgacctaactgtaaaatctttttgttcatgaacttctgttccagcagcagcatgtggcaggtgcttagtgagcggacagtaggaagtaggacagtaggaaggagcgacggtacatattcagccattacactgagaacacgaacagacaaggccccttagctgccgcttcccctgaggttggccagtaagcaagcaggtgaatggctgcggggaaggccatggtaaaggaagttaggaagtagacagcatgcctgtatctggccatgggctgtgtgctatggtgcaggaatgggtggcttggtatcctgagccactccctctggagcaaggccagtagaacaggctccctgggatacaggactctcagcatttgagactctgaaacttaacaggggtttgagaagccagagcaagaacctgctgctgcctggcataaatccataaatctatgtcaaggagaaggccctttggcaggccctggggagagatgggactagtgaggccctaggagaggataacaagattacagactacaccaaagactggaggccacacttctccaacccacttaccctccccacctccacctgggcgtccctggggaggaggactcacctcctgctgggcgtattcttctgccccagcggccttcccgtagtcacagaatttggttgtacagtgcagcacacctggaggtctctttccaaagtagctgaccagctcaagcttctccttgggttcatctccagaaataactgcagaagagaaaagggtccatcaaaggtggggagctgggcctaccaacacctatctcggagactgcaaaccaaaaccagggccattactaagaagtcctcgggtggctctgctgtgcttcgcttatttgctagctggagacgaaggtcagtgggcagagtgctggcctggcctggcctgcgccaacaccccaggttgagtccccggcactagcactgcgtaaagcaagcatggtgacatacacatgtaaccctagctccaggaaaatagatgcaggaagatctggagttctcaacggggtcgggggagggcagctgggatccttgcccagcatgcatagggtcctggctttaatgctggacagggaacaaaccaaaccatactggcgttacagcgtatagagctttatatctctacttgagttctcaggcatatgtaacacagggctaggccatacaagccaaaggcaaggggaaccaggtggtacatggggaaatgaaacccatcctgccacttactagccacctgggacacgtgggtgggtgacttgtcagtccactgtgacagttccagttgccatatccccaaattcctcagggcctctgagatttacagcaaccatttcagccagtggtgactgacccctcatgccctgcaaggcatgcgtggaggaggagagcaagccaagggcctggaacaggaagggtcctaggaacagtgggacgaggtggctgaggaccaggaggatgtcaaaagctgggcttccaaacagaggccaagcttggtggctgaatttggtctctagcttttccattccttcccaaatgctaatgcttcaaggggtcctctattctgagcacgtcctgttattgtttctgatgtcccctgtcacactctgagcagaaaagcattctggtgtttgtggccaaagccagcatcaaacagtaatcatgcccgagccagcaccaacagctctggccagaagccctgtccctgatcgttgcccctctatacaaaaagtggcctggctctcaactaacatcttccttgtaaaagtttgagtcttaggagcctagaaataagttttctgaaaactcacatgggcacaaaggacctgtttgcctctgagcagtcgaacaacagaatgaagcagtttgtttacaggccagctaaaactgagagtgcctaagtctccagtactggggaaggtaaaagcaggagaattactgcaagtcagagaccagcctgatggatgaagtgagttccaggcccgccatggaaggctacatagacttttatctccaaaacaaaacaaaacacccaagactcaactacctgtgggacactgggggaatgggaccactgaggactctaccctaccccagactatccactcattggagccaacagcccttaccaggaaagaatcctcctggctcctacccaggtacaggtggcaactcttatatcctttctgggcatgtctcttatatggagagaatattctggaaggcatgaagctgggttctctacagcttgagatgccatgggggagcccaagacccattctctggaaagtcacacagccttggccttgctactttttgcagtttaggtttccacctcaccttctgcttagaaacatatattctgctgctaaaactgatcttgacagccttggtctccctccgccctccaccgaggagcttatagcatatggcgaagagaattacagttttttcccacctccaagactcagatggaggtctagagccaaacggggaggatatcctggtgctggggggggaagaggaaggcaagaaaggagctatgggcatgcccttctccactgacgccttgcttctggccagtcctagaagctgctacctgtaccctccacccgtcaaccccatcctttgagctcagcagctgcgctgcctggctctccatcacaggcaaacagtacaaggctttagctgccctgctcccaccccacatccacctacagtgtcgaagctctttcttgaaggccttgtgattccccagctcctccagaaagacctggccagcttttcggagggtctcagaactctttttggtcaggaaccagccaaagtagagtggcagaaagtccttctccagcccgggcttcagcttcttcaggtcatcggccgacagctgccattggttcttctccttgagctgggcacagtctagtcgccacgctgtcttgggctccaccagcaccacctggtactgatactggtctgccatttcaaaaagctgatccagccgctcccgctcgtggttggtatcatcaagcacaagaaccctgatgtcccggcggcagtagccagccaggtcctcgtctagacgcttgtacgcctcggagaagtctgcccgagagccagggatgatcttgtaagcatcagcggacaccatcttggtgccgtcgtggtacttctccaggatgagccgagccagtgtggacttgccgctgcccggcaggccgcgcaggatgaatagcgtcttgcactcgtggagggtagccaccgtgtcctcatcttgaaggaaagggaactgcagctctggcttctcctttgctcctgaggatgacattttcctgaagaagagcttgggcaggaatgtgtggcttttgcgggtaaagcttgtgttctgtgtaagaagggaggaggagatgtcagccccggctcctcaaagccagcccgcaagcaccacaccctagtctctggccgagttctcccagagggggaccgcttgtcagttgaggaatccccaagcctaacttaaagcacccttgaatggtggatgctttccccggaggggaatggtggattttcttcctcgcagtagatccttcagtatcttcaacagctgggttgtaaggtagagggaatctttctgaagctacctaacctcttagtctctggctccaaggatcactctctgctccccctcagaacaccttggtgacagggcacgcaagggcagcaagtgcctgtggctccctgtcagccctaacttatatattcttggcacctcttaaggatgtcctgtttggaggcctggggctctatgtatgggcaaagccacagctgccttggctctcttgagtgtgcagaggagggtgagggcaggggagggtgacccaaagaccgcctccctccacccaacaatggcaccaacagataatactctcttgtctgggtatagggggacaatggtcccacagagggctggtggggggcagggcaggagggcactggacaaagggcatattcacaaccacctcctcctctgctctctcagtgcgccccctcccccaatctgtaggattagggcacagggcacctgtattcagagatctgtgccccctattctgctgtgtgttagcagcacctctctgacaaaaacaagacatagcggtttcagttgtcatctacaacggcttccgcccctgagaatttagctggcttctggcttctctatagccttgtgcaggaacccactcccagcgcgggctccacaacagccctgcactctctggtgctacccagacccatttgccagctggtgtcgccaaggagcatcgactttcacttccctgcggcgatatttccttctccaaagacactaagactcccccaaaatatccccgctcgcgccccttgccttagggctgccttggaggacccagaggcaacttcaactccggaacctggtgtcctcatttgcaaactacttctgcccatgcatccccaagaatctcgctttcagttagcctctctcccgccccggcccccacgcacgcgctgcgctcaccatgatgagtgggcgcaccgccgtcaccgcctttgcgggtactatgtctccggggccgcccgcctgcgtgagggacacgggcgtctccgggtgtccggggcccccccacgcagggtccctttcatagcctgggggcggggcgcgcggacagggcggggtcagcccgagcctctgcgcacgcgcccccggggaatggaaacctgagtgccaggaagcagcggtctgagccttggcagaaagtaaaagcacacctggactctcaatgccaagaaagagtccgccacgccacctctttgttccttaaaagttaaagtttaactttttcccttctctgagacaggaactcactatgtagccctgactgtcctggaactcaccatgtagatcaggctggcctggtacagagatctgcctgcctctgcctcccaagtgcttggattaaagacatcaccaggagagagatgaactcttaaaacaggaggcagttgcctttcctgggttcccaggcaggctgggatgaaatgggtgcagtcagatagtttaaaattttgaaacaggctcatagaccttatcacaactgacatgtgaaggaagtaccattcaggccacgaaaccaggccgataggcatcaccgcctcctaaaacaaaaacaaagacctaattcatcaaagtccataattctgggaaaggccctaaatgtcctaaccttgatttttggctcctatagtctgcttctgacttaggtgtgtcaacacaggatgtggtttttatgattaaaagcctaccctgagaaaagtgctgggtggtggtggcacacacctttaatcccagcacttggaaggcagaggcaggtggatttctgagttcaaggccagcctggtctacagggtgagttccaggacagccaggtctacacagagaaaccctgtctcaggaaaaaaaaaaaaaaaaaaaaaaaagtctagtgaaggggctgaggggctggctaataaagactttctattggcttccgcttgggtctaagcagtcttctttgctggatatcccccaaaaaaggtttgttttaaagatgaatctcatgtaacccaggctaagttcaaactctctatgtaacaaagggtgaccttgaacttcttatcctcttgctggaaattcatacatacaagaacatgtcagctgtttaagatgctggggttcctgcaagctaggcaagtgcatcctagcttcgaggacgtggtgacattgttcactttcacttttttctttaatcccagcacttgggaggcagaggcaagcagatctcagtgagttccaggccagcctgatctgcagagtgagttccaggacagccaggcctacagagagacaccctgtctcaacaaaacaaaacaaaacaaacggatatataattatatataatttctcaggagcagttgagatatagctttgttaacatggccacgttaccctgagttgaacttctaggccatgaatgatagaaaaccaactccctcgacttgttcttctctgacagccacaggcaggtagtaggtgtgtaggtccgcacacataaatgcacacaaaaataaattaaaatgtactttttatttctttgagagatctctctgtccagctctggctatcctggaattcactgtgtagaccaggctggcctcaaactcacagagatccggctgcctctgcctccctgatgctgggactaacaatgtgtaccaccactgcctggcttaatagatgagttttattttatgtgtattggtgtttcgcctgcatatgtgtctatgtgggggtttagaaccttctggaactagagttatagacaggtgtgagctgccatgtggttgctgggaattgaactcaggtcctcttaaagagcagcccttgctcttagcctctgcgctatctctccggcctcatttaaaatgtaattttaaaaagacatgatttaaaatacttttatctagggactgggactatagcttggtgttagaagacttgtctagtaggcacaagttcctggacttgacctggggataagtttggggaccaaagtcattctgcctttgaattgcctctcacttgactggaatcctggcttcatccagcctaagtcatctttatccctgcttctggaccacatggcaaaggccttgcatgatggtttgtatatgcttggcccagggtgtggcaccattagga

SEQ ID NO: 3006 - DNA, 1571 bp, Mus musculus
aagatggcggctaccgcggagtgcgatgtggtaatggcggcgaccgagcctgaactgctggaggacgaagacgccaagagggaagcagaatccttcaaggaacaagggaatgcatattatgctaagaaggactacaacgaagcttataactattacacaaaagccatagatatgtgtcctaacaatgccagctattacggtaatcgagcggccacactgatgatgcttggacggttccgggaagctcttggagatgcgcagcagtctgtgaggttggatgacagttttgtccggggacacctccgagaaggcaagtgccacctctcacttgggaatgcaatggcggcatgtcgtagtttccaaagagccctagaactggatcataaaaatgcccaggcacagcaggagttcaagaacgccaatgccgtcatggagtatgagaaaatagcagaagtggattttgaaaagcgagatttccggaaggttgttttctgcatggaccgtgccctagaatttgcccctgcctgccatcgattcaaaattctcaaagcagaatgtttagcaatgcttggtcgatacccagaagcacagtttgtggccagtgacattttacgaatggattccaccaatgctgatgctctgtatgtccggggtctttgcctttattacgaagattgtattgagaaggcagtgcagttttttgtacaggctctcaggatggctcctgaccacgagaaggcttgtgtcgcttgtagacttaggcaactggaagatgccatagaagactgtacaaatgcggtgaagctcgatgacacttacatcaaagcctacctgagaagagctcagtgttacatggacacagagcagtttgaagaagccgtgcgggactatgaaaaagtgtatcagacggagaaaacaaaagaacacaaacagctccttaagaatgcacagctggaactgaagaagagcaagaggaaagattactacaagatcctgggagtggacaagaatgcctctgaggacgagatcaagaaagcttaccggaaacgggccttgatgcaccatccagatcggcacagtggggccagtgccgaagttcagaaggaggaggagaagaagtttaaggaagtgggagaggcctttaccatcctctctgatcccaagaaaaagactcgttatgacagtggacaggacttggatgaggagggcatgaatatgggcgattttgatgcaaacaacatcttcaaggcattcttcggtggtcctgggggcttcagctttgaagcatctggcccagggaatttctactttcagtttggctaatgaaggccaactacttaaaacccagaaaatgcagacttgcttggtttaaccatgagtgtggacagttcacttcctccatcatgtccctgtgtacttagagcagtttcgttttctcagtcgggtgccctgtgtctgtatgaggggtgaaggaaagggggccagtgctgaggactagggagggagggaagccaggggtagacagggaagcaggcagcttgtgaatttttgttgtattgtttaactttatt

SEQ ID NO: 3007 - protein, 439 aa, Mus musculus
MAATAECDVVMAATEPELLEDEDAKREAESFKEQGNAYYAKKDYNEAYNYYTKAIDMCPNNASYYGNRAATLMMLGRFREALGDAQQSVRLDDSFVRGHLREGKCHLSLGNAMAACRSFQRALELDHKNAQAQQEFKNANAVMEYEKIAEVDFEKRDFRKVVFCMDRALEFAPACHRFKILKAECLAMLGRYPEAQFVASDILRMDSTNADALYVRGLCLYYEDCIEKAVQFFVQALRMAPDHEKACVACRLRQLEDAIEDCTNAVKLDDTYIKAYLRRAQCYMDTEQFEEAVRDYEKVYQTEKTKEHKQLLKNAQLELKKSKRKDYYKILGVDKNASEDEIKKAYRKRALMHHPDRHSGASAEVQKEEEKKFKEVGEAFTILSDPKKKTRYDSGQDLDEEGMNMGDFDANNIFKAFFGGPGGFSFEASGPGNFYFQFG

SEQ ID NO: 3008 - DNA, 1736 bp, Mus musculus
aagatggcggctaccgcggagtgcgatgtggtaatggcggcgaccgagcctgaactgctggaggacgaagacgccaagagggaagcagaatccttcaaggaacaagggaatgcatattatgctaagaaggactacaacgaagcttataactattacacaaaagccatagatatgtgtcctaacaatgccagctattacggtaatcgagcggccacactgatgatgcttggacggttccgggaagctcttggagatgcgcagcagtctgtgaggttggatgacagttttgtccggggacacctccgagaaggcaagtgccacctctcacttgggaatgcaatggcggcatgtcgtagtttccaaagagccctagaactggatcataaaaatgcccaggcacagcaggagttcaagaacgccaatgccgtcatggagtatgagaaaatagcagaagtggattttgaaaagcgagatttccggaaggttgttttctgcatggaccgtgccctagaatttgcccctgcctgccatcgattcaaaattctcaaagcagaatgtttagcaatgcttggtcgatacccagaagcacagtttgtggccagtgacattttacgaatggattccaccaatgctgatgctctgtatgtccggggtctttgcctttattacgaagattgtattgagaaggcagtgcagttttttgtacaggctctcaggatggctcctgaccacgagaaggcttgtgtcgcttgtagaaatgccaaagcccttaaagccaagaaggaagatgggaataaagcctttaaggaaggaaattacaagctagcatatgaactgtacacagaagccttggggatagatcccaacaacataaaaacaaatgctaaactctactgtaatcggggtacggttaattccaagcttaggcaactggaagatgccatagaagactgtacaaatgcggtgaagctcgatgacacttacatcaaagcctacctgagaagagctcagtgttacatggacacagagcagtttgaagaagccgtgcgggactatgaaaaagtgtatcagacggagaaaacaaaagaacacaaacagctccttaagaatgcacagctggaactgaagaagagcaagaggaaagattactacaagatcctgggagtggacaagaatgcctctgaggacgagatcaagaaagcttaccggaaacgggccttgatgcaccatccagatcggcacagtggggccagtgccgaagttcagaaggaggaggagaagaagtttaaggaagtgggagaggcctttaccatcctctctgatcccaagaaaaagactcgttatgacagtggacaggacttggatgaggagggcatgaatatgggcgattttgatgcaaacaacatcttcaaggcattcttcggtggtcctgggggcttcagctttgaagcatctggcccagggaatttctactttcagtttggctaatgaaggccaactacttaaaacccagaaaatgcagacttgcttggtttaaccatgagtgtggacagttcacttcctccatcatgtccctgtgtacttagagcagtttcgttttctcagtcgggtgccctgtgtctgtatgaggggtgaaggaaagggggccagtgctgaggactagggagggagggaagccaggggtagacagggaagcaggcagcttgtgaatttttgttgtattgtttaactttatt

SEQ ID NO: 3009 - protein, 494 aa, Mus musculus
MAATAECDVVMAATEPELLEDEDAKREAESFKEQGNAYYAKKDYNEAYNYYTKAIDMCPNNASYYGNRAATLMMLGRFREALGDAQQSVRLDDSFVRGHLREGKCHLSLGNAMAACRSFQRALELDHKNAQAQQEFKNANAVMEYEKIAEVDFEKRDFRKVVFCMDRALEFAPACHRFKILKAECLAMLGRYPEAQFVASDILRMDSTNADALYVRGLCLYYEDCIEKAVQFFVQALRMAPDHEKACVACRNAKALKAKKEDGNKAFKEGNYKLAYELYTEALGIDPNNIKTNAKLYCNRGTVNSKLRQLEDAIEDCTNAVKLDDTYIKAYLRRAQCYMDTEQFEEAVRDYEKVYQTEKTKEHKQLLKNAQLELKKSKRKDYYKILGVDKNASEDEIKKAYRKRALMHHPDRHSGASAEVQKEEEKKFKEVGEAFTILSDPKKKTRYDSGQDLDEEGMNMGDFDANNIFKAFFGGPGGFSFEASGPGNFYFQFG

SEQ ID NO: 3010 - DNA, 61808 bp, Homo sapiens
  misc_feature (1)...(61808): n = A, C, G or T/U
gaggaatttccggggaggtgggttgggatagtcatcttaggggcaagagtgaggggtgggcgtgcatctcctagagaccatctctatcccgtaaatcctcctcccttctcccatgctgagactttcctccctctggacaggaagacaggtggtggagaaagcccttcggaatgaatgtttgggggtgggaagggaggaggatttaggtttggaactctaaaaggcacgctttccctgcagcaaaaagcttgaggatgggccccagggagggggtggggttttctggggtggagactgtgtccattcctttcttttccgtgtagtctaaactggccttgcagaagcaactcaccaagacgttggcagcccgcttcctgcccagcccgctccccaccgcagccactgccatctgtgctctgccagggcccctggccctccgccctgcccctacagcagccactaccctcttcccggctcccatcctgggcccagctctgtttcgcaccccagcaggagctgtccgccctgccacaggacctatcgtccttgccccttattagccctcatggggaggccagagctgatttcccaatagccactccttgtctcctcctgtcctgagacaccttggtttcctacatgccacagggactgtgaacagcttcaggggtcctgcccgatccagaaagagctgggctagttttaagggcagctgccttccaaggactgtccccaccctcctttcgcaggccttccagggttaatcctaggcttgcctgcatttcccaccctgacagaccccaaagatctatgcaaaatctcagccccagccatgtggtgctctcactttcctccacccaagacccacatggccagactctaggaatcttagcttctacaagccatcctctcctagccaggggacgactctctgacctctattcctaggctttggggcttcactggagatagggatggggtctctagctgcagcaggctcaaggctgtcaggacaaggtgaccatgggagtgtgacagaggaccatggaggagaaagggggacccaaaagtccttcgatcagcagtgctaaggtggggcagagccaaggaggtagtggggctggttctgaaagcttttgggggcttcatctgctctgaaggggtgggactaagagaggaggtgatgttctggttgggcccagggttttgttttaatcttgtcttctgggcattcatgggcccagtctttttttctgtttgagagtatcattctgttgcccaggttagagtgcagtggtgcaatcttggctcactgcatgcagcctctgcctccctggttcaagtgatacttgctgataagcccagtcttaatattgagggagtaactcatccctcagaagctcttcttcttagcctttctctgacttcctgaaccccaactcttggagggcgggtgtgggtctccctcagactatggactcagctaacaccgaaccccccgcagagctcccaaaggaagagctttcccctacagcttcccactccaaactggtcctagcactaaattcagctttcccttctcccaaccagcccctgccactgtgaagctgagtgttgggaggcagtctcacatgcactggcaagacccattttcatgctgtcaatgtcaatgtcacaaactcctttccactgcagcactgccccctccccaccccacaatatgggaccctgccagtatccccctgtatcttttttttgttttttaaagacatttccaatgggagaaccagaaaaagggggaggggagggaaactttttgataacaattgtggttttattgtgtccaaccaatgcatcaataaatgaacttgaagcccaagcctgtgtgtgtcctaattccactcacccagccccgggcacctgccccactcacctctggctttgagaaggggcgtgtgtcggtggttgcctggctgcagtgtctcacctaggctaggtgtgcaccttagaagcacaaagcgggcacagttgtgggtaataagcttactctgcaggccgctgggtgtgtgcccaccctcctgagccccgaaagaggacctgtcagctcctgagaggctgctacgggtttgccttgttctgttcaggcatctgaggtaagaaggaggggccagaggagcaccttgtccagccttcaccatgagagcgggcatataaatataaatacaggtaacttataaatagaagtccagctctgagctgaaaaccacaggcaggataaagagcagcctccaagagcgaggctggcgggctgggcactgagcggccactctggtgactgacagcaggtagtgcactcctgccccctggtggctggagggagcggcagatcccagcctccagggctggttggcatagcaccttaaagagggagaagccattggctttacgaaatcaagagaactggaaaggatctaggagatcatctaagcaactctggtcatcttacagatgagaaactgatgcccagagaggggaaaggtcttgctgggtcacaaagtgggctggtgactcatagcccagttattctattccatctcaaccagtgaggcccatctgctccctgagcaggaagaggaagtaaaacaattggtaggggtggggaattttttttttttttttcgagatggagtcttgctctgttgaccaggctggagtgcagtggcacgatctcggctcactgcagcctccgccttctgagttcaagcaattctcctgcctcagcctccccgggtagctgggattacaggcatgtgccactacgcccggctaacttttgtatttttggcagagatggggtttcacaatgttggccaggctggtcgtgaactcctgacctcaagtaatcgacccgccttggcctcccaaagtgctgggattacaggggtgagccactgagcccagccaggggtgggggatttaaaacagaaaactacactcccaggaggccaacttcttccagccaagaaaaggacaggagaaaggtcagggtgagggatgaggagacgcctaatgccagtataggagcatatttgtgtgtgcacaactaaatgcatacacacaatacctggacaccctttttctggagtccaggctggtgccataagtgtgtgtgtgtcgctgatgggaagcccagagggtggggcccctacctataataggaactcagacccaagaagggacactgctgcgtggtgactctgcttcctgtctggggcagctggaagggacagtgacccacaactgccccaggagacagtggagcagatcctctaaaagctgggatggggagtaggctgggagggctgaggaaggggatgtcaaccaagagtatttgcacttcccagaggtgagagggagcaaagtggctggggcgtggcctggcggggagctccctggctgactgggaaagacagcttgtcctctactttgccctcaacacatctaccagagccccagacactgaaatggggctgggatcgtgaaagaggaacggcagctcttcagccatccaaggagccgctgcccttgttcttccggctgagggggaaggcagacttgctctggggttgcgtcatcttgctggccaagtagacaaagggctccaggagggagcgccggtccgccactgacacctcccacagcttcaccttctctgacttggcccagtgctgagccacatctgggtctacacgccgctgctcctgtaagtcacacttgttgccaaggaccacgatggtgacctggggaagagggacagagcataggcctgtgaatgtaccatagaaccaggaatggacatgggggctggcaaccacctaggagttctatgagaggaaagctcaatggctgatatctcatctctttctagattccataccactcattgtggggaaggagatggttgctttttttctctttcctctgttcaaattctggcctccatctagccctccttttaggagttctatcaccagctctgtattgcccatacatgctcattattagcagtcagtttctggctcaacaacaggtgaggaagcactcccagaaccctgcagcttactgtgggattctggagaacagaagggccttcgtggccagatgcagtggcttacgcctgtaatcccaacactttgggaggctgaggcaggtggactgcttgagtccaggagtttgagaccagcctgagcaacatgacaaaaccccatctctactaaaaatacaaaacttagccaggtgtggtggcatgcacctgtagtcttagcagggggctgaggcaggaggaccacctaagccttgggaggttgaggctgcagtgagctgtgatcatgccactgcactccagcctgggtggcagagtgagaccctgtctcaaacaaacaaacaaacaaacaaacaaaagaagggctttcatagctaaaagcacagaaccatcaggaaggacaactatgtggggacttcatacaactaagtgggggcttcatacattaggtcagtgaccccttcaacaactaaatgggggcttcatacattaggtcagggaccccttaaaccacaaagaggcctctttggttgagcagactcaacatgcagccaatcctgagggtaaagataccctcagtggcctccaccccacctctggctcctaactcaccttggagtgaagaatggagccatgccaggcttcccaaaccagccctccgcccaaactctctgaccactgaggctcccaccagaagcctatgccacacacctccttcttgtccttggatttgtcaatctccttcttgagcagctccacacgctgaaaagactctctgctatctgtgctatagaccaggacgtagccatcagtgcaagagaagcagtgtcggggcagttcggccccatctcggagcccccgggtgtcatagaaacgcacctgctctcgcaccccccggtctgtctcaatggagcccacgtagatgtcctcctgcgtctcgatcatctccgaacctggtataaaatgagaaaactgtctgaagtggagagagagatgggaaatgtgagtgatgagagcatcttaaggctgaccaaatggggagaaaggaatgtagggggctgaggaggccagagaattgacagcctggcaggactgaaatgatttgggtttaggggaacgaacattaatttctttctttttttgagacggagttttgctctcgttgcccaggctggagtgcaatggcgcaatctcggctcaccgcaacctccacctcccgagttcaagcgattctcctgcctcggcctcccgaatagctgggattacaggcatgtgccaccacacccggctaattttgtatttttagtagagacagggtttctccaagttcgttaggctggtctcgaactcccgacctgaggtgatccacccgcctcagcctcccaaagtgctcggattacaggcgtgatccaccgcacccggccaatggacattaattttatgctaattccatgctaagcacaagtgtgacatgacagcttctctttcctatcttggacatagggctttctccctccggatttgttcagtgttgtagagttgatctgttacaatgtaagttttattcttccaggggggaaaaccaccaggagcagcttttagcctgtgtgtgttgtgatcaagtcctattccttatttttcaacttcttccactgttcctccccctccaacaacactcacccactacatggttcccatacagaagctgctccaggattgaagttttgcccacagacgcctggccacacacgaccaccttgcagctcttccccatgcttagttttcaaccttgaagaacagaagcacgctgggtaaggtgaggaaagaaagcatcaacacagaaggcagttactagcagatgttttctggtggacaaaaacaaaaaccaaaaaaacagaaggcagaacgtccataactgagagttctaaactgaatgtatagttctaaactgaatgtatagttccagggtttcagcaccatcccaatgctagtcagaggaaacggatgtctccatgtctactactggatggtaagctgttattttattcgtctttgttatccccagtacctagccagtatctgtcacagggcaggtgcttggaaatgctgccataaagggagaggagagtcactggccactgggccaggttcccttctgtgcgcaagatgtagaggaccaattagtaaagggagctcagcccagcttcctctctttaaccatgaccccatggagaattaagcaggaacagtgttttgtgtggctgtctgaagccatctgctccctggggggactgagcaaataaaaaggataatctggggcagggcacggtggctcacgcctgtaatctcagcacttcgggaggccgaggtgggcagatcacaaagtcaggagttcgagaccagactggccaacatagtgaaacctcatctctactaaacatacaaaaaattagtcaggcgtggtggcgggtgcctgtaatcccagctacttgagaggctgaggcaggagaatcgcttgaatccaggaggcggagattgcagtgagccaagaatatgccactgcactccagcctgggcggcagagcaagactccgtctcaaaaaaagacaatctgctttcctgtacgactcatctggacaacaatcaattccctctaaactccagtcaagtctatggctaaaatgaacataagacaagagagaaaagaatgaagaaacctacggaaaaaaaggcttcagaaaggacatactttttgctgcccttggactgacagacacaaaagagaaagctcagatacagaaaccctaagaggtcccagacagatatctccccgaaggcaaacttccaaacacaagccccccaaaagctccagacaaagatcccccccagagagcagagatagatcactcccaaagacggtccctaacagaaacctctccaggggaagctcctgacacagaccccctctccatatagcgagccccacaataaaggacaccataagagtgggccagaggtgcctccgccacagattttctcacgggggagcccccagagggaatgagaggcagagaccagccacctaaagcggcccggaggcggaggccgatcctagcgccggacgagcctcgcctcccaggtccgtacctcccggggcccccgcagcaccagccgggccctccgagctcgcggggaccaggggaggggcagcgccgccgcaaaggctccagtcttcctccagagtcggtgtaggctcctccaggccccgcccccgccgcctgcccgctccccagcttccgtcaggcaagacgaattccggcagcggagagagagcgcggaccgcgcagctcccccagaggccggcgggagaatgacggccaggacctggcctgggtgtgcgcgggagcccaaggttctagactccctggacgcgggccgctgggtgttctggtgtctctgaggcccagatgttctctctgtaaaggcgatcagagtacagtaactcttcgtttactcaatcatttattcgtcaaatgttttctgagcatcatctgtctgtgcctggtgcagggccatatactgagagaaagtggacgagttagacatggtggctgcccatcagaactcacggtctagagaagctagatgtctaacaactactgaggtgctgtggagcacagcaaaagggcatttaacgttgagtcagcagacactgaagggcctgggggaaagggtgttctagggtggaggaaacggctacaagtcatggcattttctgaaactatgagaacttgggttcaatattggtggtagaaaggacctaaatattggtactcaaattaaattatttaaaaaaagaaacagataatcaaaggctttgtgtggtaggccaaagagatcaaattgacggcaatggaaagccattgccaatgaagagacatgatcagtccctgaggaaggtcactctggcagaagagggaagactgaacagagatgaaattagagaccgattaggagactattgatgtattccaagtttttttttctgttgttttgttgttgttgttgttgccgtttttgagacagggtcttgctcttttctccatgctggagtacattggtgtgatcatagctcactgcagcctctaactcctgggctcaagtgatcctcctgcctcagcctcccaaatagctgggactacagatgcatgccaccacacccagcctattccaagatttaaaaaaatgatgagcgcctgaatcgggatggaaaggtggagatagatttgggaaatatttggtaggagaatcaacaaaacttggcaacaaattggaagccaagagtgagaatggtttaatccatttaacaagatacggaatttaggaaagataataattacatccaacatttgttttttctgttgttgaggtgtgggtagacaatgaaaaagttaaatttaaatatggtaagccttggggatttgtgaaacatacaagagatatccagtagatagttggatatacagctgtggaagctgaagaaaggtctaggttggagatatgaaaagttgagagtcatcaacagatggaagtaaagctgtgggaataaatgagttgccttagatagaacataaagtgggaagatggtgagacaggttggctagcattagactggactatgagccactggcaggcagggcaggtggtctgtaagtcttgtgccctcacaacctagcacagagtaggcgttttggaaagggctgagtgattggctcaacgaatgacccctcctttccaacctagtgagcttgtcctatccctccctactcagtggtcgctgtggtttcagctccctccacactgggataggcagagtatgagcattggcacatgctgttttcctggaacaaacaggtaaatccttttaaaattcctttgccctcttcttattttactcttagctttacattgtaaagctactcctcatactcctccaatttaaccccagaaagctccaatttaattcagctccacaaatagtcgtttgggtgagggaataacaacaaagacagttaaactgtgcccttgtcccctatgaattctcaatccagaccgcattcggcaaggcaagcgtgatgagtagagagtttatataagaggtgggagtactggggacacaagagcaaggacctcaccccgcgagcttccttataaactccagggcagggtctggggcgccatgtgtcagctttcctaggcttaatgctgagatggcactcccaggcggctgacatgaaaggagccttgtaaaagggtcagcgtcattagggtgatgaaccagttggtgtttggagatccggagtggatgaaaggcgcagggtgaagacgccctgcgttcccctggcttgattgggcagggcttccagagaacgatgaaagctgggggaactgagctcaaagtgtctcttgactttcccgggaagaagctgtggacacactccaaggtcggaaaggtagcagtggggactccttccctacagagtcttgggtcacctggtccccacgcaacccagactccacggagcctttcaggaagactctctaggattggaagttgctatggcaatgaggctcttggaatactgaaagcagccaagccctagagaggctaccaccggtacaccccgccttcccacccacgggtaaagtggcgccgcctacgcaccggcacagcccctgggctcccgccccggcgcggagaccaccgtggacatccgggggcgggaggccgctctggccccaagcggagcctctctctggtagacgagcccgagggagcccttctgggcgaggcgccgcggagctgctctatgctccaaccggaagtgctcttcaccgccggcctcccacccagctctctggtcccggcggtaagatggcggctgccgcggagtgcgatgtggtaatggcggcgaccgagccggagctgctcgacgaccaagaggcgaagaggtaaccgggtagcagggtagtagaggaggcgacctgcagctccgtggctcagggaaactcgttcctgccatgatgcagcccccagctgttgaggcgatgccccgccctccgcaaacacccccccatctgagatcaaggccggatggaccccctgaaggggcgctcttgggggtcggccttcctctcccgcttccgcctggcgtaggagctgaggcatggccttgttctccagctgagaggacgatcgtccttataggagaggccgagtctccgagggcaatttcagaggtctggtgcgaggtgggggaagcggcgcggcgtcgatgacgacttccttacatcgcccccgacccccgcgttctcttgttaacttctgtgcattgttgcctgtctgcactttccgtctccaaaacctttgctctcctcaccccgttttcccttgtaattataccccagcgatcactagtctgggttcgaagtgattgtgtgtctccataattgacctggttgcccccggttatcccagaagtcaaagatgacagagaaaaaaaggaagagcgaggggcttatctcgtgttctctacgtcagactcctcttcccctgtccttcctgggtgatctttatccttcccagcactgttctttcttaagttaagcaccaaggaagagggcaactgcttgggcgctgttggcactccgaagcagccgcagtggttcgagattgccagtcggactagccaagggagctgctgagtgagtggttttcgagaacgctctagattctggcaacagttaggccagattattggaagtggggttggaacagagttgtgggtagtcatacttgttctaatcctaaagcagaattgacaagaaggttctagaagtttggagccctttccttatcagctgcgggttagtctgacccttttgttcaagatatctacagtgccctcagtctctttgcaacatactttatatcttcataccaagcccgttgtgtcttcaggctgggtaatttgaggcggtgatgtagaattagttcatgagatctgaaatcaggattctgagatttttactatctaatgagttcgaaatataagaagtactcggacgcaatgaatagttatcaagcttgagggtggttaccacagccagatctcaagttcctgatctgctgggagctgaggggcctgacaaagtgtaataggcccctgggatatcagagaagccaggacaccagagtccagtctctgttcttaattttgagctttcatgttgttcctacttcttcctagatatttaaagctaagcatcatcaacccttatacatcattaaagagctgcacaatgggaaacaaaattcctcccagtgcagacggagcttaaattaattgtagagatttacttgtatttggaaagagttcagtggttctttatactgtaaatagggatttggccacaggttatttattttttattttttgagacggaatctcgctctgtcgcccaggctggagtgtagtggcgcgacctcagctcactgcaagctccgcctcctgagttcacaccattctcctgcctcagcctcaccagttgctgggactacacgtgcccaccaccacatccggctaattgtttttttttttttgtatttttagtagagatggggtttcaccctgttagccacgatggtctcgatctcctgacctcgtgatccgcccacctcggcctcccaaagtgctgggattacaggcgtgagctactgtgccgggctggccataggtaattttaaaaactcaccctactcattgtaaatctctgatgtagagtgtccctattttggacttcatttcatagcctcctatcttaagcaaatacatttcttcaatcacagccttagaggatagtctatcataaaattggagtaaatgaacctgaagacatataataaaataggttatgctgtaatgtgaccacatcacacaaaacatggtatttgatagcagtacaacaaaataaggtaaactaccttatttcatggaatttaagtgtcattaggctgggtgcagtagctcacacctgtaatcccagcactttgggaggccgaggcaggtgggtcagctgaggtcgggagtttgaaaccagcatggccaacatggcagaaccctgtctctactaaaaatacaaaaattagcggggcgtggtggcacacacatgtaatcccagttacacgggaggctgaggcaggagaatcgcttgaactcaggaggtggaggttgcagtgagctgagatcgggccattgcactccagcctgggtgacaaagtgagattccatctcaaaaaaaagtcattgattgcagaatgcaaattattttatctgtcactaagaaaatgtaactgtaaattaaacatgacaacatgcattattcctgtagttcaaatagtgacagaaaaaaattaattaaaaaaagaaaaaagactgggcgtggtggctcacacctgtaatcccagcactttgggaggccaaggcgggtggattacctgaggtcaggagttcgaaaccagcctgactaatacggtgaaaccccatctactaaaaatacaaaaattagccaggtggggtgatgctgtaatcccagctagtcaggaggctgaggcagaggttgtggtgaggggagatcatgccattgcactccagcctgggcaacaagagcaaaactccgtctcaaaaaaaaaaaaatcaattaaaaaaagaaaaaaatgcattcttatcagacttttatgtttctcatatatagcactgttttcgacagacttaaacatagttatttattatataccacttttttgcacaaatcaaaaggaaaattggctgggtgcagtggctcacacttgtaatcccatcattttgggaggctgaggtgggcggatcacgaggtcaggagtttgagaccagcctggccaacatggtgaaaccccatctctactaaaaatagaaaaaatagctgggcgtagtggtgggcacctgtaatcccagctactcgggagtctgaggcaggagagtcgcttgaacccgggaggcggaggttgcagtgagccaaggtcacaccattgcactccagcctgggcgacatggtgagactccatttcaaaaaaaaaaaaggaaaataagtgaaataaacaaaaaaatcagtttaactttttgccatatcagacatccttagaagaataaacattggccgggcgcggtggcttatgcctataatcccagcactttgggaggctaaagcaggctgatcacctgaggtcgggagtttgagaccagcctgaccaacatggagaaaccccatctctactaaaaatagaaaaaaaaaattagccaggcatggcggtgcatgcctgtagccccaccgacttggaggctgaggcaggagaatcacttgaatccggtaggcggaggttgcggtgagccgagatcgtgccattgcactccaacctgggcgacaagagcgaaactctgtctcaaaaaaaagaataaacattaggctctgttagtatgaaaaagccttgtttatgtatgatttttccagtgctgaaaatgggatggagatttagaagctttggagggaggtggttttatgtttttcatgtgtcctggattcctcttgtgtggccatagcagagggcagtgataggggcatcccttacaaatgcccttttactgtctggcttggttagagttctttggccaagttcctgcctctgttgttatggtcctcctaccagttcatttagggatcaagagttaatgagtctctcgggtcgtttttgtgaggtccagctttgtaaggagtccttccttccttacgtcttggcttaagacatgtcctgctgctgctaagttgtcacagtcccataggggggcaaaatgagaggagcttttaagacggacttcacgattgcagcattttaaatggctacatgttttatttccttagctttagtgtttctgtagagaaaagagatggatttcaatttttttgcatgtcactctgacaaagttctgtttcccttacagcagccaagaaactaaaataaggctaggcttagtggctcatgcctgtaatcttagcactttgtgaggccaaaatgagaggatcgcttaagcccagtagtttgagaccagcctgggcaacatagtgagacttagtctctataaaaacatttaaggctgggtgcggtggctcacgcctgtaattccagcaccttgggaggctgaggccagtggattgcttgaggccaggagttcgagaccaacctgggcaacgtggtgaaacccgccccccatctctgtaaaaaaaaaatacaaaaattagcagggtgtgattgtgcatacctgtaggccctgctacttgggacgctgaggtgtaagtatcacctgagctgggggaggtcgaggctgcagtgagctgcgatcacaccactgcactgcatcctgggtgacagagtgaaaccctgtctcaaaaaaaagggttggggctaaaataaaagatatattagttggcactccaaaacagatcaggattctatgcatgaagattatttctctttgctcaccaaaacaggcaaagctatttatgagccagagggttaaacttcagatgtttcacatttcaactaacttaaggctttatattttcctgggaagttgctgactgctttacctaatatgggaatacctgtcttgaattaaggatctcttgttatatctcctgggctgggaaacagcttgatctctatagggagtctttcttatggtaaacttgagggatttcaaattgttttcttttctttttgacggagtctcgctctgtcaccaggctggagtgcagtggtgtgatctcagctcactgcaaactccgcctcctgggttcaaatgattctcctgcctcagcctcccgagtagctgggactataggcgtgtgccaccacacccagctaatttttgtatttttaatagagacggagttttaccatgttggccaggatggtctcgatctcttaacctcatgatccgcccgccttgtcctcccaaagtgctgggattacaggcgtgggccactacacccaacctcaaattgtttttcaaagagaaaacacttacgtgtctcagcatatacctagtgtgactggacaacaagatctaaaagaatcaagggatccatagacttaagagtcaggacatccttacctgattccttgagctgataaacttaacttctctgtatgttttcctgatgggcacaaataagagcaattcttattaggcccttactacctaggtattgtacactctttgcgattaggattttgccttttatttctctattcagattgttaatgggaacaactgaactctcaattcatgtcccaggtttcctgtagttgctgttcgtttgctgcagctttgcatggtgtttttgagtttgtggcctcacttaactgaagagcttgtgggcatgcctccccagctttcttccttacctggttttaaattcttaggaatgtgtccttctaatcttcctcttgaagtttcagagcaagcacctagacatttcagtaagcctccaaactgagtgggaatttatctttgacctggaacccaaatcagtgagaaacactattttccttttgctgtgcactaagtgtagtcagatgtgaagaaatgggagatgggaggagaaataagttaaggaagggataaacctaggaatacagaattctcaataccggcaaattaattgaaccctgatactaacagatggcaaagtagataatcataactggagcaaaggtagagtacagagaaaggttctctcttagtgctttagttcagatccacatgttaactagtgccagagaaacaagaattttgagaaaatatagggccaagtgagtggcagttgcttagagtccagtccactcccaacaaacagaactctgattggccgaaagcccagccttattgtacattccagccaatcagggattagtttagtcattgaagtttgtattttaatggttttgaaaagctgagtactgggcacttgcttttttgttcttcgggactttagaagtttggagaacaatagtcagcagttgcctagttgctttgtggcctgatgcagagtccctctgagagcccatttctcccttactgcactagtctttggtcccctttctccagcactgagtgatgtggaagttactcagaggtctttccaggtattcttttaaacttttgaagtaagaacaaaattcaaagtgcagttatcctaacaggctattcattttattggagtgacactgtttttccttctcccattcggatcaaaatggcaattcctatgttttaccctcaccatgggtaagaatatgagtggttgaggcttttgagaatggtaataggaggaatatatgactctcaggtcttattctgagacgtgaaattctattggcatgtgacttacaatttgtgtggggaggccagattgtcagataagcagtgttaaccatctctcttgattctaatattacttttggagagagtgtgaggggcaagcaggaccctctcttgtttttggagtttctgtcctgagagttcttccttggacagtttgccctgagacagttaaccacctgttgaactaaggaaccaagacaactttgagaagtgaaataccgttgacaatccaggctcctccccactctagttcccatctccaccccaccccactccacccaaaaaaactcaggaagcagcctttatatatatatatttttgagacagagtttcattccttgttgcccaggctggagtgcaatggcgcaatcttggctcactgcagcctccgcctcccgggttcaagcaattctcctgagtcagcttcctgagtagctggaattacaggcatgcgccaccacgcccggctaattttgtattttttttttttttttgtagagacagggtttctccatgttggtcagtctggtctcgaactcccgacctcaggtgatccacccgccttggcctcccaaagtgctgggattataggcgtgagccactgcacccggcctaggaagtagcctctttctttctctctttctgtctgtctctttctttctttctttctttgtgatggagtcttgctgtgtctccaggctggagtgtgcaatggcacgatctcggctcactgcaatctccgcttcctgggttcaagctatcctcctgcctcagcctcctgagtagctgggactacagttgcatgccaccatgcccagctaattttttatatttttagtagagacgggtttcaccatgttggccagtatggtcttgatctcatcacctcaggatctgcccgcctcggcctcccaagtgctgggattacaggcgtgagccactgcgccagggcaaagcagccttttccttaattgtagttcctcagttttaaatttttgatgggtgctggtgtccctatagtgggagatgtcacagaatagggaaccgagggatggaaaatggtgggtttggggatatgttatgaaaacaagcctctggctaatgctgaaaagccagtgacttgtatcctcagaatggtttcagagaagcatgtttcccagaagtagcttcattgttgggtctcctctccccagggataagtgaaggttaggtagatgtaatagattgtgacacctctcatttaaggacctaaaataaatttccaactcaccgttgagacaagtatttccaagtgaatatgtttctgcctgcagtgatgggatttctgtagggattgaattggttgcttgctttttcttccttactgaataaggcatagccagctgcatagccaggcacagcttgctggctggtgtccgtccctgcctgaacagtagggagtgctgctgctttgtgtagacagtctgtgactcctctggtgcattttgggtcccttctgactctgcccgtgttgaggcttctccttgaatgtccacccagaggacaatttgaactggtatgttaaggaattttcttcatcttctgccttctctttattagcggagatgtgtggagggttgttccatttgtgctttaaagtgaaaactatctattctgtaggaaattgggtaaagaaagctgagtagcagatagctttgctaaaaggtagcagttggatagcgctcaccttctatttttttctggatgaagcaccgagcataaataccttgccatatttatagaattattccaagtcatatatctatggcccggcgtgatggctcacgcctttaatcccaacactttggaaggcagagattggcggatcacttgaggtcagaagtttgaagaccagcctggccaacatggcaagacctcatctctactaaaataaacaaagattagccaggcatggtagtggggccctgtaatctcagctactcaggaggctgaggcaggagaatcacttgaacctgggaggcagaggttgctgtgaactgagatcacaccactgcactccagcctgggcaacaagagtgagagtctgtctccaaaaatatatgtctgacccggcgcggtggctcacgcctgtaatcccagcactttgggaggccgaggcgggcggatcatgaggtcaggagattgagaccatcctggctaacacggtgaaaccccgtctctactaaaaatacaaaaaaattagctgggcgtggtggcaggcgcctgtagtcacagctacttgggaggctgaggcaggagaatggcgtgaacctaggaggcggagcttgcaatgagccgagatggcgccactgcactccaacctgggtgacagagcgagactccgtctcaaaaaaaaaatctatatctatatatatatatctatacctgtgacttccacttatctatgtgaaacttatattgacatttcacttgtagaatagtagatttttttttttttcttttttgagacggagtctcactcttgcccaggctggagtgcaatggcacagtgctcggctcactgcaacctccgcnnnnnnnnnnnnnnnnnnnnnnnnnnnnnnnnnnnnnnnnnnnnnnnnnnnnnnnnnnnnnnnnnnnnnnnnnnnnnnnnnnnnnnnnnnnnnnnnnnnnnnnnnnnnnnnnnnnnnnnnnnnnnnnnnnnnnnnnnnnnnnnnnnnnnnnnnnnnnnnnnnnnnnnnnnnnnnnnnnnnnnnnnnnnnnnnnnnnnnnnnnnnnnnnnnnnnnnnnnnnnnnnnnnnnnnnnnnnnnnnnnnnnnnnnnnnnnnnnnnnnnnnnnnnnnnnnnnnnnnnnnnnnnnnnnnnnnnnnnnnnnnnnnnnnnnnnnnnnnnnnnnnnnnnnnnnnnnnnnnnnnnnnnnnnnnnnnnnnnnnnnnnnnnnnnnnnnnnnnnnnnnnnnnnnnnnnnnnnnnnnnnnnnnnnnnnnnnnnnnnnnnnnnnnnnnnnnnnnnnnnnnnnnnnnnnnnnnnnnnnnnnnnnnnnnnnnnnnnnnnnnnnnnnnnnnnnnnnnnnnnnnnnnnnnnnnnnnnnnnnnnnnnnnnnnnnnnnnnnnnnnnnnnnnnnnnnnnnnnnnnnnnnnnnnnnnnnnnnnnnnnnnnnnnnnnnnnnnnnnnnnnnnnnnnnnnnnnnnnnnnnnnnnnnnnnnnnnnnnnnnnnnnnnnnnnnnnnnnnnnnnnnnnnnnnnnnnnnnnnnnnnnnnnnnnnnnnnnnnnnnnnnnnnnnnnnnnnnnnnnnnnnnnnnnnnnnnnnnnnnnnnnnnnnnnnnnnnnnnnnnnnnnnnnnnnnnnnnnnnnnnnnnnnnnnnnnnnnnnnnnnnnnnnnnnnnnnnnnnnnnnnnnnnnnnnnnnnnnnnnnnnnnnnnnnnnnnnnnnnnnnnnnnnnnnnnnnnnnnnnnnnnnnnnnnnnnnnnnnnnnnnnnnnnnnnnnnnnnnnnnnnnnnnnnnnnnnnnnnnnnnnnnnnnnnnnnnnnnnnnnnnnnnnnnnnnnnnnnnnnnnnnnnnnnnnnnnnnnnnnnnnnnnnnnnnnnnnnnnnnnnnnnnnnnnnnnnnnnnnnnnnnnnnnnnnnnnnnnnnnnnnnnnnnnnnnnnnnnnnnnnnnnnnnnnnnnnnnnnnnnnnnnnnnnnnnnnnnnnnnnnnnnnnnnnnnnnnnnnnnnnnnnnnnnnnnnnnnnnnnnnnnnnnnnnnnnnnnnnnnnnnnnnnnnnnnnnnnnnnnnnnnnnnnnnnnnnnnnnnnnnnnnnnnnnnnnnnnnnnnnnnnnnnnnnnnnnnnnnnnnnnnnnnnnnnnnnnnnnnnnnnnnnnnnnnnnnnnnnnnnnnnnnnnnnnnnnnnnnnnnnnnnnnnnnnnnnnnnnnnnnnnnnnnnnnnnnnnnnnnnnnnnnnnnnnnnnnccccatattgatgaggctggtctcgaactcctgacttcatgatctgcctgccttggcctcccaaagtgctgggattacaggcgtgagccaccgtgcccagcctggttttgttttttttaaaggcagggtctcactctgtcacccaggctgcaggaacatggtttgctgcagcctcgacctcctgggctcaggaggtcttctgcctcagcctcctgggattataggcgtgagcctataatttcccaaaaattaaataaataaataaataaataaagctcttttctcaaaaaaaaaaaaattggccaggcgtggtggcgtgtgcctgtaatcccagctactcaggaggctgaggtgggagaattgcttgaacccaggacgtgggggttgcaatgagccgagattgcgccactgcactccagcctaggtaacagaggtgacagaggtcaggagattgagaccatcctggctaacacgatgatatcccgtctctattaaaaatacaaaaaaatcagccaggcgtggttgtgggcacctgtagtcccagctacttgggaggctgaggcaggagaatggcatgaacctgggaggcagagcttgcagtgagctgagatcacgccactgcactctagcctgggtgacagtcagactgtgtctcaaaaaataaaaaaaattaaataaataaataaataaagctcttttctcaaaaaaaaattggccaggcatggtggcgtgtgcctgtaatcccagctactagggaggctgaggtgggagaattgcttgaacccaggaggtggggattgcagtgagccaagattgcgccactgcactccagcctgggtgacagagccagacttcgtctcaaaaaaaaagaaaaaacaaaatcaaaccacagtgcggtgtgctttttgtcatataaaatttggatccacatttcctaggttacaagtgttgcagaataatgaaaccatgctagtctgtttttcatgcagtgaggtggaataaattttaaaatgatgaagaatctcatccctgttttaataatctgcaaatacgtgatatgtcaagcaattccagagagaacccagccatgttaatgacatttttaaaactaccacacaattaattctgcattagtgtaggctgactaaagtttctgattgatgctttaattgctaaaagttagactagttgacccaacgcagagatcttaagtgttcaacttggaagtatttagagagaaaatggaaatttttatagggcatctaatttggggcatgttgcaatgtcaactatgatgttttaatgtgtttttaatttagttgagctgtaaatgtgcaaagttggctagcaaccataagcccaagttgtctgatttaatcacatgatgctgagccctgctaagacctgtgtgataccaaatgattcccttagcagtgtttgttggagtaattagtgtcagcaatgaatgaatgctgaattcagagagataatgtaactacatgtctaaaggatatacagattttaacgaacatttattgtagaagagcaagttttcaaagctgcagttttcttactggtgggtggttttgtttttttgagacagtcttgctctgtcattcaggctagagtgcagtggtacaatcacagctcgttacagcctcaacctcccaggctcaagtgatcctcccatcttagcctcccaagtagttgggactacagacttgcaccaccatgcccagctaatttttaaatttttgtagagacagagtctccctgtgttttccaggctgttctcaaactaactcctgcactcaagcagtcttcttgtctctgtctcctaaagtgctgggattacaggcgtgagacattgcgcccagcaaggttatttctgaaaaacaaagaaatacattttaaaatagcaaaggagaccatgaatgggatgtcttctctgaaggccagggcttccagtgtgctgatcctgttgtgagagatcctccatgcatccagagaggacagatttttttggaaaacctttcagtagctgttttcatgcaactttattactgtcagttaaaatgaaaagactggattggtggaggtggagtcattcccagcatctcttggtgaatcagagctgtgaagctattctgcttagaagttgacccaaggatttggtgggagaactggataaattagttttaatctaaaagccttgacactaacaggatgtgggggaaaacataaacttctaggacttaggagacctgtgcagccatcttggttgcctcactagctcttcctctgttggaggataggtgaaattattgccataaccacctcagaaggccatttgaaaatcttggccaggcgtggtggctgacgcctttaatcctactagcactttgagaggtctaggcaggcggatcatttgcagtcaggagtttgagaccagtctggccaacatgatgaaaccccgtctctactaaaaatacaaaaaatagctgggcatggtggcacatgcctgtaatcccagctactcgggaggctaaggcgagagaacacttgaacccaggaggcagaggctgcagtgaaccgagttcatgccactgccctccagcctgggcaaaagagttagactccatctaaaaaaaaaaaaaaaaaaaaaaaaaaattgaaaatcttcattggaaatgcttcgaaaatctgaaataacactagaaatatattgtagttgttaatagtaccatcaggtcagttannnnnnnnnnnnnnnnnnnnnnnnnnnnnnnnnnnnnnnnnnnnnnnnnnnnnnnnnnnnnntgcattgggaatcctttttttttttaattggtctaggtgaagccaattaatcctaagtcttcttttctcagtactggtgtgtttcagtaggtgcatgttacaacctcacttggctatcagatgaattgaccctggcagtgagtgagtgacagatgccaccaccagattgccttcaattccagtgttaaccagctcttctcctttttttccagtcccacgcctttgacatctcatccttcagtccctttgctgtaaaggcaacttgaacaagcttcagccctttctcagacttccagggcaggacttgaatggatttgacactggaattgttcctgatgcagccttgttcagttcttgctgctgccatgctggattccaaagatccactctttcctcgactggtctcgcagggtcaggcccactggttaaagcttgttgtgtatttggtggggaggttcaaaatgaaggagggactccagtccactttgggcattggacctgaaggcaaaaaataagcgttcagtctaaaagcactaagtgcccattgtttaggcagctgttaatcagccacgtttctatgaaaataagtccttttcatgaggcagttgtgtgggaatagctaattctggcctgatgctgtgcagtgtgaggttaaaaacatggcaacttgtcacaacacaattcttcttgttctttttgctgtgggctgactctacattacttgctttgtttgctctagaatggaatctactcaccatttactaaaatgaaatgcatttctttggggaggcaaagtccagttcactaggtcttgcatcttaaagagaaaggagccctgcttcctctatgactaattgttaggaatgtcatttagcttatttaaataccgattttggttctggggttgaatattacatgtggggtgtactgtgtgtcttagtttaaacaaatttatatgtattgtccatgtcttacatatattgtccatgtcttactcctcgtagtacagattaattttcaaaatagttagcagtaagcggaggcaagcattagagagaaagcttggcatagtagaaagtgcacaagctttgtattctgacaaacatgggtaacatcctgacctcaggcaagttatttaacccccaggccttatttcctcttttgaaaaatgggaataatgaagttcaccggactgtgttttatagaggatactgtatggaaagtacctggcctcagtagttattagtaactgtccaccaaaatcatcctttgcattttttctagaagccagtcctgaactccccgacctccataggggtagtgtcttaggaaggaggagactaggggcacctttcagcagccctgtacattatttcactttcgactaacaagctttatactgctgacacagtgtctccccaggtacctagatgtcttcgttttcctcaaagatttgtatattcttagccactagccaactgaagaagaggctagatcttctctgatggagtttgggcctaatgtcttactttggaatttgctactccatttcttcacagcagtttgactaatcgaaatccagttttggggaagtcctttgttcaaatcccttggcatgtctgctcttaaaggataggctcctgagagtttttataagcactttgcttaatttagagttacaggatggtgaataccatgtagcaagatttcagttggttctttaaatcttgcaattgggggatctttcttgaagatttttcatagcagaaggcctcttttcagcattgtgatagttggtatagacagttactcaagcagatttatatccatcacatttcacagctgtcagcatttataggtcattcccatttgccttctccttctagcagccttttcatattagtagggcttgccaggacagtgatggagaagaatggagagggaggatcacctcaataaaaggagggcgactttaccagtttgtagtttaaaatacttaagtaaatcacaaatctccctaatgcagatatccgtagactcaagctgtaaattgctgtaccatcaccaaggtttaagaactaggacttttgcctcaacttcaggcaaccccgaactaggttcttttttgcatgtgaacaacaggaaaagtaaagatgtttctcataacaaaaatgatcaggtacttagttaatgttgcagtaatcatttcagtaaagaattatctttatcacttgagcagtggaatgattttgagtatcttgatagaggttactagttcttttaaaacactgttggtcatgtctgatttgattctaggtacttgctcgggaatctaattcccaattatataacattgttcctttaggacaaagtttaggaaagtatactttgtctaatggcacagtttcaaaaaatagatcttagaggtagggaaaaaatactgctatcacccagttgctgaatatataaggtactggagggagtacaaagagggcagcaagtacctacattgttgtgatgggaagagggaacaccagtggatgggtgctccttatagtatggcactggcatcctgtacctcatatgtccctgtcatccacggtcttagtctctgctgtcactcagctctgttcctgtcttaaacaccaacatgctatgcttttaactcttttgccacctgcctttgctctgcttgttcttccagtgacaaatgcatgagccacttttcaggaggtgaaattattaaaactcttgaggatgtgacctatttcacattgagaaataagttgccctgaatggagtaaccatttttcctgtaagtttgcaaaagaggcagcagttgtgacactgtggaaggagatagaaaaattccttgccatgagggaatgtctaaatttgtcctgcggggaggatgactacaggcagaaatagtgaggtgaggcaggaacataagaggggttttcttgatttagtttgaatgtatctaagtgacaaaaaggagcatctgaagaacttggattctttcattagcacctccttttggtccattggcctattcaacaaatctataaatccttcaagtatcacactaactttcagctcagtgtgctgcgggctctagaccaaagattcctcctgtaagattacagaggttattccctttgtaaagtaacatgattctctttctctttcattttcagggaagcagagactttcaaggaacaaggatatgcatactatgcnnnnnnnnnnnnnnnnnnnnnnnnnnnnnnnnnnnnnnnnnnnnnnnnnnnnnnnnnnnnnnnnnnnnnnnnnnnnnnnnnnnnnnnnnnnnnnnnnnnnnnnnnnnnnnnnnnnnnnnnnnnnnnnnnnnnnnnnnnnnnnnnnnnnnnnnnnnnnnnnnnnnnnnnnnnnnnnnnnnnnnnnnnnnnnnnnnnnnnnnnnnnnnnnnnnnnnnnnnnnnnnnnnnnnnnnnnnnnnnnnnnnnnnnnnnnnnnnnnnnnnnnnnnnnnnnnnnnnnnnnnnnnnnnnnnnnnnnnnnnnnnnnnnnnnnnnnnnnnnnnnnnnnnnnnnnnnnnnnnnnnnnnnnnnnnnnnnnnnnnnnnnnnnnnnnnnnnnnnnnnnnnnnnnnnnnnnnnnnnnnnnnnnnnnnnnnnnnnnnnnnnnnnnnnnnnnnnnnnnnnnnnnnnnnnnnnnnnnnnnnnnnnnnnnnnnnnnnnnnnnnnnnnnnnnnnnnnnnnnnnnnnnnnnnnnnnnnnnnnnnnnnnnnnnnnnnnnnnnnnnnnnnnnnnnnnnnnnnnnnnnnnnnnnnnnnnnnnnnnnnnnnnnnnnnnnnnnnnnnnnnnnnnnnnnnnnnnnnnnnnnnnnnnnnnnnnnnnnnnnnnnnnnnnnnnnnnnnnnnnnnnnnnnnnnnnnnnnnnnnnnnnnnnnnnnnnnnnnnnnnnnnnnnnnnnnnnnnnnnnnnnnnnnnnnnnnnnnnnnnnnnnnnnnnnnnnnnnnnnnnnnnnnnnnnnnnnnnnnnnnnnnnnnnnnnnnnnnnnnnnnnnnnnnnnnnnnnnnnnnnnnnnnnnnnnnnnnnnnnnnnnnnnnnnnnnnnnnnnnnnnnnnnnnnnnnnnnnnnnnnnnnnnnnnnnnnnnnnnnnnnnnnnnnnnnnnnnnnnnnnnnnnnnnnnnnnnnnnnnnnnnnnnnnnnnnnnnnnnnnnnnnnnnnnnnnnnnnnnnnnnnnnnnnnnnnnnnnnnnnnnnnnnnnnnnnnnnnnnnnnnnnnnnnnnnnnnnnnnnnnnnnnnnnnnnnnnnnnnnnnnnnnnnnnnnnnnnnnnnnnnnnnnnnnnnnnnnnnnnnnnnnnnnnnnnnnnnnnnnnnnnnnnnnnnnnnnnnnnnnnnnnnnnnnnnnnnnnnnnnnnnnnnnnnnnnnnnnnnnnnnnnnnnnnnnnnnnnnnnnnnnnnnnnnnnnnnnnnnnnnnnnnnnnnnnnnnnnnnnnnnnnnnnnnnnnnnnnnnnnnnnnnnnnnnnnnnnnnnnnnnnnnnnnnnnnnnnnnnnnnnnnnnnnnnnnnnnnnnnnnnnnnnnnnnnnnnnnnnnnnnnnnnnnnnnnnnnnnnnnnnnnnnnnnnnnnnnnnnnnnnnnnnnnnnnnnnnnnnnnnnnnntttgagaccagcctggctaacatggtgaaaccctgtctctacaaaatacaaaaatttgctgggtgtggtggtgcgtgcctgtaatcccagctactagggaggctgaggcaggagaatcgcttgaacccaggaggtggaggttgcagtgagctgagatcctgccgttgcactccagcctgggggacgaccaaagaactccatctcaaaaattaaattaaaaaaaattgagaaaagtagcttctctctgagaagtagccttttgcccaatgggttgataactgttactgtatgaactccttcaggcttaatgatctcatgaaggccaggcgtggtgactcatgcctgtaatcccagcattttgggaggccgaggcgggcggatcacctgaggtcaggagttcttctcccctaatttgcttaccccaactcaacatgcacatttcatttcagcctggcctgttaacatggtgaaaccctgtctctaaagatacaaaaattagccaggtgtggtgggcgcttgtaatcccagctactcgggaggctgaggcaggagaattgcttgaacctgggaggcagaggttgtagtgagccaagatcacgtcgctgcactccagcctgggcaacaagcgcgaatctccgtctcaaaaaaaaaaacaaactcatgaatgataacttttttctttttcttttctttttttttaactctttaaattttttaaaatagagacagggtcttaccatgttgccccggctggtctcaaactcctgggctcaagcgatcctcctaccttggcctcccaaagtgctagaattacagggatgtgccaccatccccagctgtgataacttcttctaactggggtgggtagtttttcttttgataaattaaaggcaattccagaaatactgaatgttatggcaatacccacctaaatacatttcagtcattgtcaattcatttactaccttagaaaatggcctttgtacataaaagaagtcttagttatctccatgcttaatttgccagcatactttaatcccgtgtcagcattcttctcacctaatttgcttaccccagctcaacatgcacatttcattttaatgtctcattatacaaaacagttcattaagattaataagctgcctctctcctcaaaagataatcactacacttcaaagccataccttgttttgttttaaaactgattgtatccttgctgctgtccatttgcacaagcagtcagaaatttggatgcagcctatttatttattgttgagacagtgtcactgtcacccaggctggagtgtagtggcacaatcttggcttattgcaaccttcacctcctagtttcaagcgattttcatgccttagccacctgagtagctgggattgcaggtgtgtgccaccatgcttggctaatttatttgtattttagcagagacagcgttttgccatgttggccaggctggtctcaaaactcctggccccaagtgatctgcccacctcggcctcccaaagtgctgagattataggtgtgagccactgtgctggctgtggcattctaaagagagtgtgtcagggctgggtgcaatagctcactcctgtaatcccaacgcttttggaggctgaggcagatggatcacttgaggccaggagttcaagaccagcctggccaacgcggcaaaaccccccactcaacaaaaaatacaaaaattagctggatgtggtggcgtgtgcctgtggtcccagccacttaggaggctgaggtaggaagatggtttgagcccaggaggcggaggatgcagtgagcagagatcataccactgcagtccagcgtgggcaacagagccagactgtgcctcaaataaataaataaaaatacagaaattagccaggcgtggtggcacatgcctgtaatcctagctgcttggctgcttgggaggctaaggcacaagaatcacttgaacccaggaggcagaggttacagtgagccgagatagcaccacagcactgtagcctgtgcaacagagtgagaccctgtctccatgaagaaaaaagagtttatgagcgttacagatagattcccttaacattgtttggagggagatgccctctaagtttttgtttatttgtttgtttgttttttgagacagggtcttcctctgtcgcccaggctggagtgcagtgatgtgctcttgggtcactgcaacctccacttcccagattcaagcaattcttatgcttcagcctcctgagtagctggaattacaggggcccaccaccacgcccagctattttttttttttttttgtattttagtagagatggggttgtgccatgttgactaggctggtcttgaactcctgacctcaagtggtctcccctcttggcctcccaaagtactgggattatgggcatgagccactgcgcccagccccctctaagttttcaaagcagggacctgttctaaactttgttttacgttcttctgcctttcctatagatatgtgtcctaaaaatgctagctattatggtaatcgagcagccaccttgatgatgcttggaaggttccgggaagctcttggagatgcacaacagtcagtgaggttggatgacagttttgtccgggtatgtatgtaatggggctgtttggggaaggctgggttgctacagttgagtttctctagccccgtatttctcaaccttgacactactgacatttgggaccagattattctttgttgtgggggactttactgtgcactgtgggttgtttagcagcatctctgacttttaatcactgagtatgagtagcaccccctctgcccagttgtaacaaccaaaaatgtctcttaacattgctaaatgtcccctggagggcacattgcccaggttgagaactactgctgtagtcattttcattttgtgttagttttgttcgtttgtttgtttttgtttttgagatggagtctagctctgtcgcccaggctggagtgcagtggcgcgatctcggcttcaggcaattctcctgcctcagcctccagagtagctgggaccacaggcatatgccaccacacccggctaatttttgtatttttagtaagagacggagttttgtcatgttggccaggctagtctcaaactcctgaccccaagtgagtgatctgcccgcctcagcttcccaaagtgctgggattacaggtgtgagtcaccgcgcctggcctctgtgttggttttgtgtgggtgtctgttgctgctgttgatttctttccacttggccaatcatgcttcttttcttccctcttggtgttcttttagggacatctacgagagggcaagtgccacctctctctggggaatgccatggcagcatgtcgcagcttccagagagccctagaactggatcataaaaatgctcaggcacaacaagaggtacgggtctgatcctgtttctgtcaaaagaggcagtatggtatatttgggaggagtggctacttgaaagtcggaactgaggtctagtctcacttctgccatcagcacacctgggtgactttaggcgagtttcatagcctctctaagcctcagcttcctaatctgtaaaatgagttttgaatatgattgacagcttttaaaaatctgtgaaaattgaagtgtttctgagatagctggggaataggcaaatgcttccagggactgatttgagtgaggttaaagaatttaagagtttgggacttagtgagaccctgtctccacaaaaaaattttttacattagccaggcctggtgccatgcacctacctgtgctcccagccactcaggaggctcaggtgggaggattgcttgtgctcaggaggttgaggctgagccgtgatcgcaccactgcactatagcccgggcaacagagcaagaacctgtctcaaaaaaataaaaaagaatttgagtaaattcaagccttgattaaattggtagcagctaaaacatgttttagttccatctccatatatagtatgtgtcgcttaatgacaggcatacattttgttaggtgattttgtcattgtgcagaatcataaagtatacttacacaaacctgggtggcatagcctgctacacacctaggctatatggcagtggcttctggactaaaacctgtatagcgtgttactgtcctgaatattgtaggcagctataacacagtggtatttgtgtatctaaacagaaaaggtacagtaaaaatacggtattacaattttacaggagcactgccatatatacagttcattgttgaccagagtgtatgactgtatatacagtttaccctagatgcatttcagtgagaatctcaaaacatatgctcaatccctggcaatgcattgcctttatttcatgtatatcaagcataacacttgtgttcctgacttgaagttcaaactgagggtgaagattgggtctagcccttctgttaagaagtcttgactgtatcttcatcaatttgatttgtgaaatgtctgtggttctgattttcttgaaagaaaatctcctagggacttctatgagaggtcgagtaccacctctctctagggaatgccatggcagcctgtcgcagttgccagagagccctagaactggatcataaaaatggccattcacaacaggaggtatgcattcgaccctatctctatcaaaagaggcagtgtggtatatttactgaattcaaattcatcaaggccttgttaatttttttgtggttgtttaatctacagcttcattaaaactttcctatgtctgattttccggtgcagttcaagaatgctaatgcagtcatggaatatgagaaaatagcagaaacagattttgagaagcgagattttcggaaggtacagtacaaccatgagataatctcatctgctctttgtcgcaaaattcccattcgtgtgtgtgtgtgataattaagaggagtagtatggcacaaaagctctagaatagtaaattatcacttaaattaggcttctgacttttcctcttaaaaatgttttgtgctaaggtacttattttcttaattatatttggccctatgataaaaggtaaaatgagtgtgccacttgagtttgtttctattgttgatgtaaagcactggtctaatagtgtacttcttaataaagggaaagcccgctggaattaaatattaggtttggataatctttttttttttttttttttttttttgaggcctagtctcactctgtcacccaggctggagcacagtggctaactgcaacctccgcctcccgggttcaaacgattatcctgcctcagccaccctgggattacaggcgcatgccatcacacctggctaagttttgtagttttgttttttgtttttgttttttgttgttgttgtttgttttttgagatggagtttcactctgtcacccaggctggagtacagtggcataatctcggctcactgcaacctctgcctcccgggttcaagcgattctcctgcctcaacctcctgagtagctgggattataggcatgcgccaccacgcccagctaatttttgtatttttagtagagatggggtttcaccatgttggtcaggctggtctcaaactcctgacctcctgatctgcccgcctcagcctcccaaagtgctgggattacaggcgtgagccaccgcgccaggccttttttttttttgagagagagtttggctcttgttgcccaggctggagtgcagtggcgtgatctcggctcactgcaacctccgcctcccaggttcaaacaattgtcctgcctcagcctcccgagtagctgggattacaggcatgtgctgccacgcatggctaattttgttttttttttttttagtagagacggggtttctgcatgttggtcaggctggtctcgtactcccgacctcaggtgatctgcccgccttggcctcccaaagtgctgggattacaggcgtgagccacctccccggccaaaagttctagatatctttctagacctcgcagttattatgctttatctgtgtaactcctttcttctttagatggtgcttggaaatagttttcacttgagtttcaaaaggggaggtagataacccccaaaaaggttaaaaaccactgatcaggagagattttctggatcacttaagtttgtgactactatccaaggaacagagttgtcacttcatatgtgggaatttgctcagtactttttgtagcatgtgctcagtaaatttttttgttttgtttttgttttgttttgttttgttttgaggcagagtcttggtctgttgcccaggctggagtgcagtggcgggatctcggctcactgcaagctccgcctcctgggttcatgccattctcctgcctcagcctcctgagtagctgggactacaggcggccaccaccacgcccagctaattttttgtgtttttagtagagatggggtttcaccgtgttagccaggatggtcttgatctcctgaccttgtgatcctcccgccttggcctcccaaagtgctgggattacaggcgtgagccaccacgcctggcctcagtaaatgttttgataagaggatacattaagaatcattcacattgactgatggtcttttatttggtaatgtatatatctgattagcttatgcagagtcccggcagtaacttattagcatccctcttctgtccattggttttaataaccacagttgtctttgtaatgtaattcataagtttgttttgtttggcatgtgtgtgtttggaaagcaattctgcctactgtcagttttctgaggtttacataggcaaaagctttgtcttgagaggcggtcttttgggtttcttttctctcttgcctactccagagccagaatcctgagtttgtgacagaatcctctgtttgtgacatcccagcccccccactgtagctcacggtgatgtcacaaatgaagaattatgatcctggcaggggaaacagatgaacttggaagaaacaaaagatcttctttgcctgcagctgtccctagtcatggggaggttggggggtgggaagtgaagcactgacgatccccatgattagcagaaccagctctgcataaaacggggtccttgtgaaggcaacagggtgtggctgctgacattttgactgactttttcctgccccctcattccttttccatctgggggggcaggacagttagcacaactctacctacataatgcttaagttttcatattgtccttagaactttcaggacatgccgagtgcggtggctcatggctgtaatcccagcactttgggaggccgaggtgggcggatcacctgaggtcgggagttagagaccagcctgaccaacatggagaaaccctgtctttactaaaaatacaaaaaattagccaggcctggtggcgcatgtctgtaatcccagctactcagagggcaaaggcaggagaattgcttgaacccgggaggcagaggttgcagtgagccaagatcatgccattgcactgcagcctgggcaacaagaacgaaactccatctcaaaaaaaacaaaaaacaaaaaaacagaaaactttcaggacagtaaacctgtgccactgaaggagaggcattcctgtcactgctgtgtgacactgcagaaagtcttctcagtgaaacagctggtaatgtggtagtgtttactgacttgctcatattttaaatttcagttttggaataggtgctattcatggttcaaaaactagaaagtgttgccagatgcagtggcttatgcttgtaatcccagcactttgggaggccaaggcaggaggatcgcttgaggcgaggagttcgagaccaacctgggcaacttattgagaccctgtctctacagataatttaaaattttagctgagtgtggtgacgtgtgcctgcagtcccaactactcatgaggctgaggcaggagaatcactggagtctgggaagtcgaggctgcagtgagccatgattgtgccactgatactccagcctgaacagcagagcaagaccccatctcaaaaacaaaacaaacaaaagttagaaagtatgaaaaatattcagtgatgagtgtcccctcaaacttgtcctctctccgcccagttctcactcccctaagctaaccactgttcttatgtcttctattttcttccttagttttgttgtacttatataaaataaagatccttgattttctccctttatttagcgtgaaaggtagtatgctttatggcaggtctgcacctttaaaaaaaaatcactgagtagctcttggaagtctttccatattagtacatgaagagcttcttcattctattttagaactatatagtattccattatatgaatgtccatgttaactaaccagtctcctgtggatggaatttgaatttttctgcttgtaagttttcagagtttatctcttcctgacccccatggccaaattcttagagggaataggtgtcccttaactccagatttgtccttcggttcatttattctcggcgtgaatgtgattcagcaaggctctcccaggaataaatagcagctaaaccaaaactgaaagctcagaggacaaactagtaaaaagagaaaaacagaatatatggagatgctttatgaggctgaaagagtaaattaatccccacctttttgtgtgtgtgattgctccttggcttgtggtttgtatagtggcatgttgggaatagtaatctgatgtagcctatttagagccatttaaaataactattttaaggctgggtgtggtggctcacgcctgtaatcctagcacttcgggaggctgaggaggacggatcacgaggatcaagaccatcatggctaacatggtgaaaccctgtgtttactaaaaatacaaaaaaaaattagcttgggcgtggtggcgggcgcctgtagtcccagctactcgggaggctgaggcaggagaatggcgtgaacccaggaggcagaggtggcagtgagccaagatcctgccactgcactccagcctgggtgacagagtgagactccatctcaaaaaaaaaaaaaaaagtgataatattgcctatttcataaaattcttgtgaggattaaatgggttcatatatgaaagtacccagtaaatgtttactgtcctcattatcatctggagcctttgctgtcctcatttcagtgcttttatttaatgaattaggtatgtttttaaactttgatattacttagaagtggacccaaagacctcattgagttttgagtctgttacctgtgactaaactaaagtgaagatgtttctggagtccctgatgaagagccttatttgttttcttcttccctacaggttgttttctgcatggaccgtgccctagaatttgcccctgcctgccatcgcttcaaaatcctcaaggcagaatgtttagcaatgctgggtcgttatccagaagcacagtctgtggctaggtatgcagtcaggctagctggacattaaaatgccagataccattggactgatggtgtccggcagcttcaccacaggatatggtccccagagtaggccagctagggctgatcagaccctcttgggacttaaagtcaaagattagaccagctttgaaaacccgtagggtatacaggagtatagtagtatagcaggtacttgagctatatatgaaagaacagattgtgtttttgtggttttgtttgtttgtttaaggtagtccttttccttctactccactggttggcacactttctgcaaagggccagattttagcctttgcaggccacagggtctctgttgcaactaactcaactctgccattgcagtgcaaaggttgccctagataatagatgaaccaatgggtgtggctgtttgaatagtgttttatttacaaaaaccagtggcagaaaggatttggccctgtgggctgtagtttgccaaaccctgttctagtttaataaggattgtaagacacaagatgtgtattaaagataattataggtggtttatttggggaaagtttgggaacagttcttgggaatctgtctacctttggatattttgaatgctagacacatggtcaaggaggaaaactggccacaaatggtagtaatggtggggacattctaaagcacagctcaatgtgcccttttctgactattgcagtgacattctacgaatggattccaccaatgcagatgctctgtatgtacgaggtctttgcctttattacgaagattgtattgagaaggcagttcagtttttcgtacaggctctcaggatggctcctgaccacgagaaggcctgcattgcctgcagagtaagttctagtcaccagacctaactgggaaagagcttccttttgggacctttaagatggctagagtggaaggttttagaatcacaaggaatgtgatagcttttcctcctgctttgcaaggatgcttggtctttattagaaatggtttcaggactacttgtatttacctaaaggtagatgtgatcatatagggtcggatgcctttaatatctaagagggtttttttgttttgtttttcccctcagtgaagatagatagtaatacttgtcctgagaagtgaaggcagacccagtaacataggtctcattggtatttttggtaactcttttcctgtccactctgtaggaagctcaaatgagcaacagatagcccagattgggggttggcggggctctgtgatgctgaactgctggaagcaaagaacttgaaaatagagtctggcctctctgtgcaatggtctgaggctttgtggatatgaaccgatcctccccttgcttttttctgtagaatgccaaagcactcaaagcaaagaaagaagatgggaataaagcatttaaggaaggaaattacaaactagcatatgaactgtacacagaagccctggggatagaccccaacaatataaaaacaaatgctaaactctactgtaatcggggtacggttaattccaaggtaagctcttgatctagatcttggggcctatagaaatatttttaagggacatcaaagggtcttgggaaatctgcctagtgagggtaagcaagatgaaagagggaaagttgttatggttaatagtttgttaggaactcccttccaagaggcaagcttttgtcatctctatggaatttgagggcagttggacaatttgcaaggatattctcacctgttcattaaggtccctttcctccagtaagagaatggctagggtctgtgggataatcttaagcacctactgttgcttttttgttgttttgcttatgcaagtgatcatttattttttaggagtgatttggaggaagagtatgaggcaagcttgtttttctccagtgtaattgatggtcaccatgcatggttgaaaatggcctgagtgcttttgtggccctacccaacatcagaaacaaaaagtagactccttgcccttgcagaattctagcagttaaaaatcagagtgatttctgatccctgcaggtgacctctggaaaaaaggagggcaggaaccagccttactattttcatgttttcattgggcactaacatggaatggtaaaggtagtttatccttgaagacagatgtgcctggcttgtatcatatacaagagaaatcaattttgaagttgctgtccatagccctggtgacaaagaactagaacttaatatgacatttaaggggccagcatgactgatcctcttagagttttgaagccatgctcacagcttctgggctccctcagtcaccaaaggtgtgaagtatgattgctctctctctcctgaagcttaggaaactagatgatgcaatagaagactgcacaaatgcagtgaagcttgatgacacttacataaaagcctacttgagaagagctcagtggtaagtgcctctgatgggtagggggaagagggagttgccgctggcctcaggggaattgccttgtggatgacgaagcagacccagagatgttgtgaggtcatttggtccttccccctgcctctaggtgggattgttccagccctagactatctttatagacctccagcggaggagattgcacaagctccctcagtctcccatgcctgtgtctaacgcccctcacggtcagtaagtttcctctgatgcctgacccaaattccttttgttaaaaagtttaaatccatttcctttggagattttattttgtgttgtacacttatgctctaccctggcacagtgcttgacacataggtgctcactgaataaatgttttgttgaatgaatgtatggtgcttggaagagaaaacaactcttggagacagttgagagttgtacttcatcctgtttgttctgggcgagggaagacaatcttagagttggaagagatgtaatccggctcagcctcccaggataaaggaacttccttttgaaacaccctggatggctactctctgcttgagtgttttgagtggagggcactctgtgtctgacagggtgattatgagccaggatgtgcctacctctaatgctcacatttgccccagagtcagggtgctccctggcatggttgctcctcttactcttagacccaccagctggttttctccagataggaacagggctaggagaaatctttctcagaaatccatctcttctgatttcagattattctctaggcggagaaaaacttcccgtctttaaagttcttagagaagatgtatttattgtatactaatcctccagcacctgctccactccttattataaaatgtcatatccaaagaacagatgctgtcactgatgcctgatgagccagtagtttaagcttccttgtctcatcagtggtacagaatatctcatggactacctcccacttagttttctcaaaattatctcacttaaaataggaaaactgctgctgtgtgtgatgctttttttaaaagtgaatttctaagttgatgactaagtctgtccaacagaaacatacagggaattataacttctgtgagactgactgtcagtcattccatctttgcaaaccactggcacacagaagcagaagctttggaagacaaaaaaagcaccctttgattcagccaaagactgactttaacagacgcaaaatgctatatacatgaaggtgtttgctgcaattttatctataatagcaaaaaaaaaaaaaaaaaaaggcggggggagaatcacctacatgtccagtgggaagggggtggctagatacttgatactgtatgaacttaatggaatgctctgtatatggaatgccaggggatgggaagagaagagaaaaatcgctttgttttattttttgggatggagtctcgctatgtcgctcgggatggagtctcgctatgtcgctcaggctggagtgcagtagcaccgtactggctcactgcaacctccacctcctgagttcaagcgaatttcctgcttcagcctccgaagtagctgagattaccggcgcatgtcaccacacccagcaaatttttgtatttttattggagatggggtttcatcatgttggccaggctgttctcaaactcctgatgacaagtgatctgcctgtcttggcctcccaaagttctggaattaccagcaggtgtgagccaccgcgcccggccttttttttttttttttttttttttttttttttttttaagcaagcccccaacaccatagaaaattcttgatttgctcggaggataattggatgaaggattattttcttctttgtttatgtgcaagaaatgaaaataaggaattgctttgatcagacaacttcttatctttgtggtagaaacagaactgcccttcttggagtggctctgcctctgagatcactacaggggagacagcatgccctgttcagctggctgaatatttggcaacaatctcctgaagcagctggaattgacaagaagtactggagattagctcgggccaaacccttacatctggcctgactactgctgcagtctgcctcaacttacccctaaagctggggagatgccacccacccacatctttgctacacatgccatcatgagctagagttcaccctttctccttaaagccctatttacttttctacttcaactttaaaacaaaattaaaatgtgaggatatccctgaattttaaaaagcatgaagtaaaaatgcaaattagtatagtttgtttaatacattacatatagacctaaagaaagttcatcagggttaatcatttgtcacatcattctatacccagggctatcagctatcaattttccttttttttttttttttaattcaggatccagctctgtcacccaggctggagtgcagtatcaaagtatcatttctcttacttcaaattattacattttattctgtacattgattctgaactcctaatataatatttatgtcctgtatttgcaggccattggtttttttaaagtcataaatcaaaatgatgccagaaaatcaaagatgcccaagatgttgggcttctcttttgccagccacattggtagcactctcctgccctggcctccaagctggtggggatctgtgatgtttgtgaaaatgggcttatgccaggcgcagtggctcacgcctataatcccagcactttgggaggccgaggcgggcagatcggttcaggtcaggagatcgagaccagcctggccaacatggtgaaaccccatctctactaaaaatacaaaaaattagccaggtgtggtggcacatgcctgtaatcccagctactcaggaggctgaggcaggagaatcacttgaaacctgggaggcggaggttgcagtgagcagagatcgtgccattacactccagcctgggctacagagtgagactctgtgtcaaaaaaaaaaaagaaagaaaatgggcttgtgtggtagcaggtaagaaattgaatctctgttgtacagcagctagctgtactgcatgatcacttcccattccccagctgacagtggctgtctctggaactcctaccacagtcttcaattggtaggccagccctggtgccagtgattttatctgggcatggaaaatgccacttgcttctgtggaagagacacttaaaagatctggcagtcggccgggtgcggtggctcacgcctataatcccaacactctgggaggtcaaggcaggcggatcacgaggtcaggagatggagaccatcctggctaacacggtgaaaccctgtctctactaaaaaaaaaaataaaaaattagctgggcgaggtggcgggcgcctgtagtcccagctactctggaggctgaggcaggagaatggcgtgaacccaggaggcggagcttgcagtgatccgagatcacaccactgcactgcagtctgggcaacagagcgagactccatctcaaaaaaaaaaaaaaaaaaaaagatctcgcaatcatcctgtcaagcttgattcctccgatcttgggccaagggcccctcctttcttttgtgctactgaaatagaagcaaacctgtgtttagagttcccttttctgtctcatttacctgcatctctcattgattggtcttagtggagggatttgccagcagctgccacgttgaacttgatccttttagtggctcactaatcccacctctattctggattgtagctagtcctgcatgtttatggcactataggtttcaaagctctttcatacccatttattcacttgataatttttctcttgtgtgtttcaacccaaagtaatcaagtagatcccttcacattgtcttttctaaggcagtccagtacctcttaggtggctgtgtgtcagaaggaactttttcctcttgattactttctgctcaaagctgaacatcactttgctggttggatgcaagtgccatgcgacctctctttttatttccttgaggacttgttagctaattttctctcactgctagattaagggctcctgtttctgaagcatcttaccagaagtgtgtgtctcttgcttgagccatgcctcttgccctagagtgatcctgagaaccactgctatttatgtcttagtgctgtattgccttgtatttccttctcagttacatggacacagaacagtatgaagaagcagtacgagactatgaaaaagtataccagacagagaaaacaaaaggtaagtttaaaagcatttgttttttagggaactgtgtggacttcgtaggccataaatctgtacacaaggtagtttgattcagggatcagggatctacctagaacttatttgatcaccagccagaaagaagtgaacaaaggctgggcgtggtggctcacgcctgtaatccccagcactttgggaggctgaggcaggcagatcacctgagatcaggagttggagaccagactggccaacatggtgaaaccccatctctactgaaaatacaaaaaattgtgggtatggtggtatacgcctgtaatcccagccactcaggaggctggggcacgagaattccttgaacccaggaggcggaggttgcagtgagctaagattgcgcgactatactccagcctgggtgacggagcgagacttcatctcaaaaacaaaaacaaaaaaaagaaaaaaaaagtgaacagatatcttgggttggggcatgaggcacctattttctggttccagatcctccctgtcgttttcatttcattttttgtgtggtgaggctaaagtgaggaacctaagtctgggtagattttcttttttctttttcttttttttttttttaagatggagtcctgctctgtcacccaggctggagtgcaatggcatgatcatagctcactacaacctttgcctcccaggttcaaacaattatcctgcctcagcctcccgaataactgggattacaggcacatggtaccacgcctggctaattttttgtatttttagtagggatggggtttcaccatgttggacaggctagtcccgaactcctgacctcgggtgatccattctgtcaagcttgattcctcccatcttgggccaagggcccctccctttctttcgtgctaccgaaatagaagcaaacctgtgtttagagttcccttttctgtctcatttacctgcatctctcattgatgcaggcctcccaaagtgctgcgattacaggcatgagtcaccgtgcctggccgagtagattttttttctaatctccagaagaaagcaccgtaaaagtccctggcatggttaacaaggcctctaactcccaggcagctgggctgagacctggtgaggaaaaaaccagagtcagatttgtccactgatgccagatgtcttcctgtagaacacaaacagctcctaaaaaatgcgcagctggaactgaagaagagtaagaggaaagattactacaagattctaggagtggacaagaatgcctctgaggacgagatcaagaaagcttatcggaaacgggccttgatgcaccatccaggtagagtaggtgcggggagtgggctcagtgggaagaacccgcagggcaggccaactgccacactcagtccagaggggaccccttggagaggtccttcagctgagaataaggtgttgcagacttgtggaccctccaaattttgggaagtgccaaattccaaaattagacagaaagtagtttttctcttaaactttgttttcttgaaactttgatttccactgagttgttcttttactccccactttagatcggcatagtggagccagtgctgaggttcagaaggaggaggagaagaagttcaaggaagttggagaggcctttactatcctctctgatcccaagaaaaagactcgctatgacagtggacaggacctagatgaggagggcatgaatatgggtggtgagttggctggggcagcctgggatgaatttgacagctgtagaatgttagaattttttccaaagatgctccagagggagagtctatttgggccaaatctgatccctggtccaaacagtaatagacatggagtcaaacaaatgcagtcaaatgtggcaggttcacagtgtgcagtgagctctgaggaggcgagcactagcaagggaaggcttggaagtgcagaaaagcatggccccatgggtcatgcctgtaatcccagcactttgggaggccaaggcaagcagatcacttgaggtcaggagtttgagaccagcctggccaacatggtgaaaccctgtctctactaaaaatacaaaaattaggctgggcgcggtggctcatgcctgtaatctcaccactttgtgaggtcaaagcaggttgatcaccaggtcaggagtttgagaccagcctggccaacatggtgaaacctcgtctctactaaaatacagaaattagccaggtgtggtggtgggcgcctgtaatcccagctactcgggaggccgaggcatgagaatcgcttgcacccaggaggcggaggttgcagtgagccgagattgtcccactgtactccatcctgggctacagagcaagactttgtctcaattaaaaaaaataataagaagaaagaaaaaagaaaaattagccaggtgtggtggtgcacacctgtaatcccagctacttgaacccgggaggtggaggttgcagtgagccaagatggcgctactgcactccagcctgggcaacagagtgagactccatccctccccactaaaaaagcaaagcatggcctctttggggatctgcagggggcttggtctagggaagataaagggatagggtgctagaggcaggtggtggtggaaggccggcaagtagctggatcagagctcacaggccataagggctgtatgtggtaaggaatatgagcattttcctattatctggaagttcttttttacccactgcaaagtgtatgctgacatttatgtatgtcatacattcctataaacactcacagattttaatttcccaaaaagatttagcatgatataaagcacacctattgtcaatattgttgctcactgtgggctgtcagagataagaggccctgacctgtgagctgggcgcggtggcttacgcctgtaatcccagcactttgggaagccaaggcgggcagatcacctgagctcaggagttcaagaccaccctgggcaacatacaaaataccaaaaaaattgtactctctactaaaatacaaaaaaattagctgagcatggtggtgcatgcctgtggtccaagctactcaggagactgaggcaccaaaaactcttgagcccaggaggcagaggttgcagtgagctgagattgcgccactgtactccagcttgggttacagagtgcgactccatctcaaaaattaattaattaattcagtcagtcttcactctaagttgtctgccaaaaaatttgctgggcatggtggctcacgcctgtaatcccatcactttgggagaacaaggtgggcggaccacaaggtcaagagattgagaccatcctgcccaacatggtgaaaccccgtctctatgaaaaatacaaaaattagctagccatggtggcgcacgcctgtagtcccagctacttgggaggctgaggcaggagaatcgcttgaactcgggaggcggaggttgcaatgagctgagatcgcaccactgcactccagcctggcgacagagcaagacttgtctcaaaaaaaaaaaaaaaaagaggacctgacctgtgaatggtgaacagacctaccatctcttccactaagaaaatctattgggattttgttttttgttttgttttgttttttgagacggagtcttgctgtgtcacccaggctggagtgcagtggcaccatctcgactcactgcaacctccgcctccagggttcaagtgattcttctgcctcagcctcccgagtagctgggactacaggtgtgcgccaccacgcccagctaatttttgtattttaagtagagacggcgttttaccatattggccaggctgatctggaactcctgacttcgtgatccacccacctcggcctcccaaagggctggaattacaggcgtgagccaccacgcccggccttttttttttttttttttttttttttaagactgagcccagtctgggtgcagtagtgccatcttggctcactgcaacctctgcctccagggttcaagcaattctcctgcctcagcctcctgagcagctgggattacaggcacccacccccatgcctagctaatttttatatttttagtagagacagggtttcaccatgttggccgggctggtcttgaactcctgaccgcaagtgatctactggccttggcctcccaaagtgctgggattacaggcgtgagccactgtgcctggccttccattgcaacttatttatttatttaatttttttttgttgttatgtttttgagacatggtcttactctgtcacccaggctggtgtgcagtggtgcagtctcagctcacggcaacctccacctcccaggttcaagaaattctcctgcctcagcctcctgagtagctgggattacaggcacctgcagccacacccggctaatttttatatttttagtagagacggggtttcaccatgttggccaggctggtctcaaactcctgactttgtgtgatccgcccatcttggcctcccaaagtgttgggatgacaggcgtgagccaccgcacccagccggaatttaaaataagaatgatggtactatatagataatgctgagtcctctccagttcagtgtgggggtatttgtgtttaataaacctaggttcaccacaataaacatgttcctctgcctagcagttaagaagatctataagcagtcaaaaactagtgaagaggttttgttttgttttgagacggagtctcactctgtcgcccaggctggagtgcagtggcgcgatctctgctcactgcaagctccgcctcccgggttcacgccattctcctgccttagcctcccaagtagctgggactacaggcacctgccaccacgcccggctaattttattttattttatttttatttttattttttttagtagagacggggtttcactttgttagccaggatgatctcgatctcctgacctcgtgatccacccaccttggcctcccaaagtgctgggattacaggcctgagccaccacggccagccgtgaagttttaagtaggggcactgtggaccagattttggctctggaaatatatttgtgataggggtgaggaggttggggttggagggagtaaggagaatggagatggaaggaagacacaaaaggtaggaaaggattggagggcacagtcagggagttagttagtggtagactcagcaggagttggttgctattcagatgtgttggggaaagtgacaggcatagctgactcggggtcattcactaagccaggagcccaggaagacacacagatgcaagcagagaaactcactctgggcacgaggtggctgtgggatcacctggtgggggtcagtccttctgtgaagcttgggcagtcagtcagggatggggccaccagacatgctgtggccttgcaaaagtgcacagagccagtcaggcaggagttggattttccagttctgctgctttcgctgccatgtgatcgtgggcaagttacttgaaccacctacatatgttttgttgagtattaattgggaatgatacttaccctgacaaaacattactaggattaagtaatgtaatgtatgcaaagtacctagtactttgcacctagtaggtgtttttgttggtttgttgttgttattaagacagggtcttgctgtcacccaggctggggtgcagtgttgtgatcatagcttactgcagccttgaactcctgggctcaagtgatcctcccaccttagactcccaaagcactgggattataggtgtgagccaccacgcccagctaataaaccatagctttttttctagcctagagtctacggagtaaaagacatggaatcaaatacagtaaatcctagatcttgctcttatatttatttttggtaacatttaagtgatacattttatcctttttagtagccgctccagcattatagggagacagagtatggggaaagtcttgtgtaagtgcaaatggcattccatttgttgagaaaacagcccaatgaagcaagctgaagcagagaaagcttcctttggggcagcagttggaaggagaagggaacatgtcctaggagtgggatcaggtagcatgttttgcacgggatggggcaggtttgctcacttgcagtctgaagtgttgggaaaggaggggagtgagactctccaggaaagctttggagatctgttctcagtgtcatcagttctcttcgaacatttctaatttttcaccttttcttcccttccatgttacttgccctgctctacagattttgatccaaacaatatcttcaaggcattctttggcggtcctggcggcttcagctttgaaggtaggtgggcctgctgttcttgggagttcccagatcacaagccaacacactcattgcctcttaggcagctctttgggagtcagaggggcccatgagcgggggcagctgaattctcatctagcagggcatctatccactcggctgttgctaaggatgaagacaggaaggttcccaggcaccccttgccttgggacctttagccaccgcatctctgcagggtcagggaggcatctctaactgcctagtaccaaggcttctctgcaagagcaaaggtactatatagataatgctgaggtcagaagctacccatgtataatacagtcacgtgctccctcttgcacccaaaaacagcctgagctgtttgatacccatagagtttctctctgtgtttgagtttgaagcagcccttgaagacttttccataatcagagcaaagtgatcttccttagaaaatccatagccaactaccaacccctcttttctctttcagcatctggtccagggaatttcttttttcaatttggctaatgaagggcaaccacccagaacccagaaaatgcagattcactcagtttaatcttgaatgtggaaacagttcacctcctcccttcatcacgtctccgtgtgcttagagcagtttcgttttctcagttggatgccctgtgtctctgtgagtggggtggagcaaagggaaccaatgccgaagaccgagggcaggggagggaggcgggggtggacagggaggcagcttgtgaatttttgttttactgtttaactttattaaaaaagaaaaaaaaaaagagaataaaatgttttgacccttcctggccctttgctctggcatctgcattgtctccagtctgtgagccagagctgagcccgacctggacttggggtgcagcaagctgctgcatgcgggctgtgggcacccagcctagtggcaggtggggcactctgcctctcccagacctgtccagcatgtgagtgctaggcaggccccggctgtgcctctgggcccagcctaacatcagtcacagagaagcgagttcagaaagcatgctcactttacggtggggccccagaaatcactagaagctgtgtgtgtccaaagctcaggtgggtactaaaagctgtgtgcgtccaaagctcaggtgggtactgacctagacagggcagtttacttacaaagactctcacagttcctgttgcagtgtgggttcgagggagatggtagacagagataaaaccctgcctcctgacccccagacccatttgaggtgggacaggtggctccagagctctggtctggccactatttttagcaaaagcccctggccttctctgctccctttctgcatgcaggagacacactgctcacggatgcagcggcatgcaccatgctgtcctgtcaagcgtggtgttcaaggtgagtagccttcccaggagctccaggcacagacttgaagctctagctgaagttcagagatggccagggacaggccttgacctagaaaggtaacttaggatttctcttcatctgagctcctgcccctttctttcaagtcttccccggctggtgccttagccatggtggaatgatgcctgagtcaggtcttggaagtttcccatgtggctgactaggcctctgatggcctggaagggactcaaatgttagatcttccctggtgcttgaagtttcagtgacctgcaggtggccttccctagagaactgggagaaacccgtaccaggagcttccggtcttactgaactctttctgatccagtgggctggggacacctgtgggcttggtgccctggttaatgggggatgagaggcttttgtgctccacatccctcgtacccagccaacccccaccttctgtatgagtctgaggccagcctctgctttctgcctcctcatgaaagccaacactgttcagctgcccaacctcaccacagctgtgcccggccagcagaggggagacaggaccgatggccccaagctgtgggacaaagccagtcctaatacacccagccctagggaagactgagctgggcacagaagggtaagagagactgcacacagctaggattaacatgatttatttcattatcagtcttacaggttgctgaggttgggcaaagccaggatagtaacttaaatccaaagcacttttgttgagtgacaacccgattagcaaggccctgttactgaacagagggcagtggagggcaccccaggaaccacagcacacagactagtgttagaaaccccttcccagaagcaaccggtgggacttggcccttaccagccaggggtctactccattggctcttggtgcccaccagcccctgttagaggaggcccagaggcctccagaggcaccatggaggcaagatgggctgggtagagagcaggactggagcttcctcaccagggttctgcctctggccccgatctccccatccacacagcggagccaggccactggaaaggacagccagtccagccccttcctggagtgaggcccccagccagcggggatgtggcggctgcttaactgttctgctttcttccctagttatcaaactgttacctagttatggtgtgaaggggagggggcagggacttaggaccaaaggtgggaggtaagctcctttttctaccctggtaaatagccccagccttcttggggctacactgattaagaaatgggatcactcaggaggattgcttgagcccaggagttcgaggctgcagtgagccatgatcgcaccactgcactccagcttgggaaatagcaggaccctgtctctaaaaacaaagaaaaaagacaaggagatggaatcaaagcccagaggtcctccccttctcagagccaccactagttctctgtgaccatggaaaactacccccagccccactgccttttgcctccggtcagtgggttttgcggggctctgaggtgtctccccactcacccagctctgggcagagcagctgggctgggctggggctgagctaaccagaacctggaagtagggctcggggttctggctgtggccccatccctggcttggcccagcctcgtcagctttggtccaggttcctgaatggtgcctccctgcccaccttgtgttgggagcgtgagcattagaggggaagagggcggacaggaagggagggtcagttattttacaagtttttaaaaagttacaggtaggttaactttgagtaaaaaaaaaaaaaaaaaaaatgtcacaaaacaaggatcaaacagagggcacgtttccctctccccttcccttctaggggcataagtggtggtgagaacactcatatgatggtgcaggactgcaaggcgccccccttccggctaccttgcgtgggcacaggtttgcctttcccgtagtaccccgtgaagatggccctgacctccatgttcttggccagggtcagcatccagcgcccattgcccaaggaatagagcttgccccggcttagctcgcccacctcctcgcctcggctgccccccttctcctgccgcagaatctctaagaggtcaaggcccgtctgcacggcctctacgtcagctgcacagccgagggtgatgtgggcgcggctcccccgcggcaggttgtcagtgggtgacagcttgtccacatcactcggccacaactgcagttgctgctcgcttaactccacccgggccccagtcgtcttgggtgtcacaaagagggcagagatggtcagcgtgaaggccttggagtaagatttctttaacacctggggagagtgagaaagaggggcccaagctagagatggcaggctcttgaggaacagctgacccaaggagggtccctcctggaggagagaaggggaagtctaacagaagtgagcacagctgagcaggggtcggtataggcccagcatccactaacaactgcggcacgcaccttccataggcgctccaggctcaagtgagaaacacgaaggcgctcagacagggccacacagggacagccggacttcctgagggagcccagctccctgcacactggcttccggcctcagcgggctggctgacctctcggtgccttggcttcatcacccgtaaaacagggagaaccagagcctacctcagagttaatgtggttatgagagtgactaggtaaacagcccacaggggtgtccgcgcacacaacagctgctactgttggcaccgctcagcttcccctgggacccagacagcgccctggaggacagggtgaggtcagactgaggtcagactcgcccttgatggaaacctgctcttacactttggttcccatctgatgatatgtctgcttctatctgattctttgagacagcccatcccatctcagcataaacgcttttctatttttgctcacgatcccttgtcccaacagtgtctggcatgaaatgggtagttaataaatgctaaatgaaggcatggttagggatggtagctcaggtgttacatattcattccactatgctagggtgctggaaccacaggagtcaacgaaacttaaaaactcgccctcaggggagcttccatttgggaggacactctagtgaacaaacaaacgattgtgctaacctaggcagagaagtgggagagtgggcttgggggtggacacttggaagttggagactgtggatatgggtgacatgcctggcattcagggatcactgtcagtggctgtgggtgtaaggtgccagctgtgtggtgcagaaaggtctcgtacccattagccaataagcttcattatcgtatgaaactccctcactctggggccaggccagacctcagacctggggacagggatggggacctcagtgcaccaggctccctgggggcgaaggactcctagtctttggaaggtaaaacaggctcagagagaccagagcaggagcccactgtggaccagcattctccatgaatctgcagaaggcgaaggtgcttgggggcaggtgaatgcacaggctggcagtactgccagggcaggctccttagaacctgcggctgaggtctatgcagctacgcctggggacaggggagctaggaggaggagatgccatttttcttgagctgccatctggtttttggtccctgcctggcaccggtacctatcttcagaagatgctgcagccccttctcccccaacctcccacctcccccatgtgtccctggggaagactcacatcttgttgagcgtactcctctgccccgggagccttcccgtagtcacaaaacttggttgtgcaatgcagcacgcctgggggtctctttccaaagtaggtgaccaagtccatcttctccctgggctcatccccagggacgactgccgggagaaaacgggtgcagtcagggcaggggagcaggggcataccaacatccgccaccaggaccaccgaggcccagcgcaaaacactcggacactaagcatcacctctccagcaacccactacagctcattcattggttagttggtcaaactaatggcaactttagagcaataaaaagttaaaattctcaggccaggtgcggtggttcacacctgtaatcccagcactctgggaggccgaggtgggtggatcacaaggtcaggaattcaagaccagcctggccaagatggtgaaaccccgtctctactaaaaatacaaagaaattagccaggcgtggtggcgggcgcctgtaatcccagctacttgggaggctgaggtagagaactgcttgaacccaggaggcagaggatacagcgagccgagatagtgccactgcactccagcctaggcaacagagcaagactccgtctccaaaaaaaaaaaaaaaaaagttaaaattctctggctttacattgtatagatctttccatctcttctccaaactctaaggcatttgtaacagaggcaggcagtacaggccaagggaatctaagatttactagcaccacgtctcaaaggggaagcaagtcatgggaagtggggtggaaagaaaacagagggctgggaacaacatggtacggtggaaacagccagaacacagtgaatatctcagctctgccatgtaccagccatcggcctcgggcaagtgaccaaccctatctatcaatccagcacaacagttagggtgaccatataccccagtgttcccaggaccaccagggaactatcagtagtgccccatttcactcaggggcccatctggacaagcagtcacaacgtcaccatcagtttaatacacaccttgcaggcctatgggggggcctcctggtacaggaagggtcttggactataatggggtgacattatggggctggaagacacaaagaggagtggagtatctgtgattttgatttccagactccacacctgtggctgtctttggagtcactcgctttttcctgttatgttctgaattgagtccccatgaggatgtctcgccctccacaggggaggaaggcctctcctgagagcagccttgctggcccattacatttctcctgctctaatcctgggcagaaaaatccagttttcctttacaaataaaataggctgggcatagtggctcgcacctgtaatcccggcaatttgggaaattgaggcggggcgtttgagaccagcctggccaacatggtgaaaccctgtctctactaaaaatttataaattagccaggtatggtggcgggtgcctgtaatcccagctacttgggtggctgaggcgggagaattgcttgaacccgggagatggaggttgcagtaagccaaattgccccactgcactccagcctgggcgacagagcaagacccccgtctcaaaaaaaaaaaaaaaaaagatctggcaatcatcctgtcaagcttgattcgtcccatcttgggccaagggcccctcctttcttttgtgctaccgaccagcctggtcaagatggtgaaaccctgtctctactaaaaatacaaaaataaaaaaaaattagccgggcatggtggcaggcgcctgtattcccagctacttgggaagctgaggcagagaattggcttgaacccaggaggcggaggttgcagtgagccgagatcatgccactgcactccagcctgggcaacagagcaagactccgtctcataaataaatattaaaagcaactttgagcagtagtcactcccagggcagagccaccagctcacaggtacagggcttgctcctggccaatgtcactgcaagcaccacagttcactgcagagttcaagtttaggagctgagaaaaaagctctctgagaacccatacaggcacaaattccctgcttctgtgcaatatacacaatgtcaacaaaccagagtggggctatttcaggcatgaagatcatctaaaattgggggtggctgggtgcggtggtggctcacgcctgtaatcccagcactttgggaggccaaggcaagcggatcacctgaggtcaggagttcaataccagcctggccaacattgtgaaactccgtctctactaaaaatacaaaaattagctggacgtggtggtgcacacctgtagtcctagctactcgagaggctgaggcaggagaattgcttgaatctgggaggcagaggttgcactgagctgagatagcgccactgcactccagcctgggcaacagagggagactccgtgtcacaataaataaataaataaaattggaggcaaccagaaatggcctaaaggcatatagatggattagtgggtggcacttctccaacaggtcactccaggagagccaccaggacccttctttatctcaaacctatcattggagcaaaaagcccatgccaagagagaaccctgctagagtggccagagtccagggttccagcccgtaaaccccacatccctcctgggtccatgtttttccatctgaaaacgggttttggcctaagtgtgagacttgtgtcctctggagctgcagatgccacaaacccatgagtaaattgagtagtccgaggcctgagaaccatccccagtgaagccacaatagtcctagttttaatttttttgcagcttacaatttcatgtgattattattattattttttggaacatgattctgctgctaaaaatgcgttggaaaacactgggcttgattccccctctaaggttacattagaagaggacatgtttcctgttactacagtaatttgtttttcccacctccaagacaagggacagtggtctacattcaggctgggaaaagggtgtcggagagaagagggctagaaggataggtgtggtgggaggaaaggcgctctgggaagcccccgtgttcccaatgtgctgccaactccccaaggctaccactgggacgcaccgcttgcccctgcccccgctgaggtgagcctctctctgcctcctgctgcttcgtgctccatcctttgagtacaatgatggtcctttgcccgcagcaccctgtgcccagcaaggtgggcttataaggccccaccctgccacctacattgtcgcagctccttcttgaaggccttgtggttccccagctcttccaggaagacctggccggctttgcggagggtctcagagctcttcttggtcaggaaccagccgaagtagagcggcaggaagtccttctccagcccaggcttcagcttcttcaggtcatcagccgacagctgccactggttcttctccttgagctgggcacagtccagccgccacgccgtcttgggctccaccagcaccacctggtactggtactggtcggccatttcaaagagctgctccagccgttcccgttcgtggttggtgtcatcaagcacaagaattctgatgtcccggcggcggcagtaggcagccaggtcctcatcgagccgcttgtactcctcggagaaggctcctcgagcgccgggggtgatcttgtaagcgtcagccgacaccatcttggtgccatcacggtacttgtccacgatgacccgtgccagcgtggacttgccgcttcctggcaggccgcgcaagatgaagagcgtcttgcactctagcagcgtggccactgtgtcctcatcctgaaggaagggaaactgcagctcaggcttgtccttggcccctgaggatgacatcttgcggaagaagatcttgggcaggaatgtgtggctttttcgggagaagcctctgttctgtgtaaggaggggaagagatgtcagcccaggtcattcgcgggctccccgccggccttacccctagtccctagactggttgtgggtgccttcccaagcggggcagtgctggaccttctttccctttcggtccgggagcacctttccgcttctggtcgtggaggaggaagagggaagcttgtctgaagctctcctaagcgtgcgctttccccattcctgccacttcggaaaggtaaacgtgctggaggcatgcggggcgcgccaggagcctgcggttctgggactggcctcactcttatatgcttggcacctactaaggacgtcctctttggaggtgggggtctctgtgtctgggccaagccacagctgccacggctgagtgcacagagaagggggggagtggagaagggttaccccaagactgcctcccttcccccaacaatggccgcaacagataatactctcttgtctggcatgcgggtacaatggtcccacagaagggctggtggggggcagggcaggagagcactggacaaaggccctctttcaccaagcctgccacctcctcctctaccctctcccggcccccacaaagtcgtggtctttgtgcctgtccagaacagggcagcacagggcacctgcaattaggatccagctctacccgccgctgtgctgtgtgtcagaagcgcctctcggagccacttgttttcctatcttctagaagccacaagggacggcagcttttaccgtaaagggtcccctcctctgaactggctccacctcccgcccgcacccgggcgcggggcagcggttccgcgtgatgagactgggcccggggagggggcgccgaagcggctgccccagcgcgggcctgcgtggggtcgggagcagctcccgggctcccggcccaggcccacccaggctcccagaggcgcagcagcttctgcggtcccgagttccctcctgagaaacaccaccgtttccctttacagcggcctctccggcaccccaaaacccctccgcttctcccagacctcagggccgccctgagtaccaagaaaactggaagtcgaacccggagccccgggtcctcgtttgcaagacgcttcctcccgaggggccccgacactcgtttcccgccctggtgctaccccgtgcccggccccgcccggcctctcaccatgatgaggaggggcgccaccgtcgccgcctctgccggcaccagcgctccggggccgcccgcctgcgcggagggacacgggagtccagcggtggcacgacccgagcccggccgctttacatagcccggggggcggagcgggcacccgggcgggctgggggcgggccgtctcctctgcgcgcaggcgctgcgaaccaaaacccgaaactctcgccgcgcgcgggaacctcggcccggtcccgccccctgcgcgcgcctgctccccacgcgcacccacccactgcgcctgcgagctgagcggccactagctttttctgcgtgttgaggggtaactcagtcaccctccccggtcctgtggattagcaggaagtgagtgaggcagggtcgtgcaaagtcggatcctgtctttaatttttgatattttattcatcatggacttttgcattaattaaaaacttttttttttaccacattggattaaaatattatcatgcaatttgctggcattccggtaaactctgcatctgaaatgcctcactggcctcattcgtccaggccctgtgccagccgaaagtcagtctcagccccgacctttccttctaggagctgtggagacagaccaggatggcaatggccaaagggacagatgagtaacggagtgaaatcctaacatcctctgaggccagatcctcagctgccacctcctctgtgaaaccactgagagctccgttggatttttgagtttcctgtccaagtgctgtgctaagcactcagtcctcgcagcaacccctgaggcaggtatcccattgttcagaggagaagccagcttggagagcctgatttacctgattatgccacccagaggtgtcagaggcggagtctgtctgcc

SEQ ID NO: 3011 - DNA, 2211 bp, Homo sapiens
ccggcctcccacccagctctctggtcccggcggtaagatggcggctgccgcggagtgcgatgtggtaatggcggcgaccgagccggagctgctcgacgaccaagaggcgaagagggaagcagagactttcaaggaacaaggatatgcatactatgcatatgtgtcctaaaaatgctagctattatggtaatcgagcagccaccttgatgatgcttggaaggttccgggaagctcttggagatgcacaacagtcagtgaggttggatgacagttttgtccggggacatctacgagagggcaagtgccacctctctctggggaatgccatggcagcatgtcgcagcttccagagagccctagaactggatcataaaaatgctcaggcacaacaagagttcaagaatgctaatgcagtcatggaatatgagaaaatagcagaaacagattttgagaagcgagattttcggaaggttgttttctgcatggaccgtgccctagaatttgcccctgcctgccatcgcttcaaaatcctcaaggcagaatgtttagcaatgctgggtcgttatccagaagcacagtctgtggctagtgacattctacgaatggattccaccaatgcagatgctctgtatgtacgaggtctttgcctttattacgaagattgtattgagaaggcagttcagtttttcgtacaggctctcaggatggctcctgaccacgagaaggcctgcattgcctgcagaaatgccaaagcactcaaagcaaagaaagaagatgggaataaagcatttaaggaaggaaattacaaactagcatatgaactgtacacagaagccctggggatagaccccaacaatataaaaacaaatgctaaactctactgtaatcggggtacggttaattccaagcttaggaaactagatgatgcaatagaagactgcacaaatgcagtgaagcttgatgacacttacataaaagcctacttgagaagagctcagtgttacatggacacagaacagtatgaagaagcagtacgagactatgaaaaagtataccagacagagaaaacaaaagaacacaaacagctcctaaaaaatgcgcagctggaactgaagaagagtaagaggaaagattactacaagattctaggagtggacaagaatgcctctgaggacgagatcaagaaagcttatcggaaacgggccttgatgcaccatccagatcggcatagtggagccagtgctgaggttcagaaggaggaggagaagaagttcaaggaagttggagaggcctttactatcctctctgatcccaagaaaaagactcgctatgacagtggacaggacctagatgaggagggcatgaatatgggtgattttgatccaaacaatatcttcaaggcattctttggcggtcctggcggcttcagctttgaagcatctggtccagggaatttcttttttcaatttggctaatgaagggcaaccacccagaacccagaaaatgcagattcactcagtttaatcttgaatgtggaaacagttcacctcctcccttcatcacgtctccgtgtgcttagagcagtttcgttttctcagttggatgccctgtgtctctgtgagtggggtggagcaaagggaaccaatgccgaagaccgagggcaggggagggaggcgggggtggacagggaggcagcttgtgaatttttgttttactgtttaactttattaaaaaagaaaaaaaaaaagagaataaaatgttttgacccttcctggccctttgctctggcatctgcattgtctccagtctgtgagccagagctgagcccgacctggacttggggtgcagcaagctgctgcatgcgggctgtgggcacccagcctagtggcaggtggggcactctgcctctcccagacctgtccagcatgtgagtgctaggcaggccccggctgtgcctctgggcccagcctaacatcagtcacagagaagcgagttcagaaagcatgctcactttacggtggggccccagaaatcactagaagctgtgtgtgtccaaagctcaggtgggtactaaaagctgtgtgcgtccaaagctcaggtgggtactgacctagacagggcagtttacttacaaagactctcacagttcctgttgcagtgtgggttcgagggagatggtagacagagataaaaccctgcctcctgaccccc

SEQ ID NO: 3012 - protein, 443 aa, Homo sapiens [sequence omitted]

SEQ ID NO: 3013 - DNA, 98726 bp, Mus musculus
  misc_feature (1)...(98726): n = A, C, G or T/U
taaattctcttagtaattataagtaaaacttaaagctttggggtaatgatcagatgttgaacaatctcttcagaggctggagatggcttagaagttaagagcagaagctgctcttacaaagtgccggaattcagttcccagcactcaagctgtgtggcgcacactggtctgtaactgccactgcagggaacctgatacctcctggcctcgggatactgcgctcacgcatacatacataatttaaaataaaacaaaaatctttaaagaaattatagcagaaaggattgaattaattaaaaaaatgttctttaaaaattatgattatctgtgtggagtggttcacatctataatcttagaccctgggaaagctggagcaaggcattgccttgagtttgcggccagcctgggctataggagttgagaccctatctccaagggaggaggaagccgcaaaaacccgccaaagttatcttgaggctaagacaataactagtcagtgcaagcaaataagaaagactgttcccagtaagcaggccagcaggcgatgcccctggcagggcccggtgtacacctggtctttagcaccgcagagagggaggggtgcccaggcctgttaggattctgtatccactctgtgtgtgagtaccggctgtgaagccttaggccatttctctgtctgccttggtttccttgcttaggagacaggaggcttcgtttctatctcattgagccctggagagggttgtgtgtcccagagtgttggggatataaatcgtcagtgaaagttctctcatgctgctcatttcagagaacagttatttttcttcctccatttctaagtttcatgtttgctggtgagattcaattaggagggtgccagaattttaaagaattttattatcaatagcagacagaattaactttatctggagagatattttgtgaagtcagacgctagcagacatcttcagaatgccctctctttccctcccctccacctcccttcctgcatctcccccacaaccatttgctctcaaacacagacacatgatgcttgcacgttgtcattcggacttgtgagaaaccgggcacagttcagcatgaggtctgggctcctctgttagttttgggctccaggcaccatttttctggcaattattcgttcctgaatcagaaccttgggcatcctgtgatagccacaaggccaggtcaccaatagtctcagtctctcggatgtctcaaactgaccctgctgcattcttcttaaacctcactgggtcccctcttactatggctccatccttccagcttttgatcccaggacccaggctccatccataagaatagcttctttcacatccagcccaccagagtggcaacccgtgtctcctgactcagatctgttttgtccatgtggctacactagcccgggctgtcagcacttctcactgaagtttgtgagggctgactgagctcccgagcctctcagttccacatgtgcatgcagattgtgtgcaatctcaggcgtccctcattcccttccagtgaccaggtcatcagtgtgctgtgtcatagcacttggccccagggatgtctttggattccccatggctgtggtccagcctcaggtcatttccttttctcccgttgtgccaccacgatcggtgagtcgttcctctcttctagggtgtcagcccaggaccccatggcttaggaaatccttctgtgattaatctgcaaaccgatttgactccccgctggctgtgtccccgctggctgtgattatcagatccttgcctcctcctagcccccctgaggccaggctgggtgctttgtgaactctgaggaggtgtacagatgggtgtttaccgtcttgcctctgctcttggggctggaaagatgtgattgccattagagtgtttccctaaacagacttgtagcagtgagtaacttgtgaagtgaagaaagataaacatgctcagttaatttcaaatacttgtcttattgaatgattcgggagaaataagtatttggttttaactaggtgttacttttgaaatcaattcctgtttggtagtgccttgagccatatagactgatccatgggattgtttgcataggggtaaatcttacactcccttggacggtgtaaaaggaaagactgagtcatgaacagagccaccaggcaacatggaggctcatagagggcatggctaaactgtcacccacttccctgagggcggaaatatctgtgagcagggtgtgctattgtggacgttgcatggttggtacatgcaacagaacgcttacttacagaaaagctgaggcaggaggattttcatttgaggtcagcttaggctacctggtaagactgtctcaagcaaacatatacacaaatgtctgcttctacgtataggtgcatcgatgagcagagagggcaggacagatggctggtgtcaagggagaatgagtgtctttttgctactatctgtgatttcctaaatgataagaaaacctgcatgatgtcatgcctatatcctcagcaggttgctgtttaccacagacaggttctttagagccgtgataatagacagaggtgttgtagcctgctcagggaatcagtgcagcttttgcctgatcgattctgtattcccttcctcttttcctcccttcttctctcccttccttccctctctttcctctttgctcccctccgcccccttttttatttttctcctttgagatttatttatatttatgtgtatgaatgtttgtttgaatgcatgtatgtacacaatactgcatgtttgatgtccgcagaagtctgaagagggcattagctctcctggagccggggtaacagatggttgtgagcgtccgtgtaggtagatagggtaaagtctctgttttcccagtagtgggcttggctgttaagtggctggctctcctaaaacgcggggtgccatgaaagcctctccactcctgattgcctcgtggagggaagcagcagagagaggcagcgcacacggtgctgtagagtgggcctgcagcgggagtcctgctctgccttgttacctggtaagttgccaggactactttgtcttgatctaaatttcttttatctaatatgtagaaacagtgaaccaaactcaggtcctttgcaagagcaacaagtgctcttaacccctaagccagctctgcaggctcctcagggtttttagacttaagatctcttgggacagatgtccctctttccttggaacaggtagatagggtggcagaagggttaagtgtgacagtgctggccagagtgctcagacaagaccttgtaataagttgttggggagtagagctctctggcgcatctttacacatcacaactgtgacttggacacacaagagagcccttgtcccacccttcagtgtcctcttggtttgtgttttgagtgagggtcttgctgcagtaccccaggctaggtttgaatttaatttgcagcccggatttatctcagacttgtagggatccttttgtctcacctccaagtatcgggggtacaggtgtgtgctccactgctctctgctggtacaggtgtgtgccccactgctctctgctggaattgataaggtcacctgtatggagagttggtctttactggagagattaaacttgctctcataaaattctttaaagatgtatgtttaattatatgtctccgtgtgtatgtgtgtgcatgtgtgtgcatgtatgtgtgtgtgtgtgcatgtgcatgtggctgaagagaccaggggcatcggatccccctggagctggagttagctgagactgtaaattgtgcagcatgggtgctgggaaccaaactcaggtcttctgagctacctcttcagccccaaggggtttggggttctgtttgtgaaagatttatttttagatgtgtatttgtatatttatggatatgtaggtagatatatgtacatataggggtgtgtgtgtatggtgtgtgtgtgtgtgtttacttgcagaggccagaagagggcattgggtctccctggagctggagttacaggaggttgtgagctgcccgatgtaagcgctggaaactgaactctgggtctctgtatgagcaccagttggtgttaatagctcagccgtttccctaggtctcctgcaaagtttctgaagaaaaataaaacagtatagtggatattttctcagggaaaacaaatctaaattttctaaattttctattgccaaagagataggtagtctttgaggacaagtgctgttatcttttggatgttgcatttttctctgtcattaagatacaagggaaatctagatgtggtgctgtgtgtatacctttaaatcccagctctcaggaggcagaaacaggtggaggtttctgtaggtttaggcccatctagtctccatagtgagttctaggttacccaggactatacagtaagatcctgtctcaaatagcaagcaagcaagcaagcaagcacataaataaatgtcagtatagttaactgtgaccctcctgctctttacagtttatggactctgtctccttcccacagtttggggggccatgcttctaccactggaatcctcagtggatccccaggagtgtgaggccagccgggctactcctgaacacgtgctcttctggttaaccttggctctcggctgtaccatggagggcagtttggggtgttgagtgacctgagtgatgtctcattgcatgtggatttgcaggaagctctgagtctgtccagggttgtgcttgggcagacactattctccaaggaatcatagacgccagaggataacccagcaacgcactcggcatcagtcatgtgggaaggcaggatactacagttcatgggcggacctgtgagcagaaagactccaagggcacagtttcccagagcttgtttctttgaagcatcggcagagccccatacagccatcaggcttagagtacctccagaattagatcagcccgtctggttccgtgctgtgtgctcatgtttctggttggttttgaaatgctccgtgtgcttaatttcctctgctctgccaagaagcaactttctcttctgcctttgtgcatccggggttcttttcagtccacttgcttttcttcactgtctctttttttttgtttgttttttattttttttttgtttttcgagacagggtttctctgtgtagctctggctgtcctggaactcactctgtagaccaggttggcctcgaactcagaaattctcctgcctctgcctcccgagtgctgggattaaaggtgtgtgccaccacgcctggctcttcgctgtctcttattcctggcttgtgtctggcctttgagacagccagacctttggggacaggcatggtggagccatgttgggccaaactctacatctagagtttgtgggcctggatcaggccaccacctaaatgccagacagcataagaccagtgcagcagagaccaggagcaggacactggcccattgtgccgtgtggccatggcagcaacagcccacttctgactcctgtttgaagtgtctgaaggagttgattgtctgaacttaaggaggtagggctcaagtgagtttcaggcctgccatagagtaatggcttttgaagtagtagctttggactggattaaccagttgattaccacaaggcgcccacgagcagcttgagttctgtataactttctctgagttcctggtccagcttcgcctgtttctgtctgtctctccctgccccctccctgccccatcaagtcttcctaatgatacatactgttttagactagtgagcctcaattcccaaagtagccatgtggagcatgtgcttgcgtgtgcgtgtgtgtgcgtgtgtgtgcgtgtgtgtgtgtgtgtgtgcgtgtgtgtgcgtgtgtgtgtgtgtgcgtgtgtgcgtgtgtgtgtgtgtgtgtgtgtgcgtgtgtgtgcgtgcgtgtgtgtgcgtgtgtgtgcgtgtgtgtgcgtgtgtgtgtgtgtgcgtgtgtgcgtgtgtgtgtgtgtgtgtgcgtgtgtgtgcgtgtgcgtgtgtgtgcgtgtgtgtgtgtgcgtgtgtgtgtgtgcgtgtgtgtgcgtgtgtgtgtgtgcgtgtgtgcgtgtgcgtgtgcgtgtgcgtgtgcgtgtgtgtgtgtgcgtgcgtgtgcgtgtgtgtgtgtgtgcgtgtgcttgcgcgtgtgtgtgtgtgtgcttgcgcgcgcgcgcgtgtgtgtgtgtgtgcgtgtgcgtgtgtgtgtgtgtgcttgcgtgtgtgtgtgtgtgtgtgtgtgtgtgcttgcgtgtgcgtgtgtgtgtttctacacataggtttgtgactgctgggaacgtttccacatgatgtctttcctctccactcatcaatcataatgagccctgagatgagaaaggatggctggggcatccatgtgtgaaagatgtttcctaggatttattggtaaatcatttgcccagttgtcctttgaaaactatgactaataatgcaatggttggggctagaaactgtacagctatccattcagaataaaaccgcaaaaattgcccaaatcatcaagatccttgccttttggttttccttcttgttttgttttgttttggatacagtcttaggcaggccttgagtttctgattcttctgcctctatcttccaaagaatcctagcaaataacaggcatgcaccgccacgcctgctgcatgcagtgcaggagactgaggcctagcaataacaggcatgcgccgccacgcctgctgcatgcagtgcaggagactgaggccagggctcgatagaccatcaagtgagccacatccccagccttccttgcttctgtgtagaagtgcaactgcgtgtggttgcattctggctccaagttctcattggccatgtgtgacatagtaggaccttttgcagcaggcttggtttagtctaactcttgcttcaatgatcagaaatggcaacaggtcacactcccttagaatgaggtcaccctcgaatgctcatttccgtgactcaaaatcaagcaacagactgattctctctaacttagcggtgattaatcatcacagttgtgacagtggtttgattttataacactgaactctttataagttgtattgttgattaaaattcagaactgtgttgaaatggtaataatgaattaatcaattaattactgttaaacattgttagaatcttgcaaaattttcagtcaacaggggaagaggacagaaaaggaggttgattgggtcagcctggtacagtggtcctgtgtgttgaaacatagattgagagagcagaatttgggaagatgtacatatgctgaacacaaccagtaaaaaaccaggcaattgctgggtggtggtggcaggcagatctcttgagtttgaggccagcctggtctacagagtgagttccaggacatccagggctacatagagaaactgtctcaaaaaagccaatcttcatggggaaaaaaacaacaaaaataaaacaaagcaaacaaacaaaaaagcaaacaaaacaattgctgtgtgtgctggtgaataattcttatactcttgaggtagaggcaaatggatctttgtgagtttggggccagccaggtctatataagtgagttctgggccagagcaggttcactctagcatttggaaagctgaggcctccctcaagatgaaggccagcttgggttccacagtgagtgctaggctagcctgggctacagagtgagatcttaaagcactaaccaatagcaaagagaggctggaataactggagacctggctcagcagggaagaccatatactgctctcacagaggaccagagttttcattcccagcacccaagtcgggcagctcacaactgcctgtaactcctgctctggggaaatccgacaacctcttctgcatgccaagggcaactgcacacatatacacataccccaccacctagatatgcatagttttaaaataataaagcataaatcttaaacaatttaaaaaagaaattacccctgtaagcagccttgcacctttaaagagcacagaatggcttgagttagttcttaacctcctgggagcctgttgacttatttttatttttttaaagataaggtatcactaaatagcccttgctggcctggaacttactcacatagaccaggctggcccctaaactcacagagatccacctgcctctgcctccagagtgctgggatcaaaggcgtgaaccaccacgcctgacaaccgtgtgttttactggctgtgttcagtgtagaaacatcttcccagattctgctttttcattgtgtgctttaatctgtgggacttcccgtgtttctgcattgtccctgttttgttagagggaaggctgaagacaaaggtgtctgatacttgacagcctgctcctgagtgagtctgtgtgccagccatcctgcacaggaaagatgtgctcaggcctgctgctgattctagtagcaacagtagctcactttagttaaggagtgtttcttgattcccccgagcagctcctaggaggtaggcactttgatcctggctttgtataggagcataaatgcttcagtctggaactttgtcacatgctgacaaatgataggggtaggacctgaagctgggcctggtttcttgtttgatttctactatttttttttatttgttttgttttgttgagactttatctcactgtgttgccctggctgtctggaaactcagaatggaagccaggctggcctcgaactcaaagagatccacccgcctctgcctcccaagtgctgggagtaaaggcgtgcgctaccacgcctggcctctgtttaagatttattactcagttcttcagtgtacaggtgcattgtgagtgagtgagtgcaggcgcccacagagaccggaagctggcatcatagtccccggagctgcagttgtaggcggttgtgagctgctcagtgtgggtaccggaagcagacagaactcatgacctctagaagagcagcaagtgtttaatgttttagctatctctccagccccagagtttgactctttaatcagttattcttgtatagtaggtttgcccagaaatctgtttagacctcacaacaatcacacctgtcttaaagttacaaaagctggagagttggctcagcagttaagaggactggctgctcttccagaggacttgggttcaattcccagcaaacacataccaatgcacattaaatacacacatacatacatacatcaagcaaggtgtggtacgtgctgtagacaagcaagtgacccagtggatgccccaggctacaggagagatttgttggttttcctaggggcagagtggtgcaagcagtcagcccgtatccagtcttccctttgcttttatctatagcctctaaggagctccaacttgaatgggccaagtaacaggatcaccctacctgcacagatcttcagagggtcaagagagtctcagggacgatgttggtttataggtagcttgctctccttgctcttcctccaacccggacctttccttccagccctactaaggagcagccgccaagtgctgtccttgctaacattaagcaatctgtatgttcagattctgttgagccctaaagtgtgccgtggtgtcttccacagtggcgcttagagctcatggtatcctttagatctttagcttcttctgatatgcttcttgttctcaaggcgttgcgaccgtcctgctgcctggcattggcttctgtgtagggctgccttttccctagttttcccaagtcttggtgttgttgaatgaaaaacatgttgcacaagagtcaaagctgactcatgtcctcgggctggacggaaatggaattcagaccctggaggtttaaccaggtggagagggagagatatctgggcttaacagggccgttggcttcctgtctagaattctctttttctgggattatatggactaaggcagcttggagaattaaggaaggtagcactgcagataaccatttggcaaattccatgatggacaagagtgagtaagtttggggtggggcggggaggggtggtcagaatgaggtgattgatgggttgttgggtttagagtcagggcttactggagctgggtgtggcttgtgaggaagaggagcaggagggatggatgggagagttcgtgtagagacatggtaagtagttgatgtatggggttggctgtgtgagannnnnnnnnnnnnnnnnnnnnnnnnnnnnnnnnnnnnnnnnnnnnnnnnnnnnnnnnnnnnnnnnnnnnnnnnnnnnnnnnnnnnnnnnnnnnnnnnnnnnnnnnnnnnnnnnnnnnnnnnnnnnnnnnnnnnnnnnnnnnnnnnnnnnnnnnnnnnnnnnnnnnnnnnnnnnnnnnnnnnnnnnnnnnnnnnnnnnnnnnnnnnnnnnnnnnnnnnnnnnnnnnnnnnnnnnnnnnnnnnnnnnnnnnnnnnnnnnnnnnnnnnnnnnnnnnnnnnnnnnnnnnnnnnnnnnnnnnnnnnnnnnnnnnnnnnnnnnnnnnnnnnnnnnnnnnnnnnnnnnnnnnnnnnnnnnnnnnnnnnnnnnnnnnnnnnnnnnnnnnnnnnnnnnnnnnnnnnnnnnnnnnnnnnnnnnnnnnnnnnnnnnnnnnnnnnnnnnnnnnnnnnnnnnnnnnnnnnnnnnnnnnnnnnnnnnnnnnnnnnnnnnnnnnnnnnnnnnnnnnggagggagggagaagagagagagagagagagagatagagagataggtccagcttatggaactcagattgccaggcttggtggcgagcatctttacctggtgagacatatcttcatatcttgccatcttgccagccttccttcatgtttttttgtttgtttgttttgttttgtttctgttttctccaaggtccagagaaaggagaaggttcatttctcattgacttttgtctctagaaagacagggggcctcatgaaaggctcagcagaggtctaaggatgtgggaccatggagaaaggtagttcccatccacaggtagatgaggctggagttgtccttggagagatgtttatctagaattgataactgaagcatgaggcagagagcccagtgggactctgcctctctcacaggcagcaggggccagctatggtacccatctgtgtccaggtgggcatcagaggaggaaggctgcagggtgccagggaggcctgatgcctgccctccacagcctctactcttggacctttgactatctgttaggcccagcaactccagctctctgcccacccgtgagcggatgtaagggatgtttctacagctgggccaagcaagacaaagtctggaaggcctcccagtatttgctggtgtgagctgagcctccttgaactgttagaacagtttggaaatggttttgacttgattgtcttcagagcattggtcatctgaactgcactttagtttcctttgcctgactctgaatatttgccaagaatgtctctggtatacagtgaaaaagtagaactcctaagtgtgttctgttctggtagaatttagagccttctagaaagttccttgaggacaatggacaagagtccccttatgtcacagctcaggaaggtggagtaagtgcaggacctgcccactcagggtctcagccctcctcaaagcacctgcctcatggctgcgtttggtaagtctttcagtgactgattctagctgaccagttgttgggatcttactcttgtggagctcttgggccccatcagttcatagctaggctgccttcagcctaaatccttcttggaacacctacaatggaggaaggccttgcctcagagcttataggcaagtgatcctcaggggacaccacaggacagccatgtggctgggttggctctgtcaggagcacggcagcttctgactctacagatcttgaacatggccttgggtttcctgcctcccaccattgcttcatgcttcatctactacttagaatctgctttctacttggttgtgccaggtagcttgttaagtagaccccccccccccccccacacacacacatacacacacaaggagctgccaggaggctttctgccccctgtgtctttagcagctccccagagcttcctttttctcccttacacacacatgtactcaggcttccttacacacacacacacacacacacacacacacacacacacacacacatacacgtgctcaggctcccttacacacacacatgtgctcaggctgtcttacacacacatgtgctcaggctgtcttacacacacatgtgctcaggctcccttacacacacatgtgctcaggctgtcttacacacacatgtgctcaggctgtcttacacacacatgtgctcaggctgtcttacacacacatgtgctcaggttcagccctggtgttttacttactgatttacagacatggctctcactctgaaacagtctggccttgaactgaaagtaagcatgtgtcaccatgtcctagttacctggcttcttaaaaaacaaaaacaaaaacaaaacaagaccgggcgtggtggcgcacacctttaaccccaaaaaacaaggccgggcgtggtggcgcacacctttaaccccagcacttgggaggcagaggcaggcggatttttgagttcgaggccagcctggtctacaaagtgagttccaggacagccagggctatacagagaaaccctgtctcgaaaaaccaaaccaaagcaaaaaaaaaaaaaaaaaaaaaaaaccaaaaaacaaaaaaaaaaacttgggccctagccagattcaaatcccacagataagcggactcctgatgtaaggttatacttagcagattttactgcctatatcaatgttaagtatgatataaagaagtttctcactgaaaaacagaggctaatatttctgattctgaacctttgctcttggagaaggtaagacagtagatactactggaattcagaagaaacaggcttcttagtaaactagtatgatttgggtgaggaaaaaaatccaaatatattacaatttactgtagctagaacatacagagatgtgactgtctaaagcagtttatatatattttttaattttttaaaaatttctttattgttttttgagacagggtttctctgtgtagctctggctgtcctggaactcactctgtagaccaggctgaccttgaactcagagatccacctgcctctgcctcccaagtgctgggattaaaggcgggtgccaccactgcccggctaaacttttttttttttaattcaaagaaaaatgtttgttgcatgtttatctgtatgagtatatgcctcatgggagaggctagaagaggggtcccatcccctggaattggaggcagaggaagttgggagctcccagtgtgggccctgggagtggaatctgggatcctctgcaagtgcttctaacgccaagctgtcactcagtccctaagtgcacagaaatctgaaagcaaaatgcatatcaccgtcaacattctctgtgctctttaagactgatgctttgtgaagacgggaggaggaaagtttctcaggaagctataaaacccagaagctggagagcggaggtgaagcgtcctgggtaccttaaaatagaaatctcggaacagccatttcacagaagaggataactaggtggtggtggggacaatggcggctgaagtgtaacgtgacaacagaagcatcgagatcttcctctagctactggactggacaaaagagcatgtttgtgcttgacaagggtgcagggaggctgtgctgtagaatgacagtgttagcagcgatacaaatcggtaaataattagtagacggtttcaacatctccaaatgagcttcctggtggcactgcctgtggtgtcaatgcttgtggagtgacttgaggattcggagtttaaggccagtcttgctgtacagcaagttggaggccagtccaggctgcatgagaccctgtctcaaaaaccagcagcagcagcacattcaactatgagtccatttgacaccacttctgctacagatgcacacttctgccacactggctctcatacacagacctgtgtaggtgtttaaaggccaggcagaccttttggtggtgtgcctgccctaaaggccctgggttcaatccttagcatcacacagaagagcaaaacaagggaagaattttcatgggcctggtccagagcaagggtcttaggtattatctgctcttgggctaaggaggtggctcagtgggtgccagcacttgcgatgcaagaatgagggcctcagttcaagtccccatcacccatgtgaaaggacagcccagtatgagtgcatgcctgtaaccctggcatcaggtgggtcctgagaccagtcaacctggccaaaagggagaacttccccttcagcgagagaccctgtcttacggcagccaaggtaaaaggtgacagcccccttacatgcccgctcccactcacttccctccccccaacacacacacacacacacacacacacacacacacacacacacacacaccaccgacctgcctacctcccttggtgagcatttcctccggatggaaggtctgtcccgtgggctgctgacggtctgggaaactgagtatcttctaagtttgaccctaatgacctaatgacctaatgtcttcagaaagagcagggagctccactgctttgtcagcgtgcattttcctaagagctgaagtaacggtttgtgtctaaaatgggatttccttttaacttcttggaatttttttttttttaggattcatttttaaatatgtgtatgagtaatgtgggtttgtggacttcagtgaaagtgtccccagagttcagaaaagggtgttggatcccctggagctggaattatacatagctgtgagtcacctaatatgggagctgggaactgaatccaggttctctgtacgagcatccactgagccatctctctaggccccactacttggagttcgaagtgactttttttttaacctttaaaatctgaaagatggtcattgtttccaggagggacaatgggatttggctaggccttcacatttgtgtggccctttgctgtaggcggagccatcgcccaaccccagccgggcaagcctttataaataagcctctacaggtcttgtgtggtaggtagtgctggaggtggtgcctggcgttgatgcttgctttgaacaccccttcctctgggctgtggcactttagcccagcagtggtgggaggcgtgggcccgctggtttactcgtggtataagccctctaggtgggaggtggtggcggtggcagtggcagtggcagtgcaggtgtgatataaggaggtggtagctgtgagtctaggaacctgataagcaatggaaagagtcctggcttctaatagtcagggtctgagggccttggaagaaggctaacgcaggctaatggaggagccaggcctgtcttgagacggaacatagactggctaatttttcctaccgtgtcagttttgatttttgttggcaaggaagagtattaccaaattaggagggctgctgccaattatcagctgcttcgctgatataaattttttagggatgcacttgagattttgaggctaaatcaggtctttctagatggttgatgtggaccttatccactatttgaacaatctcaccctcctttgcccctttcttataaaagcagctcacatttgaagaaacatcagtaaaaggtgagaagtcctctgcaaggtgggcgtggcggtgcacgactttatccccgcttttgaggccaaggggaggtggaggccagtcgaggctactagtgagatgctgccttgaacaaaggaaggaataggatgcagcttgctttttccctcttccaaaagcttttgaattaatactattgactcatagagctaagctaccaggcagggtgtgggtaaattaaccttgacaaattaggattgcccttgagaaaggaaacttccaaacctgactgtgcccggtccagaggctgattcactcttatgcaggcatccctcctgcggtaaccgagcattgaaggaaggacggacagactgacggaaggaaggaaggaaggaaggaaggaaggaaggaaggaaggaagaatagacactaccatctgtttgtctgtcctagtaagagaggaccaggcagctgttactggtaacatagtacccagaaggtttgtatggctttggttattggaagccagggttgataaaaatacaactggaggtaggaagggaagttattatcagattagaaaattgcaaaaacaaaaagctaatttcagagcagttattaactgtcaataaatgtcacactgtcttgaaatagttcttcctttctcattgtccagtctgacttactgtcaactgggttttcatggcttgattaatgaggctagccctttgggggtgtctagaaaggagataagtttcattgacgtttggtgttccactctcagccccctggacggctgtggagcttgtgagagggaagtggctggctcctgtcaggagtctttggtgatttgttgttcaaggtcgaacgacgagattgacctgttttctgtaggtagcataaagaatgccacacccatcctggagcacaagccctctgagaagcttctcctattttaaatctaccttatttttcatttttattttttggagataaggtctctatgtagctatggctgtcctggaactctctctgtggaccagactggcctcaaactcataaagatctggctgcctctgcctcctgagttctggagttaaaagcatgcagtaccacacccagctcagctttctctcttactgagggatgaatgtcttttcagggacagtggctctaatggagagcacagccaggacctggggaaggccatcagtggagcaggcagtgtctgctttccaggaatgtggctgccacgcccaggctcacagagcttttggctgcgacaggcttttgttttcctacagatgtttgggagcataaatgtctgcaccccttaccttagcagcagcctcagttcttagctaaagaacaagtgaagttttgtgcattggcttgcttgcttgccgagtctcgtctccttaggctgctgtggctggccggcctcagcctccacagtgctggggtcacacacagccacctcacctggctttgtgaggtttcccagcccgtgtgcagcgatgcacatgtggagaccagaggacagcttctggagattggttctccctttccaccgtgtgagcgtccttgctccccaagccccctgcttgcccttgagaggaaaatgctgatcctgaacagtgtccgggacgttttctctgctcatttctccattttccctggacttttcctcttaaactgtgccttccctctgtttctttttgagtagatcttgtcaccgagccaaagggcgtgctagagtgcctgagtaatggagaaggctgacacatttcagatactcaggacagtagtgtttagagtcggccccagcactgagttccctctttaataatgcattttcatttcgtaaggagggaggacaaacacgtaatggtggcagccttgcatcccaccctgcaagaagctcaaaggtgtcacatggcacaatcttattttacagctgctgagcctgagaggtgactggagtttacaacgggctccccctgaccctttgtatgcactggtgcatgtgtgtgcgtacacacacacacacacacacacacacacacacacatacacaatgtaaagaatagagattgccagtttcctgggatcaacccatgtcttctctaggctccgtttttagggtttcctcttccttagtcttttcccatttgttccttggtcagttgtagaagtgtcagcttctaagaggacttaaatgtctgtgtagattgtgttcattgccagtgggatcgtgggcttgagaatggagcagccttctcaaggggtcagacaccacccctccaccttgcctctgagccccttccaaggctgcacactgtctgcagcacactgtgatcacatcagagttgcttaaacatatcactggcaggatattgtccccaagggaccctggtgacaaggttagttttcaaatctaaagacgcatgtcacacgtgatggagaggtcagtgagagactccagccccgaggtctgttggtggcttgggcaggagatgagtggggacagcaatctgcactggcatttcagctcccgaggctgaaggctgtctgcgttttgggcctgagtgtaattgaatttcagcagcagagggcacgaggcttggcattttttatggtgctagattgtgggctggataaggaggcctttcatctctcagtgcgtgtggccagtcacatgctgctgggtcagaacggagctcttggctcccaaggaaacatcgtgatggagcccaggggagagctgctgcggccggaacacagacagacagctgttcactgcagagggaagggtgtgcagttcaggatgtcgtcaggaaggccacccctgaccagtcctctcaggtcggttgtgctggggcagactgcactgtgttcagttgatggcactttcctgctggcctgtggaaagtcagccctgttggccctggagctaccataaggagtacaagaagtggcttagcagagacccgagtaggtgtctggaacccaaaccctgggctggttctggcatactcaatttacccatgattggggctcctagaagcagccgttgcttgcctggtcccccagtgagaggaagtgaaacccctgggcatgagccccaggcagcataggctgccctggccgactggcactttgatccttctaagccgtgagcggaagtccagatccatcctggcagagtgaagaggcccacaggcatccttgtgtttaaagaagggctgtggtgccccagcctctactagcttgctttgcgagatcaagaagtggagccaggtgtggccagtgtttgcagtggtgtttgcagtggtgtttacagtggtgtttgcagtggtgtttacagtggtgtttgcagtgagcctctgaagctccgaggcttggctagactgcctgccctatctggtggcctggtgtctgcttctctgtgggtcctgtctcaggccttcttgactgatagggacttagggataggttgatcagaaaccatcagaagtccctttcagttggcagatcatgggcccctgactctctggaagttggcccctggtggcctctgtacaaaacacagccgttttctcagcaggtgcctgctttgtccctaaggtctgacctggatgattcgagcagaggctccagtgatgtttcacccatggccttggacttcgcctcagcttcgcctctttacttctgtcctgtgtcctaggagaccagcttaactattcagcctcaaaactgtccccaacctgtgcccagagtctccttcccttgccacagtgacagccaggctttacccttggtgttgctacagcagctgactgagaattagccagcaccaaacttttttaaaaccactgctacaattttcctttaaacttaccctgtgaggggcaggagagatggctcagcagttaagggctcgtacagagtctgggttcagttctcagcatccaccttgtgaggtggcatacaaatgtctgtatttccagccacgggggacctgatgcttctggccttcttggccactcacatgaatggctatacacatagcatgtgtgcacacagccagacacacacatatcattgaaacctagggagagttactagattaatatgtactaggtaagaacttgtaagactgggtggccactgaatggactaagctgtttctcattgtttctgtggctgcttcgtcttgttttctttttaacctacagacatgttgacataaagataacagggaagcgctgggcctgcgctcaggaggcagagagagctgtatctctatagattcaagctcagtgtgtctacattatgagttccaggctagccagggctacaatagtgagaccctgtctatacacaaaaccagccaggaaagaattgtcctgatctgcagtgaaacttccccgctggtgccctttgctggatgtaggttgctgtgtctaatggagtgcattctctcttcctgtattcagccccagtcagagaccctgcaggtcacggaagaacgtgggcaaaactctgatgcaaagtctttatggaagtcatttctctgagatttgatggtgaaaaggttgtgttcctgaggtgtctgggccccgactctggtgatctaggagtatggtgtccctacacctgccaccccaggttctatctgtgctcttgttgaacaggagtgtttggccggggacctaagtgtcggaatacgtgagcagtgtggtattgacggtctgcggtaggctgcttacgtgtgtgtggggctgtgctgtatgtagtgacctgtgagcgtaaacaagtagaatttaacatttgggaaatgccctcgacccgttttgcaggtaatactgagactgagaggttggggttgcagcttgtttgagttgtaacctatttgaactccccagagtcagctagaaaaggagtaagtcggagaagctctgttgccctgcccaaggcagccgcccttccactcaactcatgatgcctctctagacctaaggtcacctccctccatggccctgtgtgtcctgtagcagagaacagatctagggagccagccacggcatgcacagattggtcttcatgcccctgtcttaatcttctgcctgtgcccatcctgcctctactacccagcagttcagcgaacagagaaggtgtctagtgtctcaccctgcctggccttgtggcctcagaactcctgctgtctgccccacatcctggctcttccagtggcatcgttgtccagctgtagaggcctggctcttccagtggcatcgttgtccagctgtagaggcctggcatgatgccctgtgccctgcaagttgactgtaattagccaggtgtggggcttgccactgtctctagcatgtaagagttacgaggctgaggcaggaggatcatgcacttgaggccagcttgagccacatagtcaggtgcacagtgatgtaagatgtcatgacctgcatgtcacaggtgcacttggcattatctgtttggctggcagctttgcagatgcctgcctgccttccacctggctgttaggctttgttagtcctccctcctgcagtactcagtggcactcgtgcttgctggtaggtgtccacactaactgtcgactttcttccatgtgagtaatggattcagttctgagccaatgcttgttttatgtgaggcctcagtgccctggctggatggcacttggcatgtaagaacaacaacaggtcatgacaattagtttctaggtttccctatgtggctgtttagccacttattacaaggtagcagaacagggtggccactgtgggagacttgaggcacattgttagggcggctgtgaccctgcagcggaagcagaaatcatcttgagttaactttacacagccagaaaactagtggtgaaatttctgtctcaggagccttaagctcagccaggtgcttcatttttgctttgtagtagagagggttgctggtagaaataagccggttaaagggaaggagtggttatttagcagttgcaagtgagacagattgttggcatttagaaagctggtgtgtggtttgctcctaagagagaatgcctagctggaatttatctggtgggaattaaaccactaaaccttccaaagtgtgacgctatggccatctgccatggaaaagcataatcgccatccaagtctggccttggagctacatgtgacccagtcacctgtggagaggccactctctgacttgttctcttcttgctgtttttttcagagcctgagcctttgcaaagccggcaatgacaagtctgaatggtcgccatgctgagaaaaccattgacatgccaaaaccatcagcccccaaagtgcacgtgcaaaggtctgtgtcccgagacaccatcgccattcatttctcggcttccggggaggaggaggaggaagaggaggaggagttcaggggctacctggaggaggggctagatgaccaaagcattgtaacggggcttgaagccaaggaggacctgtatcttgaatcccagggtggccatgaccctgcaggccccgtctcgacggcccctgcagatgggctgtctgtgtctgagtcccctgccattttgcctgtctctgagaacactgtaaagctgctggagtcccctgctccagcactgcaggtattaagtccagtgccattggctctgtctccaggatcatcttcatctggacccttagctagttctcccagtgtgtcgtccctttctgagcagaaaaccagttcttcgtctccactgtcttctccttccaagtcccctgtcctgtcctccagtgcctcgtcctcggccctctcaagcgcaaagcccttcatgagcctggtgaagtccctgtcaactgaggtggagccaaaagagtccccccaccccccgaggcacagacacttgatgaagactctggtcaagtctctgtccacagacacttcccggcaggagtcggacaccgtgtcctacaagccccccgactccaaactcaacctgcacctcttcaaacagttcacacagccacggaacacgggtggagactccaagactgcgccttcttcccccctgacttcgccctctgacactcgttccttttttaaagtgcccgaaatggaggcaaaaatcgaagacactaagcgacgcctttctgaagttatctatgagcccttccagctcctcagcaagatcatcggggaggagagcggcagccataggcccaaagccttatctgcaagtgcttcagagctctccagcctgtccggcttgaacgggcacttggaaagcaataactacagcatcaaggaggaggagggggactcggagggggaaggctacggcagcgactccaacacctccaggagcgaccacctgaagcccactgaagacgcctcgaaggaagtggagcccaagggttcccaggcgagtagtctgaaggacttaggtctgaagacaagttctctggttcttgagaagtgttctctgtctgctttagtgagcaaggaggatgaagagttctgtgaactgtacacggaggactttgagctggagactgagggcgaggggagacttgataagaccctcgatctccccctcaagccagaggtgcttgccagcgatggcgtggctctggagagcgaggatgaagaggactcggccaccgagcaccaggagttacctgtaaagacgctcggcttctttataatgtgtgtctacgcgtacctcatcctcccactcccctactacatgagtgggctcttcctgggcgtcggcctcggcttcatgactgcagtctgcatgatttggttctttacaccaccaagtgctcacaaacaccacaaatcactcaaagctctgcggcaccagagcacgagatccctggacatcaaggagcccgaaatactaaaggtatgtaagcctccctccggctaacggctgagtgagctgatggctgaaggtgttcgaatcgggggtgtgtgtgtgtgagtgtgtgtgtgcgcgcgcgtgcgtgtaagatttatttatttattcatttatttaatatatgtgagtacactgtagctgtcttcggacacaccagaagggggcatcagatcccattacagatggttgtgagccaccatgtggttgctgggaatcaaactcagtacctctggaagagcagtcagtgctcttaaccgctgagccatctctgcagcccattggggtgttgctaagactttggatatctctgttgtccaggaactcaaacagctcatccggaagcctgctgtgtagaccatgcttgcctacttatcaggcagttttgaagctctccacggccccagagagcagcgcttctggctagttcctcttaggtctgccctgcaatttgctctattttgaggatctgtcattgctgaatattgggattctatattcttatttttcaggcagtctcactatgtagccctggctgtcctagaatttactgtgtagaccaggctagccttgcactcatagagatctgcctgcctctgcctgccaactgctggaataaaggtgtgcgccaccgtgcctagaagtgttatctacctggagattctggcatcaggctcgatgccaatggaactgcaggagagggccaagaggaaagagaccaattactatcactgatggcgcctgctgctagcttctctctgtgcacagtgagacatgggctgagaacaaaaatgtcatctgtgaatgccatgtgtcaggctttgggcctcctggggtggggctcctgagatgatcttttggaatgaatatattagaatttcaaatttcttttttttttttaagttatttatttatttattattattattttttaaatttatttatttattacatgtaagtacactgtagctgtcctcagactctccagaagagggagtcagatctcattccgggtggttgtgagccaccatgtggttgctgggatttgaacttcagacctttggaaaagcagtcgggtgctcttacccactgagccatctcaccagcccgaatttcaaatttctatttatttctccatatttacatttttctggccgttttgtgtacttcataagatttttagcataaaactatggttgtaggccgggcgtggtggctcacgactttaatcccaatccttgggaggcagaggcaggtggatttctgagttcgaggacagcctggtctacaaagtgagttccaggacagccagggctacacagagaaactctgtctcgaaaaaccaaaaaaaccaaaccaaaccaaaaaactatggttgtcacctggcatattggtggtgcttgtctgtgatctctgcctttggaaggcagaggcaggcggtcagcctggtctagatagtgatttccaggatgcagctgtgtaatgagaccatggcaaaacaaagcaaaacaacagcaggcagtggagctggagagatacggttgagagcagtgcagctcctgcagaaggcttgagttttatgtcccagcaccaagtcaggccacttcacagctgcccttaacttcagctccagaggatcccaggtgtctgtacacccacccacatatatgcacataatttttaaaaatttaaactctaaaagtataattgtcattgatacagtttctgagttatttgtatacatagttatatagggtatagaatcaggaacatttaaaggtcactgctatataataattttcaaggatcctctgttggcattaggtatttccagttttatacatgaggaggcagggactctgttcatcccatgtttttgagcccagcgtgacactcctccctctccccttccccccttttcctgtggcacatctctgcagaaaaagcccacgtctagactttgagagccccttgctgcccttacaggcgttcaaggtggcttctgttttcttggagtggttttgaacgctattgatcataaataacttttagctctcctcaggttacaagcttatttgggctctgttaaatttctagatttgtttcccctcccttctatctaaggaatattctgaaaatgacaacatgatctctctttattgagaactaaaaaaacaaaaaacaagaaaggaaagctgtcgctgcagtggatggaggggccctctccaaatctgtctgttgttttctcgtctctttacattctgtccttattcccaagagaagcatgggaaactcagaaaaggtccacgtcagacatatcctgggcgtgtcatctggctctggtcaggtctggagtgtagtgtctgcatcacacatgcagacgcacccgctctttgtcacctgtgtgctcacgtgtgttacagcctgacctcttcacgcttccccacacagttggctgtgagacggtttcttttttgaagggaagctggcgctggctcccgaggatgtgacacccttagtgtagcatgattatgtggagcagagcaaaagtgactcatgcctggtggccccactgtcgaaacagtgatgctgttacctcctgatttccacgctctaagtggcctagtgctaactttagccaagagaaaaaaagatgcctgtgtcagtcccagaactactgactgacgaagatatttgtcctgggaagattttaactttaggacagacagcctcagtgttgatctagtcaactgtgggttgacagtttacccactacccagagggtgcaacattacagtgctatttaaatgtcacgacagttggcttgtttttaatccagtgagtggaacagtaaaggcagggtgctaggtgtgggaatattgtcttattagaattgtatcacaaccctgttcagttcgggtatgtgctggtgagggaagggaggcccagaggctttccttgtccatggccatgctgtctagtggtattttagccagtgttctattgttagtgatgcaataccccaggctaggtaatatagaaaagagtgtcagatttagtggtacccacttgtaatttcagcgtctgggaggcagaggcaggatgcttgcaagtttgaggatagcctgggctgcgttctgagaccctggctcagcaaaacaaagaaaaggtgttatttttgctcatggttctagcccaagttgaggggtttatctggtaaaggctgtcttcctggcaaactgttgatgcacatggggaatcatggctggtgacagggatactgtgaacatatgttctctgccttccctgtcttttttcttggcttccaccttggtggcaatgatgtttagaaagggggacaccaggtgctagagaggtggcccagtagtgggtgttcctgcagaggacccgggttctgttcccagaccggcatggcaactcagccatttggaactccagtcccaggggatctattgctctcttctatcctctgaggacagataacagagcagaggggtggtggtgtgcccagtttgccaagccctgtcataggtataatgagttctttcctgcagcatgcctgcttagatgtctagatctgcaagtgacatcttgcagccttccatactctgctgggtgagttgacttacacaggcctctaaaatgaaagggccttggcctggcagcttccgtctcacctgattggacttcctagccggagtcacatgctgattgtctggcttgtgttttttgtgcttcttgaaggcagagaggttgggctcatcagcttgtccttgtatccccagttcctgctgtgtggtaggcatgcgataaataactgttggatgcatgcttgggtccatgaggaagagtttaaccagtggatcagtattcgttcctatttctgttcctgagactgactatgtgacagaagcaaccagagggaggaaggatttgttgtagggtgttgtccatcatggagaggaagtgtttggtttggttcatggtggcaggagcatgtgatcacacagcagcacacaggaaacagaacttgtgctagaagtggatggggccaggctgtgagcggaaaggctggtcccaaaggcctacaccagccagctaagcccaagtcctcttctgctgccagctctacgactgtgatgtgatccaggagccagacactggtttctttataaaatgggcctgttgccatggtttgatcatggtttgctcccatcgaaatgcaggctgaaatggaattttcagtgtaactgtgttgagataattagaagctgggcatgacaacatatgcctgtagttctagcacttaaagccctagggaggtgtaagcaagcagatctctgagctctaggccagcctggtctatagagcaagttccagaacagccagggctaaagatcattctaaatacataaaggccagtttagaatacagggagtcctgtagttcatacctgtaactccatcacttaagaggcagagaggtaggaagttcaaggccaacctgggctacatagagagttctaggccaacctagaccaacttgaagactttgtctcaaagagggggaaaaggtgattggatcatgagagctccatcgtcatgctaggttgggtgtagcttctgtaagagtgggctagttatcaggagagcaggttgctcggaagccagcagcttcgctgtccctgtgtctcttgagcaggtgtgtgtctttttcagagcctgtcctccctttctcccttactctcgggtggaacagcacacccttccctgcctggaagctgaaggcgagtgacatgatcttggactctatttacttctgcaattgaataaatttgttctttaaaaagttccctggtacagccgccctgtgatcccagctgcttaggctaaggttagaggattcaacttcaaggcctacttgggctacaaagttaatttgaggtttatcttttttttttttttttttttttttagatttatttatttatttattatatgtaagtacactgtagctgtcttcagacactccagaagagggaatcagatctcgtgatcggatggttgtgagccaccatgtggttgctgggatttgaactcctgaccttcggaagagcagtcgggtgctcttacccactgagccatctcaccagccccaatttgaggtttatcttgataatgtagtgagaaaaagacctgtatgccagagggtcctaggctcaacctccaataccaccaataacaaacaataggacgaataaacaaattatgcagattgaatatcttgttaataattaccaaaacagactaagacatctgtgaacctgtgtctggtgagtagaaatatctacttttgaatagtttgatttgaactatgaatgagctgatttgtgttttctgtgtatgtgatactaactggcttctgtagaagatgagtatataaatcttgagcacaagtatgaaaacttaagacactccccagcctcccataggtcatggtacctggcagcaacattaagatctctacagacagggacgggcaacttcttgacattgcaaaaggattttgtcatctacaaatgggtttgagccccactcacagctatcctgggacacacgccctcggggctatgggttggacgcacctataagccacttccacctgtgaaccatgaaccagctgaactggagctgagttgccttcaactgttttagcacttgcctgcctgaggcgtgaggacacaagttcaaggccagcttgggctaccttgggaaactcagtctcaacaaaaacttaacagactattggactaaaacagatgtttttcagctcctccggggtcatggaggttgtcactgacagaaggaagtgacttaggaaatgcccagagccttcgtaggacagggtgtagctccattatcggccctgtgagcaatttaaggaagaagtatcccttctctctggtttctctgtgagaaggagacaaaaagacgctctgtgccttctctgggtaaattttgagtcacatatacaccattgacatttgtattcaagcaaggtgctgaagggccaatgagctggtgagcatgtaagatcatgcgctgccaagcctgacagcttggagtccacatggcagagtgggagaaccagcccctgcaagttgtcttctgacttccatgtgtgcacctggttcttcacatgcacgtatacacacgtacacaataaattagcatgtttagtcacacagagaccatggtgctgtgacagtgagcttggggtcactaatccaaaagggccaatctgcagccaagtggtagctattgtcaaagtgactgtgactgtgtaggaccacaatatgccaccattagctcctagcccgactggtcatcagccatactgactggagcacaagaattcctttgcctctgtgggatccatgaattgtcactaacgctacagaactccctggaccagagcacgcttgttttaaaatatgggaatcaggcaagtgaggagcagccagtaagagcagggctgccttgggcacccagcccagcggcacctaagcatgaaggcaagagccactaccagacttgaaacctggtgggctgagtgagtgaggcagctcagggcagcttccatgtgctataggcaccaagagtcacagtgcaggtcccctcttttgcatatgcttctggagtggccagctagatgtcctggctggaagccctagtgatgagagtgtcaggacctggaagcctgatgcccgtcgttcacccttaggatggctactgagcattcctaaccaaacgggatgccctcctcctctgagcatgccctgtccctggccaggagcacatttcattcagctccactttgtgtgccagctctcccacttgtttataatgaagaacttcctcaagattccgtaaggttctcggatttatgctggagtgtgactcagatgcagttttgagttatatgtatgagcaagttcttatctgacataaattaccaacatgcagagcggtaggatgtcgcttccagagggaaagctgttagaagcttggctaaaattatatccatgcctttgcaaagattaatgaagatgacttttggaaaatctttctttgggtgagttacatataataaaagggacagatcattttagtaattaggttccctaaaatataggcttgggttttgatatataaaagaataattttgagagccttgaacaatggttcttgcctgtaatcccaacactcatgaggcaggaaaaccaggagttcagggccagctttagctacatcgcagctaaaggccagcctgggctatattagaccctgtcttaaaaacaaaagtcaaattataacaacaaacaccaagagaaattttggacagactgaggcaggcttgatacttgacactcggcagactgagggaagaaggtcttgagctagaagccaagatggtctcaaactcaaacgctgagaactggagaatggctcggggttaagagctcttctgctcttcctgctgttctagaggtccagagttcagttcccagcacccacatcgcacctccaacagtcgagatctgacacacttttctggcctctgtgagcacctgcacacactctgtacacacatgagatatgatctgatgtttattatatataaacataaaagcaaaattaaaaagcttaaaagatagcatggcaatgtagtaaaaattggcaaaaaggctaattttgtcttctcttgctttgcttctctctatattgtgtgacttgtaggtaaaggtagatagagttggtaggtattcacaactttcttgactgatgggacaggcaatctggaaagcttggggctgctttcttacttgtttgctgatctattattaacaagctagtgttgaagttatatgatccaatgtttattatgtatgaatataaatagggccttggttatctcagtggttcatctgagatcatttaatttgtttgcctaattttagagtttcttatcttctaccctattgcactctgccagtgcactataatttaaactgcatcacaattaaaaactcacctgagcttgggagatgtccctgtgaaggataaaaggcccagataaagatcatgtcccacagtttgtggcttagctgtgaccttgaagcagttagggggggtgtggacagtattgatgctgtcccttccctccactaatggacccttcctcgttctctggagtgtgtgtgggtagcatgtattttaaatactggctgtctccttggggctatcatttagaagatgaattttgtgtctgcaggtttgctttgccttttctggggtaaagttaaatttgcgccaaagttgttccttgttctccaaccctaggatctttggtcttgtattaggtgactctggctcccaagtgtcaatatatcagaaggggctaaactcagtaagtacaaaatcctgtttgtgtggcatttgtgggcaggtgaaattcagctacctgtgcgtacattttggaggtgagcatcagcagcagtggccgcagccctggcttcagctgcttttctctggggatgagcagggatctgagtgacaggcagttcccattgccagtgtagccacagggtaagagcatgctgcagtttctgctgtcagccctggcgccagccacactgaggactctcatcacttcctggggccaaaggatcaggtctgacctctggccagcccagcatccagccgagcacagagtgctggccttgaacccttccctggcactgtgattgggagcaagcacaatagtagctcctccagactttattattttgcaaaaggttaattgtagcttttaatctttcccaggattaaatggccctctttatagattgtggtttgtacttccagccaaacggggcttctgagtccagcagagaattgaagagaaacccctgacctttcctaaatgctgtcccaggtccagactgtagcccagacagctgctgcctatgactggtcattgtcccagtggtatgcacggtctccatttaaacagtcccaggttcagaaagaagcaaggcttatgtgacatctcagtggtgtgtgtggaacgacgacaggaggcccttggagtgcgacaccaacctgtgccggtgctctttgtgcctactcccatgcctataacaaaataaagctggagaaatatctcacccgctatgtttagggttaagaatgttagaatgggtgtgcagagggcagtggaggaggggcaacatgggggttgggaggcatgccactctgagcgctgtgtatctgactgctcaagtcacatgcagtctaacccagggtgtcagtcaagtaccgggagaatttgggtcagctcatggtaggaagaggtaattaggtttgtatgtggaaactgcattttgcaagggagacctggtttgacgtattgtggtatctcagaggcagactcgggggtcagactgagttgatttgggccagcatcttggtctaagccccaggcttgtctgccccaggttcccatgtaacatggcttcagcagcagttcctgtcgctccaggattcttattctcttactctgcagttttatgtcttttactttgattcttctccttgaggaattacagtgacggagtctcctccttgcaagtaattgttgagcttgttcctttgtgggtctccaggagtgccatggagttatgggctgggggcagcctgtttagctcctgagctccaaggatttcatttaaccctccgagctgttttcggagtcagacttcagtcgtatgctcggtcacgagacattgctgggactgaggtgggccttgttctccctgctctgtggagctggcagtttagtaaagcaatcaaaacaggtccagggcagagaaggcgtcagctttgctttgacctgaaggctgctaaggcactgcccagactattggccgtgtcatggggccatggttggaggccacacctcagtcagctagatctgaggccaggtcccagctgtaccagtctccatcaagaggcaggtcattcccctgttttgagctttgtttcgaatgtggtggtaggaaattggtgtggtaagccacatggtacacatgaagttctgggacacgataagagcctagataccaggtgctgttgtgagtactcattagtactttctcactgtgcttaagactgtccattcttactgtatgaattatgctccctgccttctgtcagcatggagaaatgttgtggtttacatagactatgagttgggatgaggaaagcaggaagctaggctgagcctctttacaggatggaaaagtggggggctgagggctgagcagcccccacggtgggtgtcgctggcaggtgttggggcctgggttggaacccgagctgccagattcttgggattcttgctgacactgcgggtggccagggcgtctatccacagtcttctacagagtcaaatgtgagcacgcacgtagatctcctaaagctagccaaggttgggaagctgtggactttagcctcaactagaataaaaggacaaaggcatttcaggaaggaggagatcaggagatgaaagggaagggaaaatgagcagaccatggcagctggacagctggggagatgaggatgggagggatgctgcctgggtcagactgggcagatgttggagcaggcgtcatggcctgggctccttgcctctgccactggagtagtaaggtttgatctgtgtagttcggcctcaaactcctttcctttgcattgctctggatcaggttgccctggtatttgtcagaacatggagtgtgacctgtatctgtcagagctgtcagcagaggctaactgcttactcatccctgaactttggtcctgctgagtggagccagagcccaggaggggcctgttcctcaggctcctgggctgagctcctgctctgtggctacccagaagcattgtggggaaggttggctttgtttaccatattacacaggaactgacctaggaagagaactgatctgccggtccttagagggctcaggataacaaaacctgtgcacagagactgttcagccagactgttcaaacaacctttggtgtgttgtctattttccaatctgaaaagcagagaaataagctaaaaacttgatagaagtttccctacagatgagtatgcatttaaagagaggaaagcatttggagaagtctctgcccagtgaccccagtggggttggttttgaagccacatagaaccgttgttgatagctgagcacaagagcgtgtgctcttggaacttgatagtgcaaatctaaatgctggagaggtgaagatggggagatctcaatttggaggccagactggtgtacataataactctctcaaaacactaaaggaaagaggaaacctgtcatcaaaatcctgtcatgtgaaatctaacaggcgtttacatgtctttagtcccagcactctggaggcagaagcaggaggagctctgggagttcaaggccagcctggtctgcagagttgagttctaggacagccagggctacatagagaaaccttgtttcaacccttactttcagaaaaaaagaaaagaaagaaattacttttctccctgctgagttgggaggaggtagagactcttgtgtcccagatgtacgtagtcccctctgtaacctgctgtcatagctaggcaaggcattgctgctggcgccataggggacattaattctgctttagaagagatgttggaggcctctcttgtccctcgaacatggagttcatgaagctgccatggccttaatctcccagccccttgttttatttgtgtccagttgtgacaaatctgcatatctcagggtggtggaggccctgtgctccgcaccaagtcagcctaattatggtcggtgccaacaagtaactgggagagtggagaggggaaaccccagctgtacagtggctaaggactgtggcaaggaatcccaggccaagggtgccatcagaagtacttcaagtgcaagaaatgaacaaatgttggctcgttaacaaaagagaaagtgtagagagaatgttctctgtccataatgtgattaaactggaagtcagtaacagatatcctaaaaattctcaaaattttgaaaatgaaacatacttctaaatagcttgtggaaagaaagttaggaaatgtttccaatttaatgagccaagaaatccagcatgtagcaagtttcatgggaatttagaaggaaatgtaggatttagaaggaaacttagcagtagtagaaatttatgttcaaacaaagaagcttttgaggaaagtacaaattactgccagggccaaagaaggatgtcaccacagattctccagacaatggagagaggggcacaaactcctgtagtgtggcgggaggcccagactgagactctccagcccacggaagagcagcaaggtggggggctggagagatgactcagcagttaagagcactgactgctcttctagaggtcctgagttcaattcccagcatccacatggtggctcacagccatctgtaatgggatccgatgccctcttctgatgtgtctgaagacagctacagtgtactcatataaatgaaataaataaatcttaaaaaaaaaaaaagaacagcaaggtgtggctgccagcctggccccgaggtgggggaaagcctgtgtaagaaaaaaagggttgggagagatagagcaggcatctagcatcttctgatgtttatccgactatataacctgacctggacacggcaaacccacgcacaggtacacaaacccaaagattatagtgaaatactacaaagctgagaacttagctgaaataagttcttcaaaataccccttggtttaaaagttcttaagaacaaatacattcttaaatatgtccgtcagtggtggtgcactaagatatctttccatccccagcctaacccattttatgatgcttattaatactaaaaggtattatctgaaaactagattatttaccatcataaatttagaaaaacattagcaaatcaaattgaacaatgtagaaaaaagatttagggttcagggtaaaccttcagcagtagagaactattctgttctgtatcctatccccaacaacacacacacacacacacacacacacacacacacacacacacacacacacacacacacgagtgggccagtcagtgttggcacacacatttttaatcctagcacttgggaggcagaagtaggtggatgagttcaaggccagcctggtgtacagggtgagttctagaacagccagggccacacagagaaaccctgtttctaaacaagcaaataaaaaatagggtggtggagatggctcagtaagtagaattcgtacagcacaagcaggaggacccatatctcccccatctgtgtaaaacagtgctcatcatggaagcgcatttctacagctcagtgctgggacccagagatggacagatcccatctccatgccattctagatgaacagcagattccaggttcagcaagagacagtgtctcaaaagtatgaaatgaagaagtggctgaaagctagctacaccccaatcttacactcactcaggcaggcaggcaggcgggtgggcgggcggagggagggggagagagagagagagaaaaaaaagtttggttggtttagcttttctttttctttttctttttcttttttttttttttgattttttttttaatgaggtattttcttcatttacatttccaatgctatcccaaaagtcccccatgccctcccccacccactcccctacccacccactcccacttcttggccctggcgttcccctgtactgaggcatgtaaagtttgcatgaccaatgggcctctctttctactgatggccgactaggccatcttctgatacatatgcagctagagacacgagctccggggggtactggttagttcatattgttgttcctcctatagggttacagacctcttcggctccttgggtattttctctagctcctccattgggggccctgtgatccatccaatagctgactgtgagcatccacttctgtgtttgctagtccccggaatagtctggtttagcttttcaagacagggtttctctgtgtaacagagccctggctgttctgaaattcaccctgtagacctttctgggctcacagagacctgcctgtctctgcctcctgagtgctaggattaaaggtgtgcgtacctgccttgcctaagaatttattttaatggtaaattagtgttcatgatggtgaaacaatctgatgtgtgatcttcatccctgagcccctcccggccaccatcgaagcagtgaggtgcgctgcacttgctgccacaagagccctggagttcagaatgagggatctgtttaaacaaaagtgttttcactagcctagaagtgttttgccagttccctttgagcactgagttcttagcactgcagtctagatgggccttcaactagagcagttctcttgccttgaggcctgagtgccaaccgaggtagacagttgcagcctccaaagcagaaaactaatgtaatgctcctgggtgccgagaataacaaaaatcctctgggacgacaaatcagaccacgtgaagccttgacattcgggtgtggtctcagtcagcagcacccagcttctgtctggtactcctaacattgaagttcatggaaggccattcttttcaaggatttttgtaaaccactgcagccagataggtgagataggaggaaaggcttctgattgtacatcacaggctatgtcggctgagctatgctttcatcatagcacccatcagtgccatttgagaaggctttacacttggcacaggtatttccaccccagctgatgctccgacagctgatctgcatccatccttccgagttggagactgcccgtgcttctcgaatggatcgttgctggttcattttcagaggctagactgtcgcccttcccatgagcactgctcatccagtaactgggtgggcacatgctgctcgtggtcagtaataaggggaggatggcctcctgctcatgcagagttgtgtgactcttgagtggttcaaagcctcaccccacacacagacgggatgtgtttggagccttgtactgagcgnnnnnnnnnnnnnnnnnnnnnnnnntaggtgctggggtagaactcagggcctcatgcatgcagacaagtgctctactgttgagctacctccagctcctagactcctttaaaattttcatgtcaattcctggggctggagagatggctcagtggctaagagcacttgtgtttacagaggacccagcttggttcccagcgctcacataggagttcacaatcattttttgtgcctccttttgacgtccctgggcaccagacatgtaagtgacatacatgcatgcaggcatgacactcgggcattaaaaaaacgttaaaccttaaaaaaaaaaaaaaaccctttgtaatcaatcctagcattttctagcatgcagattgggtgcacatcatgataatagatggacaaacgagagggttctgaggagtcctcattctcagaggctcaggtcagcaccagtgagagactcaagtatttaccgtggaaatggcattccccattctaggtgtttcaggtactcacctgcccattgcaaagtgagccatttaacacgccttatggagttcctaagctgtttcagtgattcacaaagtctgagaaaatgctttatggcaggcaaagtgttaagtgataatactgattgcattagtacattgttacattagtacagtctgtttgctgttgtgttgttttgttagcatatattagcatacgttatcttatcaaatgaagggttttattgtttccatgtgtatgtgtgatgtattttattatgttatgccttctgtgtgttgtttgtgtacttctgcaggtataaatgctatttttgaggcctatgtgtaagactgggcctggtgacaggcctataattgccactactgaggaggccaaagctagaagagtcaaaagttcaaggttagctctgagcaagttaagaagaccctgtctcaaaaaaaggagaagtaggggggtcggggggggggggggagtggcttagtgtccagagcagttgctgctccccagaggcccagcgttcaggtcccagcatcaatgcacgcacctcacagcttcctgtttccccagagtgaggatgccatttcctggtttttgtaagcacacacatacatgtgtacatacttacacacacacacacttacataaaagtaaaacaaatcaaggctggagaaatggcttagcagctaagaacatttattgttcttgaagaggacccaggtttggttcccagcgccttcatggtggtatgcaaccatccttaactccattccatgagatatgactccctcttctgacctccttgggcaccaggcatgtacatggtgcagattagatagatagatagatagatagatagatagatagatagatggactccctcttctgacctccttgggcaccaggcatgtacatggtgcagattagatagatagatagatagatagatagatagatggtgcagattagatagatagatagatagatagatagatagatagatggatggatggatgggtggatggataggtagatgcaccaaaacactcataaagtaagtctttaaaacttaaaaacaagataaaacaaaaaccaagccaccgtatgactatatttgtacccatttgaggattagtcagtccttggctcacaactatactcgtttaaattactgtaatagggggctggagagatggctcagtggttaagagcactgactgctctttcagaggtcctgaattcaattcgcagcaaccacatggtggctcacaaccatctataatgggacatgttgccctcttctggtgtgtctgaagacagcaacagtgtactcatacataaaataaattactgtaataacggagctgtgttcattgcaccagtttctttatttgctgcctagctgttattcatctgctctgcactgtatgattttcatgaggtacgagttaccatctcattgaaattggctagtaagttttctgagtcttggatgaatggtaacaggaattaatgtgatgtcaaggattgtaggctgaagtcagcagaaatcgggctaatttaaaaaaacaaactggtgctggtacagtggcttggtgggtgcttgctgccaagctggacaactgagttcattcctgagtcacacatggtagaaggagctctgccttcccctgcaggttgtcttctagcctccataggcacactgcagcctgcatgtaactaatattcagcacacatgtgataaacaggcatcacatatataataaacaaacaaatacatcagtgtaacagcaccaggccgggagccaggcatgatgacacacaccagtaaccacatcactcaggctgcgggggtggggggtgggggnnnnnnnnnnnnnnnnnnnnnnnnnnnnnnnnnnnnnnnnnnnnnnnnnnnnnnnnnnnnnnnnnnnnnnnnnnnnnnnnnnnnnnnnnnnnnnnnnnnnnnnnnnnnnnnnnnnnnnnnnnnnnnnnnnnnnnnnnnnnnnnnnnnnnnnnnnnnnnnnnnnnnnnnnnnnnnnnnnnnnnnnnnnnnnnnnnnnnnnnnnnnnnnnnnnnnnnnnnnnnnnnnnnnnnnnnnnnnnnnnnnnnnnnnnnnnnnnnnnnnnnnnnnnnnnnnnnnnnnnnnnnnnnnnnnnnnnnnnnnnnnnnnnnnnnnnnnnnnnnnnnnnnnnnnnnnnnnnnnnnnnnnnnnnnnnnnnnnnnnnnnnnnnnnnnnnnnnnnnnnnnnnnnnnnnnnnnnnnnnnnnnnnnnnnnnnnnnnnnnnnnnnnnnnnnnnnnnnnnnnnnnnnnnnnnnnnnnnnnnnnnnnnnnnnnnnnnnnnnnnnnnnctgatagccaggattcgctcttactaatagaggcctttctccaccagggaatggatgaatgagatttacaactatgatccagaaacttaccacgcgactttgacgcactcagtctttgtccggctcgagggtggaaccttaagactttcaaagcccaacaaaaacatatccaggagggcaagctacaatgagacaaagccagaggtcacctacatcagccagaaaatctatgacctctcagacagcaaggtaagtctgggacattttggaagcagagcccgatgactgggaagcatttggagtcttgattgctgactacaccccaccccaccccaccccaccccacggtgctgcttaaggagcactagaccttagggcagcatctctccaagacactgaaccacaaggcaacttttgaaatgcaggttgtggagcctgagagcctggatttcttctccccacccccttccccaaagacagactttccctatgtagccctggctgtcctagaactcactctaaagaccaggctggcctcacattcacagagatctgcctgcctctgccttctgagtgatgagatcaaaggtgtgcaccattgcctgctggccgaacctggacttctctgagcttccaaggtgagctctgtgctgcagccccggggaccacactccaggagcaagggttctttcttggcactcagaatctcgcctttaaaagcttgtacattcacagagccagttccatccccagcactaacgccaggtgtgctggcattcatctgtgatttcaggaggccaaagcaagaggagcactgtggtttctaggccagcctgggctacatagtaagaactgtttcaacctgccccttccacacgtaccttgcccccccccaaaaaagaaagaaagaaaactggattttcagtgtaaatgctatgtatatgttgccaagtattgataaagctatgtaaaatataaaaagtgtgcacatgccggcacattttgataaagcgtcatttgtatttttgtggagatataaattgttattccgcagacatggtgtcttggttagggttttactgctgtgagcagacaccatgaccacagaaacttttttttttaagaatttacaacatttttttttaagatttatttattttatatatgacactgtagctgtcttcagacactccagaagaggacattggcacagcaactcttataaggacaatatttaattggggctggctgacaggttcagaggttcagtccattatcatcaaggcgggagcatggcagcatccaggcaggcatggtgtaggaggagctgagagctctacatcttcatctggaggctgctagcagaatactgacttccaaacagctagaatgagggtcttaaaacccacacccacagtgacacacctactccaacggggccacaccttctaatagtgccactctctgggccgagcatagacaaacgatgacacatggtgcctgttctcgtagctcttgtgagtggtctttcactctcttcacagtgatggcagcctgtagattcgtccttgaggtgattccagcactgacctgcactgtgtctagactgagagatgcctggtcccagcttaagcttcacctaacgttagggtcataactcagttgttatccaagcctatttgatgataaccacttaactaaccactactctgtgactgctgcctgagagtggaacacatccagggctcttaaatgtgcacacttaggaattttgagtaatagccagccatctctgaaatgtatcccatgttctacagtcagatcatgacagatggtagagttattaccttccaccatttcagtcaaggccatgtgacagcctgacctttctcatacatgtgatactgatgcacaggtagacgctctttagtatgtaacgtcatctgcctctctccgtagatttatcttgtacctaaaagcttggctcgaaagcgaatctggaataagaagtaccccatttgcattgaacttggtcggcaagatgactttatgtctaaggcgcagtctgataaggaagctactgaggagaagccgcctcctgagaaagagctgccgagcgaagacctcaagaagccaccccagcctcaagaggggacgaagtctagccagcgagacccaatactgtatctgtttgggagaacgggccgagagaaagaggagtggttcaggcggttcatcctggcctcgaggctgaagtcagagctcaggaagccggcgggtgtttctggaagtaaatcaggtaatagcatttgtgctgagtgtgcacctgtttaaagggtttgtgggaggattcagagagtggctggcaggcaggcagacaggaagccggcctttaggtcattattctctgcaacctcaaatgtgtggacttttacagtaaccacccacccccattctttctaagtcatttttccagtgatagtccatttgcaggtatatgtggtgagcttgtggtgacaccctgggactctcttttcttggcactctcataaaagcagctccaggagatcatacatagtctgaagatagtggtcagagcataacgtggtggcacgtacctttaatctcaggatagtggcagtgacaggcagatctctgtgagtttgcagtcagcctggtgtacgcacctgagtgctagcattagaggcatgtgctaccatgcccagctgtatctggttgtttttaatggtttgcactcaatgcacaactaagtcagtggtaagagccgggactgtgggaggccttggtacctacttcacactgaaatcaagcaagcctccactcttacactcatagcaataccttggttaactagggctgctcctttttttctctacactatgagtaaagatggaacttagtacagtgaggaaggctgcactgtatttcaaagcggcctgaacaacaaggcccagctgtcatcagctgtgaaggtgacattggtgatgaatctccaggaccgggcacctctgtaagcaccgcatgagagaagtcttgctggtcgactcaagcctgtcatctccctcagggatgctgctgcttagagacataacaacacaggtttctccggcaactccctgtgcaggttctggctctccaggaggcccagctaagggtggagattccaaatctctagccctcagtttctttctgcagtcagaattggctgcagaacctggtgagagcgggaagcccggagcgcccggcacaattccagagctacagagtggagcgagacagttcctatgctgtcccaccctaagctgggaagctgccccatgggcagggaaccgcagccaggccacagtcaggttctcaccctgtccttgaactgggggaggggtgctcttggctctctttaaattgttgtttgattatttattaattaaaatctggagtttatttggattgtactgcattttctaagttcctctacaaaaaaaaggtggggggggcttggttatcattgtcctgacatttaaagataatggtaaaccttgaagtggtttgagaatgatgaaggattataaaaagtttgaattctaggtaaaacctcgggtagtcagtcctagaaataacctagctaaaccactaagttaaagtagctttcccaagtgtctgtgcgaccaggagagagctgcaggtcaggcagctggaagcaagcgacaccagtggccaggttggttttgacctctgttcttaccttgtctcacagtaaacctgagtgtcagatacttcatgcttaaaactcaattgcaacaggataaacggaatctgggtcacactcgaggtacttgacggtcaggcttcgcctttccctccacccacacttcctgtccctctgtgtgtcttctctggggactcccctgaatcttgcttcttgatattctgttctctaatctggatccttcttctgccagcgcaaggaaaatggtggctagcacaggtgttggtggcgggatgtcagcgcagggtcaacagctcttgaccatgcttgttacagtgactgggacttaccttcccgtgtgtcttacttcaagggcaaggattcagcttgttcccatgggtagcgtggagcaggtccatagaagatgtcttatgactgcttcatgtgagatggcatctttgcagtgccctgagctgtccatgaacagttcgtggtcttccttcccactctccctttacctgtgagcattcacagctccaccctgactgttacgtacactggggctgtgttttatgttttcctaaaagattactgggagcaaagaaaaatactgcactaaccccattccagaattaccttggagaacaataaaaaccattctaaaagtcacctattgttagaacagaagatatttttcagggtgaggttttttaatcatttgttagcattttagctgttttcctgcttaaccatgggcatttagtttatccctgcttgttttattgtttgcattaatagctatcgtttcttacccagggcttctgcccgcacacagcaggcacagcagtccctcggggcacctgagccacagccgcagcagcagcaaaggcagcgtggaggaaatgatgtcccagccaaagcagaaggaactggtgggcagcgtgcgacagaagatgctcctagactacagtgtgtacatgggcaggtgtgtgccccaggacaaccgaagcccccacaggagccccgtgcagagtgcagagagcagccccacagcttcgaagaaggtaaagctgccggcctggggcctctctgttcttacattcaccttcatgtgtgagggatgcatgcaggccctccctgtttcaggctataaagacatggcgatgagctaggcaccgaaaggcatgtgttgtctcggaactcatgttcaggggcctggcacaaagctggcattgggtggcaggaagacttgaagctgagtaaaggcaaatgaggaaggcttctactgtgtgttgtccaggtctcctggaggaggtaattgatgagccccagtgatacatggtagaacattctagaagggcgggtcccactgtctacaaaggtcccacagcaggaatcagttgggatactcaaaggtgagcataaggaaggacaattagagagggaggcagcagctgtggaggctcagtggggcctcttgagacgtgttctgagggagctggcaggtcacacagggtttgagcagggagagccatggttggaaggctagagcgtaagtgactgcagggaggctgcaagaggaagaaggagtggttgggaagcgctggcggtggctgagattccggtgatagcgggtgagagccggtgatagcgggtgagagccgggagaggaactgactttgctgatggacagatgtgggtgtgaggacagatgtgcacctctgcagggggctgtaggtaggaaggtcccagtcactggctcaacacctcagctgtccttggctttgaagatttgtcatgagatccagtccagagacctctaatacaagcctccactgtgccccaccattttgagatgtagccgctgcctgcacagcccccagcctcttcccgtggagagtcaaccatgtttgacctcttgctcgggccagatttctacctcttatgaggaccatgtggtgtctacctctcgtgtctttggctgcccgtgctttacctgctctgttgattctcctctgtgtggaggtgaccgatgacctgacccacgtgaccttgttagcttgacgaccgaccgaccaaccaactgaccaactgcgtgtctgtctctggtgaaagcagacttccctctaggctagggcaggttctgtcagctcctcaagaagtgcccagtttgcctggatcttctccttcctccccacattccctttatcccgggacatcggttgtctggttctcatcagacccaagaggacctcagagggagagctgtgcactacacagagagtctgatacaaatccttctgaatggcttcctcacagtcaaaagtggtttgctagtggggtgcaggtgttcgtcatccatcacacacagcccccaaggtggttgcttcagacgacagtcactacttattttcctcgcatatttgtaatttcaccatgggtagcacatgaggacttgtggctgccctatacagggtcacttggggaggctgcactttaggctggaggatgatccactgctgtgctggtttgaataggtttggccctcacagactcatgtgtttgaaggcttggcccatggggagtagcactattaagaggtgtggcctttttggaggaagtgtgtcattgtgggcacaggctttgaagtctcatgtgctcatactatgctcagtgtgatacacagtcacctgctgcctggagaccaagatgtagaaccatgtcttcctgcatgctgccatgcttccaccatgatgttgatagactgaacctctgaacctgtaagccagccccagttagatgctgtcctgtataagagttgctgtgatcatagtgtaactaaaacagttgccaaggggaagtgcctgtcttggagggcagacagatgctggtggttgagtggagttgagccagcactgaaagctggaggcctcaggtcttcctgcaggcaagcatccctagggataggtagagggcaggtgtactggtgccctccaccaggacagtcagggagcctcccacatctgctccagcagaagggcaagggctttgcccttcccaaggagaagtatgttaggtggaaagtgagctctgccatgatgctctgtactgctcatctacaagccagcagaactgctgccgtgctaacttagattagttttgtgatgtgagcaaatggtccccaccctataagctactaacatggttccaaaaatcagaaaacatttgttttcccaatgtctctgctgccctcacccacttccagaccagcaagccctgactgagcctgtgatgtgcttgctgtgtgtgcatcatctgctcttctggtttactcggagtttcacgtatgctgtggatgttctttgagcattgctggcccattcacaaatgctttctggaaactactccatgttcatagaattcactctcatctttttaaacagatgcagagacttcaatgtgtagatgttctatagttttaagatttccccaatactttgcaattcctggaggtgccaggatgaatcacgtgtgagcgtgctttcgtgttgttggggtgtcttcagtgcagaaatcttggaagcaggattagtaggtcagagtgtgaatgcacatgtgctttggttagagaccgccatgctccgttcctggtagctgttgcaccaatgttcactcctaccaggaagatccggcactgcctgattctctgacatcaccttttggggattgtcagtgttcatgccttgtgccaaagacaggacatttcctaaagtccatattacctcaatgtgagcccaaaagaggggccttaaaggggtcagagacacagaagaactttgacattcccttagcttgttccattgtgtttcagacttggccaccaccaatatgttcacccaggttcacaggtcccctctttcatagaagggggcttgggacactttgttctccttacccccacttgctgccatcttgccttctcccttttacagaccataatagtgcaagcatttcttctgtccccgagagtagggctcccgggtgttctgaccacgccacacgttcctttccctttaagttgggttcagtgctagctgaggtgaataggccagtgttaagtctctggttctcggcctttgaactaacattaaaaatacccagcatctaattagtgaacccagactaccccgctgtgtgaaacagttcaaaacattgctggcagttgttcttacccataataattaaaaacacgatcagaagattcagcatagaaacaactttgaagctattaaactgtatttgaattataaaatatcaccagtttctagatgtttaatgtccaattttaggtgattttagtcataattcagaaaattcttttcaaatgtctccaagtgggatgatattacttctggtttatgggtgtgtcaggagggggcaacctgcatgctggctgcacacgtgctccagacttgaggccaggaagttatgggttctgcgtgccctggaggtgtcatctgggagagaagcctgccagggcagcagcgtgtgcccatcctccaggcgcgaggctgtggccctcagggtgtgtaggtatttccctttcttttcatgggaggactgagggaatgtaagacactgtaggatgctctggggtggagccctgttgtcactgtcactcggggttgtgggttctatttttgacatagatctgtgagctggattacaggacagagccatctgtgttccagggcataagaatgatatgaacaagaatcggttagaaatcaggaaccctgaggctgtcagaggtcgtccccaaggctgccctatttcctcttcaaactgtaaactggaaaggggtggtggggaatgaagcttattataagttaaaaaaaaaaaaagaagaagcaatatgtccaatttaaaaataaaactgtaaaggacacaggaatgctgagacgaatcagtaagggaagacgactcttcatttaaaccttcttcacattcacatgtctgtggtgagtgcattccattcctgtgtgtgcactcgtggacatgcccctgtgcccatgctggcgaagtgggaggcagttctctttttgcactgtgtgggtcctggggattaaactcaggtcatagcagggcatggtgacacacacctttaatcccagcattatggaggcagaggcaggtagatctttgtgagttcgaggccatcctggtctacatagtgtactccaagacagccagggccacaagcaaaccagtactcactgggcttggtggcaagtacctttacccactgagtcatctccctggcctaagaatagtctttaataaatgatgtgggaatagctaactatccatgcagaggaaagatgctgagcctgagcctcacgctccatgcagaattagctcgtgtgctcacagacctcaaggtaaacactaagctatacagcacatagcagaagtcactcttagactgagttaggggaaagctcctgagcagggcatggggtgcacatcagaaacttagcacacaggaaactgataaaatatgagttcaagcctgcccaaaagaatacaaggaagtagcctggtctacaaagtgagttccaggacagccagggctatacagagaaaccctgacttgaaaaaccaaaaaaaaaaaaaaaaaaaaaagaatacgaggaagcaaaaagagaaaaactaaagctcctacaaagacaacagaagcaaacatccaaaggaaagtaaactaggttcacctaagtcaagccacggtgccataaaaagtgccatagagagcgttgaaagcgggcaagccagatggcataggtagaggggctgctaccaagcctgatgacccaggttcagtcccagaacccacatggtggagaaaacccactcccatacactaaatacaaatcaacaaaatatagtaaaagcagattttcaagttaaaaataaaaagtaggagatggttcagtggtcaagagcacacactgctcttccagaggacctgggtttgattcccagcacccacatggtgcctcacaactgcttgtaactccagcttcaaaaggatctgacattctcttctggtctccctaggcactccacacatgtgccacacacttacacagacacacatagatgcaaaaaaatgaaaataatcaaaataaatctctagggctggcgagatggctcagtggttaagagcactgattgctcttccgaaggccctgagttcaaatcccaacaaccacatggtgtctcacaactatttgtaatgagttctgacgccctcttctggtgcgtctgaagacagctacagtgttcttatttaattaataataaataaaatctttgggctggagcgagcagagactgagcgagtggggttgactgaagcaagcagatgtcctaaaattcaaaaatcccaacaaccacatgaaggctcacaaccatctgtacagctacagtatactcactagatagatagattgatagatcttttttttttttttaaatctttaaaaaatagtccacagagtaggagaaaacatttgtaaattatttctcttatattggtctaatactcaaactatataaaggaatgttatgactcaatagtaaggatataaatagttgaattaggaaatacgtaaatgcagagggagatgacccagtcagcaaatgtcggctttacgaagatctgggttcagattccccagcacccatgcagagtcaggcatgctgatgttcatctgaaattcccaagctaggcaggcagagcgagggagatccctgcagcccagtggccagacagcttagtttagttaatacggttagggtctgtgagaccctgtcaagaagatggtctgagatagagagctgagcagttacaagtgcacactgcttttgctcccgtatcaggcagatcacaccggtctaaatgctagctctggggatctcatgcaattcttaggctttggtcagtgactgcactcgtgtgcttacccaccccaccccctcaccataagaaataaaactttataaactggtaatctctctgggctcatacgtacacacagtaagggaaaaggcaagtgtgacagggactggagtgacaactcagtaggtaagggcttgctggcatggtgacatgcatttaactcccagataagccagccaggtatgatggtgcgcgcttgtgatccagcactgaggagacggagacgggtggattctgagctccctgactagccagtctggcctacgcggtgtgtctcaagtcctagtgagagaccctgtctcaaaaaacaaggtgggcagcctttaaacacacgcgcgcgcgcgcgcgcgcacacacacacacacacacacacacacacacacacacttttaaaaaaatagcaaaaatcttgttccagaacagccaggactattacacaaagtaaccctgtctggaggatgggtggggaatcttgaaagtattgctgcattggtcaggcatggcgccacagcctgtaatcctagcacttagaagatggaagcaagagaatcataagtcaaggaatccaaggctagcccaatctacaggagactatcttataaaaccagttttgggggtggtggaagggaactagacacagtctcactatgtggccggggctgacctgggacttactataaagactaggctggcttctaactcacaaatgcagagattaaaggcacatgctttttttaaaaatatttttaaaagatttatttatttattatatgtaagtatactgtagctgtcttcagacactccagaagagagcatcagatctcattacggatggttgtgagccactatatggttgctgggaattgaactcaggacctttggaagagcagtcggtgctcttaactgctgagccatctctccagcccccggcacatgcttttattattatttcttaattattggtacgctggaaaaagactgaaactgggctggcagtgcgagtctgtagtcctagttctcaagagcctgaggtgggattgccagtttgaagtcatctgtggttatacagtgagaccatgtctttaaagggggggcagctaggcttaaagaaaatacagtgaaatgattctgttctagctgggaagagagaacttacgtgtgttctgtaatgaatatgcattgtttttcaaatctggggaacaagcacacaaatgtgaagaaagtgccctgctgtctctgctcttggaccaggccaccacagctgccaccttgacacagcagccatgtgagaccaaactcaggagcagttgtttcaatctctcttatagcagaaaggcatccctggcctcccacagaattgagtccgtccatgctgcgttggagataagctcattttaaatacagtcctccccaggagctagatagatagacagtgtctgcggatggccttgcttcagctccggaacattggcttccccaaacattgcctttggaagcaggcttgggaggctacccttcctccccgtgtggatggaggaggcggcacaatgaatattctccgcacatttattcttcagctttaaattttgatgacagtcactggaaatgcatcctagcagcctgtggaggccagattctgttcataaacccttttgatgcattgtctgtgttctgcagctctgtgtttgtctttgttccctgtgccccagtgcagagcctgccttagatacagggactgggaaaaggaaaagcaacatgcttgtcagttccttgagacgtcttaccgcatcctgtgtcactggcttggacgtcattgtgaaatagtctttgtttcttgctgtgagagagaggggggggtgtttcctgtaaaaaatgaacattttaagaaagactgataaagggtacacgtgctctcctgagaaaggaagaggtggcctcttctgtgtagcctacaagacaaaaagtggtgagagtctgacgtgggcagtggtttggctcagcccaagtagcctgggggccattttcttcagacacgtgatatttcttcagtagtctgtgcagatgatctgatggggcttgaggagtcctgaacctgttaccctgagcctgaagatgacagtgcacagtgtgcaggagcatggggtaggagtgcaaacacatgtccacacacgtgtacacacacttgtggtacaagaaatggctgacgccaacttctatcctttcatccggaagtcggtggtggaaaatatctccgtcaatgtgcaggacctgacagcagcaggggtagagtcaggcagagccacctcttctaaaatggaaaagttaatatgtagcaattctaaacaaaggtgttaatttttaatgggtgtgcatgtgtgggtgtctgtgtgagtgaatgcggggtgtgtggggtgcctgtggaggtcagaagagggtgtcatctggtgttgatggtggttctcagccaccagtgggtgctgagaactgaagtgtatcctccggagtgcaatagtgctcttagccacctagctgctcttccagcctgtttgtttttaataagtcactgacattctaaggaagactttggaaatcatctagatttgaaggagtctaaaacaggtcctagactctgatgtgttactggaaaatggaagtgagccccccattccctagctcccagagaaagagctggcacagctatgacatgacattgggggctgagcagtctgctggcttcacatcagagtctgtgcatggctcacatagatcagaccctaagtccaggcttcagatctgctacgcgacataagccgtaggggtcttacaaccaggcagaccttcaaggttcgattcttggtacctagtgaccagtgtgccatgccactggcctgggcacatagccagatgaaccaattggctacctagagcaagccacggtggcacttatgcacaagcacaggcatgaagtagaagagagtggatggtctaaagtcataacatgtggagcccagatgtgtttacgtagatcacaaagggaaagaagtgtgagcagtcattagacttctgcatttctagatcttttcatctttccttctgtctgttagcttttctatataaggctgcagtctaattcagatgtcccaacaagtgtctgtctcattggctggatgttggtgcctgtcctccctcatgacagagtaagcagagaaccagaatcaggcttcagtcatgaactagggattgttccttcctcagatggaagcaggattcccctcttcctggggtattgtgatgctcagatatggtaatctttaggagtcacctatatatctatgtgtgtctatggtcagcagcactaatcctgccacccttgtaagtactgaacccaccagcacgtgctcgccaccaaacctcacggtcccctcatagttgctgctgctgctcctcctccatgcccacctctgaccctcaataggccagattccatagtctggcagctaacccaggaagttagagacaagttggctcacccactggtcacagcagatgtttcagacagattgtgtgtgggtcaagcggtgggcattggagtatttgatgggctggggttggggccaacatctgtcctgagagccatgttctcatccagccctgtggttcttacctcctctgcatcacatgctgagaggggagggctttggaagctcctgactctgctaagctgaggcaagacaatgcaagtcagtaagtgtgagcaccttgcagggatcacttgagtcctggccattgggaaactcattcctcctggaagaggataggcttgacagtcgcaggctcaagcctgacctgggagaaagagaagcaggctttgacagataactctcggacactgaattagtagggaggggagcgagggcagggcaggtcttctgagctagggctgtgcagtggtagctggatcatgggaggacaaggcagaagcagaaaggagacaaagagaaggtgcagctgtgacagccgatcttgtctctccttttcttgctcaccagcacggtgtggggcttgtaatttataggaaagatggacaagtcatgcgttccgtttctataggaggggcctctggaggctttatggaaataagcacctgtctgaatctccagttttctgacagctaattttggtctcttttcttttgccagttgccagaggccccaccctctgaggaggaagaacaggaagcctgggtgaatgctttgcttggaagaatattttgggacttcttgggcgagaaatactggtctgatgtggtgtcgaagaaaatccagatgaaactcagcaaaattaaggtatcagttttcacacgagaggcctctgatccccctccacttgtggatgttctgtcccctcaggtcttaagtgaacacacaccgtgatctaagagtaccacacatgcgtatctgacctggatcacagactggccttgatctgtaactatctagggactgagcccgctatggtgtttgcctttctactgttgctgtgtcattatcctctccagtggtcctcggagcttgttgaggagaaaggagctcctgtggctcgtttgggtctgagttagaaacagtttacacttggcttagcttaaacttggcttagcttccaggtgggaattttgaactccatgggaccctatttccagctgttctctttccctcagctaggacagttttgttttttttttttgttttttggggttttttgttttgttttgtttttttcaagacagggtttctctgtatagccctggctgtcctggaactcactctgtagaccaggctggcctcgaactcagaagtccgcctgcctctgcccccccaagtgctgggattaaaggcgtgcgccaccactgcctggccagcgagggcagttaaatgtgtctgccactggcccttgctttgggccagacatctctttgtgttgggctctctctttgctgaaggaacagtcctgatgctagctaacccaggcccgcttggaagtgtgtttaaaatgcctaaggacttcatgtgactgtcattaaaggaaatgtttgccagtcggagacctgtagaagttcccgagaagcaagcctttggcctgctccaggtccagccactttgagcactaaggccccactgagagtcctgtgctcagtagcttacatcagaggctctttggggctatagattttttcaagaagcagaaacttgtggatccttttcctagaagaatacacgctgatgtaaaactttgcacgtgctcttggggagctcaaggcctcccggtggagaggacttcagactaaggtaaacttaggcgtgaagaaagaggtggacacagagccttgattttggtccttcctctggacaaaacagaatatctgacaagctctgtgtgccttctacagaccagtctttgcccttccccggctctctggtaagaagagaggctgccctctgacctgaggaaactttagagtaaggctttgggaggccctgtgacaatgttgactagttagtgttttcagggtaggttaagggttgccctggctcctgctagccattggaaagtgtccctctctcttggcagatgagatgtcagcagggaacttgacctctttgtctccttgggaagtctctggtcaaggcaaatagaagggctgccctttctcctttctcagacactggagggctgtgcttccctggagcaagagaacagggcacgcctgggttccagatgaacgctcaccagttccagaagcctgacccttcaaactaagagtgggaggtcctggtgcctcgtccccgggggagtgatgatgggggatgacaaaggttcccttagtcccgaggaagtctagggacggtttctgcttccatcgctcaggaacgtgcttgctgttcaccagcttaagctccttctgccttttctggtcagaaggactgaggttagccgtgcttgaggtccagcggcacccaggtcaagcttggtggctttgtccatctctcactgctcctcctcgaatccctgcccacttgtgatctgctgcgctgtggtgtgccctggaggcagaggagacacaggaacaaagggcagaaggataataccacgttcctccatggttgcacttgaggttcatgtcagccagaggtgcatctggtatccagacgtgggtttaaagcaagcagtgtttctgcctcgtcaggatgctcatgccctccagcagatgctgtcgttgcacacagcctgatgctcatccacagatgagaacatatcccacacacctgaaggttccggccccagttgagttgacttaggagggtgaggaacgtgacccctgggtttgtgtctcctgtgggatcctgtaggtttctggttgactggcacagaggagggactctcttgctttcttcagcatttgaaaaaggctaacctagggggaatggcatgaggagaggttagttgtgatgtgctagcttcctggggtgcagtagacccagaaggctctgctggatagctccttatcaagactcacaggtaactagaggctcctcaccaggctgcctcctcagttgcagacaacaactctcaggtgcagacaacaagcactgtggcagacttgcccagccaagtgacattttgtagatggtagatatgtcacccacatttatgttgacgctttttggggggagggtgtcttcagacagggagtaccaatctagacaaatgtaactgaggactagcccttggtaaatagtagctcaggtgatagcgtgtttgcctaccgtgcaggatgccctgggctcactcatggtggcaccggtgtgtcaccccagagtttggaaggtagtggcaggaaacagggatgcttgagacctatggagcgagtttgagcctagccggggctacatgagactctgtctcaaacaacattggtcgcatgcattgttcttggatgcctataaaaaagcagaggtgaagctgtccggcgggtgaatcctgacaggtcccactttctactgagagccaactgcagagatccactgtgtaaacagcagagtcacccctgaccaggtgcaaccccacagtgtgttaaacttaaaaaaaaactaattttttacaaattaatctactattcaactagataaatataacttagacaattctggaagaaaagaaaagaaggacttataaactataaagctgtgtcatagctaggtgtggtgatgggtgattgtcatctcaacactcaggaggctgaagcaggaggaacatcataagccctgggctacacagtgagaccctgtgtgtgtgtgtgtgtgtggtggagtagggaggagacagacagacagacagacagacagagtcagacagagagttataaagctacatcggtaggcggactttggtgctggtagataacattatagtgtagactccagtgtggtgggaagctcatattcaaagctgatggtccagatcagggaaagcatcggttagttgctggatgataggcggggtaaccagccatttggaaaaaatactgaacccctacttcagatcttaggctaagctgcatgagatggcacgtgcctttagatccagcactaggtggcacagacaggaaggtctctctgagttcagtccaaccacagttacattgagatcctaggggtgggggggcttccactaaaataacaaatgacctgaagattaaggaaacacaaatgcagcctggctgcccagcatccagcactctagagatggccaacctggtctatggagcagattttaggactgccagagctacacagagaaatgctatttatcttggccgggggggcggggggaggagaaggaggaaaaagcgagaggggaaggaagagggagagaaggagggggagaaggagggaaagagtgtacagatccagtcagaggaagtatacatgaggtcatggtatgatcgtgatcttggggtaactggggattctgagaaggacagcagtactcttctgctctttcctccatgataaatccttgctgatagagttggggtgttagtcagacccagcagggaccagatggcaccctcagatgagtagctagaggaggtgcagaaacccaaggggagtctacagtctgcctgggtcagcagaggtggggagctgtggccctccccgaaggggcaaaggtggcgagcagtttaccagtcatctggcagggttgctgtaagggaggaactggctgtgtaggagctctggccttcctggagtgtgaggacagatgctaacatttctccctggtggaccccgatgattacatacagcctgaagctaaagagacggtggactcaggcttcctgggcaaagtcctcgtagacctgcctttgtggagcaggcagagcatgggaggacgacagaaacagccagccctgctgcagggggatgcggattggggcttaggctttagtttggttttcccagttatttctagtcctgtggtaaatttgactgtctgaagtgtaacagtttcttacctctcctcctcactcttacgagtggcaggtggcaggtccgacacttctccacctcctcagctaagacagccatgactgaccacgtcctcaccaagtcccagccctgctctaggagattatagcatttgtctgtttgtttgtttctgcttctcagctctgtacataaagatgtggcccaacaccacaactgcgctctcctcagactgcctggagctctggttgacattagcgtgttactggcttcctggggtctcattcactgtttgtttctttcctgcagctcccctactttatgaatgaactaacactgacagagcttgacatgggtgtagctgtgccaaaaatccttcaggccttcaagccttatgttgatcaccaaggtaacgcttagtggactggagaggacttgaccggtgggtggtaaaatgcttgtctggttgtagctttcacccaaaggcttgtgcttagaaagaacctgagttctaagctcctgttcatgtggactgtgggttttgttcttattctttgtttagtttttaaactggtggggattggagggtgaggagagggagagagattggggagctggcgaggggatgtgtatgttgaggtcagaggttaactctatggagtcagttctcttccttacctttaaatgggtttcagggcttgaccctaaatcattctccttgcatggcaagaacatttatctaccgagctatctcaccagccatttttggtttgttttgatttttgttactgtttcattgttgagatagagacttgtgtgtctgccactcatgctggaccttgctctgtagcccagtctatctttgaacttaggatcttcctgcctcagcctctctagcacagacatgtaccaccacatcctacaagtgacttttatttatagcagtcacagtaggaagctggatggcaatagatctaggttccttctcccagttctcttcgctcagtctgttatgggggattttccagactcaagacaccctcaagccagttgctggggtccaagcttttatgtgagttctagcccttgacagggtgaggcagtggactaggtttcagctgcgctgtcctctcatggacaccatggccctgcttccctgagagacactgccccactcgcctagccccagcatcacctgccttgtcttctaagttgtaaagtctttggccttcatgtcttgcatctttatcgtccttacactcctatgggtctggaggatttgaaagatgaagacatatacttgaaggcagtatttcaggagcagatctgtctgctggagtataagctcctggacttaaggttttattaggcttgatggtcacagtatttgtgcctaatcctgtggatggacagaaaagaattgatcagaatgtggaagaaataaaaataaaggcacagctttctatgcctttgataacatgtggcttcaaagggcatcaacagggaggagttagaatgctgggatttagaaaaacacgagctgagtgagtcacatggacagagaaggctgctggcacacaggcaaacctcactggctcattccctcttctttcccttccttccttcctttcttctcttttgagacagggtcttgctaggtagcctagccaaacaaactgcccactcagctcagttttagtatcccctgtcaaggaagctcttctcccttgaatcatgcttaacatattcccaaggaggcctaggagcagggtagaagggagtaacacactgtttctggagaatgatatgtgttttgatgccaatattttgtacaatttgtaaggtacagaacaactctgtggccatcgagtcacattttgtgaactcatttttctgctgttatacaatatgaagagggtgagtgttctgtgattacacttagcagctctgcacatccctctaggagggtttgagctgacagggcacgcacacactgatctttgagagagacaaaagtccacctggtgcctgcgtgctgaggtcacctgtaagcctgaaatctgcctgcaccttgatcagtctgagtcctgctggggtctgtcaggtccacagaatgaagctagaagagatttagactctacaagtagttattcggtctaacctggtacaaggttgcttattctacaccctggcccccagctcagcatggtgcacagtattcaaaggtgtgccctgctaagttagctgtgcagctagaatcttcgccccattagagtacaaaggcagggtctccctggtccatgacctctcggctgccctttgccctttgctctccgtctcttcagggactgactagaaacaagcaggaaataatcagcttccacaacccttccgaatgccgggggggttttaaaggtaaacactgaaggtgcctgtgaggtttctcacatgctcgccacctctccaatctcagcaccttcctggcctggttcaatagaaatgtctaaggaaagtgcactgggcagagcacagcaggctctgccgcatccaagtgtccctgtggctttgaactctgggagtgcgttggtcaggctttgaggataattggagacctaagtctccagcttctttgctgtttttatggagctggcgtgagacatttcaagtctgcagatcaaagccttgctgcttttaatcgacttgaagcttacttaactcctttcagggcaaagtgtagcgacctgccagcttgtttaacagggagaaaatattaccaaagaaagacataaggcctgggggttatttgaatttgatcaagttaggcttttccatgcttttgaagaatgcctgtatgacccaaaacagaaggacaaaggatgcactgaggtgtttttcaataacagtcacactgcaactgtgtaactctgtccactttgtgtaagcaatagagtgtgcttaacctaggcttaggcagcagtcatgttactaagtgacagaatctcacaggactgctgtcctatgtgtggtccactagtgaccagaagtcatcatgcagtgtgggattgtgtgagtttggggtttcggatcccactgttctcagggagagccttcctttctagggaaattgaaaggtggggtgacttggtaatagcagcactcctgtgagactccagtgctcctctgaaaagtccctcccaggggccggaaagatggctctgcagttaagagcatcttaacttgttgttcttgctgaagacccagtctctaactccaaatgagccctacgtccacatgggtccacaaagagaaatgcaggcagaacaccatacacataaaataataaaataattttacaaagaaaacattttttaaaaagaaagaaaattgtctttggttcacatgggctgttcaggctgctcggactattctgccttagccatgcactttttaaattctaagataggatctctctatgtggccctggctggtctagaacttctctcaaccatgtaacaaccctcttttctctgcctcacgagttgtgagatgttggtgcactgctctattctctgccccactagttgtgaggtgttggtgcactgcgccatgcctgcctgctgctccacttttgaagctgtgcagaagtagtttcatagcgtgaggtggctgaccatacacccacggttgcagtagagttcccaacatcctgctcctcacctcaaaagagactttgagagcatgggaggacacgacttcacacacccaaggcagtttggtggtggtggtatttttactattttgagccccttctaaaaaaaaaaacttaaaaattttttgtttgttttatgtaagtacaatcattgtcttcagacatatcagaagagggcataggattccattatagatgtttgtgagttaccacatggttgctgggaattgaactcagaacctctggaagagccatctctcttcaagctttgctctctggatgctggatgttcactttcagaggagaaaccaacccaccatggtttagaggaggaggaaagtcagcggggtaggggagacttgaggtcagctccatgagcaaggatctcgggacccttaataccttctggttttaactatcaacttgacacaatctagagtcaactaggaagagtcttaatgaggaattccgcagatcaggtttgcctgtaggcacatctgtgggggaatgtcttgattgttcactgaggtgggaaaacccaccctggagatgggtggtactgtatttatgggctggtcccttgactgtgttagaatggactgtgttagaatggacacaccctctctctgcctctggactgtgttagaatggacacacactctctctgcccctggactgtgttagaatggacacacactctctctgcccctgactggatttgatgctttatactttgaggacccatcttgccttccttgcaatggttagctgtaggctggaacgatcatgcagttaaaccttgccttccccatattgcttttcgtcagggtatctgccacagccacagaagtgaagctagatccccttccaagcagcaggtgccctgttaacccagccgcagagtctagaccagtgcgtttaacatagcaaggccggagccactgtgtgggaccacatgctttctgtggctgtgatgggagagttatgggagaaacacgtgcacgcgcgcacacacacacatacacacacacacacacacacacacacacgcacatgcacatgcgtgcaaacacacacacacacagagtcctccattctggttgtggcccccttgcatctggagatgtgctgccttggccgtttattagcactttacattatggtctgggcggagctgattgaggccatctttattctttttttccccctgatttttaaaaaaagattatttatttattatgtatacagtattctccctgcatatatgcctacgcaccagaagagagcaccagatcccattacagatggttgtgagctaccacgtggttgctgggaattgaactcaggacctctggaagagcagtcagtgcacttaacctctgaggcgtctccagcctctcttacctgattaattttgagacagggtctgaactgaactcactgtgttatgaaggctcctcctctgcttctggcccccgagtgctgggatgcgtcaccatgcccggcggccatctttattctgtacctgtgtgcatgcacggctgtggagtccataggctgatgtcacgtttattcctctccatttcatttttgaaaagccagtctctcattgatctggagcttactaatttgattaaaccctggccagcaagcccagggaagtaagtctccacttctcagcactgggattacaggtacattacccggcattttacctgagcaatcgagagtcagcaggtcctccttcatgcttgtaccgccagcgctttgctgagtaaacagggccatctccccagcctcacctttaatcacagtctcgtacttcctgaagacaggttctttacagcacctgtcagttgatggtactcgccgagagagcagcactttcagggaatgagctgtctattctttgtggcacccttctcagccaccctgagctctggggatggggtgggaaggggggcttatataaagaccctctaaagtttgtcatgctaattgtcatttggttggtgatttgtccctgagcatgggtagaataacagtatgcagctgtctgtgttcaggataaggtggcacttctggtgtctgaccccatcttgacattgtcaccatatctatacattttcccaaggtggcaacaggcttcctagttgctgttcacttcatctggtgcccaagccggggcctggggcatagcagtgggattaggcctctgcactgaagggcacatgctcctgggttttcagtgtgctgcttgcctgccagtcattgccatagaagcagtttgggttttttggtttttttttttccaatgcaatagccttcttttctgcattacaagtacatcatagtaatttgaactattgtttgcgatttatatcagttttaagttctcagcccattcttgagtcaatcctagattgtggatggacctcatgatacataataaggagtatgaagccagacgcaggaccagagatacagttcaggaggtagaatgtttacctagtatgaaacaaccctgggtttgattcccagttctcgatgaactgagagaggaggtatgtgcttacaattccagcacctgggaaatggagacaggagaatcagaagtctgggttcatccttaactgcacagccagtaagggcatgctgaaacacccgatcctgtctcagacaacaataacaacaacgaaacagaaaacagaaaaagaacacagcaaacccgccataaatatctgatcatatttaggtctcctgagctagatttctggttatctcgtatagccttaccctgtagcagctgcagctagaaggatggccagggcgtacagcctgctggctgcatgcactcttccctaaaaagatagcatggtgtcctttgtgtgtaggtgagacctctgtccagagatcaagaaacttacagtgaattcaaaccctacttcatgtaatggggctccaagcctttcacttggtcttcctggagatgagggtgggccatagcccatgtgactggggcctgaaccacctgtgcccataacacttgtttgtttgttgtttgtttgacagccaggcactagagaactgagtcactagtaaagggctcacagtgggcggctcacagcggctggcactccagttccaggaaatccgaccccctatgtactggcctcttccagaatacttgcttgcctcctagtacccatgttgggtggttcacagctccagctctagggggtccagatgccctcttctggccttgtctgcacctgcacatgcccccaccaccaccaccaccacactaccactcttatatacatatttttttttaaagaataaattttggagaaagaaagacaaaacctcccattttggagggagtaaaagttttggtactcttaatatgacagctttcaaagataattcatgccattaatattatttggaaacctggccaggatttccaaaagaaattagtgtcctttttatagtgagttaaaattcctctgtagccctttgaactgatcccattctcctggaagtggttaaggactaaatgtctttcctgaagcagatgcgccttttatctccacagtaacagcattttgaagagtaagctaactaatgattttttttaaactgcttaccgtaagctagaaatgaagcagtttttcccgcaaagaagataatcacccttgacctgtgccacttaattaaaccaagccattcatggaggataatcgcattcagtaacaggaagaatttgttgaaaaccaataggaattattctgcctttagtgaagaattgcaccattagtacttccgtacggatggacagtgcttctacccccggggggggggggggggggggctgtttactgcagtggactgaaactgcagctatgtatgaagaatggtctgagattaatttcctgcctcctcttacatattgtcacttgtcttatgacgatctataaaagtctgttagcatttaaatagccacttgaaggattgcattgtgattaaatatccatgaggtcttacggagctctaagagtgaaagcatctcatgtagcttcgcaggcctgccaggccaccctcctgtgctgacagagagtgatgtgtgcacactggatgctgggccagtggcagccatcctggggaaatgagatatgagctattggcagcaatatcctcctgatgactaaattcttaaaactctgccattaagtgattctccagagttactgagatactcctggaactccttttgtttttattattaggtaatttccagaaacaaatggatactaaaaatataagaatttaggggctacacgtctgactcagaggctaagggcacttgttactcttgcagaggacctgggttcagttcccaacacctgcatggtagctcacaagcatccacaatcccaggtccagggctccagcagcctttctgacattctcctttaccaggcgtgcacaccgtgcacatgcttacgtgtatgtaaaacacttatacaaataaaacaaattgtttttctttctcttttttttttcttttttttttgggggggggggtggtttttcgagacaggttttctctgtatagctctggctgtcctggaactcactctgtagaccagactggcctcgaactcagaaatccgcctgcctctgcctcccaagtgctggattaaaggcgtgcgccaccactcccggcctttcttttttctttaagatttatttattttatgtatatgaataagctgtcactgacatcagatcccattacagatggttgtgagccaccacgtggttgttaagaattgaactcatgacctctggaagagtagccagtactcctaatcactaaaccatctctccagcccaaaaataaaataaatcttaaaaaaatttttaaaaaaagtttgagatgtgtgtgtgtgtgtgtgtgtgtgtgagagagagagagagagagagagagcatacaatgagtttattgggctgtcttttttaaaccgtttattatttgcagggaggagttgatggggtgggtgagcttgtgcatgcagagctgggaggacaacttgtagaagtcagttctcttcctttcccatgtgggttcagggaatcaaactcaggtcattaggtttggtggcagggggcctttacctgctgagccatctcaccttcttgggatagatgagaaggcttacaagagtgacccccaacagctacattactcctaagccccagccattgatgaccacctcccggaaggaaacagtctcacagtgaagtctcctcacttggcaaacagcagcccctgggccacccttcctggcggtgctgtggggaagccagagagggggtgggaaagaggagggagggagggagagagaggggaacaaaggaggggggaagggagagagagaggatggagcccttgctgagctcacatggacactgaattcactgtgaccccccagagtagccactgtggccactgccctgcatgcaaaccaccagtcgtccctctcatggtctgagggcggagggccttaccctttccatgcctccattgttagtacaaatcacgtgtgggctttactctaatgccagcttaaagacgctgaagggtttattttgtgtgcctgtgtgcaccacatgcatgcctggtgtcctcagaggtcgaaagagggcgtcagatcccttgaaactggagttagataatgactgcagtccatcattcgggtgctgggagctgaactctgctgcagagtagcaagtgctcttcaccactgaaatatctttctagtcctggaagtacccgtttggatactgtaatttagattcatatttcttgggaggcaaaaagaaaaaacgaaaatcaaaacaaaccctttttttgtttgtttgttaactgtctctctaggactctggatcgatttggaaatgtcttacaatgggtcctttctgatgactctggaaaccaaaatgaacttgaccaaactaggtaaagagcctcttgttgaagccctgaaggttggagaaattggcaaagaagggtaaggggctatatatgaatttactaaccaaccctggaggcctagcctctccctgcagcctgtgagaagcaggtcggggcgtgggagtccctgaatggccagcaggctcagtgtcagtgctccggatcaccgagggagctgtacacccaggggccacacagtggctgtttgctttgctggtcttaattattcaacaagcatcactgtcacagggcaagcagcacagacccctctgagcataaactgttcttcaacccagtccttactctgaagcctacctcagctcagagccacagatggcaatgtgtggagctgattaaggtcccctggggatccaccactttaaacaccaggtcagaattatttataacgagatggttgatctggaagcaccttcccgaaataatacaatattgatttgcttagtaaattctcctctttgtagatagtacatctgttactcagagttaatctgatttagaaatattccagaattgtgaggtaattaatggagcctgaacacccgcactcactccccactctggattcgatgcccagattcttgaacaccttaaaagtcaccgttcttgttgcacatctaagtggtaacactgtttgagccaagttaaaggatatggcctctcccatcccaagttcctctgcagggactaagctaagtgctggcactcccacagtgagctaagtgcgagacactggctttttgcacagttgtgagctgattgaccctctttagttttcagtgctaatagaccaaggaggtggagttgtgtcttcaaggacattcttctgcttagatcatcctgatttatccaagtcatgccttgaaatgttttaataattggagaattgcacctgatgcacacagtctaactcgtatctgctattttcctttcatttttttgctgtttgttaaaatgtatttggattcggcaatctgtggatttgtattttctggtgagtggtatttatcaactcccgtgtagcatttcacaccctgtgcgtgctgaccctgatttgttcccctttgaagccacaagacaatgtcatttcatcatgttcccagactcgaaggcacagtctgagggcttgggaaggctgagagcaggggtgaggctctgctaacagagagtctcctagacttacccatttaaaaatgccggggtcctgatctagcctgtagtcagtcctgactttttatctcctgctccaccccactctgatcattatagctgagcagtgccagactggccgtctgacaacagagttgcaaaaacaccatataggcagaggcggtcagaaaatgaggtcccccacccccaccccgggctagagatgtagctcagtgggaggtcagctgctgagcttgtgccaggacctgggtttgatctctagcatttttcttttaatgcatctaatataacaggactgggccagagcaatctttggccttaagcatttgagtaaggaccttttggaaacagctgtaccccagcacagggctccaggctctgttgggaaggcaaggcctacacatcaggtgggcagcagacctcttggtctgagtctcatctttcacgcactccacagtgactattgttcttctggctgtcttggctttacgtctggtttccatctacaagctcacaagatgctcacagtgtttctttacactgactgaaaagacttgctttcttggggaatgtggctttcatggtggagtgtatttctaaaaccactgtttcaaagaagagtcctgaatgtaatgtcttatcttcttcctgtgaggatgttaaaatatacattgatatataatttgctaccgcttttaaatgcaaagagataccacctcagagcccttctttagtgaggaaaaagctgaggactccagaccacagtttggctcagagttccgaagcattgaagttccctgaaaacccatgcaagattccagaacctagttccagaagcacttctaaaatctgtttcctccgttcctcagccatgaacatgtgtggctgccttgaggctaaggagaggatggacagaaggcagccatgtggtagctgttactaaacaccaatgtctttgttaatactgaacaccctggtgcggactttgcagagacccgtagcagcctctcctccaggccccctctctagccactgccacctctcctctccaggcctcacaccacacacgggtttgccccagggcccagctttggcagggccgtggtggcctcactgtttcgttcagtgcccactcaaatgactgtgctctcggggaacttctagaagttttctcttctagtgggaagtttgcttatagtacccagagacaagacggagaaattgaaatctaggttgctttaggccgaacttggctccttctgaaagtcatttatgggcatttgtctttcaagcttgtacttccacaaacagcatgtcttctggtcacccactagttaaaccactttggggcagtaaggcagtcaaaatggatttcaaggaccgggagtgtagctcaggcggagagctaagcatgtgtgagagcctaggctccatccccagcactgtgggagtggaagggaaggaggagtctacattttagggggaaacctgtaaagggtgttagcattctgtctatactccatcccacagttacctggcaacagccaggtgtgcctgacccactagaaaaggggctgcttgccccctcctctctcttgcctctccctcttgcttcccttctctccccactgcccccccccccacacacacacacgtggtcatggccaacctctacttctctactctctccctcgctctgcctttctctgcctctactatcctcttaactcccctccccatgccctaaataaactctagtctatactagctcgtccctcagggggaagagatgcctctgcatgggcccgctgagacacctctttcccccatacctcgccacactcccatagaacatatcttatacttctctatctttttataaacacatcaaaaggcctttaaataagtcagaaggaatgcatcctacatgaccgatcctttaaatggatagtggggtggttctgcaatgtactcagtgcagcttgggccagtgtgtagttttctcccccttacctaggcttctgatcttcccaggagccaagtataccatgtataccatgactaggtcttgtcctggttgtgtgtgtctaaatgcatatgcagctaagaatacatgaggctggtttctttttttgtttttgtttggtttttttgttgttgttgtttcgagacagggtttctctgtatagccctggctgtcctggagctcactttgtagaccaggctggcctcgaactcagaaatccgcctgcctctgcctccggagtgctgtgattaaagacgtgcgccacctcacccgactctggtttctttttagtaaaagaaagtgaatgccttctgcggcgagtgagggccccacccagggctgttgagtatgtttatttactcctcactgaaaggctttttacagtagcctctggcatctgtgtcattcttttaactactccaaagcgatagcagtcagcctgctttactggtagtctaagaaactgctggaatggggctggagagctagctcaaccattcttccaaaggactagagttcaaatcccagcacccacacagaagctcacaaccatttgtaactccagttccaaggccctctgttgtcttctggcctcagtaggcactgcacatgcatataacacagacctgtgtccaggcaaaaagagagagccagacacacagataggctgactgactgctggaagttgccagaagtgataatgattatttgaacaagaaataaaacatttgagccaggcatggtagttcatgctggcaatcccaactcttgagaccctgaggatgagacttagccggagtctgaagccagcataggctacatagtgagttccaggccagcctggactacaaagtgagacctcatctcaagaaagaaatttttaaaaagcccaagacagaccatgataaaataatttactttctcttgtgtctgactctaggcacatttctcaagtggtttttaccagaggccgcgtaactggaatgagcctgtttagtggctctctgagaggatagaacactgagttgtgtttagagccagtactcacctcctacacatttgttctgagcacgtatactgtgtccctaaagttcttgttgacgtcataaggtcgagggcataacatgcacatttagttgtaaaaactgtgtctgagccaaacattagtcacacagtggtcctaggttccacgaaacacgactcctattttggatgatagaaatgcatttagtcaagatcggactccacatcatctggtagcctaggcaacagtatccgaatcactctcttgaggctgcggagtgcagcttggcctctgtcctgcagaggattcattcattccgggccctcagagctcagtgcagagctcagctcactggtggggacatgagggtccacggctcagcagatctcactgtgatctcagacgctttgtgctgtgtatggatgagggcctgccccgtgctaggctgtgtgttaagccagcttccacacctggccgcatgaggcttgaaggctggcaacacagctgtttggtgcagatatgggtcggttgtgtaatctctgacagtttacatttctgattctccttatcttaaaaacccagttcagagtttttttgagaattgaattttctgtatagatttgaaacccaagagatctgtgagggtggccttcccacaggctctcctaggcagttctgaacataaagggcacatcacagaagcattctaaactaacctggcctgttgggggaacaggaagcagatatttcagatgaggaggggcttctcaaagggacatccccttcaacattgaagtccagcatgtgggtgcagctctggctccatttcagagtcggggtgagccggatttctgtgtcctgcctgggaggacatcagtgggatcttcttacagcctgctctggtttcagggtgagaggctcagcctggccctctcatgcatcggctgtgtgctctgcccttgacccccattaatcaggagacagttaccccagtggatttctagtggcttaaggaggtgttgagaacctgagggcagtggcaacagggaggctgggcctaagctgcacggtcttttctgagtactttgccctggtcagcagtacaaggctgtgtttagtgatcattttgttgctcaatagtgttcagaggcagctctgtcctttgtccctggcatgcctagctaagtccctgagctatagagatggggcccgggtagtaatctcgtaagcaggcagacacctttgctaggtcaggaagcctccggtgcacctcgcacctcagaaggaaaccttgatcccacagctctgctggggaccctctggaaccctaaagagtttaatgaagagcagtgatctataaaggggctagaaagcctggcctctaaaagtacctaagatctatgtcaggtgtttttttttttttgttttttttttttttttgagtcccttgagacttggcatcttgtggctttgggctttctctgtgaccccatccccaggagatggagcagacatggtgtaatgtatctaatcttaccagttcagtcaaaactaatctgaggggcgattaagccatagacaagagacttgcctgcacccctcatccttagtaaggctgtcacatcaccagcattaagctgccatcataactgccgctaactgtccattcttccatttaccccaccaccaccaccgcgacctggctcctacattttatgtgactccatcccactctaccacctgtctctctggtgcatgctcaaaagcaaactgttctgagctcaagtcctctgcaatcctgtcaggggacttggtgctagaatttactgtgtaagcagccaatccaagaactcttggattctcttagtgacattgacaacatatgacagaggtttcttcttgaccctctgtgtgtgtgcgagcgcatttgcacattcgtgcactgccggtgacttcctttctatgcagttgcaggcccagggcatactgtctggctgacagtgatgaagaatcctccagtgctggctcctctgaggaagatgacccaccagaacccactgctggagacaaacagccgctccccggggctgaagggtgagtggatggggcttctggaggctctggtggtcaagggagcagccaggagtcagcctgtctttcccttcccctctcagcttcttcctgcacactgagtaaaacaccctaaagggaagactttggctttgccttgcagtgtgagtaaatataagaggctttgaaggaaaggcttgtctccagaagtgctgccaggtcttcagagagtgcagactgcataccacctccccctggtggtccagagagaaaggaaccctgcacatcacagcctcatctgctcgctgttgctctctatggagctcagatgcttgggttatttcttttgtgacttttgagactgtggatgacctagctgctcttctggatcgtgaacttcctctgggggctctctgggtctgttcctttggcaatgtaatggtcagagtatatctcatgcctttctgtaaagacctctacattatttaaaaggaaataaagaaacctaaggtttacagcaccaggtaattcagaaacttataagtgaatagcagtctgctctcttcgaaattgtacagaaggtgagaagagagcacagatgtgtgcccagcccagttggtacctcttagaactatggtttagggttagagatgctgttggttgtagcatgctcatccagcatgtgcacggctctgggttcaaccccaggattcagcacacacacatgtatttctgtggatactctatccatgatgtctgaaactcagaggatgtgaagaagccagctgccatgcttcctgtgtctgtgatagtgagcaggaccagaggcacgtgctactgtccttggcttgctagcatatccacttgatgtcgcttttcccctaagttctaaacctataaaggttccaaggcctttgagaggctccaggcgttggtgtgatagtgcattgaactgttgctttgctgtctgtcgggtacagcgttagctctgggtgctttctagaaacagagctttcccagtaggacgaggactcgtgctgaggctcagagtggcacaaaggagccttctcctgggtgagatgactctgtccggatgtctgggtatccgctgtccggtcagaatgttctgtctgaccggtgtgttctctaaagtagttctcaaccaaaagggattcagcccccacggagggggggggggttgaaggatggggggggtgggcacatgtttgattatctcaaaagggagaacactcttgccatctaatccttggaagccaaggacagtcctcctcaaacagagtgccctgaccgctgtgtgtgtcgtgtcgcagtgggaaagctatgtggagtcacaaggttcatgccagtggatggtattcagggccagcgagatggcttgaccaacatttgctgccaagcctgacagcctgactttgatccctgggaaccctactcccccaacacccacactaacacggctctgcattctgtatttgaaggtacgttggaggtcatcgaacaagcaagattatgaggtttgttgataagatcaccaaatcaaaatatttccaaaaagcaacagagacagaattcattaaaaagaagatcgaagaagtctctaatacaccactgctgctaactgtggaagtgcaagagtgtcgagggaccttggcggtcaacatccccccaccaccgactgaccggatatggtgcgtatattccctaagtgatccctttaccacgtgactataaagtcccagtctacttaaccctggacaagagcatttgcccactgtttttagtagactcctgtcaatcattaatcattgtgtttttgtccatgactgtctcttgtactttttgtttgtttgtttttttggtttttttgagacagggtttctctgtgtagccctggctgtcctggaactcactttgtagaccaggctggcctcgaactcagaaatccgcctgtctctgtctcccaagtgctgggattaaaggcgtgtgccaccaccacccagctctcttgtacatttttaagggtgatcttcatatgttaggaagagttaaggtgagtgtgaggtttgtgggagaggctgtttctgtccttggtcctcctctctcttaagctgactcatccaccattaataccaatcgccctttgtagttagccccgtctctgcccagcctgggttggagccacagcactggttccgtctttcaaggccttcctgcttgacagatgacagtcatacttttagcaggtccaggcagggaggagacgctcctgggtgaggtcttggtgttgtgataggaggctctctaaggaggaggctctgggtggaagtaccattgggtggtgctgaagatacagcaccccccagggatcctgactgctcgtccagagatcctgagttcaagtcctagcaaccacatggtgactcacaaccatctctaatgggatctgatgctgcccttttgtgtatctgaagacagctacagtgtactcacatacataagataaattttttttaaaagtccacatttatatactccagaaatagacactgctaaataccttactatactaggtttaaaaggttattctaaaatagtgagttgatacaacattttttcttaactgctgagttttaaatagagtaagaaacttgcttaacatgttcaagaccctttttctgtccttcactcctcaaaaacataacctaagacacactagaagcacggcagtctggcattttcctgcgtttctatagcactgtcagcaacagattacaggtttaggtagtttgatagcgctcagtgtcttatctagactttttaaaaacgttaaatactgagtttatttcacatgtatatttctgtctccccaccatccccatgtctgcccaccagtgtgactacatcctatcatgacattccactcatacttacagccaaggaaaggatggagtgccatccttgaaaaccaaacaggaattttagataacacattcttggcaatgggagcatggacagaatttgtagaatgcagtagggaaagcttttactttgcattatgaaaggtcaggcatctcgatatcagctgctacagaagtgaagtaaggcggggcggtggtggctcacgcctttaatcccagcagtccggaggcagaggcaggcagatttctgagttcaaggccagcctggtctacagagtgagttccaggacagccagggctacacagagaaaccctgtctcataaaacaaacaaacaaacaaaaaaacaacaaaaaacagaagtgaaaacaacaaaaagcagaagtgaagtaaaatgagatatttcaagctgtttaaaccacttttttttttggtttttcgagacagcgtttctctgtatagctctggctgtcctggaactcactctgtagaccaggctggcctcaaattcagaaatctccctgcctctgcctcctgagtgctgggattaaagttgtgcaccaccacacccggcttttttttttttttaatttatttataagggtacactgtagctgtctacagacacaccagaaggagggcatcagatcctgttacagatagttgtgagccaccacgtaggtgctgggaactgaactcaagacctctggaagagcagtcagtgctcttaactgctgagccatctctctagccgccttaaaccattttcttatagaggtcttctccactgccagaagtctccagtaccctcctggctggtcattggaagctattcttcacacgatttatgaacttggctccactgtttgttttttttaaaggaaccccctcctcttttctagacttgtttacatttttgccataatatcttctacagaaccaggtccttttcgtgtttgggaattcttttctgtcttttgaaggattctttggattcttaatcttggtgtaggtagattggaggttttccattttggcttgtgtttagtgagttttttaggagagtgtctcatagatttcttccgtggagctttttcttcagtttccttatcatcttcttcatcatcatcatctctatcactgtcatcatctgcatcacattttacttttttctgtggaacctggttcccgcctccaggagcagaacacttcgtgggcacacaaagagctttacaccctgctcatcctcatcttctgactctacatcttgctctacactgctaggtgctgtccactaatgtgcatgggtcctgagccacacttccaccttcagaccacagctggtgtactttcaaagccctcaagggaaccgtgttgtgcagtcattgccagtgtgactttgaatgaggtgccttcataactcgttgcttctgcgtgctttcatctcttgccctagcccctcatggatggattgtaatgataactgattgtcctagttagggtttcattgctgtgaagagataccatgaccacagcaactcttataaaggaaaactgttcattggggctggcttacagtttcagaggtttagtccatttatggcaggaaacatggcagtgtgcaggtaagcatggtactgggagatcagaaggatcagcagaaggagactttgttccacactgggcaaagcttgagcataggagacctcaaagcccatccccacagtgacacatttccttcagcaagaccacacctcttaatagtgctgttccccatggcccaagcattcacacacatgagtatggggccatctctattcacacacatgagtctgggggccatccctgttcacacacgagtctgtgggggccatccctgttcacacacatgagtctgggggccatccctgttcatacacatgagtctgggggccatccctgttcacacacatgagtctgtgggggccatccctgttcatacacatgagtctgggggccatccctgttcacacacatgagtctgtgggggccatccctattcacacacatgagtctgggggccatccctgttcatacacatgagtctgtgggggccatccctattcacacacatgagtctgggggccatccctgttcacacacatgagtctgtgggggccatccctgttcacacacatgagtctgggggccatccctgttcacacaccacagtgatgttcagttcttcattatccaccttaaagtaacaatcctttttggcctttagttcataactggagatagagcccggcagtggtggcgcacacttttaatcccagcacttgggaggcagaggcaggcagatttctgagttcaaggccagcgtggtctacagtgtgagttccaggacagccagggctacacagaagagccctgtctcaaaaaaccaaagaaataaataactggggatagctgtgaagtctcaaaggggtctcatgtctatgtctgttgtgccctcatgaggtggcgacatgcactctggtgtgagggaagccagacagcgatgtctgtcactattcctcaaaacagatttacaggacttctctattcctctttattttagtgtctttgatcttcaaactaggctgttcctgcctcagcttctgaatgttgggattacaaatgtgtgctaccacactctgctgctctgaacacttcgccaacagctctgagtgtcagtaggaatcataagaggcgcagtgcagccaggatgagtcaggggcaaggctggcgtgacaggggtgaggcaagggtgtgacaagggcaaggcacgggtgtgacaggggtgaggcaagggtgtgacaagggctaggcaggggtgtgacaggggtgaggcaagggtgtgacaagggctcggcaggggtgaggcacgggtgtgacaggggtgaggcaagggtgtgacaagggctaggcaggggtgaggcaagggtgtgacaggggtgaggcaggggtgtgacaagggctcggcaggggtgaggcaagggtgtgacaggggtgaggcaggggtgtgacaaaggctaggcaggggtgtggcaggggtgtaacaagggcaaggcaggggtatgacaggggtgaggcagcgtaaggcatcacattcctgtcacctgcacactcaagaggcagagacaggaagatttggagagttcaaagccagcttaacagtcatagcaagactgtgagaaaaacatgacttagcacatggtgaagaaaaagcagtctatagaccttctctgcctgagcttgcttattacagaccctctcgtagagacgccattcagaaggaggctgtgtctttcaaaagttgtggcttttataatgagaacaccttattgctattaaaaatacaaagagaaaggccattgccattttagggaaagaaccctaaagcagtgctcagttcctagccttctgcaattgatctcggcttttctccattgtcagcactgttctgaatccctccgagccctgacactgcccaacagacagcggcgttcagagctcacgtgtgctgtgctgagttaggaatgtggcagttcagaaccggaggtcacttagtgatcaacccttgccagcaagggctctgtggtgccagtgctcgcccacttccattctctccttaaatgctgtaactgtcttcttcacaaaggtatggtttccggaagccaccgtatgtggagctgaaagctcggccaaaacttggagagagagaagtgactttagttcacgtgacagagtggattgagaagaaactggagcaggagcttcaggtaaaactgccccgtgtttcccacagagcaagggcactgggtgggatggaaggcctagatgtcatcccaggagcaaagacctgtgttcaagcctgggcttaggattttaggaatggtttcaaagaccctgaaacttttccatgaaatagactccaaagaaacccagcagatgtgtttaaaggcaggatgatggtgcccagtaccagcaagcctgcagaaactggccaggctttgcctttggcctggatgaagtcaggaactgggcagccagcagcacctagccggtgggcaggaaagatgctctctgaggctgctgctttacttagtttagttaacatgcaaggaaacgatgccagcaacaactatcttgggaatcttaagttcaggtctcccttaaataacacctaagccagagttcaacctccaaacctgcttactacattctgccaccagggacagtagcggtatcccgggcctggtatcccgggcctggtatgagctgtttcgttcagattttgatcagattttgttttgttttacttgtgatgggaatcaaactcagggcctggcacttgctaagcaagcactctaccactgaaccatcctgccccaccccagtcacttgatccaatatttaaaggatggctgtcttgaaattttatggaagctaggagtaggggtgaattcctttaatcctgatacttgagacaaaggcaggccagattgttctgcatactgagttccaggacagcctggagagatcctgttcaaaatttaaaaaacaacaaagtgggggctatgagatggctcagtggttaagagcgccgactgctcttcaaaaggtcccgagttcaactcccagcaaccacatggtggctcgcaaccatctgtaataagatctgatgccctcttctggagtatctgaggacaggtaaagtgtagttacatataataaataaataaataaataaataaataaataaataaataacaacaaggagtatctgaggacaggtaaagtgtagttacatataataaataaataaataaataacaacaaagtacctcagaatttatgggttagcaaatgctttatttacttagtcacgaatttccctctttgaagaatatttgcattcctttgcattggtatattttaagtttagggtgtgcatgcatgtgtgtatgcgtgtgtcattcctcgggcactgtccaccttgtattttgtaatagggtctctcattggtctggaactggacgagaaggtctagactagcaggctgtgagctccagggatctgaccgtctcagtcttcccagcactgggattgcccaatctctggggtctcagtgatcaaactcctggtcctcaggcttggaaggaaagcccttaagtgaaagagttgtctcccaggcctcactttcagttttgtgtgtgtgtgtgtgtgtgtgtgtgtgtgtgtgtgtgtgtgtgtgtgtgtgtgtgtgtggtgtgtgtgtgtgtgtgtgtggtgtgtgtggtgtgtgtgtgtgtaggacaacctgcagtcagttctcttcctccatgagggtgccagtggttaagcttaggtctcagactcaggatccagcacctgcacctgcctaaccttcctcctggccctttttaaaaaactattactttttttttttttctcctagacagggtttctctgtgtagccctgggtgtcctggaactcactttgtaggccaggccggcctcaaatccagaaatccacctgcctctgccacccaaatgctgggattaaaggcatgcgccaccactgcccggtcaaaagctattactatttaaaagctagagattaaatataactaataattagtttctgataaaagcctactattttcaccaggtggaaaaatactttaaacctagttagaggttttgtgccttcaggcttttcatgtttcttgtatcctgttatcatctgggcaggtcactattttgggaggtcttagactacagggagcaaagggaggagggaggagacagagattgactggtgcctggtcctggagacagttggaaagctgaaggctactcactgcttctgcatgcttgcttgtttctctaagagtattgccaaagcacaaatgcattgtcagaatccatacacacagtcacagtgtgcaaagaacaaccaccgccgcacgcctttaatcccagcacttgggaggcagaggcaggtggatttctgagtttgagannnnnnnnnnnnnnnnnnnnnnnnnnnnnnnnnnnnnnnnnnnnnnnnnnnnnnnnnnnnnnnnnnnnnnnnnnnnnnnnnnnnnnnnnnnnaaaccctgtctcaaaaactctccccccgcccctccccccccaaaaaaccaactcagcttacatttgtgctaagatttaaaagaatgaattcacctggaatatatcatgggcatgattttgaaggagtgcagttgctaagccagttctcctgaattaaggttgatgaacatttcctacatagttactacatatatacattgtttatgaaactgagggctcttatctcaaagctgacacaccaggttcctcctgtatttgtgctctggtgtggttatttggctctttattttttgtcattgtttggtttttccagacaaggtttctctgtgtaacaggcatggctgctctgaaacctaccctgtagatcaggctggccttgaatgcatagagatctgctgccttcccaagtgctgggaagtgtctgccaccctgccagctccttggctcttttttttttttttttggctcactcacaatggatggtttggtttctgggatttgaactcaggaccttcagaagagcagttggtgctcttaaccactgagccatctctccagccctccttggctctttttaagttcaagaatggaggagctggccatttagtaacacaggcctgaggatctgagttcaaatatccaacatccacataaaatcccagctcgctcgccagccagtctagtcattgattagctctaagttcagtgaaagacttttgtctcaataaataaggtgggaagcaatttaagtcgacacatacagagacagtatgatagaacatacttggaatgtataggaaaatcgttcatgtatgaaaggaggacgcttgcctgatgcatgctctcctctaatctctccctacagaaagtgtttgtcatgccaaacatggatgacgtttatattcctataatgcactcggccatggaccctcgctccacttcctgcctcttgaaagagccacctgtggagacctctgatcagctgtgattggtgaagatgggacattcccagtattatgagacctagctcaaggtgtgggatctgtagctgccatctgttctgtgggggtggcctttcctggtgccacagctactgtctcttaaaggactgcttccgccctctgcctgctggcccattccactgaggtgtcattccctgcatctggtgactagtatctggtttgtctgatgcaaagctttgactggcaaaggagacttgaactataatggtagagccagagttacagctgactcgcaccatggctttttttttttttttttaagtctaccaggttttatgacagcaaatgagcacattcagagcaaagctgtacaactagaaggcttccctttgccttttgactcctccaaagcttttcctcaggcagctggtgcacaatggaacatttttccactctacactttgtacgcatgactgcggccctccatccttggagaatgtcactgtggtaacctgtgtggagtgtggttttgtgagccatttcattggtggtaaaataggcatagcaacttttttcatattaaattgtgcattttggaagcaagtagccatagaacatacacacccacactttcactggggtgggcttcatgtgaacatcaggcaaagccgtgagatcaaaccatcccaaagacgtacaatcgccttgcttttcaaccaatcctgactcttctgagacatgagcgagtgtgacaatgtcaaaacactgtgcacaacgaccgattgtccctccctggtactgatgggacggggccagaaagtgggagccaaagtgttcttttctggtttttctgtgtgctgtaggatgatcgaacgggttcgggaggtttgtgggcagtccccttctctggtggccaaatggactttcctttctcctcagtggcaagcactacatccacacatgcacttgtgacctttctttaatgttgccaacttacgtttgtgcatttgtgtcagaatgtttagtttacaaactcgggggctctaattgtataatttgctttgaggagatctactaggttttcttgtttgtttaaagctgcatccaatgtcaaaattaccttgagtaacttctgataatttactgtctgtggacaaagctaagttttttttcttaaacagcaccttgcttgaagatgactttaaagaaattaatatattgaaaacttatttgagtctttattttaatcatcccattaaaacatgacaaattatttgaccattccagtcagtgtactgctttaatttctcccatttgcctgtcaagagcccacatgccttgttcattggtctttctctgcagtaactaaaggcaagactagatagacacacaattggagactgaacttattaagcttaaaataatttgggaacttaaaatcacttgcattgtctcacaaaataaatattcatgtcaaacaccagacaagcatgttattttttagagaaacccacaggaccgtgaatgcagagaccctcacaaggctagttttagccacctttgctagcctccagcactgtagaggtgggaactaaagaaatccattattacttcttatggaaccagagggataaccttgttttctagaaaaactggtcagtctatggaacctgtcccttaaagcttcctttctgttttaatccaaagtttcatctaactactttgttctaattgcttactagtaagctccaattaagcaacttcactcaggaacactaagaagcctctttaagccgggcgtggtgcggatttcagttcgaggacagccagggctacacagagaaaccctgtctcgaagcccccctccccaaaaagaagcctctgtaattcagtttccttctaggtcggtggtctcagttattcaaacactggggacgcaacctctggcatatctgcactctgaggcctgacttaattaacagcctctccccccttaaggcttcagtcgccccaaagcccgtgtgccagatggcatccattcacctccagggctcctcccattccattttcctgtaggcaggacatctcaagtactgcccacgcttggggcagggacaaaggacagtacaggacctactttatcaagttatcactcgggccagttactccaaaacctaagcctatggcctgggccaacaccatctgccctcgactcccgaagtgccgtgtagtcggctgctctgagcctgtagctagcggttaaaagggccgcccgcgaagggcaggcggccccagttatgcgctagcagagtgttatggcgccgcagcttaacccccggcaccacgagaaggtgggccgggggctcaaaggcagcgcgtcggcgacagtgacacacaagacaccagcggggttatttaaacactttattcagaggctcggggaaaggtggtagaagtccacgctgtctgctgtcctgcgcagggcagacctgaaagagaagcgaagggtgagggtacgaagtcggctgcgcccgccacctcccgctgccggtgcggtcggctcagattacgattcgcatcacccggatcagcagtctaacgcgtgctatgtatggagtgtcatcatcgccggccacccagctcaaaccgtgcagcctcagcttcctcagagaacacattaccttagagcagtccccgtcgataagaggccggaatggacgtgtggccttgtcttaaagaaagcgtccggaagttattgggcgggctcctgcagtattgaccagtaggaagccagctttcttgtcacgtgctcaagagcgacggttcattggctgggctttctgagtcctccagcgtgtagataggtccaccaaccatagagctgggacgaaactgcgagtttccagcgtcttgctttttcggggagacggggggggggggnnnnnnnnnnnnnnnnnnnnnnnnnnnnnnnnnnnnnnnnnnnnnnnnnttgatgttgggaaaaagaaccgaagtgcctcttgggttcaaaggatccgcagccgtaggagcaaagactgaatacgcgagcgaatactgatttgatgaggggacctttctggtcctcagtttgagattatcctccctcggcctggcttcatgactcatctgtaattccagcacctgaaaggcttaaacgcccagtttaagatctttattctgtatattgtgtgctcggttggaaaggtgtgtgttgtaagctggcgaggatgcagagctttgctcccagttatgtttgggaatagaatgagcaaaccatttttgaaaaaggagttaaacaactaacttcttgtaaacatccacttgccaggtgacctgttaatacctgggagtttactcaagagaaattaagacctgtacacacataaaatctcatgcataattgtaaatagcatattattcaaaagcagtaccccacaactgagaatatgcaaaggctcttatgagaaaatataaattttgttgtctatacaaccaaatgctatttgacaaaatacagtaatcctttgataggtttaatggttggaagtttctagaggcccactgagtcatctcacctgctcctttttttattcagagaatgtcttgcttgagtagaccaaactggtcttgaattcataatcttgcctcagcctccctaagtgctgaaaatcaggaatgtgctctaccccatcaaagagatttatcatttttggctttattaatattctctgctttaattgtctgttttgttttgttttgtttttttaaactcctttctgaagagttacagttagaggtatgtaccaccactcctggctcctctagttttgtttgtttgttttttgggtttgtttttttgtttttttttttgttttttcctcctagtcagggtttctctgaatagccctggctgtcctggaactcactttgtagaccaggctggcctcgaactcagaaatctgcctgcctctgccacccaaatgctgggattaaaggcatgcgccaccacgcccagtttagattcttagattattaatggagacctttcttcttttctaaccgcccattaaaaactatccttttcacactaaggattgctttagcggcatcccacagattatattttgtcctcatttatttaggagaatgatgttagcagggtgtggtgggacatatttacaaaaccaacatcgggagatagaggtgggagaatcagaaatttaagatcagcctcggctacttagggaggacatggacagactgggctgtatgagaccctgccttgtgaacactgaggatctggagagatggctcagtggtgtggttacacatgaattgagctcagtcaggcagctggcaaagttaactccacttccagtggatctgatgccctcttctggccttcacagtgggggggtggggggaggcggagtggaaggggttgggaagtagaggtgtgtgaaggaggcacaacagtggttcacagcaggtgtttgcatataacctggaagcctctgcacatcagaaacccagagggtctgggcttggcactcctggctctgggccactggtaaagtttccattgatgtcgaccctgacctgcagtctccatagaactggattatctacttactcctagccgcattctgctgtaggcagagagtttcagttcctaactgcacgggtctctagctctgcttataatgcacacaaagctggcctgcttccctttgaataagagagctgagagatgcacagagggaatgaggaccaaaagctgcaaaatgtccagtcttggaaggggcatgttgtcactttccacaatttactgatcccttagagcaagcctggcacagtgggggaggggcccaccaaggaggtgagtaccagggcacgggcctttgggaatgccatctcagaggtttgctgtcatcttacaggcttattttattgttcagcacatggtctatttttgtgtatttgttgctgttgagggtgatgctccgtaagtcgcatgaagaccaaagcattgctggtgttattcacatctccaacaggagtgagtctctacccactgaagcaccttctcttgctataaagcatttggttttgagcacttgatgacagcatccctaggagctgagtacagggagagagcagaggggtcaggggacacccatcaatgcataggacagcctctatagcccagggttatctgaacaattaaaaaaaaaattaaaacacctggccccaaaatgttgattgtgcagagactgaaaaatcctgtcttctaaatctggtttctcttttatcagcaaatgagagaatgttgaaatctaatgtgcgtttgattttgctgttgcccatttgtgtcgggcttgacttccttttcaagatcaactttaaggcatttacatatttaggatttatgtttcataagtgggctcttttatcattgtgaaattcattgtgaaatgtccctcttttttttttcttttttaaagatttatttatataagtacactgcagctgtcttcagatacaccagaagagggcatcagatggttgtgagtcaccatgtgattgcttggaattgaactcagaacctctggaagagcagttggtgctcttaaccactgagccatctctccagccctgaaatgtccctctttatttttggtaattttccttatttcagagctaacttatctaacatcagcacaaccttcctgtttgctttgacatatctatttgacttttttttattttattttttaaagatttatttatttattattatacataagaacactgtagctgacttcggatgcaccagtagagagcgtcagatctcattacgggtggttgtgagccaccatgtggttgctgggatttgaactcaggaccttcggaagagcagtcaatgctcttacctgctgagccgtcttgccagcccttgacttttttttttttaaatgaattttactttatacatatgtttgtttgtgctccacctgtgtgcagggcccacagaagctagaaggtgttggtttcctgggactggagttatagaccattgttagctgccatgtgggtgctaagaataaagtccaggtcctctggaagagcagcaatttctcttaaccattgagccacctctccagcccccaggtttgcctgtaaaataactcacatatcgcatacaacctacccatttagaataattcaacggcttggctatattagcaaagttgagcatcattgcttttatcaactttagaatatcctcactagcccagaaagaaaccccacaccccctggtcattaatttctaatttcctcatccttttttcaagccctaagtaaccactagcctacattctggctctgcccacttgagtcccttatatgactggaatggtaaaaatgtgaacctttacagccttttttttttttttttttttttttttttaaggcgcacacctttaatcccagcacttgggaggcagaggcaggcagatttatgagttcaaggccagcctggtctacagagtgagttccaggacagccagggctacacagagaaaccctttcttgaaaaaaacaaaaacaaacaaacaaacaaacaaaaaattccaagattaaaatcttgttctatttgccatctattttgattgccaaatagtattccactaagtggatatacctctttttttaaaaaaaaaaagatttattttattttatttttaaaggatttatttatgtatgtatatgagtacaccattgctctcttcagacacaccagaacatctcattacagatggttgtaagccatcatgtggttgctgggaattgaactcaggatctctggaagagcagtcagtcagtgctcttaaccactgagccatctctccagccctatacctcttttttatttgtttctatttatgtgggagggagtgttataggaagaagggaaggaaggagagctttgtgtacaaggtcatgctgtagtacacagataaagagaacaatttcagatgacattccttatctttcatcttctttgagacaaggtccctcttctttccctctctctttctgtgtttgtttgtttgtttttgagacagggtttctgtgtgtagctctgaatgtcctccaacttggtctatagacaattcgcaaagatcctcttgcctctgctccccaagtgctgggattaaaggtgtgcactgccactgcccagcaagacaaggtctcttgtttgctgctttgtatgatgggctagccagctcacaagcttctgtcctcagaagctctctttcctcagtctcccaccttgacatcggaggattggattacagatgtataacatcatagccaggtggactggagagatggctcagtggttaagagcactgactgttcttctaaaggtcctgagttcaattcccagcaaccacatggtggctcacaaccatccataatagaatccgatgccctcttctggtgtgtctgaagacagctacaatgtactcatataaataaaataaatgaatcgtttaaaaaaaaataacatcatagccagcttgagatgggtctggggatttgaactcaggcccttagatgtgtgcagcaagcgcttcatccactgagttatctccttagtcctatgccaggttttgtctactatggatggtgaacatttggacctaaattataaatgacatgaagtcctgggttccatccctaacactgcttaaacctgctaagataatgcaaacttgtaatcccagcattcaggaggtagagacaggaggatcagaaagactatcctttgctacatatggaatctgaggccagcccaggctagagactctaaatagtaacagtcaggtaaggtttaattacttttaaaaaagacttattatttgttctatgcggtgtgtgtgtgtgttgagggggaggtgccacatgtgtgtgtgtgcctagtctcacagaaaggagaagagcaaggagtcttggaggaaagctaggaaatgaccaggtccaaggaggatgtgctggagaacttctgaccagcctcggaatggaacgatagcccaggggaaaacaagatgaaaccagacctcctcggagattttactagaggaaagatgcttatgagctgtccaagagaagtttccaaagagttctatggatttaggccacacaggggatcaggaggactgggcagtgagggcggtcagtgggtgtggaacataacagctcgggagcaagagagcaaataaccagttaggattagcctgagctacccctagaggaggaaacccgggtcagctaatgtcctcagccagctggcaactaccttttttatgttcttttgttcaactccaagaggaggtggacagccttcacccatggtttcagatgaggctcgtgttctgtacatgtttgtataaacttgtagctgtttttagggtagtttgcctttggtatcagtggtcagaaagatttgggttaaaaaaaaaaaaggaggatgctgatgagatggctcagtaggtaagagcattgactgcccttccaaaggtcctgagttcaaatctccagtaaccacatggtagctcacaaccacctgtaatgagatctgatgccctcttctggggtgtctgaagacagctacagtgtacatacatataataaataaataaataaataaataaataaataaatctttaaataaaatgcaactgtgttgaacacatataggttatttttccccctcatggttctttccaaacaatgtcccatactgtgtactaggtttcacagttatccagagataactcagatcttaaagtatacagaagaatatcaggaggctacgcagagacacatgcaaatatgatgccattttattaatatataagggatttgaaaaggattttggtatctgtagatgtagtggattctgaaaccaatcctctcaaatatatgatttgatatggttgatattccaggaactgccaacttggggccactgtctcctaactacacttatagcacatgtaacaggacattgtcataatgctatgggcacagaacaagaatgcaatcagagcccagtgagatggctcagcaggcaaaggtacttgctgttaagtctaatgacctgagttcaatccccagaacccacagtgtggaaggagggaactgactcttgccagtttgccctctgacctgcacaagcatgaacacacatccccatgcataaatataaataatagtgttaggtgtggcagtgcatgcctttgattccagcacttgagaggtaaagactggtggatctcttcagttcaaggcctgtctggtgtacaaagtgagatccgggccagccaaggctatgtagaaaaaacctgtctcaaggaaaaccaaaaccaaaacaaaacaacctaaacaaactcaaaaacccaaaaccaacaaccgggtaagggtggagctagtcacagcttccaccataactaaatgaagctctgaaattaagtagatctctgagttcttgtttaattttgtttaaaaaagatttatttatttattttaaatatatgagtacaccattactctcttcagacacaccagaagagagcatcagatcccattacagatgattgtgagttaccatgtggtcgctgggaattgaactcaggacctccagaagagcagtccttgctctcaaccactgagccatctttccagcctatttggttgtttttgaagtagagtttcatagcccaaactggcctctaacttgcagtgtagttgagggtagcctggcatcctgcccttcccatcccatctgggagctctaactgggttttgcatcttcctagttatgttacttactgggctttttgcttttctagattttagtgtctcttctggttttgctctgtggcctagacttatcgaatttatctgtgtagtcaaggttggcctcagactcccagcagtcctgctgcctcggacactccaatgatgggaataaaagtatgcaccactatgctcacacttaacgcatcctccacaaaatgtgtctaattaatacctaaccgatagaactgttgcacaagatgaccctaaaggcaggtgtttgcacatttccaaacaagagcaaacaataagtagtagcagtgtccatgacacagcagaaactttgtgctccagatagctcagtgagagagcatttacctggcatacttaggcttagggactgatccccaaaaagaagaaagaaggggtggggttgggagggaaagggggaaggaatgagcaggagggagagcaagcgtttgcagtttaagagggcacatacagtagtgacagtgtggatgctgggtgtcatcttgtggtaacagaagtgcctagaacaagactcatcaccttttccattactcttctctcacaagaagaaccagcagatggaactacgcccagaaaccatggcttttgagtttttcttaaaccttacgttagaaaggacatacctcttttttttcttatatcattttatttaacctttacctaccctacaagttttataaattcaagtctgtccaaacaactgcttggaggtcacttagaaagaaagaaagaaagaaagaaagaaagaaagaaagaaagaaagaaagagagaaagagagagagagagagagagagaaagaaagaaaaagaaagaaagagagatttggtttactctgatgaaaagatgtgtactttcagaaattacctcccttctgcaaactttttttttcaaaaattagtctttttcgaaagggctgacaagatggttcagctcgtgaaggcagttgcagcattgcctcaggatttgagttggatccctgaaacccacatagtagctggacagaagcagcttctgaaaggtgttctctgaccacacacacacacacacacacacacacactaaagaaatatgtgtaataaaaaaaccgtaagtagctgtgcaagtcaacttgacaatcacaaattcaaatttttaagttgtaaaatgagattaaaaacctccaagtcactggctgatggtgtctctaacctttgagtttgaagccagcctggtgtacagagcaagttccaggacagccagggatacacagagaaaccctgtcttgaaaaaacaaacaaacaaacaaacaaaaccccaaaaggctggagagatgattcagaggttaagagcactgactgctcttccagaggttctaagttcaattcccagcaaccacatggtgtctcccaaccatctgtaatgggatctgatgccctcttctagtgtgtctgaagacagctatagtgtactcatataagataaataaaatttttagggggctggcaagatggctcagtgggtaggaacactgactcctcttctgaaggtcctgagttcaaatc

SEQ ID NO: 3014 - DNA, 5033 bp, Mus musculus
attatatggactaaggcagcttggagaattaaggaaggtagcactgcagataaccatttggcaaattccatgatggacaagagtgaaatttagagccttctagaaagttccttgaggacaatggacaagagtccccttatgtcacagctcaggaaggtggagtaagtgcaggacctgcccactcagggtctcagccctcctcaaagcacctgcctcatggctgcgtttgagcctgagcctttgcaaagccggcaatgacaagtctgaatggtcgccatgctgagaaaaccattgacatgccaaaaccatcagcccccaaagtgcacgtgcaaaggggctacctggaggaggggctagatgaccaaagcattgtaacggggcttgaagccaaggaggacctgtatcttgaatcccagggtggccatgaccctgcaggccccgtctcgacggcccctgcagatgggctgtctgtgtctgagtcccctgccattttgcctgtctctgagaacactgtaaagctgctggagtcccctgctccagcactgcaggtattaagtccagtgccattggctctgtctccaggatcatcttcatctggacccttagctagttctcccagtgtgtcgtccctttctgagcagaaaaccagttcttcgtctccactgtcttctccttccaagtcccctgtcctgtcctccagtgcctcgtcctcggccctctcaagcgcaaagcccttcatgagcctggtgaagtccctgtcaactgaggtggagccaaaagagtccccccaccccccgaggcacagacacttgatgaagactctggtcaagtctctgtccacagacacttcccggcaggagtcggacaccgtgtcctacaagccccccgactccaaactcaacctgcacctcttcaaacagttcacacagccacggaacacgggtggagactccaagactgcgccttcttcccccctgacttcgccctctgacactcgttccttttttaaagtgcccgaaatggaggcaaaaatcgaagacactaagcgacgcctttctgaagttatctatgagcccttccagctcctcagcaagatcatcggggaggagagcggcagccataggcccaaagccttatctgcaagtgcttcagagctctccagcctgtccggcttgaacgggcacttggaaagcaataactacagcatcaaggaggaggagggggactcggagggggaaggctacggcagcgactccaacacctccaggagcgaccacctgaagcccactgaagacgcctcgaaggaagtggagcccaagggttcccaggcgagtagtctgaaggacttaggtctgaagacaagttctctggttcttgagaagtgttctctgtctgctttagtgagcaaggaggatgaagagttctgtgaactgtacacggaggactttgagctggagactgagggcgaggggagacttgataagaccctcgatctccccctcaagccagaggtgcttgccagcgatggcgtggctctggagagcgaggatgaagaggactcggccaccgagcaccaggagttacctgtaaagacgctcggcttctttataatgtgtgtctacgcgtacctcatcctcccactcccctactacatgagtgggctcttcctgggcgtcggcctcggcttcatgactgcagtctgcatgatttggttctttacaccaccaagtgctcacaaacaccacaaatcactcaaagctctgcggcaccagagcacgagatccctggacatcaaggagcccgaaatactaaagaggcctttctccaccagggaatggatgaatgagatttacaactatgatccagaaacttaccacgcgactttgacgcactcagtctttgtccggctcgagggtggaaccttaagactttcaaagcccaacaaaaacatatccaggagggcaagctacaatgagacaaagccagaggtcacctacatcagccagaaaatctatgacctctcagacagcaagatttatcttgtacctaaaagcttggctcgaaagcgaatctggaataagaagtaccccatttgcattgaacttggtcggcaagatgactttatgtctaaggcgcagtctgataaggaagctactgaggagaagccgcctcctgagaaagagctgccgagcgaagacctcaagaagccaccccagcctcaagaggggacgaagtctagccagcgagacccaatactgtatctgtttgggagaacgggccgagagaaagaggagtggttcaggcggttcatcctggcctcgaggctgaagtcagagctcaggaagccggcgggtgtttctggaagtaaatcagggcttctgcccgcacacagcaggcacagcagtccctcggggcacctgagccacagccgcagcagcagcaaaggcagcgtggaggaaatgatgtcccagccaaagcagaaggaactggtgggcagcgtgcgacagaagatgctcctagactacagtgtgtacatgggcaggtgtgtgccccaggacaaccgaagcccccacaggagccccgtgcagagtgcagagagcagccccacagcttcgaagaagttgccagaggccccaccctctgaggaggaagaacaggaagcctgggtgaatgctttgcttggaagaatattttgggacttcttgggcgagaaatactggtctgatgtggtgtcgaagaaaatccagatgaaactcagcaaaattaagctcccctactttatgaatgaactaacactgacagagcttgacatgggtgtagctgtgccaaaaatccttcaggccttcaagccttatgttgatcaccaaggactctggatcgatttggaaatgtcttacaatgggtcctttctgatgactctggaaaccaaaatgaacttgaccaaactaggtaaagagcctcttgttgaagccctgaaggttggagaaattggcaaagaagggcccagggcatactgtctggctgacagtgatgaagaatcctccagtgctggctcctctgaggaagatgacccaccagaacccactgctggagacaaacagccgctccccggggctgaagggtacgttggaggtcatcgaacaagcaagattatgaggtttgttgataagatcaccaaatcaaaatatttccaaaaagcaacagagacagaattcattaaaaagaagatcgaagaagtctctaatacaccactgctgctaactgtggaagtgcaagagtgtcgagggaccttggcggtcaacatccccccaccaccgactgaccggatatggtatggtttccggaagccaccgtatgtggagctgaaagctcggccaaaacttggagagagagaagtgactttagttcacgtgacagagtggattgagaagaaactggagcaggagcttcagaaagtgtttgtcatgccaaacatggatgacgtttatattcctataatgcactcggccatggaccctcgctccacttcctgcctcttgaaagagccacctgtggagacctctgatcagctgtgattggtgaagatgggacattcccagtattatgagacctagctcaaggtgtgggatctgtagctgccatctgttctgtgggggtggcctttcctggtgccacagctactgtctcttaaaggactgcttccgccctctgcctgctggcccattccactgaggtgtcattccctgcatctggtgactagtatctggtttgtctgatgcaaagctttgactggcaaaggagacttgaactataatggtagagccagagttacagctgactcgcaccatggctttttttttttttttttaagtctaccaggttttatgacagcaaatgagcacattcagagcaaagctgtacaactagaaggcttccctttgccttttgactcctccaaagcttttcctcaggcagctggtgcacaatggaacatttttccactctacactttgtacgcatgactgcggccctccatccttggagaatgtcactgtggtaacctgtgtggagtgtggttttgtgagccatttcattggtggtaaaataggcatagcaacttttttcatattaaattgtgcattttggaagcaagtagccatagaacatacacacccacactttcactggggtgggcttcatgtgaacatcaggcaaagccgtgagatcaaaccatcccaaagacgtacaatcgccttgcttttcaaccaatcctgactcttctgagacatgagcgagtgtgacaatgtcaaaacactgtgcacaacgaccgattgtccctccctggtactgatgggacggggccagaaagtgggagccaaagtgttcttttctggtttttctgtgtgctgtaggatgatcgaacgggttcgggaggtttgtgggcagtccccttctctggtggccaaatggactttcctttctcctcagtggcaagcactacatccacacatgcacttgtgacctttctttaatgttgccaacttacgtttgtgcatttgtgtcagaatgtttagtttacaaactcgggggctctaattgtataatttgctttgaggagatctactaggttttcttgtttgtttaaagctgcatccaatgtcaaaattaccttgagtaacttctgataatttactgtctgtggacaaagctaagttttttttcttaaacagcaccttgcttgaagatgactttaaagaaattaatatattgaaaacttatttgagtctttattttaatcatcccattaaaacatgacaaattatttgaccattccagtcagtgtactgctttaatttctcccatttgcctgtcaagagcccacatgccttgttcattggtctttctctgcagtaactaaaggcaagactagatagacacacaattggagactgaacttattaagcttaaaataatttgggaacttaaaatcacttgcattgtctcacaaaataaatattcatgtcaaacaccag

SEQ ID NO: 3015 - protein, 1108 aa, Mus musculus
AFAKPAMTSLNGRHAEKTIDMPKPSAPKVHVQRGYLEEGLDDQSIVTGLEAKEDLYLESQGGHDPAGPVSTAPADGLSVSESPAILPVSENTVKLLESPAPALQVLSPVPLALSPGSSSSGPLASSPSVSSLSEQKTSSSSPLSSPSKSPVLSSSASSSALSSAKPFMSLVKSLSTEVEPKESPHPPRHRHLMKTLVKSLSTDTSRQESDTVSYKPPDSKLNLHLFKQFTQPRNTGGDSKTAPSSPLTSPSDTRSFFKVPEMEAKIEDTKRRLSEVIYEPFQLLSKIIGEESGSHRPKALSASASELSSLSQGHLESNNYSIKEEEGDSEGEGYGSDSNTSRSDHLKPTEDASKEVEPKGSQASSLKDLGLKTSSLVLEKCSLSALVSKEDEEFCELYTEDFELETEGEGRLDKTLDLPLKPEVLASDGVESEDEEDSATEHQELPVKTLGFFIMCVYAYLILPLPYYMSGLFLGVGLGFMTAVCMIWFFTPPSAHKHHKSLKALRHQSTRSLDIKEPEILKRPFSTREWMNEIYNYDPETYHATLTHSVFVRLEGGTLRLSKPNKNISRRASYNETKPEVTYISQKIYDLSDSKIYLVPKSLARKRIWNKKYPICIELGRQDDFMSKAQSDKEATEEKPPPEKELPSEDLKKPPQPQEGTKSSQRDPILYLFGRTGREKEEWFRRFILASRLKSELRKPAGVSGSKSGLLPAHSRHSSPSGHLSHSRSSSKGSVEEMMSQPKQKELVGSVRQKMLLDYSVYMGRCVPQDNRSPHRSPVQSAESSPTASKKLPEAPPSEEEEQEAWVNALLGRIFWDFLGEKYWSDVVSKKIQMKLSKIKLPYFMNELTLTELDMGVAVPKILQAFKPYVDHQGLWIDLEMSYNGSFLMTLETKMNLTKLGKEPLVEALKVGEIGKEGPRAYCLADSDEESSSAGSSEEDDPPEPTAGDKQPLPGAEGYVGGHRTSKIMRFVDKITKSKYFQKATETEFIKKKIEEVSNTPLLLTVEVQECRGTLAVNIPPPPTDRIWYGFRKPPYVELKARPKLGEREVTLVHVTEWIEKKLEQELQKVFVMPNMDDVYIPIMHSAMDPRSTSCLLKEPPVETSDQL

SEQ ID NO: 3016 - DNA, 136011 bp, Homo sapiens
  misc_feature (1)...(136011): n = A, C, G or T/U
actagcatgcggtggaggacagagacgccacagatgctggagttcctgcaagaataaagtgtgaccctgcagcaggcagctgggctaggagacacaccaccacagagaggtggagactagtagaacgtgaggcatggaatagcctaacctctgcgatgttacagaagaggaagctgagactcaacaagggacacccatgtgttcaccagatatttttctcttcttttctttttttggagacggagtctcactgtcgcccgggctggagtgtacagtggcacaatctcggctcactgcaccctccccctcccggattcaagcaattctcctgcctcagcctgccaagtagctgggattacaggcacatgccaccacacctggctaattttttatattttagtggagatggggtttcaccatgctgcccaggctggtctcgaactcctgagctcaggcaatctgcccaccttggcctcccaaagtgctaggattacaggtgtgagccactgtgcttggcccaccaggtatttttcaagagtcaattagatgccagaagctgagccagcttatggttaaatattgcagtacaaaacatcaccccaaaactggggctgaaaacaactgccattttattatgtcacatttctgtgggttgactgagctcaactgtgtgttttgctctctgtggtgatagctaaggctgcaggtgtctaggacatgacacggctggaacctccaagatggtccatgcacagatatggcaatcaatgctgactgttggctatgaggttcagtggggctttcacctggagtgcctcagttctcttctgtggtttctccatgtggcctgggcttcttacagcatggtgcctggattcctaaagtcaagaagtgaaagcttcagttctcctaaggcctgagtttagaagttccagaatatcacagctgctgcattctattggacaaagccagtcatggggtgttttattcatagttgcataataatcccaaaatgtagtggtttaaaatgatgataaacatttatctctcacagtttctgtgggtgaggaattatggagcagtttttctgggcagttcaggttgggagtgtccgtgagattgcagtgaaaatgttggccaaggttgcactcatctgaaggcttgactggggctggaggatccatttccaaggtggcttactcatataattgacaaattggtgcttgttgttggtgggtagtctcagtttttctgcacatcagcctctccacaggctgcctgagtatcttcacaacctgatgggtactattccccaagcaagtaatccaggagaccaaggcagcaacccaaatgcccttcataagctagcctgagaagtcatacattgccatttccaccatactgtatctattgtgacccctgactcatggtggaaggagagattatgaaaaagcatgaatgaccaggaagtgagaatcatgggggtcattctggaagttggctacctcacaaggccagcccaagattccaagggatggagaaataagctatagctgtggatgagggaacagtcacgactaagtggccatctttaacctatcagagctcaactgtcaggatgtaacagaggaccagtcagaaggggctcactgttcacagagctcccagtctagaggaccacacagaaaactagcagcagagaagggatgtgtctataatcttgcgtggtgatgcgtgtctgtgtgatcccagctactcgggaggctgaggcgggagagttgcttgagcctgggaggcagaagttgcagtgagccaagatcgcgccactgcactccagcctgggtgacagaaccagactctgtctcaaaaaaaataaaagaaaatgagtcttttcttccttcttctatgtttctatgtttctttgttttaaaaatattctaaatgagcttctatcatgttcataacagaaaaacccaaaccatttcttgctgcggtggatcccacaggctcagcaggagagggtgcggggatggggcagaggttaaaggtggggggttctccacctgtggattttggttcctcctctgctgtggggtatccattgcactgcaagtttccggttcttctgaaaggcctgtgactgttagttaactcacttctgaaaacaaaactgccccttcaggcgaggtgttggaggaagaatctcagaaaagaagggttatgtttttgacactccaggagtgggtggagcaaaggaaactaggagccgatgttttccctcctgggtggggtagacctatgatgctgttttctggttcaagatcgaggtgactgcctctcaaatatgaatttatgtactgggacaaccagagagaatatttcaaatggatgctgtcttggaaatgccaggatacgtagtcattgtagacagaagctgcttggttgttcggaacatttagaaatctttttggtttcctgcaaccatatgatatcttctttcacttctatttttgatttttgaggctttagcacatcaccccattgtcttcctgcatgccttacattccatgatcagtaattttctctatagtaaaaaacatcagcttccattaattgggcaactattatgtaaagatgctatactaagcaatttacatacacaatctttacaaaactgtaggatgtggacatcggcaatttctagatgaggggctcaggggagttcaatagcttctccaaggtcacacaactcagaaacaatagaagtggaccctgaacccaggtcgaaatctgagcccaggttgaaaagacctcaaagccactagcctaatgctgcctccctaaaagaatactgtaacattaaaagacatttgatatcttatatccctccatcctaacttaagatatcttttttggctccaaatttatccctctttttgaaaatagtctgtaccacacacctcttaaacaccctctgagatccttccagccactgctgtggcagtgagaactgtgaatgttcccagcagctctggcaggtgtaaactgacagtatcttgcctcaggcctgcagctgccatctctcaaacccagcccagggcatctcttctgacactgcagcttagaaagcactggaacccattcagtgccaagccagtgcattctggaagctcggctcaggcaggtgtgcagagccttttacctatggggaaggggccagtgggtaagtgccctcccctttaccccaggggcgggtcctgagacacttcttacagtcctcagacagttccctccaaatcaagcagccaggaatgtggccaccccagtgacacgcactcaagtgcttctgcctccctccctgcgtcagttcccggagcctcaattatgctccctgggctcacaccccccagtagtgtattcacacacaagcttttgtctcaagctctgttttctgggcaactctcacagatccaaacattttccttgcctaaactctcacccaaatatctttgcttctaaatcagaaaatgggtgctaagtaaccatatggaaatgatgaaagctagcaattccaacatttccactcacaattctgttgaacaacctgggagggagccagcatctcccgcttattcctaggtactctatatctgggtgtataaatgaccttttcaaggttacgaaccaagaaacacccaaccttcccctgtgtttgggtggatgtatatgtcgttaaatggccagttgagcccttccacttctgctatttaagggatggtgtgttctggtggggctgagaggtgccccagctgcagggctggggctgtcatccattggctgtgctgttgaccttctgtccctggagttagaatcgtgttcgggggtgattccaggcaagctcaagattggatttcccgtgctggagtggaggcaggaggatggtagtcacgagcaggggaccttgtggttggaaggcaacaaagatggcaggcaatgtcaaggtcatcaagagagcaaggcagtatctgctgaaaggcatattccttctctgtgcagagtgttgggaaggccctgagaggcaaggtgcagaatcagggcagaaagggaggagaatgtcagtctttctccttagaaattccaccctggtgctgctccacatcagttagaagccaccattccccagcgggccttggaatgacagagcttgagccatttatatttaataacctcaggcctcacatgctaattggcaaagtaaataatgggcatcaccactgtctgctgccccattatggcagggaattattctcgtgagtgcatccaccacttgaggcatctctaaagcccctgatgatgtccctcaaggagcccttcccacaaatgcttgtatctcgaaggtggtgggagtcctgattataaacaggttttcattttagaaggaaaaccagtcacgaatgaggctctccccctgccccccatcttggagagccgtcccagtgctggtgcagagtgaaaagaaagtgttggaggcttgcccagtcctcagactgattatttcccataaaggatccaggggaagagaaaacccaggagttgagcatctttagaaactccagttctgtggctgcacctgaccttgtcatcactcggaatggttcaccaatgaacgaagtcggcttcctctcacctttcctgccaccacatatttcctcccgtctatcccctctcccttggatttcctatcccgcatggaacccatgacctatcacttcaaccaccctgttgtcagtgtccccaactgtttagtgtttctcctgtctgtccatccctaaccctggattctccatacctggcttctgtggccaagccccagagagccatccatccaactccacagacctggtgccaccacaaacgcatgggtctcccagaatcctccctctccatcgggcagttcccactttcattcctcttggtggctttccaaaccctcatggttcccctcaaagcccttcatcatcccctccccacccactctcgagagatgactttgcttcctaccctggcccagggctactctcttgtccccttgggactccttggaccctatcccatcagtcctccactgcacagtctcttcattcttcttcttcttcttcttctttttttttttgagatggagtctcactctgttgcccaggctggagtgcagtggtatgatctcagctcactgcaatctccatctcccgggttcaagcgattctcctgcttcagcctcccgagtagctgggattacaggcatgcaccaccacgtctggctaatttttgtatttttagtagagacagggttttaccatgtcggccaggctggtctctaactcctgacctcaagtgatccacccacctcggcctcccaaagtgttggggttacaggcgtgagccactgcacctggccgattcttcttttttcttagctcttctcctcagcccagctctagggagcctctacatttccagccacatctatgctgcatgtgtcaatgaccctaatcttctaatttcgaaatcccagagcatactttcaggcctcttctaatttgaccattctgcggcatctgttgctgttgactgctctctctttcaatctcttctcccttgggtttggtgactcttacttgggtttttgtaaactttctggcttctcttcataatgaacttcatctggccacccctaaaaacattattgggttccccaagggttctaagtgcctattctgtgtccccacggctcctgggcttccctctaaggaagcctataatggtctatcaacgtgtcagtttctctactagatctagcatctacaagtgccttcatctctatccccagtactcagcccgccacctggtactgagtgcacagtgattgctcattaatggtgtggcttgtggcatgatgatccctaatctttgttagatatacaagtggatcaactttttggttttctgtacttcttaaccatttctgtctccaagaatgcaatgtcaaaaacagaattaaaaatcttaggctgggcatactggctcatgcctaatcccagcactttgggataccgaggcaggaggatcatttgagcccaagggttcatgaccagcctgggacaacacagcaagacctcatctctacaaaaagtagaaagaaattagccaggcatggtggcgcatgcctgtagtcccagctactcaggaggctgaggtgggaggatcactggaacccaggaggtcaaggctgcagtgagccatgagtgtgccagtgcactctagcctgggtgacggagaaagaccctgtttcaaaacaaaaaataaaatcttagagcattttttggtttgtttagaaattggtgagaaaatagggattatcttgaaatgcaataattgggaatctttcaagtatatcagaacctatgtgggcttaacctgatagttgaaacctgggtttcaagagagcctggcatgagggttgaggggttgggggtagagaaagaggggagagtattagcttgggcttgcatttctgtgacttaagatcctactctaggtgaaaaaatttagatcacttggtacatgctatacatatagagtagctatctgggggacaaagtaaggaatcttgcttgatatctgaatttagcctcacaatccctaacctttttcagaggtactacaatgagtcacagatgccaagctctaaaatcactcttttaagcatgatttgagccaggcacagtggctcacgcctgtaatctcagcagtttgggagaggttgaggcaagaggatcgcttgcacccaggagtttgagaccagccctggcaacatggcaagaccccatctcaaaaaagcctggtggttacggtcatgaatgctggctcttccttcaactagccctgctatcctggacacatcactaatctgtgaacttcagtttctgcatccataaaaaggagaaaataatggtcatatctaccctaaagagttactgtaaggtttcagtgaactgctatgttccagggacttggcatagtacctggcacatagtaacctcttaataggtaggaaacaggccaggcgcagtggctcacacctgtaatcccaggactttgggaggccgaggctgaggtgggcagatcacctgagctcaagagttcaagaccagcctggccaacatggtgaaaccttgtatctactaaaaataaaaataaaaaaaattagccaggtgtggtggcgcgtgcctgtagtcccagctactcagggaggctgaggcaggagaattgcttgaaaccaggagtttgagaccagcctggacaacatggtctcaaactcttgggctctcctcctgagcgggggttgcagtgagccaaggtcacgccactgcactcccgcctgggcaacatgacagaggctgactccatctcaaaaaaaaaaaaaaaaaaaaaaggtaggaaacattattgtgttatgatatgttcatttatttttcaatgcatccaaattcctcagatttcaaaaagaagggatccttctaagtgttcatgctggatcttactggcttctagtttgagatctggttggtagtgtattaattaatttaatgcttacgtggagcttggtagggaaaggaggttggtgggcactctgagaggcacattgccagcttccaaggacctttgcaaggggcagctccagggcccctaccctttctctctctctctccctgaggcagggggctgaagatgtggccaaggagagcttcaggctgtgtctccattggtaactgcctttgttgcacatttccagaaaaccacaactggaaacctcttctgttgggacatgaattctttttcctttgggaagggcaacagaagcaagtggtgatcccaggcagtaatgcctgcagcccagagactgcattctcatgaggctgatcaatccttgtgcagagttgtccctggcaacacaacatccgtcagaaatcacagcacaaacagggttattgtgtggaggccattccaagagcctgagatctgtgtgggaggcagctgacctgcaagatctagtgggcgagggctgacctccaagtctgaggacaatgacttctgggtcaggcaggtgtctgggatactaggaaggggagaggaatgttgccaggagggtaggcagggcttgctggcattggaatgaggcaccagagtagcagggcattcttctgggatcatgactgggcctggtggtgagccggagtgtgtctgccattaagatatttatgcactgtctcacgggtcagagaactagcctggcttccctctgcttgaggcatcaaatcttcttcctgcttgaggatttcaatctttcagatgttgtttcatctgggtccagtgcccttctacactcagttcttggcatgacttattctgttatgagtgtcttagtaggtgacctcctcccttactagcaagtctcccaaccatattactaattctgaggatgaaaggagtttggctttcattttgccaattgaatttgaatttcatgactatgatagactcaaaacacgcacctgagtgtggtccttgtaccacttgcattagaatcacctggagggaggggtgtcgaaggccatctcagacttactgaattacaggttctggggtgggacttagagatcttcatgttaaaaccctccaggatgatctgacgttgaagatctgacatttgggacccactaatgcaggagacacactgacacatctgtttgttgtcttggtcctttcttgtggtgggtgggaagtgcagaggggcaaggactacgggggaagggggaactctccctatgtgccagtgcttctgccagccaacccaggttcgcagaagataaatgcacaatgggcattgccatcccaggaagctcattctaagtgagaatttacctcgagaagtcactttacctctctgagcctcagatattgcctctctaaaaatgagtagttaatactatataagttctaagctctaagaactcgtggccaggcgcggtggctcacgcctgtaatcccagtactttgggaggctgggtccggcggatcacgaggtcaagagaccgagaccatcctggccaacatggtgaaaccccgtctctactaaaaatacaaaaattagctgggcatggtggcacgcgcctgtaatcccagctactcggaaggctgaggcaggagaatcgctttaacccaggaggcggaggttgcagtgagcccagatgacggcactgcactccagcctggcgacagagcgagactccgtctcaaacaaaaaaactagtaacagagttagttcaggataggatgtggtagtgtggtagtcaggtgggggaagtacataatgcgggaaactgggaatttgcctttttaaatcaatgtctgcagttggatggggatagatacgtctgatggccctctaaaatgcaaatcgagtgaatttgcccagggggatacccctggttctccgcgcctcagtcaccccacctcaacccccagccctcgtctcaagggcacttgttgctgctagactgcaggaagaggaaattaagaagtgcaaagagctggggacagtgtgcagccccgttgggagagtgaagcttttgtccccctcacctggggctcttccaggtaaccctccccaccactcctctccctagctccaagggcggtggcccctttaacagacctgacaaatcgctcccccatttccgcggcctcacctcggcgcgcggtagaactggattggttgggcctggcgtgccgtttgctccgcccccgcgccctctggttggcggcggcggccgcgggcgcggggcgggtccgccggcggggcggggcggcgtgtgcccgggggcgggcgggcggcagggcagcaggaccgcggccggtgccccagccgaagccggagtcgcgcggccgggagcacgggcgccggcatagtacaatgaggcagccagcggatcttgggtgagcagtctcagggccaggcgggggcggtggagggagcgccccgcggataaggcccgggctgggcgcggatcgaccccgcgggcttcagagtaccggtcgggtccggcggcccttggcgtggcggggctcggccccccaccccgctgtcatggttcaggtattgaaggggacgcccacccgcgacacccccgggcaatcccttccttcggggccccgccggatggctcgggctcgactccggcgggaggagctgccggccccgtcccctcagcctgcggtccccggccccgggcagggaggcaccgtcacgcgcaaactagaggaaaacggcttgcaattttatgaatggggccccgggttcctgccgcccccctcaccggcgacgcgaaatgcttgaaagtcgagaaccgcagttacttttactcgaatctgtcagaggttgtatgcgccccggtggtttttctccaactcctggagaacgcgggtggcggtggggtggtttgtgtgctttagcagggaggcggcggcgtgccgaaatccgggggatcggaaggttaacaagtgacattgggctgaggcctagcgccaggtgccttgcggggaggcggtgtggccgtggacgccgtcgctgctggctgctgagcacggaaaccatacggtggaaccggagaaggcggggaacggctggccacattgcaccacacgctgcctagagcgtacggctgccatgggagttggtgcaggggagtcttccccttttgaaaacgatttttggaaaacttagcccctcagtgggttgatagttacttaaaccatcggttgttatggttactgggcgtcaaatgtaagggcaaagtctgtttccaccctcgctctttctccagagctatgaagtactttgtcactgtgttttacagacactgtccagggaggacatccttttttagagttgagggaaaattgtgggctccttgagggcagggctcgtgccacgttcacgtttgaagtgccagcgtcttcacaccatcaccgctctgcacatgcattaaaaggaatgaggcttttacatgttttgaggattctcagaggattcagaggagtcatttcaggagccaggtgtaagctggaggggaaacaacgagtgacttttatatggaaaacaataaggaaaaatggagggcaggttatccttgaactctggagtatggggagtttgaggagtctaggtttgtgagttttagggctgggtcacacagagacgcttgtctcatattggaagaatgaaactgccatttctgttagctcttacctagcccataaacaatattctttcagattctccccaaaaatggtagttggtctaaagttatggtaaacaagccccctgaggtgatgtggatagagtgggattttgccatatcatttctttcttttttttctgggcccctttgggagtgtgaaggcttggagggagaggatgtggagggctctgggtgaactgaacttgcttgcatgtttatctccagtaaaaggcactgtgcctgagaggaaggagattaacaaattgattcagatcagaagatggtggtaattgagtctactgacaagcaaccgaggggctgggacagacgaggagggaggaaaaattcaggagtttggtttgggctgattgttggaggtctgaagagcaagttatgtcatcgtgagagaagattagacacagcatataccaaacataatgttcattattagaggttatgttagaatgcttctggagaagaagcaggaaagattaggcttttcgatagaataaatacgtagcatgttttggacaaaaagcagttgcctggagttaaaaaagaaattatttattaaaataataataattttgctgtatgccagaaactgctagacattatagaaatgatggagggtttttttgtttttaaaggatgaagagtttgtttctatatgccatattagttgcctttccttcaagtcaaatgcttctgttttctggaaggttttctgaatcccttgaggaaagagaggggagaactgcacagtttattacttaatatgagaacagagcaatggggaaattctcctcactgtagattactttcagtatcaaagtgaatcttcaaagaccagttttctgtgtcaggttcaatataaaattatattaatcctcacgtctgttgactggtatcttttgatggaaagtgcctgttctttctttttttccatttgtcaattcattcattcagagttaggaagttcattaaacacacactgtctcttgttctctaggtgtttctagttcattttctttgcctgaatatccctcagggtctgctttcttctgtctgatccttatctcctgaaggtctccttgggaattgctgaggtcacagggaatgcttattctttgattctgtcccaaggcagaagactagtatagaaaagagagcagtgttgagttccaactcagccaggtactgttttctgccccttatgtatatatcctctccagtcctagagcagccctctaatggaggtgtgatagcctcattttacagaagaggaaaccgaggctcagagcaaagtagtaacttgcccaaggtgacaagctggttagatggtggagcaagaatgtcagtctaggacattgattcaaaaaacgtgcttttttgggccaggcacagtggctcacatcttgtaatcccagtaccttgggaggccaaggcaagaggattacttgaggccaagggtttgagaccatcctggatgacagagtaagaccctgtgtccaagcaaacaaaacacactttttccattgtaccacgttgtttttccctggagagaaatggcagtttattagagatgtctcttgcagtgtcctcttgagtggacatgttcagagtggtcaggttcagagatgttcagagaattgctgcactaatgagctcctgtgctcctgctggagccagagttagatgccgatgtctgtctctctgccaagtgcagttttgagtaattcacgaggctattgggaaatcttttactgccatgaaaaggtgactggactgactgggtctgtatccttgtgctctgcttaccagctctgtgaccttaagggtaaattacttctctttctgtgtacctcagtttctttgtaaagtgggaaaatattcccatttcaacaatgctaagacagtgtaatttatgtaatgttaacattcctggggaaaaaaagcatcttgtaatgtatggggtcttagacttgtagtcagcagtggcttccttttttggcacataaaataacagtgtttcttatagtcaatggtcttagatgaactagggtagtatattatttataggtagttgtaagaattaaatgagatcacttatgtccctggttctagtgagcacccaataacaggtcatgctgtccactgacaggatgaatggttaactgggaaaagctgggaagcatctcgtaagatttgccactcaacgcctaggcaataatccatggtttgtggctggaggaacattttccaatttgcctagagcactatcctttggctgactcttgtccctgtgagaaacattaacttcaggagctaacgagccatggacagacagctccctttgtcttcctattcattaaggtctttgtcaactttaaatcccaagtttaaagtaaatattgtaataagaagactggaagcccatgctgttgtgaatattcttacatgtgagttttaaagcaactcataggttatacaagattttgtgttgctcctttccaaactctttataatgcgtaattacactgcgtgaaatgtccatgaagcaccattaatgagagggatgctaggaggtcatgaaagttcagaagcccttgactggcattggtggggtggagagaacactagacttggagtcagaaggctacagtcctgacagtttcacctgtcatccctgcttcaccattagaaacatatttcccaatggctgcgtggatcacccaaaattgcactgggcagcaaggcaggataccagctgcgcgtcacttcactaatttggacttttaaaagtctctcttccaggacagggcgcggtggctcatgcctgtaatcccagcactttgggaggcggatcacctgaggtcaggagttcaagaccagcctgaccaacatggtgaaaacctggctctattaaaaatacaaaaattagccaggcgtggtggcacatgcctgtagtcccagctacttgggactgaatcaggagaatcgcttgaacctgggaggtagaggttgcagtgagccgagatcgcaccactgcactccagcctgggtgacagagtgagactctgtttaaaaaaaaaaaaaagtctctcttccaaaatgaagagttgatttcttagtgccatcccctactgctagcagtctcatagattatatgagtttatgattctaagaatctgagaaattaaacaattgaaagaaaatgattgtattcaggacttttgaagtctcaggtgtttgtgatagtgctttgaaaaacaaaacaatacgcaggtgataacaatgtgagtaactatcatttacggggaatcgtgtgccaggcactgttcctacctttaaactttataccaccctatgaatagtagatactattatcaatcttattttaagatgagaaaactgaggctcagaaaggttaaataactttccaagattacacagcaaggtcaaggactgatagctgggcctagaatactggcttatgttgctccccagtggatgcctgaaaccatggatagtgctgaaccgtatatacaccacgtttttttcctatgcatgtatacctataataaagtttaatttataaattagacacggtaagagattaacaatataactaataaaaatagaacagttgggccaggtgcggtggctcacacctgtaatcccagcattttgggaggctgaggtgggcagattgcctgagctcaggagttccagaccagcctgggcaacacagtgaaaccccatctctaccaaaatacaaaaaattagccaggtgtggtggtgtgcacctgtagttccagctactcaggaggctgaggcaggagaatcgcttgagcccaggaggcggaggttgcagtgagccaagattgcaccattgcattccagcctgggcgacagagcgagactccatctcaaaaaaaaaaaaagaacggttataacaaccacatattgttcacaattttcggagatagaagattcattcttaacatagatcttagcaacctcagtacaagattttttcctttcctaagttgtgaagtttgactttttcacttaaaggaagcactttacagcttcactttggcgtatccaaattgccagcgtcattaatcttgtgctttggggctattattaagtaaaataagcgttacttgaacacaagaactgtaatatggtgacagttgatctgataactgagacagctaaaggtgactaatgagtaggtagcgcctacggcgtggatctgctggacaaagggaggattcacatcctgggcaggatgggattggacagtgagaaatttcatgacactacccagaatggcatgcagtttaaaacttgcgaattgtttatttctgcaattttccatttgatattttcagaacttggttggctatgggtgacggaaactgcagataagtggggactacttgtattgggagaactttgttaaacttaaagaattaactcttattgcagaagacttaagtccttgaaaggaaaggcttttctttggtgaacaaaagccatgtgccaggtcactgtgagcataaatgggactattgagagaagaatctaacctttctgtgtggaagctgggagaatgggaaatgtgggtgggctttgaaacaaccaggtaacctttgtctgctggatttgcctggaatattggttctaagggcttttccctaagaagattattgcaacaaacacattaagtgcctccccagcttattctaacagttgaaagcagcactgggcaagaggagctggcttcagtcataagcttatttaggatttgagattaaaacctacccgttggattgctcctgcaaataacctttcagaatcccaatatgcattttataagtttcatttctcttgctgttcaaagctgacataagctggcttgttttcttattcaattttcagtcctttcttggacctcatgctgtcttttgggctgtattcttatagatggttatatttattattttaggctcaaaatagagaatttaaaaatctttttactgaaaggattgactgaacagtgatcgtcattcagcaagtatttgagcatctaccagggccaagcattgtgcttggcattggaaatctgatggggagcaaaacagatgtggttccttcctgcacaaagcacattatctagtctagacaacaaacaagtcaatagacatatgcatcatatatattggattgtaatatgtgtaaaatctccttcctctgaaggaaaagaacagggcaccaagaaagaaagaaaaggaagaaaccagcaactgggggtcttgggcagagcatttcaagagagagagcaacgtggatgtctggctgctgtgcagaggggcagagaggggaatatgggaagggcaggctcagaaggtgccattctgcagaggacatgtcacaaggcagcatagtgtagcagggagagcagaagcttgggaaccagacactgctcaaggggcctcgggaagtttcttaacctcttttgcctcactttcccacctccaagatgctatgagggttgaatgagccttgagagccatgcctggcatgtacagaaaggactgtgggtagggtttgctgactctcagggctgtggggaacttgatttcgagtggatgagcttctcttcctagtcagcatttcccatgattccatgtgtagcgtaaccatagggcagaaggtaaaactaagacagctgagtaggtgtatccatggaggcattctaaggtagattatgttggactttctgtggtgtgctaagcattcagcacccgtacctgggagacttggccctacctgtaggcatctctgcagtgggtgcagtcctgagtgtggagcaaggtggaccggaagcagctgttcctctgctcttgcctgcagttgtttgctttagtgtttggatgcgggcagatctttcaccttttttcctgataagaggagacagagactactggccttacagccaggtggtcaaacatgacaactcggagttgctgtgtgcaaaacctgcctgaaccccatctccagcgagatttgatgatgtttccccattcaaaggaacaaccacgcctcaggaccatacaaggagaggacttcatgaaacaggtcactggcttgggatagtcaataaagtgctatgaacccagccatatttaagttatagttatcttgtaaagtatgtgtgaggcctcatcaaatttgtatataattgactaagtttttcaaaatatcttttgctctggaattttaaaaaacatacacaaaagtgaagaataatataatggatatcaggcatctattactcaattttgataattatcaacttttgctaatcttgttccaagatagttccacaatgaagcattgttggtggattttctgtcacagtataaatgtgtctttggactataaaatcatttggtagatattctagagaaaaaaatgcctgcacactgcataattatagggctggtgttaggtagttgaaattcagaatctgaaatgaacatttagtggaaacctcttacagacttgtctatgagaagtaggcatataaaattaagagtgctttcaagatgaccagttagtctatgtatttactaagtagcaactgtactgggcagtgtgcaaggtacattttttttttttaaaggccaggtgctgtggcttatgtctgcaatcccagcactttgggagaccgaagtggaggatcacttgaggccaagagtttgagaccagcctaggcaacatagtgagaccctgcctctacaaaaaaaaaaaaaaaaaagccagacgcagtgacacacacctgtagtcctagctacttggcaggctgagctgggaggaggattgcttaagcctgggaattcaaggctgctgtgagccatgatggcaccactgcaccacagcgttggtgacagaataagaccctgtatctaaaaatcaaacaaacaaaaaaggacagtgtttgtccacagtggctcataaaattatgagcccatgatgaagtcacaggttattttcaaacattcttagcaaatgaattttacacaaagcccaaactgtgaaactgattaagaagcagtattttagtggcatatgttactttaagttcaatttatagtattcacttgtagcatgaaacaggacacaagttaatatgtcgaaagtttctatatgttgaatttcatttttattttttaaaggggaaattcacatcaaacatgcaaacaaccctgtagcagtgcctctgtgcatcatggtacaacagaccattaaacatttgaaaggtggttagtgcaactgagaattggaagctttaattttaattaagctgaaaccgaagctttaattttaatttaaatagttccatgtgcccatattggacagtatagctccagggtttattaaaccaccattcctggtgataggatagagcccagcacaaactaatctgggcaacaaatcaaagggcacaagtcgcatgtaggttccaaactcagtacattttagagaaaaggagtttgattatgtagtagaaggaagaactgcctggtgggactcatgatcttcctttaagagcaaggctcaaagacctggggagttttgatttgatgctatgatgtctcctggggctcagaatattatgaaatgaggagtgaatctctgagtgaaaagaactcaagctgcttgttgcattgcggaatgtctctaagaggtagagaggcgtctgttaagtggcttgtatgaaggtttcagaaggtaagatgagccccagctttgggagttgtgtttgctgccaggagggtttagaggctgcctctaggcaacacccaggggctcaaagaagacagacgcagagagcatgagctgctggtcacctctctatccccagagcatcgtagatgcttgataaatgtgttaaaaatggatgacagtttcaggaatagatttaggagtaaataagagatgggcttgaaatttttctagaaattctgaaaaataggtgccgagggaagtgcagtgccagtgagctgcagagtttgttcagcctgtgctttctgccagaggtaattgacatttctcctcactacgaatgcaagctcgacctccctcctttcgcccttatctagtcctgcaccaaatactgctgatttttatcttataaacgactcttggatggttcttttctctgaagcttctctgccactgttctagtttggtgcaaacaaccatctttttgcttggaatactccagcagcccctcactgacctgccctcatctacctctactcctttctaatctcttcacctctcagcagtctgagtggtctttaaaaaattcctatcatggccgggcatggtggctcacacctgtaatctcaacacttggggaggctgaggtgggaggactgcctgagcccaggagttcgacaccagcctgggcaacatagtgagaccctgtctacaaaaaaaaaaaaagaaagaaagaaagaaggaaaaattaaaattagctgggtttggtggcctgtgcctgtggtcccaattactcgggagactgaggtgggaggattgtttgaacccaggaggttgaggctgcagtgatctgtgatcacaccactgcatccagcctgggtgacagagaccctgtctcaaataaataataaataattctaacatcatcatgtcacatccttgctcaaactctctgaatgtttctttgttgcctgtgggataaaatctacattccgaacatgtttaggtgctgtgtgatctagcccctcctgccttctccagcctgggcctctgtgtctctcctggtttattgtattccaggcacactggccacctttctcttcccagttggaagggagctagactttttaggagctgaaccctctgcaggaaacagctgtactccctacctcacccccacccccattttctcttgtcctttgtagcactcatcacagtttgttactatatattctgttgtagatacctgcttttcctcttcttccaagaaggcagggaccttgtttattttgctccgcgttatatacccagtacctagcttcgtatctgacccattagacatgctgcttaaatattctcggggtgaatgaatgaaagaatgcaagccacattagaaaataagggaaactcaacttgaggacttctctttaaaacttggttatatggctgagcacagtgggtcatgcctgtaatcccagcactttgggaggctagggtgggaggatcgcttgagcccaggattcaagaccagcctgggcaacatagggagacctccccatctttaaattctttacaaaaaatttaaaaattaggcatggtggtgtgcacctgtagtcctactcagggtgctgaggtgggaggattgcttgagcctgggaggtccaggctgcagtgagccatcattgtgccactgcactccagcctgggtgacacctcaaaaacagacaaaaacaacttggatttattggagaggttaagtagtttttagagaataacccaggaagggaaatggggggaaagagttcacagggatctatcatgaaaactgtacagagggtttggagcatcctacaaaaacatgttctgagaaaccatgttccatgcccttgtcccagacttgaaaggcatttgcccatcatgttggaaggatgggatttgaggctgatcctcttgtctggatgggttttctgcacccagcctcaggagacactgacatgaggctccattttgagaccttaaggttggagtattccatatacagcccacagccaggggtgcagtagtcttcctctcttcctagagggtagggattctgccctgctcatatttgcacctttctcctccctctgacctccctcactgccatcagcaaactagagtactttgcctgtcgggggtgtttgccaagtgtttctgagtagaccctggtactacctggtggacactaaagagggctctaggcagtaataagagggaattctggttgtaccttgtgcaggggaggcttcctgctgttgctgcattccctgttggaaagaagctgggcagttgtgtttagaactgaccctgcagatggggaggcttcccccttctctctcttcctgagggctacttccagatgagtgggggagcctgccagtgctcatcaggtccacctgacatgtcaaaaggaaaaaggagaaacctgggtcttccccgggaactttgaagttacgaataggaaatcgaaggacttgatgccgagataatgttcttttggaaggaagggactggttccccagaccagcacctctggtaaccagagagaagatgttttgtgaagactagagtgatgcgttttctgggagactgcaagttaagaaggctttaagctttatattaattagaaatttgtattaatgtatagtaattagagaaaagcctacaggaaaatcacagaatcggataatgaggagacctgtgtgacttagtagcattctaggtaccaaagtggtgcctcggaactctcgagtggaaaccagcaccaaagctgattgggaacaccattaagggaggggctctggtatctgtaagctcatgcctgagtgtgaacagctcattccccatgtgctggaaaccttaacagcacaggcaggcaaataccatctggtggttgttaggattggagttagagcaaagtactatggggtgcacctagccccaaaggaaaatcctgtaagtaatttactctgtgtgccctgatcatggaaacctggtggaaagcatttccttttatgatggaaaggggaaatctgggcctggtggctcacacctgtaatccagcactttgggaggctgaggcaggtggatcccttgagttcaggagttcaagaccagcctgggcaacatggtgaaaccctgtctctacaaaaataaaaaacaaaaacaaaaattagctgggcatggtgacatgcacctgtggtctctgctacttaggaggctgaggtgggaggattgcttgagcttgggaggcagaggttacagtgagccaagatggtgccactgcactctagcccaggcaacagagcgagaccctgtcaaaaataaaaaaaataaaaaagtgagaggggagcaagttatgttgttgtaggatgctgcctgccagaccgagacaacagtgttattttccatagacagattttaaagtaggcctccggcaggtgtagtagaccatgcagatgtttgtataaggtgaagtctattacaagtggaccatgcagtaaactctaaccctaccttgctgataattttacatctgagagcaggtagagggaagtgtgtgtgttggacttaatgatgacaaatgaggaaaagccatccagagggcaagggagcttgtgactggggctgggaagtaagcacagaactcttgttcaggcaggcaggctggcacctgctcactaaagttgctcactaacggctgagcatttcctaccttctattattgtttcctttgataaaaatgatggaaatgctcccacttaacctggagcaggagccatcttggtatcctcagtgcctggatgtgtgttagaagtgactgcttgacggttagtccctgacagtggctgatctgatgtggccaccccagtttcctatccacctcacctacagttaggagcagaaactgctgtaggaagcctggcaggagctgccctcaggaattgagcctctttgcctggctaagttcaggggcaagatcgaaatgggaaataagtcagtagctgaaaacccgtgggaaaggaattgcttttgttttaatttcccagggtaggctaatgtctgtggggatacggtgagtggtattcgatcctgatggggtaggttaatagtgaagcaggaacattaatttttttttaaggctaaaactcccagcagaaatggctgttgatcatgctctgagccagaaaccaaactcatttggtcagcctagcttttgtcttaaggctgactgtgatcattgttcagaggaggcctaatagcctgaagtgaattttatttcaggaggtactaaaatcttagggaagagaaaaaacacatcttgagtttagtttttcagttagatgatagagttgttttggcagcaagtgtagcaagtgcagggcccagaattttctggggtggatggttaagagatccttccagaagtctgtatgattttttaatgccaaagtgttaatctcaaaaaatacaattgaaaacaaatttaatatatgtatatttgttgacccacagctccaaagaagccttccagaaattgcaaatttcactatttctaaaacttagctttcttatggtctgcaagcattttagccattttgtgggatctgtcacagaactgaaccattagcctccgttttccctctcagaactgccttccagctcctcctgagctccttcccacagtgctccagtggagtgtcctagcctctcaccctacacactgctaagtaagcacaaagcaggctgtactgtcgattggttaacgttgagtgagatgggtgctttattcaagctaaggaaaaaaggaatttttttgaacgatgtttttctgttttaggagctcatttatacaagtgcttaagtcagtatttaaagttggaatgagaggttttgctttcctgttcttacagcagtaaacagtaggtatgggggcaggtacctggggtcagccctttatgttttttcctttttttttttttctttgagacaaagtcttgttctgttgcccagtctcaagtgcagtggcgtaatctcggctcactgcaacctccgcctcctgggttcaagtgatcctccttcctcagcctcctaagtagctgggattacaggcatgcaccaccaggcctggtaaatttttgtatttttagtagagatggggtttcaccatgttggccaggctcatctcgaactcctgacctccagcaatccaccctccttggcctcctaaagtgctgggatcacaggggtgagccctgcctggccagccctttagttcttatttctgtcaatgtgggtacacagggacatcttttcaagtgtgatgctactgctaagggagggagggtccctgacagacaagcaggaagcctaccatctggcatgggaaccctcgtctaatcactgggatgatttcaagccaaattctttgaggcctgataaaaggcttataaaataggctatacctgcatttatttaatatggactggttatccagtgatcccttcagcattcagcagatgacactgcttagaaaacagtggctatgcttggggactgtcactgggcaggtccagacactggtgagagtcagcctcctgtgaatctttaaaatgaggtccttacccatcttgtgtttccttttagggaaggtctttgaagaatcttaaacaagtattttaactctttaagtagcattaagcatggaaaattcttataaaatagattcttttctcccaaattaatagcttataaattagtgtaccaatttttcttttctgtctttctctcttgttctttgattatttcttattctttctctcactaacataaagcacttaggtatgttttgcagttatagtttgtttttcaatagattggttatttattgtctagaaagtaaccagccgttttcccactacagtcttggttccaggagtaaaattgctggcaaagctttgggaggcaccagaaggctgtcttcttcctggagtgagatttcacatgctgtctctgtcttgcccaaatgccctaggaccatgcactcaccatccaaaggaatgtggattaaaaccctactcctcctattcaaaagagtgtaatgaattctgtacatctgggttttttaatcttggggagggggaagagaaatatctgtgtctccttgaaaatcaagtgcaaaatcttgaggatatttgtgtatgtatatttgtgtggtggggagagatctttgatgttcatcaggctttcaaaaagcccgcaactgagaaaggttaaagaggaacttcaggtctaaatctctcatacctctcatctaaaaagctctaaagccagctttttagaatggagagaccaattcacggtagaagaacctggagcacagacaacaccggtgagcgaactgcaggctccccgcgcggggcatccgtgcgcaagcctggccgcctcctcactgctcaaaccagatcatctctggagccctgacattctctttcctcactgctagccccactcccctcaaatcctagaagacctttgagggagagaattggagatacacgtcatcctagccaggtgtcctgtgccaggatattttctccttcagttttcttagtccatttgttttgaccagaaccctactgaattttcacagggcatctttttatttttcttgggtttgcctcttttattcctcttcttcctcctctgccttcttctttctttcttttcttttctttttcttttttttttttgagacagagtctcactctgtcacccaggctagagtacaatggcctgatctcagctcactgcaacctccacctcctgggtttaagcgattatcctgcctcagcctcccaagtagctggcacctgccaccacgcccagctaatttttgtaattttagtagagatggggtttcaccatgttggtcaggctggtcacgaactcctgacctcaggtgatctgcccacctcagcctcccaaagtgctgggattacagaattacaggcatgagccaccacgcccagctgccgccttctttatttttctgtatcctgaataatctgttccccgtcattggcttttctgttaggtctggtgattcttatctgcagcaagaaaagggggtccctcacgtagacacagcaccaggaggctggtcctcccagctctgtgactctggaaggtggatcctgcccttccttggaaggccttagggcctcagcttaccccttttagcccagaagtccagccttctcctcgtgcagcctccagctgttctagaacacacatctgctgttgcctgttactgactccttcctttcctcatgaacatcatgtgtgtcctgtgatggtgggctctgctcatgaaagtatgattgttttatatacctttttttaaagacagaagttgctgctttcagaaagaccattcttctagggggcggcccaatatttaagacaatgctggtaggctggacgtggtgggtcacgcctgtaatcccagcactttgggaggccaaggtgggcagatcacgaggtcatgagtttgataccagactggccaatatggtgaaaccccgtctctactaaaaaatgcaaaaattagccagctgtggtggcgcacacctgtaataacagctactcaggaggctgaggcaggagaattgctggaacctgggaggcagaggttgcagtgagctgagatcatgccactgcactccagcctgggcaacagagcgagactctgtcaaaaaaaggacaacactggtgacaaatatgcatgattgcagcagatccctgttagcagaaatttagagtcaagaatggtcatcttctgcctttggccatttaagcttcttcctttctgaatttcagcctctagtgctcaggaggaggtcagggatctggctcttaaagggtgttggagaaaggtctcctttccatattgcttctgaggacttcttagaccattggcagcacacgtcctcacatgaaggtgggcgtatgatctgggagactctgcttaagaaaccggatctctttattgatagagccatctcatgagcaagtaatgcaagctgttggtaattacagaaaacctactgtggaatttcatctaaaattaatgaagagtcagcactgtggattttaaatacagaggcagtaatggctttagctctcagctgtctgcgggctttcctttgctctctgttgtgcctgggggctcccttccgtcttgtccagttggttcgtatccctatgacacagacccattttaatggaacaccaccaaaatatgcagtatattccaaagtcaaaggtttaggatcagaaaagtgaaaaaggttcatcgtattaaaaagaaaacaaacgtggagaataaaaactgggcagtgaaatctagctagatgaccataatatgtctgcttttcttgactttattattattactttttaagggcattgttcaatcctcgattttgtatctatggcagcaggtgaaggtctctagatgagcgttcacatacacgatgacaaatggttaaggaattttgaggctaaaatctttactgcttagatgtcatgtactttataggcatagcatttctagatttaataggaaggatctctgctctgtatgtgcttttatgtgacttgcaaaggaactattccatttaaatagatttcaattaggataatgggtttgagacatttcacaatggtatattttctagactcttaagatagaattgtcaaattatagcaaatagagttagaaattattttgcaattttctcagcagattgtaatttctcctgccatacatgtagtcattgtaaaaataatagtgtaagggtaccttttataaaactgattattttccaaatagactggtaccttttggtttagaaaaaaaatgatggaagaagattgtagttcaggagagcaagcagaaagcagtcatttttcagcctttcattttattgtacctttggtcacatttttgaagaaaggcccaaaattgccatatgtatgaaagaatattggtaatggggtagagttggaatgaaagtgagattttcagagtaacaaggtcactttcttctgtggcttgtagaaacagatatgtgatcacaacaggtccagcagccagggttggggggagtagagagttcatgtaatttgtatcatgcttaaatttccatatttgaaaaagcaactagagaacaggattttgtcaaaacaaagagaaaaaaataatttttttaaacaggagggggaaatgtacgtgttattcttacaggatgttgaaaaatgtttaaatagctgcgatacagtttgttgagggggcaggggacagtgggaacagtgactaaagggttacattttgatgtagaaatgcctagttgaagaaaaaagcttgcctgggaggaaagtttctgtggagatgtaccctgcatttggagtgatgtactgaagcatcaaagactcagcattaattttgatctttcttgggaagctggagaaaataatgcatttctgagaaaaaatagtaacttatgaaatgtcaaagcctgctctggacaatgtcaacatccatgagtgcgaggcaaattcaagaatccaaaccctaagtgaagaccttcctgacctgctgtctagacgtcaggggctgtttgagcggtgaggtccagcgggttaggcattccaaagatacgagaggcccacacccacatcaggattgtgtgttagttctcaggcttcctaggatttttcttgggaaaaggtttttgaccccaagtggctcccagcttgacagaaatctttagaggcagctcagaaaaactttggtttcccaaaataatccaaaggctaaagttctgccaccctttaaaagagtagtgttttggctgggcgcggtggttcacacttgtaatcccagcactttgggaaaccgaggcgggcggatcacgaggtcaggagttcgagaccaacctggccaacatagtgaaaccccgtctctactgaaaatacaaaagttagctgagcatggtggtgcatgcctgtagtcccagctacttgggaggctgaggcaggagaatcgcttgaacccgggaggtggaggttgtagtgagccgagatcccaccactgcactccaacctgggcagcagagtgagactccatctcaaaaaaaaaaaaaaaaaagtggtgttttaacttcttttgggacatagtcaccatttaggactctgaacactatgaactctctccgcagaaatccgcacatgtacacacagaccaaaacttgcatgcatgtgtgtgttaagaacccttcatttaaaataagatgcaaagttttgaagagaaagtttgctgctgttacagacaccattttcccttgagtgttaaagcgttcagctgggaatgtcccttgttggttgttcctcagtaagattagcagagctggaacctgccagccaggcctcattttgagacttgtacagcctgacagtagtgcttccaaaagatgcacctccccactcacatcaggagctgaggcccagtgtttcccccaagggtctttttgaagaagacatttttgtctaataacagttttattatttttattattgaaaaagctgtaccaactctgtattcattttcctggttattcatatgcttttttcccctgagagtcaaaagatgggtttaacctttgaccttgtgggtttttatggcctgaaattaattttttagagaaattgctttatctttaaaaaaatttttggccgggtgtggtggctcacgcctgtaatcccagcactttgagaggccgaggcaggcggatcacgaggtcagcagttcgagaccagcctggccaatatggtgaaatcccgtctctactaaaaatacaaaaattagccgggtgtggtggtgtgcgcctgtagtcccagctactcgggaggcggaggcagaagaatcgcttgaacctggagggcagaggttgcagtcagctgagatcgtgccactgcactccagcctgggtgacagagcaagactccatctcaaaaaaaaaaaaaaattttttttttttagagatgggatctcgttatgttgcccaggctagtctcaaactctggccgcaagtgatcctcccaccttggcttccaaacgtgttgggatcataggtatgagcccctgcacctggccaaattgttttttacattagttatgaaggaggcattgcgtgcctgtattatgtgtaacacaatttgagaatacatgtttttaacaaagtacgttatgaaaactgcatatgttggatttgtgtcctgcttttaagtcctttgctgtactttctcacaggctgggaggaggatgattctggttcagaggcaggccctggcaccacaggtctgaaactgcagtcctcttggtggcaacagccctttgatttctacttccaaacccctggtagatcacatcctgcagaggagcctttatttgtatgatcaagatatgacaagtttccaccacccagaagtagtaattcctcccttttctggaaggatccttttctttgttacagcaactggattagattttccatgtcctaaaagaaatgtattttcccagcagaaacaaccttatacaaagtggttccgtggaggagagaattaccatgttatagtcctcaggaaggcttttgttcctggaaaggataccattgaatagtgacatctgagttttaaggtagatttcactttcttatagcaacagtgctgtaatgttacattatggaagctaaaacctgatgctcaacttgtaaaatatactcaactataaacattcctcttctgaactatatggaattttctaaaaaggacataaataggttacttaggtattatgtgcagtgttccttcattcattcattaaactaataaatatttcagtgccagcattgggatacagcagtgaataaacctaactttctgccacatacagcatatttttcttgtggggcaaaaagtaacaggtaggcaatgtcagacagtaccgttctcaaaaataaagagagagccaggtgcagtggcttactcctgtaatcccagctctttgggaggctgaggcaggaagattacatgagccgaggagtttgagaccagtttgggcaacagtgagaccctgtctctatttaaaacattgaaaaactagctgggtgtactggcatgtgcctgtagtcctagctactcagaaggctgagtaggaggattgcttgagcccaggagttcgaggctgcagtgagctatgatcgcacgagtgcactccagcctgggtgatagagtgagatcctgcctttaaaaaaaaataataataattttagaaagataataagggatgaggaggccccacttttaggatgaggtagtcaggaaggtctttctgagaatgtgacacttgagctgagacccgctgttatttttactacaacaaattttaggagtaacaattatctttgggatcttggaattcagtgaggcttcttttcacagattttgatagatttgtttgaaggacctcttgaggagttaggactttggtgtcagtgtccttttgagagagagacccagccatatctgttttttccttattgtcagttttcctgcggcaagaactggaggagagatgaaattaccgcttggcctcttggccgcagttcaaagcagaactgagcatcttcctgctcactggtcggcttctgagctcagcactgaacctagctgccagacattagacagtagttcccaactgtcttccagacgcatgaaccgacccctcagcagtcactccatgagctctgacaaccccaaatgctttccctggatttgtcactgcatctggaggccagctggcttcagcatggccctgaatcccagacacaggagcctgggcacagggtgaaggattgcggctgttggcctgaggctatttttcttctgaatgtcattttaagcactgagtcacaaaattctaagtcttttaagcagcagtataatactgccaatgatgctgctgctgtttaaaaattttttcacatgtgacctgctcagccctgaagttattcctattactccagagtcccagagtacattaataatcagtgtttgtacagggctgcagttgacagatccattgccatacatcttcctttaatccccacaataccctattgttactcttgccttgctttccccttcatcgaccaggcaactgactctaaaccgatcaaggaagaagagggactagccatccaaggagacagacacttatgccaggaattttgtagaattcctttcattccccatgcaaacgctaggaggtagactttatttttctcattttgaagctcagaaagtttctgtcacttgcctgaggtcacacagctggtgaggggcagagctagagtttgactgctcagaggggtcagtctgagttggaagcatatactctttctactgcaccaggcgcctgtctgacctgcctgaggacagccctgcttgctccctcctcttcgtaactccacctccaccctcttcctcttcagtgtcccctcagtcaccttgcccagtgtctgagccaggacagggtgtcgtgggctggcccgtgggtgggcagtgacaagtgctgttatcttaggttcctggaggatgaataggcttttaaacatttattaacaaagagctttacacacacacacacacacacacacacacacatctgcatatacacatacttatatacatctgtatatataaagatcatagaggaaagttaagcttcatatgaccctaccatagcaggcattcatttacatttttaaacattgtataatcagtgtacttactagtttgtattttccccctcatttatcatgatttcatttatgcatttctaggcagtgcatatacttaccatctgtaaggacttgtaatatttcctgttagcacacctagagtccttatttaacaattcaagttgttaaccttttgtggcctggtaaggaacttaccagataacattatttctcttctcttatcttctctgctttttttttttttttttttttttttttttgagacagagtctcactctgttgtccaggctggagtgcagtggcatgatcttggctcactgcaacctctgcctcccaagttcaagcaattcttctgcctcagcctctcgagtagcagggattacaggtgcctgccaccacacctggctaatttttgtatttttagtagagacggggtttcaccatattggccagcctcgtctcgaactcctgacctcaggtgatctgcctgtctctgcctcccaaagtgctgggattacaggtgtgagccgccatgcctggccagcattatttccttaagaaaataagttgcttttgaaaatttttttgtaagttaagcttagtttattcatcgttttagtggatttgggttggaaacatgcagtaagcatttgacagaaaacaaacatttgtattttccaggtttcagtttacattttgatctaaattctgcgaacagttataactaaatttacaaagctctttggggtatgattatatggctaggtaaaactcttttaagaagatgaagcagagaggattgaattgacaaagacagctctttaaaaattaaggttatttcaagactaagaacataactgcttaattgcaggtaataacagaaaaaacttggaaataaacatcccattatttgacctccaaggcagaagactggcaccaaggaaatggcagcttcgtccctttcctgtcttgggcattggtaaaaggagttgtctagacatgtttgatttctgtttcagcccttattagtagttatgccatggcaaattattcaatttctctgactcagtttccttattcagaaaatggaagcataattcttgcctcatagggccatgaagattaaatgaggggtgtcttgaagtgtctgggacataaatcttcaataaaagctaattccttttttttacagttatctcaaaccttttagtgaattggtgcttatcagtgagctttttaggtgatgcaaagaccctgctttgctcattttaaggaacagttatttttctttctccattttgaagtttcttgtttgctgcctggttgatatggtttggctgtgtccccacccatatctcatcttgaattgtagttcccataatccccacatgtcatgggagggacctggtgggaggtaattgaaccatgggggtggttaccctcatgctgttcttgtgatagtgagtgagttctcacaagagctgatggttttataaggggcttcccccttcgcttggcactcattctctctcctgttaccctgtgaagaggtgtctcctgccgtgattgtaagtttcccgaggcctcccggccatgtgaaactgtgagtcaattaaacctcttttctttataaattaccaagtcttgggtattccttcaaagcagcatgagaacagactaatacattggtttaaattagaatgccaaaatttaaataatttttatcttgaatagtagatggaattaactttctcttgaaagatatattttaaaaaattgaacttacacagacagttttgaaatggtcttattttagttttatttatttatttattttgagacagagtctcacagtgtcgcccaggctggagtgcaatggcacaatctcggctcactgcaacctccacctccagggtcaagcgattctcttgcctcagcttcctgagtagctgggattataggcgcccaccaccatgcccagctaatttttgtgtttttagtagagacggggtttcaccatgttggccaggctggtctcgaactcctgacatcgtgattctcccacctcggcctcccaaagtctcaggattacaggcatgaaccaccgcgcctggctgaaattgtttttattatagatgttgcttgtgcagttttgttagaagttcgtgacttttaacagtgatgaaaatacttcgtcattcaacaggttatttttctgctggttgtaggttatttgtaaggaactgttagtctcctatctgggtggacatgtaatagtatcagttactgaaccagaactttaaacacctttctgatactcacactgggaggtcaccaagtatctcagaataaaatgtcccaaactgaacctaccatgttcccagaaacccagcccttctcaaattcccagacttggtgaatgggagcctgtccttgcagtcttgtagcccaaaacctagggcttaagaacaccttcttccttactcccatatgcaacccatcaagttccatgcatttcatctcctaatctcaaatcccttcacccatctccacagccaccccgctagtccgggctgccattgtctctcacttaaaatgttgttattgtctaactgaccttcctgaaccctttcttgcctctttccagtttattttccacactacagccagaaaaagcttttcaaaatacgcatctggtcacctgcatacctgtctccagaccacatacaataagccttcacttgttcctcctttcccttaggaaaaaaactagatcctcaatgtggccttcaaggcactgcatgacccagcccctgccgcactcctgtctcatactgtgtgtataatactcacccccgagaagctgcttcagattcccccatgaggctctgcgcctgcctcaggcccttactcttacccttcttgtttctggaatgcccacgctgccatcacttagccagctcgactcatcctggagatgtcagcccaatgcccacttgttcagggggcccttctgtgattaatattcaaaacggatcaggtttccctgctgactgtgatctcttggtgcccttcacatcacttcctagttcttgcattgattatgtgattgtctcgctcctcacccctctctaagctccctgaggtcaatctgagtactgcaccactttgcaaattataagacaggaaacaagtaagtccggaatattcaatcattgccttcactctcagagctcaaattccacgtgtccaactgtcaagatttggcttacattaaaatgtttatgcaaacagacatttaacagtgaataaattgtgaaattaagagagccatagatctatagctaactccaaatgtttgtgtgcataataaattgagggaaaaataagagtttatctttaactaggtgttattcttaaattaattcctgtattgtagtgtaatcatccctcggtatccataggagattagttctaggatccctgatagataccaaaatcagagaatgctcaagtcgcttgtataaagtggtgttatatttgcatataacttatgcacatcctcccatatactttatttttaaattaattaattttttgagacagggtcttactctgtcgctcaggctggagtgcagtgtcaacctgggctcaggtgatcctccccactcagcctccaggtagctgggactacaggcgtgagccatcacacccagctaatttttaaaactttttgtagagacggggtctcaccgtgttgctcaggctggtctcaaattcctggggctcaagcgatcctcctgccttagcctcccaaagtgctgggattacactgggcccagccctcatatatactttaaataatctctagattacctgtaatatctaataagatgtgaatactatgtaaatagctgttatattgtgtattgtttttaaaatttttatttttttttagttgtatttttttttccccgaatattttcgatctgtagttggttgaatctgcggatgtggaacctgtgggtatggagagccggctgtaccttaagctatttagattgctatttcaaggaggagtttacatagggaaaaatctgtgttgcaggtgcccaaggtggccagtgtaaaggggaagacagagtcatcaacaaagtcaccaggtaacagtaatatggatgaacatttgctacaggtggaatttcataggaaagctcatctgatatagcttgtttgtgtctcggtaaagtcctaggctaatgtaaccaacttccctaaagatggaaatatattcccatagcactcaaaaagggatgtgcagaatttgggagtttttatgattttagtacttgtagtagaacatttacttatgtatagcaatgaattagaggagcagaataggatgggtcatactcagggatgacctaggcctgctggtttctttttgctgtaaactgtggtttactttttgtaagaaagtcttcacagtatggaacatatatccctaataggcagctttttaccccaaacaagttttgaggggcctatcacaatagacaaaagcgctttatagcctggtctgtgaattactgtgactttttaaaagcacctttcagtgcttgcctgagttgtcattacactcaaggtcccccagaattgatgttccccctgggtagatagggtgaaagtctttgtctttccagtgatgtgctcagtaagtactgagtggatggaacactttcttggagcacagagcacctgcagaaagcttctgttggctccagattggtttgtcaacggaagcatccgcatgaggcagtgccacacagtggttaagaggatggccttggaacctgagtcctagctctgctagttagtagctttgttaccttggtgagttgcctaaaccactttctttttcctcgtgtattaaatgtggaaatgatgatagtacctacctggcagaattgtgaggcttagatgagatagtgttataatgttggtaaagtgattagctagagggctggcagtcataaacgttgattgttgttcttgttggttcagggtccctctgatacatcttcacagatcaggactgcgtttgacttggatctctatggcccttttttccaagaattcctgccactttactggactgggtcatgcgctgcccagtacctaaaggtgttctttaaccacagaaattaaaatggcaatcataatgtttttggaggaaaaaaaaaatacctgtattttctgaagaaataaataaccattgtatctttgtatttaaatagagtaactgccaaatcaataggatattttgagaacaagtggtaatatttcttggtgtcatttactccatcataaagatccatggggagagagcagtgtggttaattatgatgttcctgtgctgtcactgcctaaattgacagtgtatgaagtgccgtcccatttattctttctcccaacaagctgaggggtggggttttaccatcatggtcctcattcgacagatccagacccagtgaggctgctcctgagctggtgttttttccagttagcctcagctgtcagctgcgccatggaggatgattttgggtgttgagttatctgggtggtatttaatgggctcctaattgcacatggatggccagaaagttctgctcctgttttggcgttttgctttggcagacagtgctctctgaggactcacataagctggaagaaaaaaacccaacaacaaactcaacgctaatcatctggaaagacaggatactgctgttaggcagatattggacctgtgaacagaaaaacatcaagatcacaattttacagcgtttgtttctttgaaatgtcaaatggagccccaatacagccatcaggtttatagcacctccagaattagattagacggtgtggttccatgctgtgtacttgtatttctggttatgaaatgctccttgtgcttattttccccaatctgctgagaaacacttttttcttgttcctttatgcattcacgtttcttttttattccacttgccttttttccttaccccttatttctgccttctgctctgcttttggcctttagacagcaatggaacagaccttcaggaatgggcgtccatggaggccctggcgggggccagctctgtacctaggatctgagttggggggttaggaccacgtcccaggaggtaaggccacaactcaagggcaaacagtacaggcatgtgtagtgaagatcaggagcaggacatggtctcactgtgccctgtgtctatggaagcagctgcccatttctgattcttcagatattttaaatgagttcattgaccttgatagagacttgcccttctttgatgtagttacacagcaatagcctgttagaaagcacttgcctctaacatggtgccttgcaaggtaggtgtagactatattaactagttattggtgccagggaataactggtactatatctccacctgaattcctcgtgattccattgtctctttctgggtatgcatgtgtttttgtttgtttgtttgttttttgagatggagtctcactctgtcacccaggctggagtgcagtggtgcgatcttggctcactgcaacctccaccctccaagttcaagcgattctcctgcctcagcctcccaagtagctgggattacaggcgcctgccaccgcgcctggctaattttttgtatttttagtagagatggggttttaccatcttggccaggctggtcttgaactcctgacctcgtgatccacccaccttggcctcccaaagtgctgggattacaggcgcgagccaccacaccaggccgcatgtgtgtttttaaagtgtaatgcattcctaatggtccaagttgttttacaccagtgaatctcagttccagggtgggccccggggcagggtatgtgtgtgtgtttgggggtggggtagttgtgtgtgtggttgtgcacatataggcttatgatgactggggaattaaaaaaatgtcttccaatccatcagttgtgaaactccacaatcatgataagcctcaagatggataggggtgagctgggtcatttgtgtgttgaagatgttgcctaggattttctggtacactaacccttccctcaatcccaaatgcctctgcctttttagaactgtgattaagaaggtaatgattagggatgatcagttgtctcaccagcagtctgttaggtggagctgacctgggctcatgccatctgcaaaggaacccatgggaaccagggaccattttcagcatttgaaaaggcttaacagaaactatgcttttacccaggatgaacatacaaaagctacccaaaccatcaagtttccttgcttttgtttggaattgcaaccctgtatggaaggtttcatgctgactccacgttctgattggctgtggatgacataataggagtttctgacacaggattggtctaactgtagatattgttactggagctggtaccaggtctcacttcccactacctttagaatgaggttgaccttgaatgtgagtgcccttgactatggaaatgaagccactgattgtttcttgcttgctcagctatgcttattatcacacctgtggcagtgacttgatttttataatgtcattatgaaccccttataaatatggattgttgattaaaatttggatcagtattgaaatggaagaataatacacagaattaatcagtttactggtaaacaatgtaagaatattgaaaaacatgtggccaacatggggaggggacagaaaaaaaagaggttgatgaaactacagatcttatccacagctctcatttaaaaaagatcctttttcatcagcttttcactgaaatcaaacaccaataactctttcaccacgaaacaccaactattaatacttagtctctataagcctcctaggatcctgttgtgttcatttacctaggtgatgtacatcatcctaaattctgccttttcattttgtattacgatgtatatgtacagtacatatttttacattgtcattgtgtcattcttaatggtcacagctgcctgaactaaacctaaagtcagacagtcaggacagtccagtgctggtgattagagaaggctggaaacaagctgtctgatcccggataacatgccggtgagtccacaggctgagtcggcacggataaaaagatgtgctcacacctgctgtggatgctgattatagtagcttacatatgttaagtgttatttcttaattctcccagcagcccctatgagataggcactattatctgcattatatgtaaggaaaaagaggccttttgccgtaacttgtccagggtgacacactgataagaggtggaactggaatccaaagctgggtctgtttaatttcagagtttgagttcttaaccaggttttctgtgcaattgtgttgcaccccaggacctattcagttctcacctcccttcagaatctaaccaccttccaccttaataatgacaaacacatctattaatatgcattaaagtgacagaagcttaatactgaaacaagatagagtggatgttgctggcgaacaggaaccccagagacggtcctgtccacatgaggctgtgttagttttcctagagcagagtggtgtgaagggccagcctgcattcagtctctcctttggttccgtcctttagtcagcctcagagtttttcagacttgaatgggcacaacagtgaccacacagggttgcctgaagcacatatatggtacttggtgggagactcaagattcttagtgaggctgagaagtggtgcttgggtgatgtttgtacagagtaagaactaatgaagcactgggatagagagccccatgaagttcaaccccatcacagcctgagcaggagcagcctcacagtcaccttctgtactgtttggcagtaggtgggggaaagataggggctgctgaggaggccaagttgatgcctgtcctctggtgcctgagcacatgcaggtgcggctgatctgcagctcattctcataggttggaaactctccacctaatggccagcacacataagggatgtttctacagctgggctgagcaagacaagtctggaaagtctagaagtatttgttaatgggagatgagctgtttcagtactatttgaaaaatattttgacttaattgccttaggcacattagtcagctgatgtgcactctggtttgctttccttgactttaacagttgccaagaatttctcttgttacaaaagagaaaagtaggactctaagtatgttctgttccatggaaattgagtcatagactcttagaatttagagccttctggaaaattccttgaagacaatggaggaagcttccctcagtttacagcagaaccccaggctcagggaggtgaagtggggagctccgtcactgtcatttgagggccatttgagggctgtggtcctccgtggagctcctccctctgctgcctcatggcctcactcggtctgtgttttcaatgactgatttactactaactgaacaattgtctgaatcccaatcatctcatcactgggcaatcctttcttggcatgatccacaacagaggtagagttgggtggggaatgttccccctcagggcctataggcaagtggttctcctcagggaaccatgaggtggccagccggccaggtcaggaccatgcctgtgccaggaaccagtatctcctaaccttgccagttgtgaacatggctctgggtttcttgcctctattccttttcttctgctttgtcctccacttaaaatgtactctccattttgtcttggcggggcaccttgtcaggtccccatgggccagctcacacggggcccctgggaaaccttccaccatgccttctcatattcctcccatcaattcctatttccctcagtcccactctttcccctacacacacatgtgtgcacacatacatgcacatacacatgtgcacacatgcatgcacacatcttaaacctggtttaaaaaaatttatcttctttggccctcagatgccttacctataaataacattctgatgtaagattacacttagcaaatttactgccctatatcaaggttaagtctgctgatgcctgtgtgaaaaggagggtttctgactgggggaaacggctaatttttttgagttcttaaagagttttttcagtttttgaagaattaatctgaaatacgttcctcacattgagaagctgaatggccagtgatcaacctagatgtaagctaggttgtctaatttcctaatatgatttgaagggaataaattcaatgctttacagtttattatagctagaaaatagagaaatgattgtccatatcagtcagtttttccaaagttaaaatttagatccttgtataggaaacagagcaatatgtgtgttatgtgtgttatatacactattgtcagcgttttctaaaaagatttcaaagacgaatgtttttatgctgatggaatgggaaggcttcatcaggaagctgtaaaaaaatccagaagccataaagaaaaagatagagagcttcaacatctcaaaatgtaaaactttgtatattaaaaaaaaaacccatacaattaaaaggcaagtcagagatggaaggaaatatttggaacacatacaatagacaaagtattaactatccttgataaagaagtgaataacaaaagtccttgggcaagaaatatgaacgaccagttaacagaagaagagaagcaaatgagggaaaagtatgaagtgactatcaaagcattgagataccttttccctgcccactgaatgggcagaaatttaaaataatattcagtcttgaccagggttgaaggtggacattttatacaatgttaattaggagagtaaattggacaaattggcaaacagtttcagaattttaaatatgtacctcatttgacccagcaactccactctagaaatacatcctacagatagactttctttttgcacaagatttatatggaaacacagcttttaaaggcagcgttgtttctaatggtgaaaacaggaaaccctgcaaatttctatcaaataaaaaaatgattaagtaaatagtggcataccttactgtgtagaaaaggtgtgtgtgtgtgtgtgtgtgtgtgtgtgtgtacctgtcagtccataggtataggccataggaggtggtccaagaaatagtaagtaaaaaacaaatgcaaaacaatttgtataatatgatctcatttaaaagtaaaaacaaaaacaactttatttgtgcgcactaccttttgtatgcacacaaaatgcctatgaaaggtctggaaagatacgttctaaaccaggggtccccaatccccgggccacagaccaggagcggtccatggcctgctaggaaccaggctgcacaccaggaggtgagctgtgggtgagtgagcaaagcttcatctgtatttacagcccctttccatccctcgcatgactgcctgagctccacctcctgtcacatcagtagcggcacagattctcataggagtgtaaaccctactgtgaactgcgcatgcgagggatctaggttgctcctccttatgagaatctaatgcttgatgatctgtcactgtctcccagcacccccagataggactgtctagttgcaggaaaacaagctcagggcttccactgattctacattattgtgagttgtagaattgtgtcattatatacaatgtaataacaatagaaatgaaatgcacaataaatgcagtatacttgaatcatcccgaaaccataccccgctgcctctggtccgtggaaaaattgtcttccatgaagctgattttgcagggaggaggagaaaatttcacttttcctctacatctgtttttgaagtttttttcaatgagtttgaaattatatattttttattgaagtgaagatgtatacatatggttcaactctctcatttcacttctagaaatatttcctaaggaaataaccagagggcagtcaaaggtttatctatagctagtcaaaggtttatctatagcatcatgtgcagcattgcagtcttgtttgtaataagaaattcaagtggtattcttgaattacattatggaatattcatcctatacagcgattaaaaatcatgcatgaaataatctttgatttgagaaaatgcttataagaacagtaaacaattagggagggctgctctgtgccagggatcatgctcagtgctttgcttaagttgtttcgtttaatcttctgaacagtcagttgccattcccattttacagatgaaaagaagcttaggcttggttagggtaaatgatttgccagagggccagactgctaccaagttggtggaactcaaactaaaggccttgctaatgatagattacttcagtgtgtaatcttgagtataaaagcagattacatacatacatacagtgtgtcctcatttaataaaaatgagtctttctgccttagttttcttgtgggtaaggcacagaggattggctagggcaattttatattctgaagataatgattataataatttttaaaagattgacatgtgtttacatataattttttttccagatcacaaaagtatttggaaatacctgaaattagcaaataacaattactgttaaacctgttatatggagaaaatgagaattaatgctaccctctccttttttttgcccagtgcagacatttgtacattggtgtcagcttgatgagtacttacttgatgagtaccatctgtttaggacatacctgtcctgagttttcattacttattctagggattttttgcccccatattgatgtcattttctttttttttttttttgatacggagtctcactctgtcaccaggctggagtgcagtggcaggatctcagctcactgtaacctccgcctccagggttcaagtaattctcctgcctcaccctcccgagtagctgggactacaggcgcgcaccgccacgcccagctaatttttgtattttcagtagaggcggggtttcaccatgttggcccagatggtctcgatctcttgaccttgtgatctgcctgcctcgacctcccaaagagctgggattacaggcgtgagcccccgtgcccagcctgatgtcattttctgatgtctatgtgttgtctccttgagttttccctgtggatgcacccattattttttataaatattttattattttttatactacttttatactacagaaaagtttttactaattttctagtttctaataccagttttcagcaaagtttttgctaattatgttccagccttagtgcaagagagggtttgtctcattgtgcccttgccagcatcatacatgttttaatcattgagagaaattatttcatcggtttgtttccaattctgtattatttttagtaaggttgagttttttatttgtttcttggccatttgaacttttgggtgaagtgcctgttcatgtacttgggagatacctattgaagatgccttcctaaatttgaccattaaagaaagaccttaagaaagactgtaagtccttctaaggggaagttttactctgccaggtggaatgcatttttcttacattgcatgaaagttaaaaacatgatttcttaaccacttggaatttatctgacttacaagatttgcctttaaaattttagaaatgattggtgaaaagtacatggaacctctctgtactactttggcaacttcctgagaatctgtcattatttcaaaatgaagcttgagaatttaaggaatggtacaacttcagctctctcctcttactgcctggaaccctgcttgataatcccaactggtagaaccaatagggacgggaggggagcagctctcatgatatccccaaagccaaacagtggttaggaatgctgcttttgtttttaatttggacatagtttcaaactttaaaatggatgcaaaagtaaaaatggaatcttaaaccctttcccaaaggtacattgttgttaacatgttaccccatgagcatcagcttttgaaaatgtgttgttttggctaggcatggtggcttccgcctgtaatcccagcactttgggaagccaaggcaggcagatcacctgaggccaggagttcaagaccagcctggccaacatggcgaatttctgtttctactaaaaatacaaaaattagctggttgtggtggcatacacctgtaatcccagctacttgggaggctgaggcaagagaatggcttgaacccgggaggtagaggttggagtgagctgaaatcttgccactgcactccagcctgggtgacagatcgagactctgtctcaaaaaaacaaaaaacaaacaaaaaaaaagaaaagaaaagaaaaatgtgttgttttgtgaccacagccacaacacactattctcatatcttgggctttcggcaccatactctcttggcttccaggcattcattcctctgaagaaaaatgcttactcctggttttcagatttctcaagagcctacggtttaggaatgattggtgaaaagtacatggaaaggttttctttttaagatttaaatataaattcaagcacatttagaggtttggaacaattgattgcctgctcctgaactcaaatattaatattctttcctcacccctagcaccacccctcagcttcaggtagcagttaacgtccctcttgtgtagctgccttgttcccatctcaatgcccttccatgtgctgttgcttcatatccacaatattctttttttgttgtttttaaatagagatagtgtctcgctgtattgtccaggctggtctcgaacccctggactcaagcattcctcccgcctcggcttctcagagtgttggaattacaggcttgagccactgtgcccagcctgcaatattctcttctctgcatatcctccttctaagacacatagatgacttttctgctttaaaaaaaaaaaagttattcccagacttctttacttgataagtaccatctgtttaggacacacctgtcctgagttatcattacttattctagggtttctgtgaccccatattgatgtcattttctgatgtctatgtgttgtctccttgagttttcccctgtagatgcccccattattattttttataaacctccacaggccttgtatggttgtgctgaacgcatgacctggttttcaatgagttactgtgaattgaatttgattttgttatttgagccatctagcaatctataaagcaaaattctaattgtattgatgctttcgaacccccctttcctctgggatgtggcactcttcccagagtgggctttcttcatggcaggtaaaaggtctatgcggtggtggaagggagtgggcctgctagtttcttcgtctaaaccctgtgctgtgttggtggtggtgcaggaccctgctgggtcggaagagatggtgagtaggggcctgggaacctaacaactaatgggaaaggatttccaagtttcttgccagtgctgaagatagagtcttgtctttttcttttctttaaatgaaactaaggctagagctagttcattatctacaatgtcatattgatttttgtttgtgaggtggagtattaacagattagaatggctgctggcagttctcagctgcttcattgaatttaaatgaatcaagggatagctcttaagatgtacttgagatttgtaggctaaatcagaccttcctgccgtggttggttttgaccagattcactgttttgctctgtggcatcaaggcagaaaaatacagaatcttatagccttttccctcctttttacaaaaccaactcctattaaaaaatgcacaggtaagaagtattaagacatcctctgcaatagaatgcagcttgccttcttttcctctgccaggagcttttggattgaaactgttgactgacataacccaagctagcagatggtactcatacatcaaatgtccaaatgcaagcttgttcagaggtagcaaatgcctaacaggctgaattttacaaagacaaagaatgtgaataatgaccttgaaggattagggatggtcccgagaaaggaagcacactcgacaccaggcttgccccttcagatgctgtgttacctgcctcggcctcctggccaacatggtaaaaccccgtctctactaaaaataaaaaacattagtcaggtgttgtggcaggcacttgtaatcccagcaactcaggaggctgaagcaggagaatcgcttgaacctgggagctggaggttgcagtgagcctagatcgtgccattgctctccagcctgggcaataagagtgaaactccatcgcaaaaaaaaaaaaaaaaaaaagatgctctgttaccgtgctcactgtacactgtacctggaggctggttccattttcaatgaaatttgctttcttccctccctgccttaccctgtctctcattctttcctccagtatttcctctaatctagtatatgaattagaagtaaataatattcatggctatactactatttggcctagtgtgtttgctatgaacaaacacgtgttggtgataattgagtggcctggaacgaaccatctgctctttttatggctctgattctagaaccccaggattgtgaaagacagagctaggaagggcagttattagtagaaaatgagaccaaagaaaaaaagtgaaaaaaaaaaaaaaaaagccagattcagtgaggttaatattatcttggaattaataaatgctaatattgagtcttgaaatggctcttcattttttattatacagcctgatttattgttgattggtttttcatggcctaattgatgatgatgacctttttgggtgaacagaaagcaaataaacctcattgctgtttgatacgctcactctgactccactgacacagagcgcagttggctccagtttgaggcctttgttttttatgagttcaagttagatggcagctactaatttgtaaactagatagaacagaatcctacataaattctggagagagaagcccttattagaggctttctcagtcttaatgggagagatgaacttcttcatagggatagcaaccttaaaggaggattctggcaaagaccttaggaaggacccatcagcagaagagtttgagacatcctgctttctggaaacataccggatcaaggctaaggtttagagggcatttggctccaaatagcctcccccaccccacccctgccccaccccaaatgtatgggagcataaatacatttacatctattatcttataacttaaccacactgtagtgtaaacactaaagaacaatgtgaagtttttgaatagaattgttttagttggcataacaagtggttcagagtattatttctttgtagttttgaagagtgaaatcttttaaaattttatattatttgtttattttttaaaatagtgatgggtctcctgtgttgaccaggctggtctcaaactcctagccttaagcagtcctcccatcttgacctccaatttttgcttttttttttttttttttgtgagttggaatctcgctctgttgccaggctggagtgcagtggcgcgatctcagctcactgcaacctctgactcccaggttaaagcgattctcctccctcagcctcccgagtaactgggattacaggtgcccaccaccacacccagctaatttttgtatttttagtagagacgggtttcaccatgttggccaggatggtctcaatctcttgacctggtgatccacccacctcagcctcccaaagtgctgagattacaagcgtgagccaccgcgcctgaccaatttttgctttttaaaatgtaactaacctgcacatatactggccttcaaattttatttttaattatgataaaatacgtatagcaaaattttaccatcttaaccatttttaagttcggtagtattaagtatattcacattgttatacaaccaatctccagaactttttcatcttataaaactgaaattctgtatccattaaacaacatctccccatttcctcctctgccagcccatggaactcttcattttcctttctgttgctatgaatttgactactttagatacctcttgtaagtggaatcatacagtatttgtctttatgtgactagtcagcttatttcgttagcataatgtcctcaaggttcatccatgtagtagcatgtgacaggatttccttccttttaaggctgaataatattcccttgtgtttgtccattcatctgtcagtggacacttgggttgcttccacctcttggccattgtctgaaatgccactgtgaacatgggtgtgcaaatatctttttgagaccctgctttcaattcttttggatatatacccagaagtgggattggaggattatatggtagttctatttttaacttttgagaaacttccataccagttgcgccattttacagtcttgccaatagtgcacaaaaactctaatctctgtacaaccttgccaacacttcttttcttcttttttaattgtagtcatcctaatggatgtggggtgatatctcattgcggttttaattgcattttcctaataactagtgatgttgagcatctttccatgtgcttgttgcccatttgtatatctttttggagaactgtcctttcaagtcctttgcccatttttttaaaaatgtaatttaattttaagttccaggatacatgtgcaggacttgcaggtttgttaacataggtaaatgtgtgccatgcttgtttgctgcacctgtcaacctaggtgttaacccccacatgcattagctatttatcctgatgctctccctcttcctgccccctgccccctgacaggccccagtgtgtgttattcccttctctgtgtccaagtgttctcattgttcaggtcccacttataagtaagaacatgcagtgtttggttttctgttactgtgttagtttgctgaggataatggcttctagctccatccatgtccctggaaaggacatgatctcatttctttttatggctgcatagtattccatggtgtatatataccacatttttttagtccagtctatcattgatgggcatttgggttgattctgtgtctttactattgtgaatagtggtgcagtgaacgtatgtgtgcatgtatctttataagagaatgatttatattcctttgggtatatacccagtaatggcattgctgggtcaactggtatttctggttctaggtctttgaggaattgccacactgtcttccacaatggttgaactaatttatattcccaccaacagtgtaaaagcattcctatttctccacagtctcaccagcatctgttttctcttgactttttaataattgtcatctgactggtgtgagatggtatctcattgtggttttgatttgcatttctctaatgatcagtgatatttagctttttttcatatgtttttttgctgcataaatgtcttcttttgagaaatgtctgttcatgtcctttgcccactttttaatggggttgtttttttcttgtacgtttgtttaggttccttgtagattctggatattagacctttgtcagatggatagattacaaaaattttctcccattctgtaggttgcctgttcactctgatgatagtttattttgctgcacagaagctctttagtttaatgagattccatttgtcagtttttgcttttgttgcaattgcttttgacgttttcatcatgaaatctttgtctgtgcctatgtcatgaatggtattgcctagattttcttctagggtttttatagtttttgggttttccgtttaagtctttaatccatcttgagttaatttttgtataaggtgtcaagttgtttgttattagagttctttacattttctggatattaaccccttatcagataaatgatttgcagatattttcttcccctccataggccacctgcattccttgggtcatgctccttgctctcattactctgatgtctgcttctgtttcacatcgccttctctgagtttctgccttcctcatatcttttaagggcacttgtgattacattgggcccacccaggcaatccaggataatctttccatctcaatcatatctgcaaaatctctgttgccatgggaagtaacagattcacaggttttagggactaggatgtggacgtctctgagtggggtaggggaggagcattacctgtgtaccacgtcccttatctcccctgcctgccttcacaggaactagacttatctctttagtgacttaagtcaatttggactgttcctcatgttttcttttcctttccaaccttccatctggtcctgttgcttcattcttttccttctctttccatctgccttttcttgccagctccacatccactcctctagtttaggcatttcttacatcatgctttggctgccagaatagccttaaaactggtctgcttgcctgtaattctccctttagatattttattttattttattttattttattttattttattttattttatttgatgagatggagtctcactctgttgcccaggctggagtgcagtggcccaatcttgccttactgaaacctccttctctcagtttcaagcgattcttgtgtctcagcctcctgagtagcttgaattacaggcatgcgccaccacgtccagctgatttttgtatttttagtagagatgaggttttgccatgttggccaggctggtctcgaattcctgacctcaagggatccacccacctcagcctcccaaagtgctgggattacaggcgtgagccactgtgcctggactccctgtaggtattttaaactcatcttgatgcatacttgtaaaaacaaatctatgcctgataattccattatctgaagtccttatttttctgttatattctatttctgctggtccttagtcttgtttcctcatctgcttggttacctttggttatgtgcttaccattcattgtatttgagaaagtatttctcggaataacttgaggcttcgggtgaaagtgctttgctttcgtggggagagaatttcttctgccaggtccctggaggtatttctggtccaagaccaccttggaagaagctcatggttgagattccctggttctttcagaggaggcaaacctaggcctccagtctaagtgaggcctggtttgcttctggttcacctgttacctagtagctgtagtcctttggggtcccggctccttgaggaagagtctccagttggtgttccacgctggccagccctggatgttgacttctgctcaggaggctgttaaagtgaaaggctgcggggtggtgggacatcacacctgtcatcccatnnnnnnnnnnnnnnnnnnnnnnnnnnnnnnnnnnnnnnnnnnnnnnnnnnnnnnnnnnnnnnnnnnnnnnnnnnnnnnnnnnnnnnnnnnnnnnnnnnnnnnnnnnnnnnnnnnnnnnnnnnnatacaggtgtggtggcgggcgtctgtagtcccagctactggggagcccgaggcaggagaatcacttgaacctgggaggcggaggttgcaatgagccgagattgtgccactgcactccaggctgggtgacagagcaagactctgtctttaaaaaaaaaaaaaaaaaaaaaaaaaaaaaagtgaaagtgtcctttgccagactaggctaggccaatgcttgagggcaaggtggcttctctagagctcatacctcggggttcctgttttctttagtttctgtactgttattccttgctcagttcttgaagcttcaaagcctttcagacttttttttttctggagtcagagtctcactttgtcacccacgctggggtgcagtgccacagtctcagctcactgaaacctctgtttcatggattcaagcaattcttgtgcctcagcctccctagtagctgggattacaggtgtgagccaccgtgcccagccattcagaaattttttttcaatgtattcattgttagttgtgttcagcagaattgtgagcctgataatggagcctgccttcccagacaaccagactccagacctgtttttccatgttgcctctgccaccctcatccattctgggacgggacgtgattaattttgtgtaccactttgatcatgtcagacttttgcttaaacacctctccagcacgaaatcatacctatgggagcctggcgacaacatgagctacagctctccttcccatcacaaggcttggggggtcagtgttaaaacccaagggctttgtagtctgctggaactatgggaaaaagagactgttgagaaggaagctttcttttttggcctttcagttcctgagggcttgagagaagcttgtctctttttttgagcctgggtataattgagtttcaggagtagagggcaggaggctagccattttatatggtaccagattgtcagatggataatgagacctttcatttctcagtgcggccagtcacatgctgctggttgagaactgaggtcttagcttgtaagtgagctgtccatgacggagcacagagggcaggtacaaaagctgggacaaagcaggaataaagagcgtgtgtggcatgtttgaaaaggcaccctgccgggcatcgggcctcagtgtcaggaagcccatgttgtcagtgctgtgcccttggacaaaccatgtagtcttcctgggtgtcagtcaggtccttcctcttggccttggctgtcctgcatggctgtggctgtgggagggtcggctcagttggccttagcagccagccactgggaggacagagagaagagggaacttgaagtggtccccaggaggaggcagaggcagtgaccacttgataggttgtctagagcccaaaccatggtctctggttctagcacactcaattacccagcagtttggggcctggaagcagcctttgtttatctagcctaatcccctcattttgcagatgagcaaacagaagcctggacattttcttgtatttaaagagcagtagtgatgctccggcctcgtgtggcttattttagtaaaaatctagagaagtggaaccaggctttggttagtgtgggtttgggggcatttactgtgaacctctgaggccactgtctgagtgagccctggaggacaataacaacagtgagccagagcctgcccccatctggccacctgacacccagctctccctggggcccaccttcagctctgtccgcccagtctgatcagaggtcgctttacctggccagtcagggggcccaagtgtgtggaggattaggcaagcagggtcctggtgacctccacacgaaaaataactctgcttcctgagcaggtgccagctttttgttccctggggcctggcctgactgctgagaccgcaggcttctgaacgcattgctgttttcaccctttggcgctaggctgggcctaactttgcccttagattcccaggccttcttatcctcaactgcagacgggcctctccactcttgccttggttcctgaaggaccgattcactctgttcaacctcaaaatcatgcactttgtacttggacttgtgcccacagttaccttcatttatagccaccgctgtgggtgaagcagcctcagaacagcagagccttacatatcatccttttatgttatgaaagcaacttaaatgagtttttcagcccactgagaattatcaaataccaaacttttctttttaaattacctctataattttctttttaaattgcccttataaaactaggtgatagttaaatgaaaaacatatgttgcttctgatatttttcttcttactaagcctacaaattccttagcttaagataacagggaaggattgtcctggacccgaggctgtgtttttctggctgctgccagttcctggatttaaattgctttgttggtggatagagatcattcccttttcctggattcaggataggaaagcctgagggtcacaaatgagcctggacagaactgtgtgtgaaagtttttacggtaacttctctcaaatatttgatactgaaattgtgtagtttcagcttgagtccatgttgcagctgggcccttgaatgtaattcttgtcatccttggaatatttcctccttctagtgatccaggatcactgtttcccaaacccccttattcccctacccattttatgatttctcttgttggtaatatcagttgccagcattttgaacctgaatatttagcagaaggcttaaattaggagctcttcaaattaaagaaataagcaagccacataatgtcgattgtggtagattacttgtaagcgtattgtgttgggttggatacagtcacctgtaaacataaacgtgtagcgttttaaatttggaaaggactgtggatctacctccattttacagaccaagatactgagacatcgagaggccctggcttgttcaaagtcccacagagtcagctgtagaaagacaagtactagaagccctatgtcctgggcccaagctgggtgctctttccactgccccacgatgccccttttgtctcaatggcctcccactgctccccacactcaccctctgtcctggaaacagaatagagccaggtggctgcacacaccatgcccattgccatctttatgcccttgtcccttccctctgcctaatcatgctcatcccactacaactcacccatcagttccaaagacccgttggatgtcccacctcccacactggtgtcatcctcctcagaacttctgaagcgtgccctgtgtcttggctctttttacatggtctctgtccaggtgtggtcttaatttttacatagtagggctagtgcccagtaaatgggccatgagtgaataaagagagatgactgtaccatgtcacaaggtgggcgtggcatcttgttttgctgcccagcttttcaggcttctgacttcgttccagctaagctccagaaagaagcaatcagctattaagctccagaagggcagaaagcatagcttccacatctctcaccacagtccttggtagagttcttggttggtggtgggttacagcagtgatacttcattttcctgacacatgaatcttgcattcagtttaaaatatgtttgctttatcctgatgcctcagaacgtggccatgtcctcatggctgcctcatgtcttcatggctgcctaaatactctggtcttatggtacctaccatttgaggaggccaacagaccatggcaattagtttacagatttccacatttggatactttgctacttacttgcaatagcaggaagttgggagatgcaggccaaataattgttaggattgctgtgaaaattgcagtgaacgcaatacccctcctgggttagcttgttacagctacaagactcctagtgaaatttttgttccaagatcctcaaactcaacaggatgctacattttatcctgttgggcttctcaagcaatgctggtaacatctattgttcaggtattttaaggcttaagatagaaaattgttggtagaaattaaccagttaaaagggaggaaatgattactcaggtgttgtgaagtaagacagattgtatggcatttataacattggttatgtagtttgctcataaaagagaatgcctaactggaatttagtgaaaattaaaccattaaacccaatgaagtgaaaaacggtggacatctgccaagtaaaagcataatcaccacttaaacagcttcatctgtgctcctatctgcgaatgacagcgtctcctgtggagaaactgctctctgacttctggttttctcactgttttcacagagcctgagcccttgtgaagccggcaatgacaagtctgtatggtcgccatgccgagaaaaccactgacatgccaaaaccatcagcccctaaagtgcacgtgcagaggtccgtgtcccgagataccatcgccattcacttctcggcatccggcgaggaggaggaggaagaggaggaggagttcagggagtactttgaggaggggctggatgaccaaagcattgtaacagggctggaagccaaggaagacctctatcttgaaccccaagttggccatgaccccgccggccctgctgcctcgcctgtcctggcagatggactgtccgtgtcccaggcccctgccattttgcccgtctccaagaacactgtaaagctgttggagtcccctgttccagcagcacaagtattaagtacagtgccattggctgtgtccccagggtcgtcttcgtcggggcccttagctagctctcccagtgtgtcatccctttctgagcagaaaaccagttcttcctccccattgtcctctccttctaagtctcccatcctctcatccagtgcctcaacctccaccctttccagtgcaaaacccttcatgagccttgtgaagtccctgtcgaccgaggtggagccaaaagaatccccacaccccgcaaggcacaggcacttgatgaagacattagtcaagtctctgtccacggacacttcccggcaggagtcggatacagtgtcctataagccacctgattccaaactgaacttacacctgttcaagcagttcacacagccccgaaacacaggtggagattccaaaactgcaccttcttccccactgacttctccctctgatactcgttccttttttaaagtgcccgaaatggaggctaaaattgaagatactaaacgacgcctttcagaagtcatctatgagccttttcagctccttagtaaaattataggggaagaaagtggcagccataggcccaaagccttatcttcaagtgcttcagaactctccaatctgtccagcttgaatgggcacttggaaagcaataacaactacagcatcaaggaggaggagtgtgattctgagggggatggctacggaagtgattccaacatccccagaagtgaccacccaaagtccactggtgagcccacaagagagatagaactgaaaagttcccaggggagcagtctgaaggatttaggcctgaagacaagttctctagttctggagaaatgttctttgtctgccttagtgagcaaagaagatgaagagttttgtgaactgtacactgaggacttcgatttggaaacggagggggagagtaaagttgataagctctcagatattcctctcaagccagaggtgctcgcggaagatggtgtggtccttgacagtgaggacgaggtggactcggccgtgcagcacccggaattgccagtgaagacgttgggcttctttataatgtgtgtctatgtgtacctcatcctccccctcccccactatgtgagtggactctttctgggaattggccttggattcatgactgcagtttgcgtgatttggttttttacaccaccaagtgctcataaatatcacaagttacacaaaaatctgcgacactggaacacaagatctctggatatcaaagaacctgaaatactgaaggtaagcctctccccgggagctggctagtacacacacttctcacatacagccgtattttagatctgacttgttttttggttagctgttaaagatttttgcacaggccgtgttttttaagagcttggggccacttcattctccaggcacccagtcaactcatctggtaaacctcattctaacccaagctttgcagattcacaaagtagtttctgaaagatctctgtgactctagagaatagtgtttacatcagttcctgttctggtctgtctctaaacttacttggaatgtgctacttgctgagcatttttaatggctgagtctgttagggttcactattcttgagaccttgaagaagggttaaatactcccggaattgcaagaggagggaaggaagaagagaaggcaaattaatgtcagctgttggcccctgctggtgctcctctttcctttgcacggtggggaatgggatggagaaagatgtcatctttcactgcatatcagatgtcaggcttttgggcctcctgaggggtccctgggacaattcattgggaagcaggaagaaacattcatctagctgtctaatctgtcgattgagacggagtctcactatgttgcctagtgtggtctcaaacttctgggctcaagtgatcctcctgcttcagccttccaaagtgctgggattacaggtgtgagccgctgtgtccagcctagaacttctatttattattatttttttgcatattaaaatttctggttatgtgtatacacactataaaagtacaattagaacttatatagtttgtaagttatatgcacacacacatttatgtacagtatccaagggggcattggtttcaggaccccccccaaggataccaaaatcgatgaatgtttcagtcccttatgtaaaatggcatagtatttgtattaatatataacctatgctcattctcctgtatacttttaaatcatctctagattacttataatacctaacataatgtgaatggttattatgctgtatttttaaatttgtatcttttttactgttggattgttattattttttttaatttcatattttcaatccaaggttgattgaatccatggatatagagggctgattgtatatgtttttagagataaggtggaaagccagaaaagtttagagaccactgctttataaaagttatctaattcagcttcataaccatccaggagtttgatgcttccagttttacacatgaggagattcaggctctgagagaggtggtcattgtccaaggtgtcttgctacttaataagtaatagaggctgggcatggtggctcacgcctgtaattccagcacttttggaggctgagggaggcagatcacttgaggtcaggagttcaagaccagcctggccaacatggtgaaaccctgtctctactaaaaatacaaaaattagctgggcttggtggcgtgcacctgtaatctcagctacttgggaggctgaagcaggagaattgcttgggcctgggggctgaggctgcagtgagctgagattgcgccactgcactccagcctgggtgacagagtgagactctgtctcaaaaataataataataataataaaataagtaacagaggtaggctttggagcctttgtgtgtcctcttcctgcttttcccatgacacctctctgcagaaggttcatgcctagacctgcctggagaattccttgtgttacaggagatgtatgaaaaggagaacttcgtttccctggagcaattttgaaccttaattattggttttaatctttagcttttcaaattcaaagcttgtttggcttcttagttaaattaaaggtattattctcccatctatttaaatgagaatgctctaaaaatggcagcgtgatgtccctattgcaaaaaaaaaaaaaaaaaaaaaaaaagctgggggttggggagaattcttttaggatccaaaataatatttgtttttaaatttcattgacttttttccttgttcaaaggaaatacatggttaatgttttaaaaacacaggaaacccaaagaaaaaaaattttttgatcacactagtggaagggaattacagttaatgatttggtatatatcctagttttttgggtttttaaaatttctgcatatatgaagatatgcatcacatacatgcatactcacccactctttttgttttgatttaataggatcatatattttgcagtctgaccttttttctttctttcacatggcaatatgttatgacactttcttctttaagagaagctgtgttgagtcttgtggatgtgacacccttaagcttagcgttaataaatgaagtggagcaaaaatgactcacgcgtggttgctgagctttttctgatagggtggtgcagtgactacctgaagtacgtgctctccaagtaagttcgtgctaactttagcaaggaaaaattgcgcttatattaactctagtacctaatgactgactgtggcattcagtttaaactggtttgagcactgacttgtcttaggaagattttaattttaatccagtcaatctttagtgtttttttcctaccctcttctcagatgtaaattacttagtgtcaatccaatcactgtgatatgtcaagagtttactaactacacagggtgccgatggaatgggattttaatgttatagcacagcctggttgctttgatctgatcactggaagaataaaggcaacactgtgatgctgagcactgcagtgggctaagtgttgggtgtattatctcattcaatcctcgtcacaaccctgttcagttagcgtatatgtgctcatgcagatggaggcccacagaagttaagttattgcccaaggtcacacagctagtgtgtggtggagccttgtaggacagtgttttcttttaaggaaggtgttttgcccacagtggctaggataaacgtatttgaattttccttgtagagaacaagtactttaatgctctcatagactgacacccctaatccaagcaaactgtcatagactaagcatttattcttccttattgctgtttggacaactctgatcactttggtaattcttttttcattcttagccttaacttgtttagaatggtttcattactaaagaggaaaagtatattttagcctgaagtcttttgttgggtatgcggtgttgtttttagaaactgggctgaatgcattctctatttagaaaagggacactactatgaattagaaggatatgctgtctgttacaagctaatttcaaatgcaaatgttctttggacttagttaattttactgaatgggagattatactcttgggaaccgtttttaaactatggtactttaaaacatttagcagcgttgacattaactttaggacccaagtttactgttatctgtcttccctaatattccataagcttcatgaatgcataggccctgtccatcttgttcatcttgtatcctcagcacctgccacgtattaggtatgtgataggtaattgttggctgaatggatgggtagatgaatgaaggagtgagattttatcagaagatttgagcagtgagttggtattgaccctgtcatctcctggtgatgttgctttttaaaagaaatccctagctgggcatggtagcccacacctgtaatcccagagctttgggaggctgaggcagaaggatcacctgaagccaggagtttgagaccagcctgggcaacacagcaagatcccatctctacaaaaaatttaaaataattagccaggtatggtggtgcatgcatgtggtcccagctactcaggagggtgaggtgggaggatcacttgagtccaggagtttgaagctgcagtgagccatgataacaccactgcactccagcctgggtgacagaatgagactctgtctctaaaaaaataaaataaatccttgatgcttgctttaaaaaaaatagggtttaataggagtgatcttttaagaaaatgaaaataattactaaaaagtaaagcttttggttgggcgtggtggctcacccctgtaatcccagcactttggaaggccaaggcagaggattgcttgaggtcaggagttcaagaccagcctgggcaacatagtgggaccaccatctctataaaagttttgtttaaaaagccaggtgtggtggcgcagcttgcagtcccagccactcgagaggctgaggcaggaagatcgcttgagctcagggggtcaaggctgcactgagccgtgatcatgccaccgcactccagcctgggcaatagagtgtgaccctgtctcaaaaaaacaaaacaaaaacaaaaacaaaaacaaaacagtaaagcttttcctaagctttttttctgaaagtggacaagccaagacagtccatctttaacaggatttgaagcttgacatttgttgcttagaaatcgactggtgacccaagtctgctctcctgtgaccagtgctcacgcagtgctgccctcctgaatgcaaagggagtagtagaaaggcaaatactggccgggtgtggtggctcacgcctgtaatcccagcactttgggaggctgaggcgggtggatcacgaggtcaggagatcgagaccatcctggctaacagtgaaatcctgtctctactaaaaatacaaaaaaattagctgggcgtggtggcgggtgcctgtagtcccagctagtcatgaggctgaggcaggagaatggcgtgaacccgggaggcagagcttgcagtgagctgcgatcgcaccactgccctccagcctgagtgacagagcgagactccgtctcaaaaaaaaaaaagaaaaaaaaaaggcaaatactaagtggaggattggagaagtgggcagtgatgagttccagatttccactctgcctccaggttgatggctttaaagtgatgtaggagatagaccttggtttctttataaaacaggcctgtgaacttgtttctagggcaagccaaaagagccacttattgaaaatgtttgatttcaggggataagtgagctggtttgaattattttgtgtacatctgatccaatttagttggtatttacagaagatggtgcaattcttgagggaaggtacggaagcctttttaaaaagctcaccaatatggaagactataatacctgcctgcgaccgagatctccaagacaggcccagcccaggaccgagatcccgcatactttatgccctaagaggactccatatatgagctgtgaaccagtcaggcagtgagctgggtgctcagggactgttttaggagaccatgtggttttgaacctctgagccgtataagttctcactgatgggtccaggaactgcttgcagccagactggactaagagtcttgcccctttactggttccatgaacagttcaaggagcattgcagtttttcttctgtgtaacttcacatgctgaggaaagaatggagaaaaggaaagtttttgtgtactttatcagggtcctcactgcagacatatgtatttatatatgatgctgcagcagtgatacatttatgggatgacaaaccaaaaagaccaatttgcagccaagtagtagctaatctcaaagactgttgtgtggttgtctaggccctatggtactccgccgtctcccgctctgaacccatttgatcagcagctgtactgtctagaatataagtaaaaaagaggccgggtgtgatggctcacgcctgtaatcccagcactttaggaggctgaggtgggtggatcatgtgaggtcaggagttcaagaccagcctggccaacatggtggaacccccttctctgctaaaaatacaaaattagccgggtgtggtggggcatgcctgtaatcctagctacttgggaggctgaggcaggcgaattgcttgaacctgggaggtggaggttgcagtgagctgagatcgcaccactgtactcttattgcctgggcaacaagaacgaaactccgtctcaaaaaaaaaaaaaaaaaaaaaaaaaaagtaagacctctatgtggccaaagagctgtcacaaagtccacagaagaattcttaggacctcctccaaagcttgcttgttcttagtatgttggagttcatagctgatgagaagcagcaaataggagaaaggttgctacaggcattcaacaggaagtggcatgtgaatgcacatggtattggcacaaaggccaataccaaaatgtgagaagaagctcataggacttagagcatggtgggctgggcaggttagctcaaggcaaagagcctcgtgtgtgccacagaccaatggcatccctgtagtgacaccccctgtgtggtagccttcaggagttcttatgttgggtgactgtctagatgccctaagctggggaccttgggaaagggtgggtttgggcacggggaaaatggggcatttagagtcagcaaactgcacttggcatgtttgcttagccaaatcagatggtcccttgcccaggattatttttaattcagagccattcctgttgcacactaactttctacatgtttataatgaaaagcttcctgaagatttcataagggtcttggatttatgtttgagtatatgactcagatgcaattttgaattatattcacgagcaaattctttatctcagatttataaaccaccagcagaacacagcagtagcatattggtttccagagtgataatccatctcttttttaaagatatggcctgcaagtttgactaaaattatatttaggccattgcagaaactaatagaaatggattttggagaacttttttttctttagattgtgtcacatgtagatatttaataagagggataggttttaaaaataggttccctgaatataggctttggttttgatatataaaagaataattttggggggaggacatgatcaattttgaggagaaattccaatttgtaaatttaatctcaatttgttgaaattctttcaagaaattagagtaagcaagtctttaggagaaaatggccattacatgcagcccaaagagacttggattgctttttgttggtctcttataacttagagtaaggacaagaaatgtgagtgcatttctttctacattatactttactgaaaatatcctgcccctataatgggttacctgagtttttatgtatggtttttataaacatggctatttcccagtgccccttgtagaatagttttcaggtgagatgtttgtttgtttgtatgtttgtttgttttgcctcgctctgtcgctcaggctagagtgcagtggcacaatcttggctcactgcaacctctgcctcccgggttcaggcaattctcctgcctcagcctccagagttgctgggattacatgtgcgcatcaccatgcacggctaatcagtgagatgttttgatgcaggcagccctcacttaccagaaggtaccccttgtgttgaagttggagaggcagctgtgtggaacgtgcttcctgaattccataggaacaatatggttaaggatgtcaggtagtcccaaaatgacttttttgaactttcatttttaaactatttattgatgaaaatattaaatacagacaaaagtagaggcaatagtaaaatgaaccccccatgtgcctgacacccagtttcaacaattgtcaacattttgccagtttttcactcaattcattaacttatggcatggctgaattgtaattctggttacctatatataagtacagtttttagcatcctgaaaataccttctgaactctgtaagaaaagtagcaaaaacatcgaagattcttattgtaattattgttcaataattagccgttaagaagaggtttgctgtactccaaagatgagtttgccagcaagatggttctagggcatgagcgtgtttttttgtgggtgcccaggccatagttgttgactcactgttttcattccattgcttctttcagtggtgttcaaatgggttgcagaagacactaatcaagaagaaaacagtaaagtttccgtctgtatcagtctttgctctttctagttgagaaagtaaataagccttgctgatatttaacatacagatgaccatatatcgacttttggccaaaaaccttggaaattatcagtaagactctgaaatacagatttacactcaggatcatcaacagtgatcctcaccttgagtgtatgtattgtgccttaaggtgtcagctgaagatagtacaaagctgtcatactggaaaaactaaaaattatcaaaaggataattatttcatcttttgctctttatttctattctgtactttatataaaagctgtatatattgggacatgtgtataacttataagtaaagtatatatttgtacatacccaaaaagttgtttgatagaatgcgtgatctgaaaagtgacagaggctgctaatttatttgcttgctgatctatttatcttacaattttaacccttgttaatatgatttaatgtttatcatgtattaatgtaactcagaccttggtcatttcagtggttcatctgagatcattttacctttctaatttgaatccacgttatctcctattctattactgtctgtcagtgcattataatttcaaaaatgttctatggccacctgagtttgggagattctgcactggaggataggagagcaggataaagctgtggctttagccctgactccagtgcttctagtgtcactgctgggaaggtgaccttgaagcaggcagttggaggatgtggacggtattaatggcgcttccctcccctaatgggctttctttcttttctttttttaatgttctttatagtgtctttgagcagcatttattttgaatgttgactccctgcttaaggctatcatttatagtatgaattctggatgtctgtgggtctgcttgcctttcatgggtaaaatcaaatttgtatctcaggacctataaagtttattagacggtcccacccctgccatattctcaaactccatgatctatggtgctgtgtttctgatactgatgatgctggtcctaaaccattaatacatcaaaaaaggtttaggcctggtaaagacaaaatcctgcttatgttttagttttggagacagagagtaattacctttttatgtgcttcagagatgattttcaacaggaggggcctcaggccctggctctattcttgtgtaggatttgctccttccctgatacacttgatgaagcaatgatacagggatctgaatgacaggtggactgaaatgccagcacagccacatgtcagcagggtgaaaacatgctgcattgttactgctgtcagccaggcacacagtgcctgaattctcatcacttcctcgggctatagggctggcacttttctctggtcagctcagtatcaagctgagcaatagagcattggccttgaacttctgattggcactgtaactgaaagcacggtagtagttcttccagactttattattttgcaaaaggttaattgtagcttttaatcttttaaaatattaaatggcccctttatagattgtggttttgtactttcagccatacgtggcttctaaatccagcagagaattgagagaaacccctgaccttttacaaatgccatcacaggaccagtctgtgggccagacagctgcagcctggctgactgggtcattgtccccagcggggtgcactgtgtccattttaacagctctagcttcagaaagaaacaaagcttgtctgagtcactttagtgtgggttgagagcatctcagagttttcggttgagctgttgaaatggaatgttgctatctatatgccatatctctctatacccattcccatgtctcataacaaggttggatgaatactttacctggtaagaaattcaggcttaagaattttagaacagctgagcagtggatagttgggcactatatggagaacaggatgaagaccttggagttgctgcttctctcaagattcgacaattgctgaaatctggaaatttcatttgcagcttaatccagggacttggtcagatcctgggtggggggaaatggctgattaatggtatcaaaaggtgattaggtttgcaccgggaaattgctttctgcaagagcaacctggtttcaggtcagtaggagtgtgaaggggcagaattagggaggcttggaggaaagttgtgcctcagcctcttgtcctgagcctccctaaggccagtctgcaacctggttcctgacagtggggtcaagtagcaactcctgtgatcctctcaagatttcctgtcaaagcctgtagtgttctggaaagagccttagatagggggcaggaaacatgggctccagtcacaatacccctctctgctctagataagacttagcccatccgatttctgtcctgaaaatctttggtttctggggttattttcttgttctgtgctattttgcatttttaccttggtttttcttttttagaagagtgaccaagtcttctaagtaacctctacagctccttgcacttattagggcgtcagcttcttcctttgcttgttcgtctcacacagctagcactgtacttataagctgtgaggggctcgctagccttcctgcttactcctgcttcccatagatttcatttaatcctcacagccacctctgaattaggcttccctcatgtattcagtcaacaaacatttgttacagttgtggttggcagacatgatgatccctgctcttgtggagtttataactcagtttagtaaaccaggtagttaacagatacagtgatgggagagtaccagagaactgagcctaggtgaggagggaggcttcctaggagaagtgccgtctttgccatgacctgaggggtgactaggcacaagccagactgcaggtggggccgtgccatggagctgaggtagcatcccacaccttggagtcaggaacacttggtttgagtcccagatttgccactctgtagacattggaaggcaaatcacatcccctctctcaccacttttcttacctgtaaaatcgtagggaattgacagaaatacaggagataatgcacctggggtacctgggccataaggtgagcttaaatgtcagctattattatgaatagtaatattagtgtttaaaaaaccatatgcttatgatttctttataaagtctaaacaaattgtaccttaataaactgtcagtaggagaaaaatcactatggcttgaacagagggtgaggtgtaggggccagggaggcatgaaactgggcagtaagccacctggacccttttacaggtgagcaaagcaagtgtctgagggataagcatcacctaccttggcaggaggtaagtggtgcaggcatgattggaacccaggtctgtcagattcccagtacttctgctaaggtaggtgagttggtttcagcgcatgtgttttgaccagcagtcttttgtgtaattggatacgatcagtgtagggtctcatttaggctaacaaatgattgttcacaataaatgtgtaattcaaatcctgatttgtgtgctgtgtttatttgttttttagcagctgtggactttagcatctgatgaatctttaacacaaagataggaacatggtagttcaggaaggaggaaatttgaagataaaagggaaggagaaaccacagcagctggtgattctgaaaagatgggggtagggagaagaagggccaagccaagcccaagcagaataaaggaatttgggtcccctccaggctttcgcaagagaaggaaagcatctcctagattctctttctatgcctacctacttcttgcctctcacttctgcctcctgcagtgcagcaggtaaggttttgtgcttttgaactgtgtaggtaggacttgaaactcccttctctctttcacattcttctgaatcaggttgttctgggattcctgaatttggcaagtggtagaggatgacctttatctgtcagagctgtcagcaaagaaggtaattgcatactcatctcagaactgtgcccatgtgtgagcgagcacacaggctgcagccagcaagaactccacagtggctgttcttcagctaaggtggtagctcaggttgctgggttgaatgcctggctttgtggctaaaaaccgaatccctgaagcactgtggaaatggttgctcttgttatccagggacaggaattttcctaggaataataattgagtagcagttggttagactggggcagagtaacagctcagcacctgaaactgacctgtgaacagatgagctggtgtatgtatctcaacacacatgcctgtatgtcttgttttgttttctaagtctaaaaatcaaaagaataagctaaaaaaatgatatgtttgtctattaattatcttaattttcctatagaactatgagtttttcaaaagcctcctacatagaatactcttattaatatttctgagtttttaatattgcaggttaacttttaaaagggattttgaatttctacaatagatttcattaggtgattacttagattatcttctctcatttaattatgcaaagcatctaataaaatggcagaaaactgccatgtactgaatgactgtctcttatcactaagactgagtgtgttgaaagcatgcacaagaagagaaaggaaggctttgcccattctattcatagttgagccaagggtctagggctaaaaagcttgaacccaataactggccctgaactgtctcttatatactagtcctgagccctatgtggctgttgagcccttgaagtgtagctagttggaatcaagatgtgttctaagcgtaaagtacgcactggattctgaagacttggtatgaaacagaatgtaaaataccagtaataatttttaatattgattacatgttgaaatcataattttgatatgaatttaaataaaatacattgtttaaattaattttacctgctttttctttcttaatgtggctcttagaccatttaaaattacacattttcagcaaggcgcagtggctcacgcctgtaatcccagcactttgggaggccaaggtgggtggatcacttgaggtcaggagtttgagaccagcctggccaacatggtgaaactccatctctactaaaaatacgaaaattagccgggcgtggtggcacacacctgtaatcccagctattcaggagactgaggcaggagaatcgcttgaacccaggaggtgcaggttgcagtgagccaaggtaacgccactgcactccagcctgggcaacagagcgagactccatctcaaaaaaataaagtaaaaataaaattacatattttcatgatcacatttatggctcacattatattaatatttccattgtacagcacctccctggacaagtctgcattttctgatttaggaaagacgaaatgaaagcaattggagagaaacaacttttatccctaagtttctcttattcataaatcagataattaacctgtacaatcccagcagtttcaaatgggaaaaatccccacagcttactttactctatttctcagagactgtccttttcttggagaacagtttcatgtaatataatacttgtcttttttttctcctttagcccttctagtctggtggtgagtggttgataaacataatgcagggatttttgtctgaaattccagtatcatgttaatcctttttttctcatttggtgccagtatcatgttaattctactggcttttgtacatgtatctgtaattctatgtacctggaaataacgaaaaatattttatatggtgatttgtcgcagtaatgtctatcttatatcaaattgtgattatcataattcaaaaacagccattaaataaatgctgagcatctcagcttaggtattaggatggacgaaagcagtatcacacataatccatattctcaagtagcctctactctagccagcagatgtgtgctcagagtgaaatgattcaagaagagcaattgcatgcagggactgtatggccaaatggctcataaatgacactgataacaagtggctgttttgatctaatagagttctcatcagctccaacttccccccgcccttcatggattcttcttggttttagtagctctgcaagcataaacaacctctgaagtatcttagaaaaacgattatatctgcttcaagttctttattaatctagttgcctttagaactttagccctggtaaacctgttatatatgtaagacagtattttctgcaaccaaattgaataagaagaaagctgtgtgttctgtgtcaggagatctttggtgaaaatggttgtgcttaaaaagacaaataaatatatttatagaaaaccctactcaacagcagaatgcattttttttaactgcacttggaaccaagatagaccatataacaagcttaaaagaattgaaattatacaaagcctgtttcctattatgaaattacactaaaaaccagtaagagagatatctgaaaatttctcaaatatttggaaattaagcaaaatacttctaaacagcctgtgggcctaaagataaagtcataagggaaaatagaaaatatttttaactgaaggaaactgaaaatacaacctatcagaaattgcaggtaatacagtgcctagagggaaattaatagtattaaaagcttgttagaggatgggtgtggtagttcatgcatgtaatcccagcactttgggaggccaaggtgggagaactgcttgagaccaagagttcaagaccagcttgggcaacatagcaagactccatttctacaaagaactttttaaaaaaattagcttggtgtagtgacacgtatctgtagcccttgctacttgggaggctgaggtgggaggattaattgagcccaggagttccaggttacagtaagttatgattgtgccactgcagtacagccaggatgacagagaaagaccctgtctcaaatacatagatgatagatacatacatatatacatatatatgtgcatacatacatacgaaaagaaagatttgagagaagcacaaattaccagtgtcaggactgaaagagggggcatcaccatagacactacagatattcacaggattatagggaaatattgtaaacaacattatgcccagaaattggacaacatagataaaatagataaactctttgaaagatacaaaccaaagcttactcaagaagaaatagataacctaaatagtccaatagcaagtaaagaaattgaattcatagtttgggacctttctgcaaggaaaaatctaggcccagatagcttcatgggcaaatgctatcaaacctttaaggaagaaatattattaattctacacaaacttccagaaaatagagaagagggaacacttcccaaatgcacttacctgcattttctgaggctcattaataccaaaaaacactgcaagaaaactatagaccattttccttcatgaacttagagggacaaatgaacaaaatatcagcaaagtgttatgctggtaaactggctctccaaaaaaaaaaaaaaaaaaaaaaaatcttgatttgactattccctgatttccgtgatgtagcaactcccactgttgccagttgaaagctaccaacgtgaagtcactgaacatggagttaggaagagatgtgtagaatccgttcttgtgagctgatacagcccaatttcagcacatcatgactcatacatccttaatcctgagaatgcaagactggttcaacatttgaaagtcaatgaatgtaatttgccataagaacagactaaagaaaaagacaaaaaaactgtgagccaaagaaagtacttagttctacatttagcaaaaatacacccacccaaacggatgctctgacaatacagtccacttcaggccccactgtgatctgtaattgtcatctttttctcttcattgctctgattgttgctgtttcctcacaaacgcctcttcccatggccactgcttgctcactcaatattgttgaatagatgctgctcctgtccggtcattctttgggaggagggagagaacctcccagctcaggccaaaacatctactgaggtatataaatccatataattggctcataagtttcacactctttcccccatgacaaagagatatgtttgtccatttttccttccacttcacacttaggtgctctgtttgtgacaacttgtctctattatgtttactacagtggggtcataggatacgggaatgaagacctaattctctactcttttggaggcacctttggatcaagaatcctgtccttttaaaaaatctttgtcccaactcctaacccattgcttcgcacatagattcaatgcgtgttttaataaaaggatgaatgaaagaattctgaggagtcctcattctcataggctttcaattcaagactttagtgtgagactcaaatacttagcatggaaatggctattgcttgaaaagaatgacagtcccaactcccatgtagtgagctttagcatctctctgctcattacaaagacatgtatttttaaaaagttggggagagtaggaagatatcaattaaaactccccagaggacttcttttgtgagatctgggctactcataacctgaaaaagtatttgaggcaggagaagtgttcagtgatgaatgatgatgacagctatgagattagctttaacacagtgtatagtgtattaggcttttgtgtatgtattttttgtcatacatttcagtgttggctcttttaaaaaatcaagatatgtaacacaaaatcatttatgtccaatttggcagggggacctggagcacaattttacccatttaagttactatgtatctttgaattttgatatattattgattatatttacgatgtatttaatgcctaattctcaatcatctgctttactgcatggtttcaatgaggtacatattgtagtgcaacagaagtggagaggtagttctctgagtcctgtgataacatgaattaatacctgaaatttcaaagattccaactgggctgggaagagcatgtgtttagctaattaagaaggccagactgggtgggattaatcaccccaaaggaggtcaggcagagaggcttgctcagtcacatgaacaaatcttctgagtttcctgatgtgcttataagctttaaaaaaagaaagaaccttttatttaggataatgaacattgccatttttcctccaaatccagatttttggttatcaaaaacctcctcagttccagttatcctcccagctaagcacttctctttgcaacctgtagtcattggtgagctgatatctgtgtcgtgatcaagtttggtttcagtgtcccaaataccacagtgttcatcatttcacactaaatcagatttgcgattattctgatattactaatggaagtttttcttcatcagggatggatgaatgagatttacaactatgatccagaaacctaccatgcgactttgacacattcagtctttgttcgacttgagggtggaaccttaagactttcaaagcccaataaaaatatatccaggagggccagctacaatgaacccaagccagaggtcacctacatcagccagaaaatctatgacctctcagacagcaaggtgagcctgagcaattttggaaggatagcttagatgaatgaaaagcatatggcatcttggatgcttaactgcatttttttataccctaaaaaggtttgtggtcgttgaacagtataccttaggggacagtacctctcacactttaaagtttatgcacatcacctgggcatcttgttaaatgcagattctgattcagtagctgtgggcagggcctcgggcctgcatttttatgagctcccagatgatactcaggctgctggtccacagaccacaacttgaggaacaagtgttgtgcactcagaattctgcctttaaaagctaattatttcagtcaaacaaaaagctgtgtggctatgtgtggtgattctgcggtacttaactattgaagtctttgtacatgtgcaaatgatagatatgcaaaataactacattttgattaagtattatatacttctatttttgtgagaaatgtaaattatgtattccacaaagctattgtttctctgttcttacagttcatctgaatgatctttagatttctccaatgtgagagaagtacttaaaatagtttttatataagtttattcttaacttgagtttgatactcaaggttgactttagcttcccatctagattttagctatctttttttttcttccaacttaagtttggtccaaggtcattaaattcagttgatagccaaacatagttgatgataagcagctaaacattattattgtgctactgccacctgaaaattacggatatttataactctcgcaaaattattaaatgcctactttgtggaatgattttgaagaataacaagacacttctgaaaattccagtttctgtagtcatgttatgaacaagtgttgaaagttatttcatattcatcattttagtcaaaaagtctataaggtttgcactttgtgctatgcataatattaatgcatagtgtagccaatctttaatatataaatcatcatttttctttctctgtagatttatcttgtacctaaaactttggctcgaaagcgaatctggaataaaaagtaccccatttgtatcgagcttggtcagcaagatgactttatgtctaaagctcagactgataaggagacttcagaagagaagccgccagctgagggaagtgaggaccctaagaagccaccccgccctcaggagggaacaagatctagccagcgagatcagatactctatctctttgggagaactggccgagaaaaagaggaatggtttaggagatttattctggcatctaagctaaagtcggaaatcaagaagtcatcgggtgtctctggaggtaaaccaggtaatgatgtttgtgctaaatgcttatgcatttttaaagggccactagggagaatagagaaagaatgccaggtaggaaggaaggaaggaaggaagcccaccctgaactgatggttgtctgccacctaatgtgcattctcatgactcatttaccatctaggctgatcactgcagccgtctgtcccaaatcatttaaccaatgatggatccatttgcagatgatgtttattagcctttgctggttatgttttatttgtatataatgtgactcccctgagagaagcagcaacagaaaaaccctggttctgagatggcaggtgagtcagggagatccttcaggctggtactttcgagcacctgaccctcaatatgtcttccgagcctgagcttgccatagaatgcagaatccttgcacttcctgaccattcaggtcagatcgtggtcattcggattgataaccatgcagcacctctttgctcagctttggctgggcttggagctgcaagagacacaaaaccagtaaaaagcagtagctcccctgtccttcaggtgttgtgcctgttatgcaaaactggcacgtatgagtcaggtgttcacaaattgccatgctaaaatgagtgtggtgtaacaaataattgggacaagaccagtgtgggtgttattagggaaagctttcttacatggatctgaaacaaagactaggagggagccactctggggctttctctaacaaggcatttgtgttgatccgggagttatgctggtcacatgagtgtcacacattgcttcagagtgctttggttccttcccctggaacataatctgagcctttgccctaactcctttgctaaccttccattctgtcagcttcaacaccagattccatcctaatcccagcactgagatctaagaagtcccttttaagaatcaagacgaatggggagattactagatatatttatttcctagggctgctgggacaaaataccacaagctgggtgatttacaacagaaatgtattctctcacagtactggaggctggaagtctgaaatcaaggtgttagcagggccatgctccttgtgagactctgcatagaatccttccttgcgtgtttgcagcttctggtggtgaccatcaatacttggcccgcagccgcatcactccacactggcctatcatcacatggcattgtctgtcagtggctctgtgtcttcttggaaggacaccagtcatatgggattaggagcccaccctgtttctagtatgactttattttaatgaatggcatctacaatgactctgtttccaaataaggtcacattctgagatactggggttaggactttaacatattttttggaggacacaattcaacccataacactgagtaaaagaaaattcaagtgggtaagaactcctcagcaccaggcactgcctagctctcctggtaggtctaaacctgtgctgcttcttacggtagccaccagccccatgtggcttttgaacacttgaagtgtggccagtccagatggaggtgtgctctaagtataagatgcacattggatttcaaagtcttagtccaataaaagaatgtaaaatatctcattaataacttcttatattggttacatgttgaaataatattttagatatattgggttaaaaatatattcaaattaattgtattctttttacctttctttttctttctttcttttttttttttttttttttttttttgagatggagtctagctttgttgcccaggctggagtgcagtgacacgatcttggctcactgcaacctccgcctcccaggttcaagcagttctcctgcctcagcctcctgagtagctgggattacaggcacccgccatcacgcccagctaattttttatatctttagtagggacaggatttcactatgttggtcaggctgatcttaaactcccagcctcaagtgaaccgcccaccttggcctcccaaagtgctgggattacaggcgtgagccactgtgcccgacctctttttacatttttaaatgtgactactagaaaatttaaaattgtttatgtggctcagattgtattcctactggaaatataaaggtctactggtctaggcactgaagctcagaatcaggtaacccacgggggtatatggggccaccaggaaacaccaccttaggtacttaggggccccccagagcaccttcaaaagaggcatgttattcatggacttaaataaagcatttgattatttttaacgagttcaatttttggaaatcctgccaaaagttccactcagcacacaacaaacataatggtaagagtcagagatgtgggaaaaccttcagtgcactcactggtactaaagcaaggctcacacaccactaatgtcttcgtacatctgtaagtctgggttgcctttgaaagctatgaattgagatatttatggtaagtttaagccaccaaaagtgtgattaaactagtagcaaggtaaattggtgagcactgtgctgttcttcaaaaccatctctgaatcagtgactacataggtggtcagccgtgaaggtaggactggtctgattctctgaggccaggtacatctatcagtaccaagaagttagaagtcttcctgctcgacgacctgccctgtcctctccctcagggatgctgtcaccaaaatcatagatttctctagcaacacggattgtgcttctcagacttgaatgtttgacgggatcttaagatgcaggttctgactcgaggtcatgggtggggctgagattctgcatttccagccagcagtgcccaggctgcaggtcaggaaaggcctcccggaggaataagaatctggagacagcaggaaagccacatggtcatttggcagaattccagtatggtctctgcacaggaaggtccttgactttatcaggggctattgtccatgagacccacagtgcagtgacgactcctgtgctttgtcccactcaggggaagggtgaggtgatgtgaagaggctgttctgtgggcaatgagcaccagccaggcctcgtagggggttcctttcctcctctacatggagtgtggctcagtcacaatgggatcagtttggtttgaagtgttggtatcatgctgccctgtttatttcatctttttttctcttttttactattaactaaactgtaatctttatttggatttcactggtttttctactaatgtcctttttctcttccaggatccaatccaggatattaaatgtaatattagtttacatctattttttaatgtttttgatgtagcttttatcctagcaattaaaaaaatgctaaacatgaaaacggtataaggataataaaagttacaaaaatgtatttttatagttatgcagtgtaaaatattaaagtgctggaaattatctggctaaaatttaaattaagaaatggcttgcgtgaccctttgtgaggctctggggaattatggttctgatggttggagcctcttaagaagaaaatggtttgatttgattttttgatttctttctttctttctttcttttttttttttttgagacagagtcttgctctgttgcccaagctggagtgcagtggtatgatcttggctcactgcaacctccgcctcccaggttgaagcgattatcctgccttcagcctcccccagtagctaggactacaggtacaggccaccatgccaggctaatgttttgtatttttagtagagatggggtttcatcatgtcggccaggctggtctcgaactcctgacctgaagtgattcatctgtctcggcctcccaaagtgccgagattataggcgtgagccaccgcgcccagcctggtttgattttaaccactttacgtttcacctggccatcagagtaaatctaaataaaattgttagcatcaggcgcatcccatgcttaaaacctctggcgcaacagggtcaatattaaattcgaggttggcttttgaggcactttgcagtctgttcctggctaatctctccatcctcatttcctatcctctgccccccgtactatgcttagaacttcactgaatctctcactggcctccaaacatactgtgccctgtcactgctttttgcatatgctgcttcctgtacctggaatactcttccccacctgggccaggaaaatggcaactattccctcaagatacagcgtagatgtcactgctgtgaaagtcagctagggtaagcaccgctccagtctcttgggcagaggtagtcacccccttctttttgcccagagagtcccttagttgtgctacaattttgacacttgttacagaagattgtgatttatctgcttaggtgcgtgagttcaagggcagggattatgtcttctttttagcatggtgtgcttgaaagtgcttgatgcataatttgtcgaatgaaagacatctttggaattgctgtgagcttgtggatgaacaattaattagctctctacccactttccatttacccctgatagcactgacaagttcgccactacttgggatgtgttggtcctatatttgaccttttcctaaaagatcatcaggagaaaagagaatagtacctaccaactatatttctttacttccattactctaattatcttggagaggaataaaaaccgttcttaaaaattaccttagagaaaaaggtacttttcagggtgggaaataaacttataaaatttttttttttttttttgagatggagtctcgctctgttgcccagactggagtgcagtggcatgatcttggctcactgcaagctccacctcctgggttcacaccattctcctgcctcagcctcccgagtagctgagactaccggcgcccaccaccacgcccggctaattttttgtatttttagtagagatggggtttcactgtgttagccaggatggtctcgatctcctgacctcgtgatccgcccgcctcggcctctcaaagtgctgggattacaggcgtgagccaccatgcccagccccttataaatatttttaaacagtcatttgatagcattgtagctgcttttctcaggagtccgcttactttgcagttgttttcttcattgtgtgaatagcccccgtcttcttggctccagggcttttgcctgcacacagcagacacaacagtccgtccgggcacctgacccacagccgcagcagcagcaaaggcagtgtggaggagatcatgtcacagccaaagcagaaggagctggcaggcagcgtgcggcagaagatgcttctcgactacagcgtgtacatgggcaggtgtgtcccccaggaaagccgaagcccccagaggagccccctgcagagtgcggagagcagccccacagctgggaagaaggtaaagctggctgctgggccggacctttttcacttttcgacttagacacatttcttcatgcgtaagtgctccgaagccctgttgtgggcactgggataacagtggtacacaagacagagaaggaccctgcctttggggaacttgtaatctactcaggaagacagcaagaaacaagcaccaggtggtgggaagaatgaaaataaagtcagacaagggaggaggggaagtggccagaactgctattttatttatttatgtatttatttatttttaattttaaaaagtttgtactgtttttctctgctattttggatgggtggtcaggaagggcctctttgaggaggtgacttttgggcacagacctgttggtcacgggggagtgagccatggtgatgggtgtgggaggagcactccaggtgggaaaagcagcaacccaagggcccgctgtaggcatgtgcttggaatattcgaggaacagcaaggaggcctggccggacagtgagcaagggaaatggggaggtagggaggctggaggatcaggatgggaggccatgggagggttttgagcagggtatgatgttgactgatctaagtataaaaagataagtggctcttggtggagaactggctgtagagggaaaaaaggagtgggaggtgactgtcatagtgaaggctggatcaatgtgaaggtagtgacagtaggtggtgaggagaggctcggctggggtgtgcttggcaggaggcgctggctggatttgctgacgtgagagaacgcagaggccaagatttgcactttgacctgagcaactggatgatcactaggggttgttgcagaatcactggtgattcaggtctcattcctccaaaaccattgtattttcaaattctcagtctcctcggctatgcccagtgcttttgaagatttaccatgaacattctttacaaagtgtaaccggacacggacttaggatcatctctgataagataactcctgtaagctgccagatgccaggctctgttaggcactttaatagaattactctgctctcttgaacagtcctgcaaactagacaggattgtctccattttgtaagcggagaaactgaggcttgatgaagttaggtagcctagtcacacagttgctaagtgatggagtgtgcaaacctgacctgagaacccaggggccccttggctcgctgagactattttgctgggttattctgaaagcctgcttggcctgaggcctcctgcctctactttgcacactcttcagagtcacagtctctgcctgggggacacttaacctctctttcatatccaggtgtttgacctcttttttttttgagacacggtctcgcagtgtcacccaggctggagtgcagtgtcgtgaacatggctcattgcaacctcgacctcctgggctcaagtgatcctctcaccctcctgggctcagcctcccaagtagctggagctacaggtgtgtgccaccatgcccagctaatttttgtattttttgtagagatggggtttcaccatgttgcccagtctggtcttgaactcctgagctcaagagatgcacctgcctcggcctcccaaagtgctgagattacaggcgtgagccaccgcccttggctgtgtttgacctcttacaatgaccatgtgtatttctgttcttaatgagaagcaagccattgctcttgatccgttgatcctcttcagtgtggaagaggtcactcacctgatctgtttgaatttgtcagggcaataaaagaccatatgcctctgctggcctgcgacccactacctctgcactgagtcaccccagctttagtgggaagcagacctccctctaggcaagagtggggtgatataaaacttttctacaaatggtcctgtttaccactggtgagtttcccctccctccaaatgcgaggctgtcagctgtctggactctcatcagactcaagaaaatcaagaggagaattgtgcactgacgttaagaaaattatccaataaaatgcttccttttgaaagatttccccaaattaaaaaacaaacctgattttagagctttgtttccttggtttgtgttacatgtgcatattgtatgctatgttcactggggtccctgatgtcacagcccagcattgctgtcaggggctctcttgttccagccacctggcacttaccctttaagcacccagacatttcttttccctcttctaagtctgatgacttttttttttgagatggagttttgctctttttccccaggctggagtgcaatggcgtgatcttggctcactgccatctccgcctcccaggttcaagcaattcttctgcctcagcctcctgagtagccaggactgcagtcacacgctaccacgtccggctaattttgtatttttagtagagacggagtttcacaatgttggccaggctggtcttgaactcctgacctctggtgatccactctcctcggcctcccaaagtggtggaattacagcgtgagccactgtgcctggcctctgatgaaattttttttttctttttttagttggagtctcactctgtcgcccagactggagtgcagtggtgctgaaaatttgaattagaaaatatcactattttggggggcaagggcctagttttccaaatgtttagtgcctggtttggaaggggatttaattcaggaaacaaggaaactcttttttaaaaaatgtctgaaagtgcaatggtaccacttccagcatgggtacatcaggaagagagactccacaggtcagctgcagatttgctcaggggtgtgagtccagggaggctgctggttctgtgtgccctgcattgcctgcctgggagagaggccatggttcctgtcctccagtagtgaggctctggtgttcaggttgcataaggcacttccactctccatttcaacagacagttttaaaaaatgttagagataatattaacatatgccaccccggtatggagagtcctgtccttattactactcgtcgtgctcatcatctcatatctataaactggattacaagatattattacctgtttggtgttatcagaagatgagaatgttacagagcaaataggagtcaaatagaaaccaggaagtctgtaactggcagaatagttttccagggcttcccttgctacccccacaaagtaggctttttaaacacttagaagttgaattggaaaatgtttttgttgcactaagttaaaaaatgaagctatatatccaatttaaaaataaattttaaaaagaattcagacaagagtgctaaaacaaatcagtggagagaaagaatagtctcttcaacaaaggtgcgggaacaactggatatctatgggcaagagaatggagctggccctctacctcacaccatacataaaaattaactcaaaatggatcatagacctcaatgtaagagctaaaaccataaaactctcaggagtaaaatttgtgactttgggttcgataaaccttcttagctaagatactaaaagcataagcaaccaaagaaaagataggtaaattggacttcatcaaaattagaaacttttgtgctgccaacaataccatcaagacagtgaaaagataacccacaggatgggagaaaatgtttacgaatcatttatctgataaggttctggtacctagaaatataaaggactggtacctagaaatgtataaaggactcttacaactcaataacaaagagataaataaccagattaagcaacggggctgggtgcagtggctcacgcctataatctgagcactttgggaggccaaggcaggaggatcacttgagctcaggagtttgaggccagcctgggcaacatattgagactccatctctacaaaaaagaagaaaaaaaaaattagccagacatagtggcatgtgcctgcagtcccagctactcagaaggctgaatcagaattgctcgagtcagggaggtcagagctgcagtgattagtgattgcaccactgcacttcaacctgagcaacagagcaagaccctgtctcaaaaaataaaagggtaaaggatctgaatagacatttctccaaagaagatacactaacgcccaaataagcaagcacatgaaaagatgctcagtatcattagtcatcaaggaaatgtgaatcaaaaccacagtcagatgtcacttcacacccacccagatggccacaatgaaaaagacagatggtggccaggcacagtggtggctcacacttgtaatcccaacactttgggagactgaggcgaatggatcacttgagctcaggagttcgagaccagcctgggcaagatgacaaaactccatctctaccaaataaataaataaataataaaaatttttaaaaagatagatgataacaggtattagtgaggatgtagagaaattggaatccttggccgggtgcggtggctcacgcctataatcctaacactttgggaggccgaggcgggtggactgcctgagctcaggagtttgaggccagcctgggcaacatggcaaaatcccatctctactaaaaatacaaaaaattagccaggcatggtggcgcatgcctgtaatcccagctactggggaggctgaggcacgagaatcacttgaacctgggaggcagaggttacagggagccaaaatcatgccgcttcactccagcctggacaacagagtgagactctgcctcaaaaaagaaagaaagaaagaaattggagtcctcatacgttgctggcaggaatgtaaaatagtccagccactgtgggaaatagtttggtatttcctcaaaaagttaaacagagtcaccatatgagccagcagttccactcctaaatatatatccaagagaaatgaaaatacatgtttacacaaacacttgtacacaaatatttatagtagcattattcacaatagccaaaagtggaaaatggtggggcacagtggcttgcgcctgtaagcccagcagttcggaaggctgaggtgggtggattacttgaggccaggagttcaagaccagcctggccaatatggcgaaaccccatctctactaaaaagacaaaaattagccgggcgtagtagtgcacgcctgtagtcccagctactcgggaggctgaggcacaagaatggcttgaactcaggaggcataggttgcagtgagccgagatcacaccactgcactccagcctggatgacacagcaagactctgttttaaaaaaaaaaaaaacacaacaaaagtggcaaacaacccatatttccattaactggtgagtggataaagtgtggtatatgcatagatgataatattattatgcaataaaaatgtttattatgcaataaaaaggacgcactgctacaacatggatatgccttgaaaacattagtgaggggagtcagtcacaaaagaacacattgtatgacttcatttataggaaatgtctggaataggcaaattcatagagacaaactagtttcctagactggtgggcagggggatggggaggagttggggaggaatagggagtgactgctaatgggtacagggtttatttggggagtgacgaaaatgttctaaaattgactgtggtgatagctacacaactctcaatatactgaaaactattgaatgtactctatttttaaaaattatttttgtggtaaaatacataaagtttgccatcttaatcattttaaaatgtatagttcagtagaattgaatacattcataatgttatgcattgaccaccaccattctcttcaacttgtataattgaaactctatactcattaaacagtaactcccctgtccccctcctcccagcccctggcaaccaccattccctgtctctcggattttgactatcctaagtacctcatataagtagaattatacagtatttgtctttttgtgactgacttatttcacttagcctaatgacctcaagattcatccatgtggtagcgtaagtcagaatcgccttcctttttgaggctgaatcatgctccattgtgtacgtacgccattttgcttatccattcctccatcggtgggtgcttggcttgcttccacattttagctattgtgaatgatgctgctctgaacatcagtgtacacatatcttgttttgagaccctgctttcaaatttgttggggtatatagccagaagtgaaattagtgcatcttaagggtaattctgtttaaattgtttaaggaaccgcaatactgttttccacagcagctatggaaggatggaaaaattgtatgatctatgaattatatctaagtaaaactgtaaaaaaaaaaaaaaatacaaaaccagccgggcatggtggctcacacctgtaatctcagcactttgggaggccgaggcaggcagatcacctgaggttgggagtttgagaccagcctgactaccatggagaagccccgtctgtactaaaaatacaaaaaattagccaggcgtggtggtgaatgcctgtaataccagctacttgggaggctgaggtagcctcccttgaacctgggaggcggagtttgcagtgagtcgagatcgcgcccctgcactccagcctgggcgacagagcgagactccttctcaaagaatacaaaaccatgtagccagatctaattttgcttttttttttttttttttttttttttgagatagccttgctctgtggccagggtggagtacagtggcacggtctcggcccactgcaacctctgcctcctgggctcaagcgattctcctgcctcagcctcctgagtagctgggactataggcacgcaccaccacacccagctaatttttgtatttttggtagagacgggacttcaccatgttggccaagattgtctcaatctcttgactgcgtgatttgcccgccttggcctcccaaagtgctgggattacaggcatgcaccaccacgcccggcctaattttgctttttaaaagttctgtattcttaaatgtatatatacactgaaaagagactgaaagaaaatatagtaaaactgtttttaaaaataatgtttaaaatgttttaaatctgagtagcaggtttatgggtgttttctgcagtgaatatgcattgtttttataatcaagggaaagaaacacacaggggtagggtcctccgctgtgtcatctcctggaccacactgtcccttgtgcaacccccctggcggtacactgggtgcggccaaaaaggagtgggggcactacacactctttgtaatagaaaaactgggctggcctcctggccatttgtaataggaaatgttacaccacagacttcagtaaatctgtcctactttagttttagaggttagttttaaataacacatatcccaagagtgacgcagttttgatgggcttgcttcagcttcaaaccattgaattttctctacacttatttggaagccatttttggaaagttaccatttcttagtgtgtttatacagttgagacagcgaaatgaatatcctccacacatttcatcctatagccaaatggcaatattaggaaatgtatgcacattgtttctttaaactcttaaatttttatgacattcgttgggccttcctagcaggctgttgaatccaggttttgctcataaaagcttctttgatgcattatcgatgttctgctctggaatttttctttgttcccaatgagtctgtggagagaagcttattttggaaaaaggaactgttgaaaaaacaacctgcttgtcggttatttcagaaatttgtttaccacatcatatgccattggcttggacatacattgtgaaatagcctttgtttcttgctattttgtgctaaaactgtttcctgtgagtaactagggttgtaaagaaaggctaataaagggtagatgctccctctagggaagggaaaaagtaacttattctcttgtataacctacaaatctaaaataagacacgtggtgtcttacgtgggcagcaacttagtactgtctgaggggccaggtggtcattgcccttggatgagtgtttatgcagaagtctgtataaataatcggatgggactcaaagacagtaacctcagaaaagctgaatgagttacccttggggctgggaaggagatgttcagtcagagaaaaaagggattcaaaaaaacagtgcaagttatggcatggccaagcattcaccgctgcagactcttgcccttccatccaggacctagtggtggaaaatgtcttggttaatgacagaaaacgtcacagcactcgaaaagcccagagagaataatccatgtccattaagaagggtgaagcagatccatgtcttctgaaatgggctgaccagcatgctttcttttttaaaccattttttttttttaaatgagactcaccaacgttcataaaggagacctttgaaaactcaaatgtgaaggactcctgtaaaatataaagtcatgcagtgacatgtgattgaaaaacgtaagcgaaccctaggcccccagcaagagagggcacaggctgtggcaatgtatctggagttggttcctgctggtgggttcgtggtctcactgacttcaagaatgaagtctcggaccttcacggtgagtgttacagctcttaaaggtggcacggacccaaagagtgagtagtaggaaggtttattgtgaagagcaaaagtacaaagcttccacactgcgtaagggcacccaagcgggttgccgctgctgctggctagggtggccagcttttattcccttattgtcccttcccatgttctgtttttgtcctatcacaatgcccttttttcaatcctctctgcgattggctacttttaggatcctgctgattggtgcattttacagagtgctgattggtacattttacagagcgctgattggtgcgttttacagggcactgattggtgcattttacaatccttttgctagctacagagtgctgattggtacatttttacagagtgctgattggtgcattttacaattctcttgtaagaaaatttctccaagtccccactccacccaggaagtctagctggcctcacctctcagcaagactggcagacgggtgggactgagcagtgtgctggctcaggcacagctcagtgactggtgaacaccaagcttcagaatgagtgcacggagctatgtgctgtagaccttgggagtactcacaaacaattggatctgcagattcaaatccatacacaccaagcaacaacgtgtgcaccacagcactgacccaggcacacagcttcaatgtgggcacagtcacagctgctcagaatggatatcactggcacgaatgcacaagcacaaagcgtggaggtgatgagagtgtctggtgtgtgttatagctgcagccagcccatgagggcagaacagatgcacttatagtagccatagagggaggggaaagggggaataattcacagattctgcatttctaaatcttttcatctttgctttccaaagctcattgtttctgcaaggctacagtctaattagagacctcagcacaggaaaatgtctgccatatcagggggccagctccccttcccccacccccaccgccacacacaggacagagcagatagaggatgggagaacaggactgtgtgtcaggcgctgcactcatttctaaaatggaagtaaagttcctgtctttccagggtattgtgagacatgagtggacctgagacaggaatgtgcccatagggctggcatgtggtcagtggacagctgctacattactgagctctcagcccgtgcctgcaccaaccacataaaccttacaacaccgtctgtgggtgctgctgtttacccttctttatctccatccctgaccccctccaggccagagtgcacagtctaatgattagccaaggaaatcagagacttgggtttactttctcccccatctcacacattggccacagcagatgcttcagatggattgtatcaaatggaagtaaggatcagggtatttcgctgggccgagattggtgagaacagctgtagatgtttcatggaagccctgagagcagctctctctaatccagatctgtgattcatcgtcttgcctgttcattacattaccaggggagcatctgaaactcctgatgcccactgaaatcagtgactctgggggtaggatccagacatcagtatttttaagcatcccgggagtattttgacctcacagggttcaggctgaacttgagtcctggccattggggaactgtggcgtctgcccggatgagcaccagcttgacaattacacgtccaagccttagcttgaagaaagatgggcaggcattttatcagatgtgtcactgatgcataatgttgataccaagctaatttggacgcagagcagtttggctaagctaatagtatgaaatattagctggtttacaggaagactggtagaaaaagaaaacagacaaagagaaggttttagctgtgatggcagctttcgtttctcccctttcctagtcaccaatataatgtgggacttgtaatttatagggaaggagtatgactcgtgtggtctcctgtttctataaggagggaccttcagtgactttataaaaataagcacctgtcttattctccagttgctttctagctaattttggtcccttttcttttgccagttgccagaggttccaccctctgaggaggaagaacaggaagcctgggtgaatgccttgcttggaagaatattttgggacttcttaggagagaaatactggtctgatctggtgtctaagaagatccaaatgaaactcagcaaaataaaggtatcactttccacacaagaggcttctaatcctctatacttcttcatttctggaaattttgtacccttatgtcctaagtgaaaaataatttggtttaaacgtataacatatgagggtagtaagttctcaaacagcacatctgaccttgatcacagactgaccttatgattaactgcatctgggggcttagtgaacattaatgtttactcattttcttgtgttgccctcattgttatccactccaggtgataatccagaatttagtttgggaaaatgtgagctcttataaccgattcgtcttatataattgttatttttaagttggaaatgaacttaaattgtacatccagagcccacccagccccacagcagtctaggccacatggtatatcctctgaggaaaatacaaattacttaaggcctcttagtatactcactgaagaaaatgctagactacttaaggcctcttagtatactgactgaggaaaacaccagactacttaaggcctctttcccaggctgtgctccctctcaagctgggaaagttagcattgcactttaaatgtgtctgtgtttgacctttactttttggccagatggtactttattttgggctctctcctgaagaaacactctggtgctaatccagggccagttggaagtgagtttgaactgtgtaagtatggctgtcattaaaagactcatttgccaaccaggagaccttattgaggatcttgaggttctttaaaattaactttttgacccagtgaagacccagccaagaagagtcactttggatcccaaatcttcactgaacagtcagtagcttaagtcagtagccctgaagttgtatggatcagagacatttttgagaagcagaagcctatgatatcctttcactagaaaaacacgttgacacaaaattttgcccattatttcagaaagttcaaggactctagattaagaaactgtgaactacggtaaactagattagaaggaaaatatgggcatagaggagcttcaggttgatttcttttgttcctttgggtaaagaacagagcttttcctggccttgtcaagctctggctgctgtctgtgggccagtgtcccttcttccccagctcctgagaaagaggaaggaggggctgccttctgagccagaagggtggatttcaaggcagattttgggggagggctctgttgacaggtgtcagcctgtttgtgttcctgaggtagtttgagggttgaacgtgcttctgctagccagttccatagcaggagacaacaagtagcagtaaccctctgtgttgggagatgcagtgtcagcagccaacctagagctcactcagcctctccccatttttggaaatgatggaaggcttgagttcccaggtcaaggcatatgggtagggctggccctgctcttttcccagggtctatctcgagcccttctgtaagcaagaggggcccttccctgagcagcagggctgcagttcttggcagtgtgcaaaaagaaagcaggacatacttgaactccaggtgggatgctgctcccctgctacatgcattccaaagctgacttgagccaggagtgctggtgcacacctgtggtcccagatacttgggttgcagaggcaagaggatgacttgaacccaggagttctgagctatgatcgcaccaccaaactccagcctgggtgacagagcaagactctcatctctaaaaacaacaacaacaccaacaaaaccaaactggtttgagaggtcccacccttctctcttgagctggaagtccacagagcctctgccctatttgtgaaggtgcccccgtcctcctggagaaagttgagggaaagtctgttttcattttctcccgttgataatcatggaggcactggtagttcacagacttaaacttccttttgttttttgaggtcagaagtactaaaaggttagaatggagaagtgtggcctagatccagcagtgccagaggctagaggtgggcattgtgttccctcagtgtgttccatccataccctccacccgcctcctgatctgctgcactgtgaagtgcctgcagaccagaggagcccctggttacagaataaacaggaaagcagaaggacattaccaaattctgaagctgtcaccgcccctacgaaaagaactgattgccaccaaatatccaagtacccctgggaggaactaagccttaagcctagtagtgagtgggtattggttaatagccagtcaagagccaaaatgggaatagggaagtggtatctagaggagcctgagctttcccctgtgacacagatctccctgatcccctggtttccctggaaggcctgacatatggagaactctttgctggccttgccctgtagtctcggattgtcagccttgcacatgatcatgactcatgttgtgaaaaagcagccctgtgtgtgcaactggtgcccagtgatgggtttaaaacaagctgagtttctgccccagtagtaagtgtgctcttggccttagccagctgctcagataaccgccctagggccctcagtggttatgagcctcttgtgcctgtgtcagcaaatgttgctgagatcgcatacagcttctaacttagcacccaccagcctgagaacgtcccatacccttgaatgcctagtccctaattgggtttactccagagggtaaagaatgtgcccctggatttctgtctcactgtggtaccctttgggtgggaagaaaacagtttattgtcgaaaagaacaggaggaatgaccttaacagaagaaggctgctcaagggcagggatgtgaactaggaggggagtatatgagtgctggagggttggttatagatgttctggggtcttcgggttggatagatgggcaaataaataggaaaccaggccctctgatctcccctccccattctgcttactagtaggtagacaccttcccctgccaagtcctcctcagtccccaggtccttcaggtccctcctttgtctcaggtcctgtctcaggtccttcctttgcctttgcagggactagaggttgcagaatggcaggtagtggttgacaggggaagagaagggacagttatgttcctgctgtctctttattcactcctgtggctcagtgtcagactgacattcccatagaaacaccgttggatgtctgggcatggtggcttatgcctgtaatccagcacttcgggaggccgaagtggaggaaatcttgagcccagtagtttgagaccagactaggcaacatagtaagaccctgtctctacaaaaaaaaaaaattatccaagcgtggtagtggtacatgcctatagtcccagctactcagaaggttgaggtgggaggatcgcttcaccccaggaggctgtggcttcagtgagccatgattgcaccactgcactccagcctgagtgacagagcgaaatcctgtttcaaaaaaaaaaagaaaagaaacaccattggaggtgacagtattccctggctcacccttggaagtctctctaacttggcatgctcctgaagcacagcatttgaatgacagtagtggacaaaaaggacagggcaattgtgcaagactttggttacattcttagccaagtagcattttataggttggtagagaggccaataccacttataacattgatgctttggaaaaaggttctccaaatatagcaaacaccaattcaaaactatgcctttgaacactgtctactcacgttttgttcgtcatagacattataacctttttaacatcccctccacaaaaaatcagagattacattctctgattggtgaatcctgaaagcttatgtttctctgcagggaaacagctgaagaggtccagccaagttaggtattaaattcatgcctgactagatgctacctcattttatgtggaatatttagtttacatttaatttttaaaaacctcttaattttattctaaattttataaaactattgtaacattcaactggaaaaatacttatgaaaataactaagagaattctgggagaaaaaaaaaggagagggacttgccagatttaaaagtatattataaagttaaaagtgtattataaagctaaaatatattataaagctaaagtagtcaaagcagtttgatactggtagaaattcagtacagactccagtgcagtgggaatttagcacttaaagatggcggaacagattagtagggcaagtgttggttgctgaataaataggtcgagattgctgaccaaccatttgggggaaaaattacactagatccctaatttacatcttacattaaaattatgaatggaataaatattttaagaaatacatatacatccacaaatccaagcagagaaaatatagatgaattaattctataatcttgagatgaagtaggaatttttaaacatgatgccagtattcttatgttatttcctgtagaataaattcctacggatagatttgggggtgtgtattagtcagggtcccagcaggaagcagatggcacactcagataagtaactctggggagagtttgctgaagggaagatttataaaggtgtgggcagatggagaaaaactcgtagggagagtgctacactccagaactagcagaagtgggagctgttactctctctggagcagcaaaggcaaggagaacttggacagggcagctgtgtggagaggcttcctgtgttacaggagctgtggccttcagtagatgggggggacaaatgcccaacactcttctccgtgtgcctccccatcaactgcccattggtgtatcccattggccatgcccaaccagaagctggagggtaaaagagaccgttggcacagttcacgcagaccaaccactggggatagagtgtagatctggcagggcaaacagaaaatgttcagcatgagatcaaaggatgtgctatttttcttttttttttttttgagacggattctcgctctgtcacccaggctggagtgcagtggtgcgatcttggcttgctgcaacctccacctctcaggttcaagcaattctcctgcctcagcctcctgagtagctgggactacaggcacgtgccaccacacccggctaattttttgtatatttagtagagacgggtttcaccgtgttagccaggatggtctcaatctcttgacctcgtgatccgcccacctcggcctcccaaagtgctgggattacaggcgtgagccactgcgcctggccagcatgtgctgtttttcaaggattttcatacacatgtaagtttgcctatcggaaatgtagcaatttctcttcttttcttttttttttttttttgacgcagagtctcgctctgtcctccaggctggggtgcagtggcacattctcagctcaccgcaacctctgcccccaggttcaagtgatcctcccacctcagcctctccgagtagctgggactacaagtgcatgccaccttgcctggtggatttttgtattttttggtagagttggggtttcaccatgttggccaggctggtctcgaactcctgacctcaagtgatccatccaccttggcctcccaaagtgttgggattacagacatgagccaccgcacctgaccttgttgtagcagtttcttactacccactgagagtctgagagaggtctgttttcccatacttcagcaaatgtggggtactgttaaccagcatggctggctccttctccataggtggcctctgctcaaatgccactcctcagggaagccatccctgacctcctcagccaaaacagccacccccgtgttccctctgcccattacctgcttgatgttctttgcagcactaatcactctctggaagtatattgtctatgtatttacctgtttctgcctttctattataaaccccgtgagagccaggccctggcctgacctcttcatggctctgtctggagtacgaagcctagtacatgatgtgtgcacattacgttttcgttacataaatgatatgtccccaaaaccttggccaccatcctctccggaagcatgttgacttgcaacagcatgttttgtaggttgctcatgggtctcactcattgtttgcttgtttcctctagctcccctactttatgaatgagctcactctgacggaacttgacatgggcgtggctgtgccaaaaatcctccaggccttcaagccttacgttgatcaccaaggtaactcctaactgaccattctatgagtgttaaaatatatcctttgctgcagattcagtaccatgatggctttgtgtttggagggtgttgaggactttttaaatcatctgtttcatgttgagtgtctttctgttcttaccagtcatggccttaaaactgatttggggccgggcatggtggcttacgcctgtaatcccagcattttgggaggccaaggcaggcggatcacctgaggtcaggaattcgaggccagcctggccaacatggcaaaacaccgtctctactaaaaaagtacaaaaattagtcgggcgtggtggcgggtgcctgtaatcccagctactcaggaggctgaggcaggagaatcgcttgaacccaggagacggaggttgcagtgagccaagatcgtgccactggactccagcctggatgacaagagcgagactctgtctcacaaaaaaaaaaaaaaaaaaaaaaaaagatttggaatagatccaagctcccatcctaagtcttttagtctcttggttattatagggcctcctccagcccagtgatgcacacatgccagctgatggggcctgtgcttttgtaggggttgcagcccttgccagggcatgaggcagtggctggatttcagttccgctcacctctcatggccctcacgggtgcagctgccccagccctagccgcttgccaggagctgcctctcctcacatgtgttcacatccttacctctcctgacttgtaggttccagattttttgactttcatgtcttctgtctttatgttccttgctactcctagtaggtgctcagtacatgtttgagaaatgaagacgtacagtatattcaaaggcaatattttgagagtagggctccttgctggaggaaagttctcagatttgagtttttaaacatgttactaagacattatttatgtctgcttttgtgggtggggggttaaagagttgatcagattgtagagagtttgtgtaacatgatgatgatgatgatgtaaggatttgtatctcttatgtcacataaaccataaatacggttttaaaaggatcttgacagggaaaatttagtacacaggagtttggtaaaaaaagaggaatgagccaggtaggccagaatagcccattagcatgcagagagaattctcactgacgtttttactgtagcctcccttggcaagtgagcctctttccacttcaaccatatttacatttttcctaaaatggcttaggaacaaggtaggagaaaaactaattatagcttttcaagagagtgatagttgttttaaagtaaatgttttataaaatttgtagagcatggaagctacttttctctctggctgtatcagatggttcttgaattgtgtttagtgaaatcagtttttctgctgttgtgtacatttgatgtaaatatgaagagatttttctagcactatagttagcagctctagcatatctctccagcaatatttcagtggacaacctatccatgtttttcgcatcacatcaatttcagagaaagaaagaccagggtagtatttgcacatccagagaagtccatctaattcctgcatgttgagctcacctgtaacccctcaattatgtctataccttgatgaatctgggtgtgtctaggtttgggaatttctggttcactgaaagtaaaagtagaaaacctttcaattcttggcaaatggctgaactagagtgtttttaaccccatgcaaaattgtaaaagatgcattggctgagtgcggtggctcacgcctgtaatcctagcacttttaaaagccaaggcaggtagatcacttgagaccaggagttcaagaccagcctggccaacgtggtgaaaccccgtctctactaaaaatacaaaagtcagccgggcatggtggtgtgtgcctgtaatcccagtgactcagtaggctgaggcacaagaatagcttgaacccaggaggcagaggttgcaatgagccaagactgtgcctctgcactccagcctgggcgacagagcgagactctgtcttaaaaaaaagaaagaaagaaaataacagagctttagaaataagatgaagatgtaacctcgggccctagcatcaccctggcctgtaatcccagctactcgggagtctgaggcctgggcaacagagcgagaatctgtctcaaaaaaaaaaaaaaaaaaaaaaaagcaccatctatgtgttcactgcatagctagctagcatcttcactccatcagtgtgcagctgctacctttcttcctctaactcaggtggcctctctattcctttttgctctttgcctctttagaaatgtataagaagctggtgaatgatcagctaacacaaacctcatgtgaggcttaaagaaactaaataataagtgtgcacgctctattttctaatgtgttagcagcctcttatctcaggactgccctttgctgaatttgtagaaatttccgaggagaggggagcagggccacaaccaggcccctgtggctttgaactctgcagcctctcagggcagctttggtcaggctttgagtaaaattcaccaaacacctaagtgtcaagcttcttaactgttcttctagagcaggagctatggtgagatatttcactatatagatcaaagctttgccagtttttaatccatttgaggctatttaactcctttcagggtacgtttttagagacttgcctgcttgtgtaacaagggagaaaatggtattaaaggaacgataaagacataaagccagtggggttttcaaagtttgatcaaatcaggtttttccaagtccacaaatgatgcatgtatgatgataaaacagaaatgaccgtgaaagaaataaataagcattttggattccagtgctctacgggggaatctttccttttagtgaaatttgaatctgggtgacaagcaaactgactctgaaaagcagagctcaccttccagggaaatgcgacccaggtgaaggaggccttcacagctctaaggagcgccacctcctatgggatcccctcacattctttttaaaaatatttcctggcttgtgcttgtttgttggaggaatatgttcagaagggatattttggccacaactggttggattatcccatcctagggatgctcttcttgaggcaagaggcagcactggttttgagcaccagctctggacccgactacctggtccacagcttcgtggcctcaggcaaacccctgaaccacttcacttcctcatctctcaaatagggattcttttttttttgagatggagtttcactcttgtcgtccagcctggagtgcagtggcatgatctcaactcactgcaacctccacctcctgggttcaagtgattctcctgtctcagcctcccaagtagctgggattacaggcacctgccaccatgactggctaatttttatatttttagtagagagggggtttctccctgttggccagtctggtcttgaactcctgacctcaggtgatccacccacctcagcctctcaaagtgctgggattacatgcatgagccactgcgcccggctcaaacagggattcttacagcacctacttcataagcttgtcgtgaggattaaatgagtcaatacaaaaaaggcactagaacagcatctggagcaaggaggagctctatgcatgtcaactaaggattgttattatcatggctgcctggatgctgctgttagggcatttagcatggaggcggccatagtgtccagttgaccatcctacagatcaaagctggcagatcctactaggataaacaaaaacaaaacaaaacaaaacaaaatggcattctcagctttcatggccttgctgctgtaagaagtcaagtctgtggttcttctgaatgaaatcgcacacaatggccatgttggcttgtccctgttccaacacacacaacctgtctcaagtgaattgaatgaggttaaatgaccaccttttccagagcagcctcacttcccaccaaaggcagatggctggacgataggcaagctgtgtcccttagaaactggctgtgctcctcctgcctcagctctgacgcctcctcactccacacacaccctggaactagctgctctacctgtgggatatatatggatttcctttctttcctttaggccacacagcaaggtccagaaacctgtgtatgttacccttcccccaccagactggcctcctctacccagccctcatccctaccctgggctgccacctccagggcctgccactcagccaaactctttccagtcattttattaactccattagggtaatgtttgttcattcattcaacaaatactcattgtgggaaaaacagaaatattcaggaaaggtaaaaaggaaaatattacccatcatcccaccattcagagataaccagggttacctttttagtacatttttggtatatgctctccaaatcttttttcttatggctaaaaatttagaaaacatagctctttttcaaaacccttgaagaactgggaagacttgaaagggcagtcagattgcctcaatccaccctgccatgtgtgtatgagccaaagcccagagaggggtgacttgcccgggtcagcagcagcctcacacttccaacctgtttcatggagtctaggccccatcagaggctgcccatgagcactggctctacagccaggtcacctgtgtttgggtcctgctcgtacaccattcagcggtacaactgtggggaagccactaaccactctatacctcagtttcctcatccttcaagtgctgatggcagtcctgcccgcctcgtttgggtgtggtagagatgcagtgttacgtgtaaagcactcggagcacgtggcacgtagtaagcatcagtgttagctgctgctctccggccactgtgttagtattaataaaatcatcctgaagaggctgggtgggggccgcttctgtcagcaggtttttatcttctgtgcctgagtccagcggtttcagaacaggtgcccacaggtgtgtcagcagcgtcagaatgatccaaggatgcagaccacaacccctcaggcttagatgaattcatttagtcttcgggatgtttgcaacatgaatttaaaactgcaaatagccactgagtgtccacacagacagaggacccgactgggttttgccttgttttcaagataccaaataacagcccaaatttagactgaatgtctcagattctatggaaatattaccatgtcccacagaaatagaaaccttgtctgtctccagagctgcccttagtcatctggactgatattccagaccttaacccacgtgcctggtgccttcacatccagtgttccagactggatcctaccaggatccactacctgtgtgcctggtgccttcacatccagtgttgggagtgatgctactttgccacctgagtaatgacagaaaactggagccagagtcagtcatgacttgcccactcctcctgccacacgtgcttcaagagtgacatcagagggcagctacagccactggggctgcctgggcctgagcaccaaggcagggccatactctagcacgtggggctgataggagtggctctgaccagactgtgctacgggaagaaaaacacttagtgtggaaagggcttagtgtgggaaggggaaatcatacctcttgtggaacatgggtcgggtgggggacaggggaccctgatttgcagcttgtcaaccttgaaggggtggagctctatttcagaggacagttacaggtagacaaggctaaaaatgatgtctatcatcaaagacacatccacacacaaggaattgctaattttctgtagtatctgaatgagcaatatggcaccagtctctttgccaggagcacaacagtcactggtgtgttcttcccagagctgaataactccaacatctgttcttgataatgttatcaaatgttccattttaagaagttttgttctttggatgccaaatattgactttcagagtgaaatcagctgttaatagttacaggtagaaggaaatggaggagaaaataacgtgaggaccaagttcaggtgtgcagggttttggttcccttaactactcccaagcagcaggtgccctctcaagcctactccagtgagacagatgcctaaatagtaataaaacagtgaactgctgtgtgagattattagattcacatggccacgggaggactgaggccatggggtctgttaactggaaaaccaggccgaaggcagaagagcctcttgtggttgtggccaccccttatctgtggggacatacgccaaggcattttatgataccaactggcatcatggtctgagctgcagcagctggcctaggccacttttatttttcttcaaacatacacttcctgagggcaggggttcatctcagtgcttttggctctgatattgtacattaagaacgcatacacgctttttggtggaataagctgtaatttttgccacagtgtctctgtgtagtggtggtagtggtaattgatcctgccgctgtgaaactgaagagtggaaaaacagcatctgagctccttccaggtccttgtacacagactaagtcttactacattgtcactcgtgttgctgcatgaagtgccagggttttttttttttttcttcttcttcttttgagacagaggctagagtgcagtagggcgatcgcggctcactgcaacctctgccccccaggctcaagccattctcgtgcctcagcgtacctagcagctgggactacaggtgcgcaccaccatgcctagctaatttgtgtatttttagtagagacgaggtttcaccatgatggccaggctggtcttgaactcctggcctcaagtgatccgcctgcctcagcctcccaaagtgctgggattacaggcgtgagacactgtgcccagcctgaagtgccagttttataggggctcgttaatgatcgggtgccactggttaccactggacaacctctcaacatgatgtggaatagacccttcgtatgcgtgcctccagccccctttcccagagaacctctcaggactgcctgcttactcctatttaaaggcatcaaagattatcctgctcctcaatttctggttttgttcttgagcaccagccagggcacatggttatagaaagtattttcagtgaaatgcctacagctaagtcttaaccatttgtcaagactacaaaagaaagggccctgtaaccgcattcctctagattaagtagcatttagctgggttacagtggaagatggtgctcatggggcagtgtatgtccccgtgtgctcattgttgctatgttagtccccaaggggaagacaacctttctagtaactgtgaatttcatctttcagtcttgcaaggcaggggcctcctgactcacctgtcacgtaaccggttggtctttgctccaagttttgggagttgcccgtgtccccaggttttcaggtcacgttctgcctgctgaatcattgttacaaaagcaaatttctcctacacttaatgctaaaatagtcttcttaccctcatctgaatgcaagcacatcatattagagtcatttgttggaatatttatttaccattcatgtctgcttttaaaagttcttaaaccattccaggccaggtgcagtggctcacacctcccaaagtaatcccagcactttgggaggccaaggcaggtggatcacttgagctcaggagtttgaaatcaccctgggcaatatggcaaaaccccatctctaccaaaaataaaatatatatatatgttagccgggcatggtggcggacccctgtggtcccagctactcaggaggctgtggtgggaggatcacttgagcctgggaggcggaggttgcagtcagccaagatcgtaccaggtggcactccagcctgggtgagagtgagaccccatctcagggaagaaaaaagttcttaaagcattcttgactctttcatatttttatgagtgccagggctgagcagggccctgtgagtgggtctcatgaggtatattcagtgtttaaaacagacccctcacccaggcagaggctcagtcagatgcccaagcctcatcctcagatatcaggctccatggctgaccagtacagcctcttccctggcaacagcagcaagggagacagagcaagaagtaagggtgggctggtgaatgcagaaaaagggaggctgcctggtcagactgtgccaggtgccagggtgtacacagctctccctgaaagaggcagtataggtctccttggtgcagacaaaggtactgatggcacagaagtgaagaaacttccagtgaaacacaagccccaatctatgtgactgggctccttgctcttccctgggccttcctccacctcccagctcctggcagggacgctggaccacacatcatttggtagaatgtccccgtgactgggcatgagccagcagtttactaagcctaaatccatatatcttcatttaaaaaacagactagcaaaactttccattttgtaagaagtataattctggtgcctttaatatgtccattttcaaaggcaacgcatactattaatatttattagaaacttgactagaattttcaaaagaaacgattatgtttggatgtatatagtaactaggtagtttgaatattaattttcaaagctggaaatactatacaacaataaatatctcctttattgttgttcttttacattgagtttaaatctattaatattagccttttgctctaatcccctttctcctgaagtgattaaaaactaaatgtctttattaaagcagatataccctttatttccagtaatagtacctttgaagagcaagctaattaattctttctaactgcttaatgtaaacaagaaatacaacagttttgtgagtattgctgcaaagaagataatcacaattgatctccatatcacttaattaaaccaggtcattcatggaaaataattaccttccattatggtaaaaagaatttgttgaaaacaaaatggaaatcatcctgcctttagtgaggaatgacaccattagtgctgggtggggttaagcagtggttttatctgaggtggtggccgtgtaggggatgggctgtttactgtaattgcttgaaaacaatgctgtatgtgaacgatggttttagattaatttcctgcttccttttagatgtcatttgtcatgtgaggatctataaaagtttattaacatttaaacacccacttaaaggatcacattttgatagaaagtccatgaggtcttctggagccccgagtctgaaaaatcacagaaaaatacttgacaaatcatagaatcctcaagtagaagagggtcatgagataaaccctgtttgcattttaaaccactgaacagcggccattgcagtaaaattccatgaagctacaagccttttagatatgatctcattggcatagtatctttcctaaggagctgatttttagcctaaggtacaaagtgattatgcaattgtatctggataatcctgggaattgaaagttaattctttggttcccatcagtgggcagtttccagaaagaaaggaaggtcttaaacgtttttgtcactcttcctgttaaatctgagccattttctgtgtcccactcccaatactggagaattttaagaaagacagcggttctcatatgtgtctttaaagaacaacccagcttacagagaagtcttagcacttcccttgtgcctcgtaactggctgggcatcagcatgccttgtcctggctttgccctgggtcaagccattttcttccgctaggcatatgtcttcttactaaatacaaggagattttagaagccagaggatgggacccttccaatgctgacttgtgcactgaattccccaggatcctgtgaatgggtcctcagatgctggctgtttaccaggggctcgatgtattccatgacctgttctcgtgtgtgtcgatggcacaatgtgctctcagtcctcttctcaactagagtagtagacgatacatggactttcagtatggtgcctatttagatatttttaaatgtaagtcatttatagtcatgtgtttttttgagggaaaaaaaccttctgttttttcaccatttctccaggactctggattgatttggaaatgtcctacaatgggtcctttctgatgactctcgagaccaaaatgaatttgaccaaactaggtaaagagcctcttgttgaagccctgaaggttggagaaattggcaaagaagggtaaggggctatatatgaatttactaatccaatcctggggcaccagcttctccctccagcctttgagaagcagatttgatgtgtagtggcccctggatgttgagtgagcttctgtgtaagtgctcctggaccagagcatttcagggaatggtttcctagtctcatccccagtggcctgtgagttcccaacccagctcagctgtgacagcgcctttgacctcagtgctggtggtggtacacatggaattgattacccagaaaacatcactgactcagacaagcagggcagactcatccgagcaataaaatgatcctcgaatagaatcatgaagatccttccggtcataaacagcaatatgtggagcaggctgaatctacctgctttaatcacaaagtcagaattatttataattagatgattgattttgtagcacagagggtgctcctaaaagtgttttgagaagcattttccctaaataatacaatattgacttgcgtagtaaatccctctctttgtagatagtgtatctgctgcctagggtttgtctgatttagtaaatattccaaaattgtgaggtaactcatgaagcttaatttttttccctcttaaatgcctagaatagataaactggaacttttacatcctattctccttaaaatgactgctttgactataaatttaaattatattattgtttttaccaaattaaaaatgttgactagaggctacttctcacatctttagccctttgcatggaatcaacagtatgatgacatgaaaatgtcacaaggagctacctccatggggtctaaatataagatactggctcttagacttttgcttggttctggtactgacctaatgcttttattcatgcttgtggtagtagcagattgggggagctgggttatgcattggagaatattcttttacttagattattctgatttattcaagttacttaatgaaatgtttctattttaataattggagaattttaccagctatatgcaatctaaccggtgtctgtgctattttcctttcatttttctatttgttaaaatatgtttggattcggcaatctgtggatttatattttctggtgagtgtggtatttatcaactctccacatagcatttcataccctgtaacttctgagtcttgttcggtcccatgtgaaaccatgaggaaacctgtcttttcatcacgttcttggacataaaggcatcacgttcttggacataaaagcctgagagaaccgacaccaggagtagttaagaggctttcctgacagggaaagtcttatagacttccccaatttgaattgctggagtcctgatctagtcagactcaattccttgtcctgctgtccccaccccacccccacgcatagctgagcacattaaatctagctcatgacgacagagttgcagaaccagctgcctagaaaatgaagcacctgaagcagaagcagtcttgaaaatgagatctaataaaaagggagtgtggcagagcaacctcaggcagatgcgtttgtgcaaggagccctttctagaaacagcaccatgtgggcacaggggcacagggactccattgcaaagggggtcttgggcaccgggggtggcaaccaggccggtccctgaggtgcttgccacgtatgcgtccacattcactgctattcatgcagccctcgtagcccagtttcaagttcataaactctggccgatcagagggtggacgtgtttctggaaagctgtgcttctctagactgagtgaaaaaaagatcctctgctttaggaatgtgatggtattatatttcacttatatttctaaagtactatttttttctagaacagtctgttataaaatgttttgcttcttcctgtgagggtgttaaattatatgttgatgtgtagttggctatcatttgtttttaaaagtaaggaggaatacaatccagcagcacttcatttgggagaaaaaggcccagaaaaatggacccttaccccttttttcagaaaggaccctttcgggaacctgagagcactgggtccttctttctgcaaatgcttccacatgcaccatttggctcacagtttctaggagcattgtgaatctctgaaagcccatccgtggttaagaacctaatcccagaagtgattccagaatccacttcacttcctcagtcatgaggtttacggaatcaccacgcggcttagtagcagaggagggacaggggtcagcatacttattagctgtttgaagcgtgtgacctttggaactgacatcttccttaatattaaacctccaaagcacagaacatctgaagaattggccagcagcagccctttcctgcaggctctccctgcagcccatggccacctgtccagggcctcactccacatcagggtctgctccctggtgtcctgcctggcagggcctcggcttcatctcactgcttttctcagtccctgttcaagtgtgcaaatgattgtgcttttgcggagtctctgaggagatgctgcttaacctgtgagatgtcctccttactggtaggaagtttgttcacctttagttagcaccctgagggttagactgagattttaacctgtgtagctttgccctagcaaagtctcttccctttgaaatatgtgtctgctgtattttcatgggcatttttcctttagtcttttcccaaatagtccttttgtcgcacactgcaggtaacataacatacaacattcagatgggattgagatagtaacctgagcagcctctgctttaggaactgccctgcagagggccagaatgagttagttaaagggagcgctctgccttttgggtggcctttaaatggaaagtggcatggaagtgaagtgtttcctataaggcacttggcctcttcctgctccaccactgcagtctgggccctttgtacaagtccccaagtcagaaggtggccccatctgacctcttttgggttactagttcacatctaccccaaactacccatctgcccccaggcccctggtgttctgggcactgagtgcctgcagtttacactgtgactcagtctagtttgtgggtgtgtatgcacatgtgtgcctgtggcaggtgtatagaactgattttctcaaaagaaaaattagtgcattcttgagtgtggtctccctcaaagcaaacatctcacagggcttcttaatttaattatgcgtcttcatttaaagcattttgggggcttctttttagaattgcctccacagtccgtgacattcttttagctatcctgagtgacagcaaattgtcctgctttgtagatggtttggacctttgagaaattgctagaagtcatcagaggtggtggtcattatgagaccaagaaataaaatatttggtctaagagtgtcagtgataaaataattcactttttcttatatatctgacatttccaaaagatttttggcagaaggaacataactggaataagccttttaaggtgtctctttgaaaggataccacactcatctggaattctgaggtgtgtttaaaacaagtaggctaattacattccagcacgtcttctacaagtaagtgtggtgtatcttcctctgaagttcatgctgaggtcataaaatgcatgttcatttataaaaatgaatatcaggcaaacactgggctacacttataattcctaagtattgggtgccgcataatactgcccccagcgcggagagcagaggtaccactcggtcaaaatcagattttcacatcatctgatcagcttgaactggtacagcattacctaaagtgttcacttcaagccacaaaatttgtcctgttctgtgacctgcagaggattaactcagtaacctgagagcttgccacagcgctcagcctctggcatcttctgcccagggttggagctgccagatgatatggcccagtggggacacaaggagcagtggctcagcagatctcactggggtcccagagcttgcaggcagccttttgtgctttgtgggtgaggagcaggctccctgtgctgtggggacagatttcacacctggcagcatgaggtcagagagcctcaggcactgccatcctactgatggagaactctgatgctcttctgagaggggcgtgtgatctttggggatttacatctctgactttcctcacccaagacccggtttaggctttcataggaattgaattttgctatatacattttaaatataagattcctgtgagggctgcctaaccacagcacactctgatatggctctgcagccagtggatacacataagcatttcctggaccagccaggcctctggtggaaggaggaagactcagttacgtgctgtcccatggccagggacaagaggcttttgtttctgcagagggagtttccctttaatgtggaagtccagcctgttggctggagcactggctctaatgtttcagagtgggggtagggaggagctgtgtgtcctgccagggaggacacagtccgggtcctcttacagccggctcctgtttccagtgtagaggtttcagtcctaccctcccagtgcacagggctggggccactgccgggccttcagttccacactggcatgtgtgctgtgcccttgggtgcctttggctcctgttggtcaggcgataactgtccccgtgggcctctggtggcccaaggacagcatcaggaaaaccaaaggactgcagctgcagggagataggccctgagccccactgccttcccttgtccatgtaactgtgtccttgtcaaaaatacaatgaccagcctctgcttggtgaccatttggttgtgtaatagtgttcagagactactctgtcccttgttcattttgtcccatttaagtctctgggctcagacacagccctgccagtactttctgaagcaaagccacggtccagggaggaagctgctttctataggcccgaggctcagcccagaagcccccaggtcccctccgacgggaactggacccctcacctctgcgggtaatccagcaaccccacacctctggaactgagtatctgccctggagagctgagtgagggacactgctgtcccacgaggctttcccttacttcagtcaaaggaatggtctttagacatgtatttttccggaaaatttcctgagttctcatgtcagttgcttcctagagtctcctgagactttttgtgtgtgtgtgtgtatgtggttgttggctttttctgtgaccctcaggagatagggcaggtgtggagtgaaatacgtaatttcactggaaaggagtcatgagtcaaaactcacttggagggttactaagccagaaagcatcagagttgctgaattaagccagagccaagggacttgcctcaacatcccatcatcagtgagaagtggccatgtcaccagtataagctgtcacctcacttttgcaaccatccgctctttctgttcatcctcccgtgtggctccgctgcactgctggttgaaatcactgcattttatgtgcgcatcacactcccacctcctgtccttctgacgcatgctcaaaagcaacctcttctgggtccaaggcctctgtggtcctgtcagaggccttggtgctgaagagtgtcctgagcatctgcgctgatccaaggattcttggattgggcctcttctggtttgggtgggttggagagaatgacgagatgtagttaacagttacatcccgaccctgttgtggttgagtgtgtgtgcatgggtgtgtgtgttctctttctaagcagagcttgggtgagggcaggcagtggtggtgactctctctctgtccagttgcaggccccgggcattctgtctggcggacagcgatgaggaatcctccagcgctggctcctccgaggaagacgatgccccagagcccagcgggggagacaaacagctcctcccaggggctgaagggtgagtggatcagtgcttctgtgcctctgagtctccagggatcaggacagcaagttgggagtgaaccttgtttcccttccttcctctgtgatcttccttcctctttaatgttgagtagatggtttttttattaatatcccaggtcagtggtctgtttaaattccaggcaaccaagcaaaaagacccatatagctttccttactaaaatggctttctgctgctgtttgattaaataatagagaagttgaagggtgtgctgatgatgaaaagcatctccctgagccttcagaaggaaccgagcatacaccccctccccccggagagcctccctcccctcagcttcagctggagtgcatttgcttctgttgagctgcaagttcctgcaaagcagaaacattcagatgattttctttggcgagttttgaaagcgctgatgactgagctgatcttttggatcatgaacttcatttggagggggttactctttccctgttaacttgggctgtgaaatgatcaaagtgcttaaatagcctatccacaatgatcttttaattacataaagtgaattgaagaaactaaaagaagccaaataattcagaaacttttataagaaaaaaccaacctattcacttttgaaatcctacaggagatgagaattcagatgtttgaggagttggtgccaaagtttgtgtgtattatttacagtctagctgcttgaccctcttaagaatgattgcttttccctgaacacatacttttcctcatgttctggaactgtgggggattttaaaaagcaaatatcctttcttctgagtctcatggtacatgtgacctgatacaacagcttattttcttggcctgtgagcacgtcaacttggtgtagcattttgtttgtttgtttgttttcttgagacagcatcttgctctgtcacccaggcctggagtgcagtggcacgatcatagctcaatgcagcctcaacctcctgggctcaagtgatcctcccattttagcctcccgagtagctgggactacagatgcacaccaccactcctggctaattttctgtttgttttttgtagagatgggggtctcactgtgttgcccaggctacatttttctttaagaagttccaagccctttgaaaagtaattgccactcaaggtagccatgtgacaccacctaaagacagtccattaattactgatttatgtcctattgatgcagcatgatttgttacttgctgcatggagattatgagattgatatgtcattggatttctgtctggtattggagtagtataaaggaggacaggtgagaaacctctgcatgaggactttgtccagctctccattgtcaaggtttggactgtttcagacatttacaccttctctgaagtagtagttctcaactgggggtgatttggccccccagaggacatttgccgatgtctggcaacattttttattgtcataactagggggagtgctattggcatctggtaggtagagaccagggatgctgctgaacaccctgcaatgcacaggatgccccccgccccaacacagaatcaccacatccaaaacatcgagtggtgctctaaagtaaggggaacgaagagccacaggtttttgtctgtgaaaagagcaaagtttgtgctaaccgccctttgtgttccacatttgaaggtacgttggaggtcatcgaacaagtaagattatgaggtttgttgataaaattaccaagtcaaaatatttccaaaaagcaacagagacagagtttattaaaaagaagatcgaagaagtctccaacacacccctgctgctcactgttgaagtacaagaatgtagaggaaccttggcggtcaacattccaccacccccgactgaccgagtatggtgcgtagagggccctcagggacaataagtgattcctcctattgcatggccacagaaatcccagcctgcttaaccttgaggttatggaaagtaccttctcccgggcagaagcacttccaaacaattttcatgggaccttaatattagttgcaaatctgatggtactttcttctgtgagtggtgaattcacattcaagaattcatgttcacatggtaggaaaagttaaagtcaatacatgaagtttatgagataagctgtttctattattggtcttcctcctctgtaaagccaactgttctgccagtaataacagctgtcatttgtagatagcgcctttattctctgcctggccctggttgtaattgcattacctgattagtcctcatagcatcctgttgaggtagatgccattgttatccctactttaaagatggggatcacacatccaacagagtctgggaagttagggagacttccctgagttaggcctcaatgctgaggagtcaggagcatgtgcatttggtgtctgaggactggattctcagccccagctgcatgttaaaatcacctggggacttgctaaaaatatagctatgcctggcccatccccccggatttcaggggtcgggggtgatgaagccagggttgagagtcactgaaataaattactgatgagttcagcatcactgcctgtgaatctcaatttaaaattgacatgctaagtcctataaaaatgggcataagtgtaaatagtgattgcataagagatctcattgtaccataaactacactcataacaaaaatatagctctgttctatcatagagtaaaaccaacatgctagtacataccatcggtattcagaaggatttgtaggaatgatcagaagaggggttttgaattgactaaccatttaacgataatgctggtatttcccaataaaactttaaaatgcctttttatacttttttaaagtaatattttcattgttaaaaaaaagagaaagattgggaaaaggtgaaaaatagataaataaataaaaacccataatctcaccatccagaaataaccactgttaatatattgtatggtctttcaaaccttaaaaaaattttaatagttaaaattgatacatttcttctccttactgccaattctttagatttatcagttttaaatgcctctgctcagggggagataaaataaaagggctctaggatagtgctacccaaggcatgctcaaatgctgaactatgtgttattgatccataaagataagtatagagtgtttagaaatatttatggcaacttgacatttttactgtatttccaaaagcactggtccaggacagatttaaggttttagatagttgatagcatacagggtcttgtctggatactttgccaacagttctgattgccagtctgctccctcgggaagtcatacaaagcgtattgttggggtgtaggatgaaaaaacaggtttcaaaccttattgatcgacatatgcacaggagaatgtaaggggagttcaccctacttctgtcaatagtcctctcttggggatgacattcagagagaggcagtgtgtctttcactctctgctttatctgcttgtatgtatgttttgtttttgtaatgtacatatactacttttataaaaattgaaagaaaaaaggttattgccattttagaaaaaaacagaaaccaatgcccaggtcatggacttttccagtggtgcttcctggctctctcagtttgtcagaactgttctaaatccgccacagccctaacaccatccagggaacacagggggttcacaattcatactttgtgtgtggaatatttttagagggcattttcagaagaaaataacattttaagtagtgataaagccccatgtaaatgagaactgtttgctgtcagtgcctgtctcattccttgctttgcttctaaatgtggttattacttgtcttcaaaaaggtatggtttccgaaagccaccacatgtggagctgaaagctcggccaaaacttggagagagagaagtgactttagttcatgtgacagactggatagagaagaaactggagcaagagtttcaggtaaacctctagtgttatctagtatttcacaccaagtatagaagctctgggtttagccgaggttctgaacttcagctgggtcaggatcctcttttgaaaatctgatggtgaccttcatcccggaagagtattacatttgatcaaatatgggaataaaacttcaggtacagtatcaaagccctgaaacttatccacagaacattactaagtcatcttcagaggaaacccaaaagatttgggtcagagcaaaatgatgatgtcttttcccagcaagcctgccaggactgtcaggctttgttttctcttacgcaaggcctggccttgcccaactcttagcacccggcctgtgggcagggaggctgccccctgttcttgtgtgctgttcaccttgctcagtttgttcagttcaacaaacattcctggaaacccttctgtgtgccaggtaccacctgccctgggagtccaaagatgaatctggcctctccctcccctgggtagcttctagtgtagtctgggagttcattaagccagagcttactctctcagcttttctttctgcatttggccaccaaaggtaatagcagtatagctgaggccctaggatgagctatttccatcaaacttttatcagatatttgaagcacagttgtctgtcggggttttatggattagcaaactatttacttttaatgaaattcaccttttgaagaagacctacattctttttgcagtggtatattttgagttactgccttaaaaaaatcctcttatttaaaaactagagattaaacataactgataaccaatttctgaaaaagcttaatgtcatcaccaaatagaaaagtactttgaacctactgaggggaaagaacatcatgccttttatttttccctttttctttcctttttttttttttttttttaagacagagtcttgctgtgtcgcccaggctggagtgcaatggcgccatctcggctcactgcaaactccgtcccccaggttcacaccattctcatgcctcagcctcccgagtagctgggactacaggcacccgccaccacacccagctaattttttgtatttttagtagagatgggggtttcactgtattagccaggatggtctcgatctcctaacctcgtgatctgcccacctcggcctcccaaagtgctgggattacaggtgtgagctaccatgcctggcctaattttttggtatttttagttgagacagggtttcaccatgttggccaggctggtcttgaactctggacctcagatgatctgcctgccttggcctcccaaagtactgggattacaggcgtgaaccatcgcacctggccattagcttacattttatcgctaggatttattaataaaaggataattcacatggaatatgtgttctagacatagtaactgggaactactgtgaacagcttaagccaattctcttaaattgttggatatatatcagtgcatatgggcaaccttattatatgtatacaaaatcaaaggccacttctgcctccgagctgatatattagaggattctcgtatccatgcgctggtatgattcctcaactctttctaaagtatgtatggtgggagaattagtttggaatgcatagcaagtttttatatgtacttttaaaaatcagtctaagccctaaaattatcagaacaaaggagggtgacagcctggcaaggcattcttccacatagctgttctttaatatcttcctacagaaagtttttgtcatgccaaacatggatgatgtttatatcactataatgcactcagccatggaccctcgctctacttcctgcctcctgaaagacccacctgtggaggctgctgatcagccatgatgggtgatgtcagatgttccccatattgtgacatcgagctggatgtgtggggttcttggccgccatctgtactgtagcactggcctctgtgccacagctactgtttcttaaaggactgcttctgccctctgcctgccagtgcccattccactgtgaggtgtcattccctgcatctagtgacaactgtctggattgcctgctgcaaagctttgatttggcaaaggagaccatggaagaatcatggtggatccagaagttatacgtgacccacaccatggcttttaaaagtctacccatgtttgtggcagcaaatgagcacagtaagagcaaagctgaacaacttgcctcctctactcctccaaagcttttcttcaggcagccggtgcacagtggactttttcacttctatactttgtatgcggccttccacacttccagagaatgtcagtgtgcaatgtgtctggagggtggggagaggaattctgtgagccttttcatttcggtgacagaagagatgggcagagcaacttattttccacattaaattgtgcatttgggaagcaagtagccatagtacacacacaacacgctatcagcttgggtaaggacagtgggatttatgtgaacatcaggcaaagccatgagatcaaaccatcccaagcctttcaccaatgaggtacaaccacctgggggctagctaatcttgaatgttttcctgagacaggagcgtatgtgaaaacatcaaacactgcacatgacaggatgggtcctctcatacagatgggatggggttagaaagccagagccagtttttccatctggcgtttcctgtgtcctccaggtttatatgggaatcgaaacagtttgttaatctgattgggagagttccatgggcagatttcccttcctgaaggccaaaacggagaactgctctctttaattatttcaagagtcaagaccaaaagtttgctcagcatcacactacatctcaaaattaatgttgccaacttaattttgtgcatttgtgtcagaatgtttagtttacaaggttgggggctctctttgcttcgagaagtaaacctaataccatttttttattgtttaaagctgcattcaacgtcaaaattaccttgggtaacttttgataacttacatgtgtggacaaagctaatagtggttttttaaacagcaccttgcctgaacatgactttaaagaaattaatatattgaaaacatgtttgaacccttattttaattgcaccattaaaacatttgacttaaattgtttgaccattccagttggtgtactgttctgatttttcgttgtgtaggccgatctgcctgtcagagtccacgtgtcctggtcactggtctttataattgttgtgcaataactaaaggctaaggactagatgcactatcgtgtaaagagattacacatgactgtaccatgttgcacttaatcaaatagtatgtggggatttaaaatcgcttgcattgtttcacaaaataaatatctcaatgtcaaatactagataagcatctaagtcatttctacggaatcctgttcagataggggcacaataaaatgagtacagagcaccggggccctcacctggcaatcgcagctttcatttactgcgttgatcactgcccagtcctaaggctacaaagccatcctcactacatccttcaaactatgtgccattatcttcagcccacatttaaagaatccagtgaaagttcgtaactgagggggtagggcagtggtgctcctgggctgcagtttacacccttcattgtctagtataatgttaattcgggacaccttcattcatcgaatgtccatgtagtgaacgcatacgtgcatccttgcccaccattgctgccctgtactcagaactgatgcacctttcactggagcccttgtggaagatcttttaccaatcactgaatctggactgtgtaactaggtgtctatgttgtccccaaccatatataaaatctaattcaccttcacaaccgccctataattttgaactgtttaggagtgacagattaacctgcccaaagctttagtcccatgcttgtcagtactcctgcatggttatttgtaaacaggtcgattaccctttagtcaggagttaactcaatgcagttccacaccgaatctgtttatgtcaagtacacaacagccctgcagacgccattccacgctgccttcaactaaatctgcgcgtctgatggcagacgcgacagcctgggacttatgtcgaactcacggcgaaggcacagcgcgcgcgatacactcagggaaggctgggctggggaacgtatgggagcagaggggcactccttacgcatcaagagtccgcgtatccccgtcagccaccgcccccctaacacgccattccagccttggtattacggattgaggcctgtcgtggcaaaacagctggaaaattgcccagcctagcagccggacagtcaggttacttcttgtcgctcgcggttaaaaaggccgcccgcgggaggccaggcggccccagttatgcgcaagcacatgctctagcgctgcagattgacccccggcgccacgaggaagctcggcgggggctcaaagacagcgcgtcgccaacgacacacaccgacaccagggttgggttcaaaccactttattgacgggaatggggtggcaaagcagcaaggacgatgacatccgacgtcctcggctgggagctacaagaacgagagtgatagatcagcgggtgtgcgcgcgcccgcccgccagccccctcccagctccgctcgggcaggctcagactccagttcgcatcacccgcgtcagcagtctaacacgtgctttaattggaatgtcatcacagcaggccggcccccctacgcctccctgctcccgagccacgacctccggggcccacccagccagacgacccgccaggaatacaacctgacctcccggaacctgcaggcgctgaaagacaggggagcgtcgatggcgttcttttaaaggagcagaccagcgctgatgggcgggctttactgccattaaccaatagcaagttcaccttgcgaccacgtgcgcgtaaagttgtctggtgactggtagtccttgctgagtcctccagaggatagatgggtcacataccaaccatagagatgggagtcgctcagtctcaaatccatttgcgtttcagcgactccaccgccagctggtaatgagcgcatctctccgcagtacgcaaaagaaaacttcaccaagagcaggcgacgatgatgcctaacttggatgacatgttctgtgccaggagctaggataggagttgagaatggaaagttaaaaactgtccccaagtgcaaaataacctgtcgtggtagaaagagcttgtattgaaaatggaccgatctgcaccacatcctgactttgtgatgcgttcgctctgtgaccttgctcagttaacctttctgagattcagtttctggaaattaggaatacccccccgccgcccccccccaacacacacacaccgcgaaaaaaaaaaattgtaaggattcggtgaattaatgccaattgcctggcacattctaagtggtaaacaaaggtatttaaagggcagagtgatgtgaaaaacttcctgggattgcaaaactttaataaatactaacatagcgctatgaacagcctactgtagaagcccaaaggacagaaagcctgactttgggaaagcttcgcagagttgattgagcctgttccccggacatacaggtggatgaatgatagtttgcttaactgggggaggacacagtacaccagcagtcacagtcgccggttatctttattgcctccctgttttccttgggaattcttttcctttttttcctcttaatacggaaaatttattgttttgtgtgtgtgtgtatgtgacagtgaaatcatttcaccctatgggtttgtagttgaatgggctcttattttccttattttctatatagactttaaattcaaaaaattcctctttggccgggcgcggtggctcacgcctgtaatcccagcactctgggagacggaggcggatggatcaggtcaggagttcaagaacagcctggccaacatggcgaaaccctgtctctactaaaaatacaaaaattagccgggcgtggtggcaggcccctgtaatcccagctactcaggaggttgaggcaggagaatcgcttgaacccgggaggcggaggttgcaatgagctgagatcgcgccattacactctaacctgagcaacagagcgagactccatctcaaaaaaaaaaaaaaaaacctctttaatccaaagcaataatgactttgacaagtgtttagtagtctctatttatttttgttgctgttttaactttcgttatctcaacatttattacattatggtacagtttccgcattgggcaatgtatgaaagttttctttgtgacctaaaatatcagtttttataagtgttccacagattgttgaaacgaagatgttttcactatcaagtacaaacatggtataaaatatttatttattaattcaaccttagttgtgttgtaattacattgtccacagctctgctttgtgtattatgtacttgcttggaagttggctgttggctttgattgtgatgtgttaagattatgcctcaaataccaaatgccagtgaggatgtggagcaacagaagctttgctccattacttgtttcgttttgttttttgagacagtctcactctgttgcccaggctggagtgcggtggcacaatcttggcttactgcaacctccgcctcccgacttcaagcaattctcctgcgtcagcctccccagtagctggaattacaggcatgcacaaccatgcctggctaatttttgtatttttagtagagatggggttttaccatattggccaggctggtctcaaactcctgacctcatgatcctcccgcctcagcgtcccaaagtgctgggattacaggcgtgagccgccgcgcccggcctgctcttttcttttcttctcctcttctcttttcttttcttttcttttttgagacagagtctggctctgtcgcccaggctggagtacagtggcactatcttggctcactgcaacctctgccacccgggttcaagcgactctgctgcctcagcctccctagtgctgggactacaggcacggaccaccatgcccggctaatttttgtatttttagtagagacggggtttcaccatgttggccaggctggtcttgaactcctgacctcaagtgatccacccgcctcagcctcccaaagtgctgggattacaggcatgagccaccgtgcctggcctgcttttttattttcttgacagtgtctttcaaagaggagacatttttaattttgatgaaaatctaatttatcaattttttaatagacagtacttctggtttcatatctaagaaatcttggcctaatacagatttttcttttatatggtttcttctagaagtttaatttaatttaatttaattaattaattaatttattgagacgaagtctcgctctgtcaccaggctggagtgcagtggtgcgatctcagctcactacaacctctgtctcccaggttcaagtgattctcttgccccagcctcccgagtagctgggattacaggcgcacgccaccatgcctggctaatttttgtatttttagtagagatggggtttcaccatgttggccaggatgatctcaatgtcttgacctcgtgttccgcccaccttgacctcccaaatttcttgagattacaggcgtgagccactgcgcccgctcttcgagaagttttatagtgtttgctctcgcattcaggtctattatctttttcaagttaatttttgtgtctagtgtgagacaagagttaggttcatttgtttgtatatggatattcacttgttccagcaccatttgttgaagaggatatcctttcacttaaagtaccttgtcatgtttgtaaaaaaaaaaaaattgaccatatatgagttggtttgtttctaagcagtatcttcttttgcactgttatttatctaccctttattaccattgctttatagtacatcttaaaatcagatatacaagatctgtaactttgtcctctttcaaaattattttgactattttaggttgtttgtatttccagaaacattttagaatcagcttgtcaatttctacagaagaccagtaggaattttgcctgaaattatattgaatctgtagatcaatttgggaataattgacatcttaacaacactcagtctttcatcccatgaatacagtatatttcttcatttaagtcttattcatttccctcagcaatgtcatagttttcattgtacaatcttgcatatattttgtgaaatttatccctcaggatttcatttataatgctattatgaatgatactatatttattcttttttttttagtcaagcctctaacatgagagatactatttttaaatttcaatttccaagagttcattgctggtatatagaaatgcaatttctattaatttaaatctaattttactaaaatcattttaataaatttttgtaatttggtaaatttttgtaaattgattccatcttctgtagggtgggtacaatcaaaggtgaacttgagaactggcttctattttttgccccacctcatcacaagctttttccacaggtgccctggaagcagttgaggcagaaaaggcccatgggttatttagaagaatgatgttaatttccaaatagtgaccgggaatggtggctcacgcctgtcatcccagcactttgggaggctgaggtgggcggaccacaagttcaggagttcgagacaagcctggccaatatggtgattacaggcacatgccaccatgcccagctaatttttttttttttgtatttttagtaaagacagggtttcaccatgttggccaagctggtcttgaactcctgacctcaagtggtccacccacatcggactcccaaagtgctgggattacaggcataagccactgcacctggcctatatttttaaatatttatttatttatttatgtatttttattttatttttgagacatggtctcactctgtcacccaggctggagtggaatgcagtggtgcaatcatgggtcactgcagcctcaccctcctgaagtcaagagatccctgggcctcagcctcctaagtagctgggactacaggagtgcactaccatgccccgctaagtttttaaattttattttagagacagagtctcattatgttggccacactggtcttgaactcacagtctcaggcagtccttccccctctgccttccaaagtgctgggattacaggtgtgcgccaccatgctaccctcctttttttttttttaaattggcaacacttcattccataaaatagaataagtgtttccagaatgtgtattcttttgttgttgggtataatgttttataagtgtaaaggagatcaaggtagttgatagtgttattcaaatctcaatgggagggtggcgattttgccatccagggaacatttggcaatatctggagacatttttgtttttcacaactaggagggatgccctgacacctattaggtagtgttatgggttgtatcctccaaaaggaaatgctgaagctggccaggcatggtggctcatgcttgtaatctcagcactttgggaagctgaggcaggagaattgcttgaggctaggatttcaagaccagcctgggcaacaagcaagacccccatctctacaaaaaaatttaaaaagttagccagccacagtgatttgtgcctgtagtcccagctactcaggaggctaaggcaggaggatggcttgaacccaggagttggaggctgcagtgagccatgatcgtgccactgcactcaagcctaggtgacagagactctgtgtcaaaaaaaaaaaaaatgttgtaaccttaacccccatcacctgtgaatgtgaccttatttggaaacagggtctttacagatataatcaaggtgagttcataggatgggccctaatccaatttgatgttcttataagaagcaggataaatttggatacagagacacacgaggggaaaacagccatttgaggacagaggtagagattggagttagtctgccacaagccaaggatacctggggctcccagaagctggaagatgcatagaaggacccttccctagagggttcggagacagcgtggccctgccaacacttttgtctcagacttctagccccagaactgtgaaagaataaatttctgttgttttgagccacccagtttgcagtactttgatatggcagccctaggtaactcatacagataaagaccagggatactgctaaacattcatatatatgtttgtttatttatttatttttgtagagatgaggtttcaccatgttgcctgggctggtctcaaactcccggactcaagtgattcgctcttctcggcctctcaaagtgctatgattacaggcgtgagccaccacacctggcctgctgctaaacataccacaatgcacaagacagccccccacaacaaagactgagctggtcaattacaagtaaaattaaaaacttggccaggcatggtggctcacgcttgtaatcccagcacttcgggaggccgaggtgggcggatctcctgaggtcaggagttcaagaacagcccggccaacatggtgaaacccagtctccaccaaaaatacaaaaattagccaggcgtggtggctcacatatagtcccagctactcaggaggctgaggcaggagaatcacttgaacccgggaggcagaggttgcagtgagccgaggcagcgccactgcacaccagcctgggtgacagagtgagactccatctcaaataaataaataaataaataaatacaaacaaacaaattatctggccaaaaatgtcagtaacacagaggctgaaaatcgttctcttataatttagtgtctgcctacttatcctatcagtaaatgagtgttgaaatctaatctaattgtgggtttatttttttcaccccatcagttgtttcaatttttccttcacgtattttcaaaccgtttttaggtgtttacacgtttaggattgctatgttttgtgcatgaacagactctttatcattgtgaaatgccgctttttatctctggtaacattccttgtattaaagtcagttccaatgtcagtataacctttccaactttcttatcggtttcacaaggtctatcttatttttctccatcttttcacttttagtctacctatgcctttgtatctgaagtttaatttttgtagtcatcatataatggtcttgatttctttctttctttctttctttttttttgagacagagtctcgctctcttgctctgttgcccaggctggagtgcagcggcattatctcggctcactgcaagctccgcctcctgggttcacaccattctcctgcctcagcctcctaagtagctgggactataggcgcccgccaccatgcccggctaatttttttgtattttttagtagagacggggtttcactgtgttagccaggatggtctcgatcccctgacctcgtgatccacccgcctcggcctcccaaagtgctgggattacaggcgtgagccaccgcgcccggccgattttttttcagcttggtcattttcagccttttacttggcctgtatagaccacttatatttttataatagctttattgaagaataatttacataccatacaacgaactcatttaggtaaaaattcaggctgggcaccgtggctcatggctgtaatcccagcactttgggaggccaaggtgggaggattgcttgagcccaggagttggaaaccaacctagacaacatagggagacctcatctctacaaataatttttaaaaaattagccaggcacggtggcggggcacctgtagtcccagctactccgaaggctgaagcgggagaattgcttgagcccaggaggttgaggctgcaatgagccatgatcacaccactgcactctagcctgggcaacaaagtgaaactttgtctcaaagaaaataaagtacaaattcaatggctttggtgtattaacagagttgtgcagccatcactgccatcgacttcaaaatattttcattaacccaaatagaaatccacactcctttatcatcactctccagtctccctcatctgcttccccttccctaagcaaccgctcatctactttctgtctttctagatttggacatgttatatacacagaatggtacaacatatggtcttttgtgactggcttctttcactaagcataacttcctcaaggttcatccctattggagcatgtatcaatactccattgcttttcaattgttaaatattccattaaatagataatgccatattttgttgatccatttcagttgatggacacttgggttggttccactttttgactattatgaataatgttgccatgaacatttgtgtacaagtttttgtatgggtgtatttttttttatttttattttttagacagagttttgttcttgttgcccaggctggagtgcaatggtgtgatcttggctcactgtaacctctgcctcccgggttcaagtgattctcctgcctcagcctcctgagtagctgggattacaggcatgcgccagcatgcccagctgattttttatttttagtagagacggggtttcgccatgttggtcaggctggtctcaaactcccgacctcaggtgatctgcctgccttggcctcccaaagtgctgggattacaggcgtgagccactgcacccggcagtgtgttttaatttctcttcgggaagtatttgctttttaattgggaagttccccttgtttttttgtaatttactatgctgactatgttttgtttcattttgtttcatcttctgtagtaatttgtaatcaagccaccttttaaaattttctaagttctctctagtgctgttcgtaaatactatgtaaaattatgtaatttttacatatatataaattatatatatataatttcagaatgctttttattttaatggaaaacgtaaagtaactgaccagctgacacaacttgaaaacccagaggaaccacagccgggcatggtggctcacacctgtaatcccagcattttgggagactgaggtgggcggatcacttgaggtcaggagttcgagaccagcctgaccaacatggtggaaccccatctctactaaaaatacaaaaattagctgggcacggtggcacacacctgtagtctcagctactcgggaggttgaggcacaagaatcacttgaacccaggaggcagaggttgcagtgagatgagattgtgccattccactccagcctgggtgacagagcaagactccgtctcaagaaaaaaaaaaaaaaaaaaaaaaccagaggagccagactccaggcaacacttgccccatggccccactcagccaccgtgctgacagcatcatcctaagggcagacccagcagctcctgggctccctgctccctcacatgcattccccctgaagatttttcatatcatgggttcatcctgaaccaactactgtgggaagggcttccatgaagttactcggtgctttcctttcccc

SEQ ID NO: 3017 - DNA, 5126 bp, Homo sapiens
cgcggccgggagcacgggcgccggcatagtacaatgaggcagccagcggatcttggagcctgagcccttgtgaagccggcaatgacaagtctgtatggtcgccatgccgagaaaaccactgacatgccaaaaccatcagcccctaaagtgcacgtgcagaggtccgtgtcccgagataccatcgccattcacttctcggcatccggcgaggaggaggaggaagaggaggaggagttcagggagtactttgaggaggggctggatgaccaaagcattgtaacagggctggaagccaaggaagacctctatcttgaaccccaagttggccatgaccccgccggccctgctgcctcgcctgtcctggcagatggactgtccgtgtcccaggcccctgccattttgcccgtctccaagaacactgtaaagctgttggagtcccctgttccagcagcacaagtattaagtacagtgccattggctgtgtccccagggtcgtcttcgtcggggcccttagctagctctcccagtgtgtcatccctttctgagcagaaaaccagttcttcctccccattgtcctctccttctaagtctcccatcctctcatccagtgcctcaacctccaccctttccagtgcaaaacccttcatgagccttgtgaagtccctgtcgaccgaggtggagccaaaagaatccccacaccccgcaaggcacaggcacttgatgaagacattagtcaagtctctgtccacggacacttcccggcaggagtcggatacagtgtcctataagccacctgattccaaactgaacttacacctgttcaagcagttcacacagccccgaaacacaggtggagattccaaaactgcaccttcttccccactgacttctccctctgatactcgttccttttttaaagtgcccgaaatggaggctaaaattgaagatactaaacgacgcctttcagaagtcatctatgagccttttcagctccttagtaaaattataggggaagaaagtggcagccataggcccaaagccttatcttcaagtgcttcagaactctccaatctgtccagcttgaatgggcacttggaaagcaataacaactacagcatcaaggaggaggagtgtgattctgagggggatggctacggaagtgattccaacatccccagaagtgaccacccaaagtccactggtgagcccacaagagagatagaactgaaaagttcccaggggagcagtctgaaggatttaggcctgaagacaagttctctagttctggagaaatgttctttgtctgccttagtgagcaaagaagatgaagagttttgtgaactgtacactgaggacttcgatttggaaacggagggggagagtaaagttgataagctctcagatattcctctcaagccagaggtgctcgcggaagatggtgtggtccttgacagtgaggacgaggtggactcggccgtgcagcacccggaattgccagtgaagacgttgggcttctttataatgtgtgtctatgtgtacctcatcctccccctcccccactatgtgagtggactctttctgggaattggccttggattcatgactgcagtttgcgtgatttggttttttacaccaccaagtgctcataaatatcacaagttacacaaaaatctgcgacactggaacacaagatctctggatatcaaagaacctgaaatactgaagggatggatgaatgagatttacaactatgatccagaaacctaccatgcgactttgacacattcagtctttgttcgacttgagggtggaaccttaagactttcaaagcccaataaaaatatatccaggagggccagctacaatgaacccaagccagaggtcacctacatcagccagaaaatctatgacctctcagacagcaagatttatcttgtacctaaaactttggctcgaaagcgaatctggaataaaaagtaccccatttgtatcgagcttggtcagcaagatgactttatgtctaaagctcagactgataaggagacttcagaagagaagccgccagctgagggaagtgaggaccctaagaagccaccccgccctcaggagggaacaagatctagccagcgagatcagatactctatctctttgggagaactggccgagaaaaagaggaatggtttaggagatttattctggcatctaagctaaagtcggaaatcaagaagtcatcgggtgtctctggaggtaaaccagggcttttgcctgcacacagcagacacaacagtccgtccgggcacctgacccacagccgcagcagcagcaaaggcagtgtggaggagatcatgtcacagccaaagcagaaggagctggcaggcagcgtgcggcagaagatgcttctcgactacagcgtgtacatgggcaggtgtgtcccccaggaaagccgaagcccccagaggagccccctgcagagtgcggagagcagccccacagctgggaagaagttgccagaggttccaccctctgaggaggaagaacaggaagcctgggtgaatgccttgcttggaagaatattttgggacttcttaggagagaaatactggtctgatctggtgtctaagaagatccaaatgaaactcagcaaaataaagctcccctactttatgaatgagctcactctgacggaacttgacatgggcgtggctgtgccaaaaatcctccaggccttcaagccttacgttgatcaccaaggactctggattgatttggaaatgtcctacaatgggtcctttctgatgactctcgagaccaaaatgaatttgaccaaactaggtaaagagcctcttgttgaagccctgaaggttggagaaattggcaaagaaggttgcaggccccgggcattctgtctggcggacagcgatgaggaatcctccagcgctggctcctccgaggaagacgatgccccagagcccagcgggggagacaaacagctcctcccaggggctgaagggtacgttggaggtcatcgaacaagtaagattatgaggtttgttgataaaattaccaagtcaaaatatttccaaaaagcaacagagacagagtttattaaaaagaagatcgaagaagtctccaacacacccctgctgctcactgttgaagtacaagaatgtagaggaaccttggcggtcaacattccaccacccccgactgaccgagtatggtatggtttccgaaagccaccacatgtggagctgaaagctcggccaaaacttggagagagagaagtgactttagttcatgtgacagactggatagagaagaaactggagcaagagtttcagaaagtttttgtcatgccaaacatggatgatgtttatatcactataatgcactcagccatggaccctcgctctacttcctgcctcctgaaagacccacctgtggaggctgctgatcagccatgatgggtgatgtcagatgttccccatattgtgacatcgagctggatgtgtggggttcttggccgccatctgtactgtagcactggcctctgtgccacagctactgtttcttaaaggactgcttctgccctctgcctgccagtgcccattccactgtgaggtgtcattccctgcatctagtgacaactgtctggattgcctgctgcaaagctttgatttggcaaaggagaccatggaagaatcatggtggatccagaagttatacgtgacccacaccatggcttttaaaagtctacccatgtttgtggcagcaaatgagcacagtaagagcaaagctgaacaacttgcctcctctactcctccaaagcttttcttcaggcagccggtgcacagtggactttttcacttctatactttgtatgcggccttccacacttccagagaatgtcagtgtgcaatgtgtctggagggtggggagaggaattctgtgagccttttcatttcggtgacagaagagatgggcagagcaacttattttccacattaaattgtgcatttgggaagcaagtagccatagtacacacacaacacgctatcagcttgggtaaggacagtgggatttatgtgaacatcaggcaaagccatgagatcaaaccatcccaagcctttcaccaatgaggtacaaccacctgggggctagctaatcttgaatgttttcctgagacaggagcgtatgatggggttagaaagccagagccagtttttccatctggcgtttcctgtgtcctccaggtttatatgggaatcgaaacagtttgttaatctgattgggagagttcccttcctgaaggccaaaacggagaactgctctctttaattatttcaagagtcaagaccaaaagtttgctcagcatcacactacatctcaaaattaatgttgccaacttaattttgtgcatttgtgtcagaatgtttagtttacaaggttgggggctctctttgcttcgagaagtaaacctaataccatttttttattgtttaaagctgcattcaacgtcaaaattaccttgggtaacttttgataacttacatgtgtggacaaagctaatagtggttttttaaacagcaccttgcctgaacatgactttaaagaaattaatatattgaaaacatgtttgaacccttattttaattgcaccattaaaacatttgacttaaattgtttgaccattccagttggtgtactgttctgatttttcgttgtgtaggccgatctgcctgtcagagtccacgtgtcctggtcactggtctttataattgttgtgcaataactaaaggctaaggactagatgcactatcgtgtaaagagattacacatgactgtaccatgttgcacttaatcaaatagtatgtggggatttaaaatcgcttgcattgtttcacaaaataaatatctcaatgtcaaatactagataagcatctaagtcatttctacggaatcctgttcagataggggcacaataaaatgagtacagagcaccggggccctcacctggcaatcgcagctttcatttactgcgttgatcactgcccagtcctaaggctacaaagccatcctcactacatccttcaaactatgtgccattatcttcagcccacattta

SEQ ID NO: 3018 - protein, 1125 aa, Homo sapiens
MTSLYGRHAEKTTDMPKPSAPKVHVQRSVSRDTIAIHFSASGEEEEEEEEEFREYFEEGLDDQSIVTGLEAKEDLYLEPQVGHDPAGPADVLADGLSVSQAPAILPVSKNTVKLLESPVPAAQVLSTVPLAVSPGSSSSGPLASSPSVSSLSEQKTSSSSPLSSPSKSPILSSSASTSTLSSAKPFMSLVKSLSTEVEPKESPHPARHRHLMKTLVKSLSTDTSRQESDTVSYKPPDSKLNLHLFKQFTQPRNTGGDSKTAPSSPLTSPSDTRSFFKVPEMEAKIEDTKRRLSEVIYEPFQLLSKIIGEESGSHRPKALSSSASELSNLSSLNGHLESNNNYSIKEEECDSEGDGYGSDSNIPRSDHPKSTGEPTREIELKSSQGSSLKDLGLKTSSLVLEKCSLSALVSKEDEEFCELYTEDFDLETEGESKVDKLSDIPLKPEVLAEDGVVLDSEDEVDSAVQHPELPVKTLGFFIMCVYVYLILPLPHYVSGLFLGIGLGFMTAVCVIWFFTPPSAHKYHKLHKNLRHWNTRSLDIKEPEILKGWMNEIYNYDPETYHATLTHSVFVRLEGGTLRLSKPNKNISRRASYNEPKPEVTYISQKIYDLSDSKIYLVPKTLARKRIWNKKYPICIELGQQDDFMSKAQTDKETSEEKPPAEGSEDPKKPPRPQEGTRSSQRDQILYLFGRTGREKEEWFRRFILASKLKSEIKKSSGVSGGKPGLLPAHSRHNSPSGHLTHSRSSSKGSVEEIMSQPKQKELAGSVRQKMLLDYSVYMGRCVPQESRSPQRSPLQSAESSPTAGKKLPEVPPSEEEEQEAWVNALLGRIFWDFLGEKYWSDLVSKKIQMKLSKIKLPYFMNELTLTELDMGVAVPKILQAFKPYVDHQGLWIDLEMSYNGSFLMTLETKMNLTKLGKEPLVEALKVGEIGKEGCRPRAFCLADSDEESSSAGSSEEDDAPEPSGGDKQLLPGAEGYVGGHRTSKIMRFVDKITKSKYFQKATETEFIKKKIEEVSNTPLLLTVEVQECRGTLAVNIPPPPTDRVWYGFRKPPHVELKARPKLGEREVTLVHVTDWIEKKLEQEFQKVFVMPNMDDVYITIMHSAMDPRSTSCLLKDPPVEAADQP

SEQ ID NO: 3019 - DNA, 2935 bp, Homo sapiens
ggcttttgcctgcacacagcagacacaacagtccgtccgggcacctgacccacagccgcagcagcagcaaaggcagtgtggaggagatcatgtcacagccaaagcagaaggagctggcaggcagcgtgcggcagaagatgcttctcgactacagcgtgtacatgggcaggtgtgtcccccaggaaagccgaagcccccagaggagccccctgcagagtgcggagagcagccccacagctgggaagaagttgccagaggttccaccctctgaggaggaagaacaggaagcctgggtgaatgccttgcttggaagaatattttgggacttcttaggagagaaatactggtctgatctggtgtctaagaagatccaaatgaaactcagcaaaataaagctcccctactttatgaatgagctcactctgacggaacttgacatgggcgtggctgtgccaaaaatcctccaggccttcaagccttacgttgatcaccaaggactctggattgatttggaaatgtcctacaatgggtcctttctgatgactctcgagaccaaaatgaatttgaccaaactaggtaaagagcctcttgttgaagccctgaaggttggagaaattggcaaagaaggttgcaggccccgggcattctgtctggcggacagcgatgaggaatcctccagcgctggctcctccgaggaagacgatgccccagagcccagcgggggagacaaacagctcctcccaggggctgaagggtacgttggaggtcatcgaacaagtaagattatgaggtttgttgataaaattaccaagtcaaaatatttccaaaaagcaacagagacagagtttattaaaaagaagatcgaagaagtctccaacacacccctgctgctcactgttgaagtacaagaatgtagaggaaccttggcggtcaacattccaccacccccgactgaccgagtatggtatggtttccgaaagccaccacatgtggagctgaaagctcggccaaaacttggagagagagaagtgactttagttcatgtgacagactggatagagaagaaactggagcaagagtttcagaaagtttttgtcatgccaaacatggatgatgtttatatcactataatgcactcagccatggaccctcgctctacttcctgcctcctgaaagacccacctgtggaggctgctgatcagccatgatgggtgatgtcagatgttccccatattgtgacatcgagctggatgtgtggggttcttggccgccatctgtactgtagcactggcctctgtgccacagctactgtttcttaaaggactgcttctgccctctgcctgccagtgcccattccactgtgaggtgtcattccctgcatctagtgacaactgtctggattgcctgctgcaaagctttgatttggcaaaggagaccatggaagaatcatggtggatccagaagttatacgtgacccacaccatggcttttaaaagtctacccatgtttgtggcagcaaatgagcacagtaagagcaaagctgaacaacttgcctcctctactcctccaaagcttttcttcaggcagccggtgcacagtggactttttcacttctatactttgtatgcggccttccacacttccagagaatgtcagtgtgcaatgtgtctggagggtggggagaggaattctgtgagccttttcatttcggtgacagaagagatgggcagagcaacttattttccacattaaattgtgcatttgggaagcaagtagccatagtacacacacaacacgctatcagcttgggtaaggacagtgggatttatgtgaacatcaggcaaagccatgagatcaaaccatcccaagcctttcaccaatgaggtacaaccacctgggggctagctaatcttgaatgttttcctgagacaggagcgtatgtgaaaacatcaaacactgcacatgacaggatgggtcctctcatacagatgggatggggttagaaagccagagccagtttttccatctggcgtttcctgtgtcctccaggtttatatgggaatcgaaacagtttgttaatctgattgggagagttccatgggcagatttcccttcctgaaggccaaaacggagaactgctctctttaattatttcaagagtcaagaccaaaagtttgctcagcatcacactacatctcaaaattaatgttgccaacttaattttgtgcatttgtgtcagaatgtttagtttacaaggttgggggctctctttgcttcgagaagtaaacctaataccatttttttattgtttaaagctgcattcaacgtcaaaattaccttgggtaacttttgataacttacatgtgtggacaaagctaatagtggttttttaaacagcaccttgcctgaacatgactttaaagaaattaatatattgaaaacatgtttgaacccttattttaattgcaccattaaaacatttgacttaaattgtttgaccattccagttggtgtactgttctgatttttcgttgtgtaggccgatctgcctgtcagagtccacgtgtcctggtcactggtctttataattgttgtgcaataactaaaggctaaggactagatgcactatcgtgtaaagagattacacatgactgtaccatgttgcacttaatcaaatagtatgtggggatttaaaatcgcttgcattgtttcacaaaataaatatctcaatgtcaaatactagataagcatctaagtcatttctacggaatcctgttcagataggggcacaataaaatgagtacagagcaccggggccctcacctggcaatcgcagctttcatttactgcgttgatcactgcccagtcctaaggctacaaagccatcctcactacatccttcaaactatgtgccattatcttcagcccacattta

SEQ ID NO: 3020 - protein, 77 aa, Homo sapiens
MSVCNVSGGWGEEFCEPFHFGDRRDGQSNLFSTLNCAFGKQVAIVHTQHAISLGKDSGIYVNIRQSHEIKPSQAFHQ

SEQ ID NO: 3021 - DNA, 5192 bp, Homo sapiens
cgcggccgggagcacgggcgccggcatagtacaatgaggcagccagcggatcttggagcctgagcccttgtgaagccggcaatgacaagtctgtatggtcgccatgccgagaaaaccactgacatgccaaaaccatcagcccctaaagtgcacgtgcagaggtccgtgtcccgagataccatcgccattcacttctcggcatccggcgaggaggaggaggaagaggaggaggagttcagggagtactttgaggaggggctggatgaccaaagcattgtaacagggctggaagccaaggaagacctctatcttgaaccccaagttggccatgaccccgccggccctgctgcctcgcctgtcctggcagatggactgtccgtgtcccaggcccctgccattttgcccgtctccaagaacactgtaaagctgttggagtcccctgttccagcagcacaagtattaagtacagtgccattggctgtgtccccagggtcgtcttcgtcggggcccttagctagctctcccagtgtgtcatccctttctgagcagaaaaccagttcttcctccccattgtcctctccttctaagtctcccatcctctcatccagtgcctcaacctccaccctttccagtgcaaaacccttcatgagccttgtgaagtccctgtcgaccgaggtggagccaaaagaatccccacaccccgcaaggcacaggcacttgatgaagacattagtcaagtctctgtccacggacacttcccggcaggagtcggatacagtgtcctataagccacctgattccaaactgaacttacacctgttcaagcagttcacacagccccgaaacacaggtggagattccaaaactgcaccttcttccccactgacttctccctctgatactcgttccttttttaaagtgcccgaaatggaggctaaaattgaagatactaaacgacgcctttcagaagtcatctatgagccttttcagctccttagtaaaattataggggaagaaagtggcagccataggcccaaagccttatcttcaagtgcttcagaactctccaatctgtccagcttgaatgggcacttggaaagcaataacaactacagcatcaaggaggaggagtgtgattctgagggggatggctacggaagtgattccaacatccccagaagtgaccacccaaagtccactggtgagcccacaagagagatagaactgaaaagttcccaggggagcagtctgaaggatttaggcctgaagacaagttctctagttctggagaaatgttctttgtctgccttagtgagcaaagaagatgaagagttttgtgaactgtacactgaggacttcgatttggaaacggagggggagagtaaagttgataagctctcagatattcctctcaagccagaggtgctcgcggaagatggtgtggtccttgacagtgaggacgaggtggactcggccgtgcagcacccggaattgccagtgaagacgttgggcttctttataatgtgtgtctatgtgtacctcatcctccccctcccccactatgtgagtggactctttctgggaattggccttggattcatgactgcagtttgcgtgatttggttttttacaccaccaagtgctcataaatatcacaagttacacaaaaatctgcgacactggaacacaagatctctggatatcaaagaacctgaaatactgaagggatggatgaatgagatttacaactatgatccagaaacctaccatgcgactttgacacattcagtctttgttcgacttgagggtggaaccttaagactttcaaagcccaataaaaatatatccaggagggccagctacaatgaacccaagccagaggtcacctacatcagccagaaaatctatgacctctcagacagcaagatttatcttgtacctaaaactttggctcgaaagcgaatctggaataaaaagtaccccatttgtatcgagcttggtcagcaagatgactttatgtctaaagctcagactgataaggagacttcagaagagaagccgccagctgagggaagtgaggaccctaagaagccaccccgccctcaggagggaacaagatctagccagcgagatcagatactctatctctttgggagaactggccgagaaaaagaggaatggtttaggagatttattctggcatctaagctaaagtcggaaatcaagaagtcatcgggtgtctctggaggtaaaccagggcttttgcctgcacacagcagacacaacagtccgtccgggcacctgacccacagccgcagcagcagcaaaggcagtgtggaggagatcatgtcacagccaaagcagaaggagctggcaggcagcgtgcggcagaagatgcttctcgactacagcgtgtacatgggcaggtgtgtcccccaggaaagccgaagcccccagaggagccccctgcagagtgcggagagcagccccacagctgggaagaagttgccagaggttccaccctctgaggaggaagaacaggaagcctgggtgaatgccttgcttggaagaatattttgggacttcttaggagagaaatactggtctgatctggtgtctaagaagatccaaatgaaactcagcaaaataaagctcccctactttatgaatgagctcactctgacggaacttgacatgggcgtggctgtgccaaaaatcctccaggccttcaagccttacgttgatcaccaaggactctggattgatttggaaatgtcctacaatgggtcctttctgatgactctcgagaccaaaatgaatttgaccaaactaggtaaagagcctcttgttgaagccctgaaggttggagaaattggcaaagaaggttgcaggccccgggcattctgtctggcggacagcgatgaggaatcctccagcgctggctcctccgaggaagacgatgccccagagcccagcgggggagacaaacagctcctcccaggggctgaagggtacgttggaggtcatcgaacaagtaagattatgaggtttgttgataaaattaccaagtcaaaatatttccaaaaagcaacagagacagagtttattaaaaagaagatcgaagaagtctccaacacacccctgctgctcactgttgaagtacaagaatgtagaggaaccttggcggtcaacattccaccacccccgactgaccgagtatggtatggtttccgaaagccaccacatgtggagctgaaagctcggccaaaacttggagagagagaagtgactttagttcatgtgacagactggatagagaagaaactggagcaagagtttcagaaagtttttgtcatgccaaacatggatgatgtttatatcactataatgcactcagccatggaccctcgctctacttcctgcctcctgaaagacccacctgtggaggctgctgatcagccatgatgggtgatgtcagatgttccccatattgtgacatcgagctggatgtgtggggttcttggccgccatctgtactgtagcactggcctctgtgccacagctactgtttcttaaaggactgcttctgccctctgcctgccagtgcccattccactgtgaggtgtcattccctgcatctagtgacaactgtctggattgcctgctgcaaagctttgatttggcaaaggagaccatggaagaatcatggtggatccagaagttatacgtgacccacaccatggcttttaaaagtctacccatgtttgtggcagcaaatgagcacagtaagagcaaagctgaacaacttgcctcctctactcctccaaagcttttcttcaggcagccggtgcacagtggactttttcacttctatactttgtatgcggccttccacacttccagagaatgtcagtgtgcaatgtgtctggagggtggggagaggaattctgtgagccttttcatttcggtgacagaagagatgggcagagcaacttattttccacattaaattgtgcatttgggaagcaagtagccatagtacacacacaacacgctatcagcttgggtaaggacagtgggatttatgtgaacatcaggcaaagccatgagatcaaaccatcccaagcctttcaccaatgaggtacaaccacctgggggctagctaatcttgaatgttttcctgagacaggagcgtatgtgaaaacatcaaacactgcacatgacaggatgggtcctctcatacagatgggatggggttagaaagccagagccagtttttccatctggcgtttcctgtgtcctccaggtttatatgggaatcgaaacagtttgttaatctgattgggagagttccatgggcagatttcccttcctgaaggccaaaacggagaactgctctctttaattatttcaagagtcaagaccaaaagtttgctcagcatcacactacatctcaaaattaatgttgccaacttaattttgtgcatttgtgtcagaatgtttagtttacaaggttgggggctctctttgcttcgagaagtaaacctaataccatttttttattgtttaaagctgcattcaacgtcaaaattaccttgggtaacttttgataacttacatgtgtggacaaagctaatagtggttttttaaacagcaccttgcctgaacatgactttaaagaaattaatatattgaaaacatgtttgaacccttattttaattgcaccattaaaacatttgacttaaattgtttgaccattccagttggtgtactgttctgatttttcgttgtgtaggccgatctgcctgtcagagtccacgtgtcctggtcactggtctttataattgttgtgcaataactaaaggctaaggactagatgcactatcgtgtaaagagattacacatgactgtaccatgttgcacttaatcaaatagtatgtggggatttaaaatcgcttgcattgtttcacaaaataaatatctcaatgtcaaatactagataagcatctaagtcatttctacggaatcctgttcagataggggcacaataaaatgagtacagagcaccggggccctcacctggcaatcgcagctttcatttactgcgttgatcactgcccagtcctaaggctacaaagccatcctcactacatccttcaaactatgtgccattatcttcagcccacattta

SEQ ID NO: 3022 - protein, 1125 aa, Homo sapiens; identical to SEQ ID NO: 3018

SEQ ID NO: 3023 - DNA, 35803 bp, Mus musculus
  misc_feature (1)...(35803): n = A, C, G or T/U
cctgaccccttgccttcttttcctcttttttccccctttcttctcttcctcatttccccctcccccatcaaaaaaaagaaaatttctttttgtggaactgtgctggcctggtgtgatctgtccggaaaagagctgtcttctaacaagtttggtctatagagagagttccaaaacagccaagctacacagagaaaccctatcttgaagagaaagaaagagaaagagagagagagagagagagagagggagagggagagggagagggagagggagagggagagggagagagagagagagagagagagagagagagaagggagggaaggaaggaaggaaggaaggaaggaaaagaaagagggaaaaagggaggaagggaggaaggagatatagctgggcatggtggtgcagggcctaatcctagcactcagtacgcagaggcaagtggacctgtgtgagttcaaggccagtgtggcttacatagcaagcttcaggcctccagacctccaaagtctttctatgtagcttaggttggtcttgtattctggatcctccaatatctgttcccaaatgctggattcacagtcatctaccactatgccagtgacattttggataaaaatcttctaataatgaggtttatgaaataaagatcgtagagaactccaacaaagaggtagcaaagacctccgcttgctccaaattctagatggctcaagagtagctgacagagcctggcgggcgtggtggtacacgcctttaatcccagcactggggaggcagaggcaggtggatctctgagtttgaggccagcctggtctacagagtgagttccaggacagccagagctgcacagagaaaccctgtctcgaaaaccaaaaaaaaaaaaaaaaaaaaaaaagagtagctgacagcgtttccaccggagacaatcaggaacctgtcctatgtggcagtcttcacgtacagtccgggtacttttcagtccaggactaaatggctttagcttatcctttccaccccccatccttccaagtgactccagaaaaaaaaaggagagagagagagagagagagagagagagagagagtcaaaacaagacaataaaaggcaaaggttccttccatcccagaactttaaaaattacagaaacttgacaatggcgccatctaatggaaattagaaaaattgaacacacagctctccctaaatctgaaaaatttacagctataatctgtggtttagcaggatgtgacagcattaacctgggtttcgagctttttaggaggctgaggcacaagaacaacaaaaaaaaaaattcaagtcctgacttggatatattgtgagttcaagaccagcctcagcaatactaaaggttagggtgtttatctagtgtgttatgaggcactaggttcaatcccaggctcactcacacacacacacacacacacacacacacacacacacacacacacacacacacatagagccgtgcacatatacacacaccatagcttatcttaaatacttctctctctctctctctctctctctctctctctctctctctctctgacacatttagttctcttttcaggattttggctttcttggggtgaggcaagttgttgtgattattttactttattttagacagggtctcatgaaactcagggtagtctcaaaacttgttagacagctgaagcagatcttgaactcctgacccttctgcctctatttcgtgacagctaagacacagggaggtaccactctggctattatttatttatttatttatttatttatttatttatttatttgagatatgatcttgcctagcccaggctggtcataaactcctgatgtaactgaagatgtccttgacccccttgcctctacactacgaccctagtatgcactggtgcacatagctttttacagtggtagatactaggcaagcgctctgccaactgagatgcagctctcaggtctctcatcttcgtagagcctgaggttttgctatgtaatgtaggtgtctcagtcagggtttgtattcctgcacaaaacatcatgaccaaaaagcaaattggggaggaaagggtttattccgcttacacttccacactgctgttcatcaccaaaggaagtcagaattggaactgaagcaggtcaagaaccaggagctgatgccgaggccatggaaggatgttacttactggcttgcttcccctggcttgctcagcttgctttcttataggacccaagactaccagcccagggatggcaccacccacaatgaaccctctccccttgatcactaattgggaaaatgccttacagctggatctcatggaggcatttcctcgagggaggctcctttctctgtgctaactccagcttgtgtcaatttgacacaaacccagccagtgccgttggcatatctcatactcactctgtagtcctggctggcctcaaattcacagtcaaggtgttaataataggtgtttataccacaactggctccccctttttaaaaagtgatttttaaatatctcattgagcacgggtttctttaaaaaaagtatgcaaatattctaaaattagattgtggtgttaattgtgtggctttaattagatagattttatgggttttgtttattttgcttttgtttttcaaggcagagtttcacggtgtagtcctggctgaccttgaactcagagacctgcctgaccctgcttcccaggtattgggtttaaaagtgtgtttctctctctccctctccctctccctctccctctccctctccttctccctctccttctccctctcccacacacactctccagtgcttcacatagcacaggctggctcatactcactgtgtagccaaggatgattttgaacctctggttcccctgcctccatctcctgagtgcagagattgtaagcatgtaccccatgactgttttatgcagcgttagagattaaacttggagctttaaacctgctaagcaagcactttgctgatttggctacatccccggtgtctagatctctaatttgttgttggatctgacgctgtcagaggctacttggttcaggttgggttgaggacaggtgaccttgtcttaaggaacctgggaagtccacacacatccccaccaaagcctgcgaccaatgactaaagattgaggggtgggacaggaataaaagccagcacttatgctgcagtataacacaaactcagggcccctgacatcagacagtgtggaactcagctgaaatccctgtctttgcttaggtcctgcctaaacttgtatgactttctagtctctgccttggtcacctcttcaataaatcacactctgaagaatacctggcaaactatgctgcccaggaacagctggctgtgaactctgcagatgtgacatctccatcctccgatgatattagagatgtgaatcacacatctcttaaagtgttttcctgataagcttttttcttttttaaaaaaagatttacttacttttattttatgtgtaatggtattttgcctgcatgtgtgtttaggtgtcacatgcatgcagagcctatggagaccagaagagggcatgagagtccctggattcgaagttatgaatggtttccagatgttatgtgagtgctagaaattgaatctagatccttttgaagagcactcagtgcctttatccatttaaacacctttacatttaaacattaaagacatctctttttttctaataaaaaaaaaaaaaacccagccgggcgtggtggagcacgcctttaatcccagcactcaggaggcagaggcaggtggatttctgagttccaggccagcctggtctacaaagtgagttccaggacagccagggctatacagagaaaccctgtcttgaaaaacaaaaacaaaaacaacaacaaaaaaaaacaaaaacaaaaacaaaaaaaaaaaccccacaaaaacaaaaaacacaaacaaacaaaaaaccttaaagtatttgatgggctgtgttggcctctgggggccccaagaactaccagcttggaaccctaccttaccaatctcttctcagtcccagtctagagcatagccagaacaggtgagttgagagcatggtcccctgacctccactgtctggctctgggctcagaggagccttgtgggaccctaagagcatcctgcttccctgtgaaggactgcagagacccccagaactaccagctgggaacatcgctccaccaatcccttgccatagggtccacctgaggcatagccagcaaagtcgggtcccctaacctcattacctgttccatggctccccccaccttccagccaacaccagggaaaaccaggagcttaaaggatagcataagaacacaatcaataaacccagggcaatatggcagcaccagagcccagctatcctgctatagcaagccctggatacctaataaaaatgaagcatgagccgggcgtggtggcgcacgcctttgatcccagcactcaggaggcaaagacaggcggatttctgagttccaggccagcctggtctacagaatgagttccaggacagccagggctattcacagaaaccctgtctcgaaaaaccaaaaaaaaaaaaaaaagaaatcgagggaaaacacaatcaaataagtgaagggtatgagtgaaactgtccaggacctgaagatggagatagaagcagcaaagaaagcaaacgaggaaaacctggggaagagaacaggaactacagacacagcatcagcaacagaagacaggagataaagagagaatctcagatgcagaagataccatagaagaagttgataccttggtcaaagaaaatgcaaaaattttaaagtgtgtgacacaaaacatgcaggaaatttgggacactatgaaacgaccaaacctaagaataataggaaaagaagaaggagaagattcccagctcaaaggcacagaaaacatcttcaataggaaaattttcagctgggcgtggtggtgcacgcctttaatcccagcactcgggaggcagaggaaggcagatttctgagttcaaagccagtctggtctacaaagtgagttccaggacagccaggactatacagagaaaccctgtcttgaaaaaaaaaaaaagaaagaaagaaagagagagagagagagagagagagagagagaaaggaaggaaggaaggaaggaaggaaggaaggaaggaaggaaggaaggaagaaaggaagaaagaaaattttctgggctggagagacggctcagcagctaagggcactgactgttcttccagatgtcctgagttcaattcccagcaaccacatggtggctcacaactatctataatgggatccaatgcctttttctggtgtgtctgaagacagctacagtatactcatacataaaatcaatcaatcaatcaatcaataatttttttaaaaaggaaaaaaagaaaatttcctaacctaaagaaagaaatgtctataaatgtactataaatatataggaagcttacagaacaccaaacatattgaaccagaaaagaaaagcctcctcccacataataagcaaaacattaaataaaaagaacaaagaaagagtattaaaagctgaaagggaaaaaggcaaactaacaaatgaaggcaaacctatcagacttacatccaacttctttttgtttgtttggttggtttttttttgttgttgttttttcgagacagggttgctctgtgtagccctagctgtcctggaactcactctgtagaccaggctggcctcgaactcagaaatccgcctgcttctgctgcccaagtgctacatccaacttcttaacagaaactctaaagactagaagggtctgggcagatgtcttgcagacactaagagaccacagatgtcaacctcaactattatacccagcaaaactttcaatcaccttagatggagaaaccaagatattccatgacaaaaccagatctaaacaatatatttctactaatccagccctatagaggatactagaaggaaaactaaaacataagatgggtaactacacccaagaaaacacaagaaattaatcatctcagagcaaaacccaaagaggagaaacacactattactactgctactactactgccacccccaccacccccaccaccattactatcaaaataaaaggaactaacagtcattggtcattaatctctctctttctctctctctaaaagattctttaaaaaaaacgatttatttattattatattgtaagtacactggtagctgtctttagacacaccagaagagggcatctnnnnnnnnnnnnnnnnnnnnttcaaggtcaacctaggctacttgagaccctccctgtctcaataaatgagtggacagatgagtgaatcctcataggaaatgcaggaagagccagcagagagatctcaaggtcagagggagtcttgtacccccaccacccccaccaccattactatcaaaataaaaggaactaacagtcattggtcattaatctctctctttctctctctctaaaagattctttaaaaaaaacgatttatttattattatatgtaagtacactgtagctgtctttagacacaccagaagagggcatctcattatggatggttgtgagccaccatgtggttgctggaatttgagctcagaatccctggaagagcagtcagtgctcttaaccactgagccatctcacccccccctttaaatatttatttatttatttaaggtatttgagtacactgttgctgtcttcagacacaccagaagagggcatctgaccccactacagatggttgtaagccaccatctggctgctaggaattgaattcaggacctctggaagagcattaattaatatctctcaacatcaatagactcaatcccataataaaaagacaaagcctaacagaacggatgcgtaattagaatccatcgttctgctgtattcaagagacacacctcagcaacaaagatagatattatcccagagaaaagggctgaaaaaaggctttccatgcaaatagacccaagaaacaagctggagtagctattctaatatctaataaaatagactttcaaccaaaagtaatcaaaagagacaggtaaggacacttcatactcatcaaaggaaaaatcctccaagaggacatctcaattctgaatatctatgccctattactaaagcttaaatcacacattgaagcatacacttcaacaccatactctcaccaatgaacaggtcattgagacagaaactagacagagaaataatgaagttaacagaagttatggtacaaatggatctaacatttcacccaaacataaaaaaaatataccttcttttcagcaactcacagaaccttctctaaaattggccatatactcactcataaagcaagcctcaacagaaacaagaagattgaaaaaaacccttgcattttatcagatcagcatggattaaaactgtacttcaacaacaatggaaacaacagaaagccaacatattcatggaaactgaacaactctctcctcagtggtcactagatcagggaagaaagaaagaaagaaattaaagactttctagagttcagtaaaaatgaggacacaacatactcaaagttatgggacacaatgaaagcagttctaagaggaaagttcatagtatcaagtgccttcataaagaagttggaggggctggtgagatggctcagtgggtaagagcacccgactgctcttccgaaggtccagagttcaaatcccagcaaccacatggtggctcacaaccatctgtaacaagatttgactccctcttctgatgtgtctgaagacagctacagtgtacttacatataataataaattaaaaatctttaaaaaaaaaaagaagttggagaattctcatacaaattaaaagtacacctgaaagctctagaacaaaagtaagcaaacacacccaaaaggagtagatagctggagatgatgaaactcggacctgaaattgttcaattagaaacaaacagtacaaagaatcaacaaaaccaagaaagacaaacaagatagacaaacacttagccacactaataggcagagagggcagagagacagtaccaaaattaagacaatcagagataaaaagggagacataaggactctggggaagttcaaagattcactaggtcttcaaaagcctgcacttcacaaaactggaaaatctaaaaggaatggatgattttgtcgacaaatactaagtaccaaagttaaatcaagatcaggtaaatatttaaacatccctataacccctaaagaaatagaagcagtcattaaaactctcccaaccaaaaaatgcccagggccagaaggttttagcgaagaattctaccagacttttaaagaagagctaatgccaatactccttaaattagtccacaaaataaaaacagaaggaacattgctaaactcattctatgaggccacagacatcctgaaccacacaaagacttaacaaagaaagagaacttaaggggctgaagagatggctcagtgggtaaaagcacccgactgctcttccgaaggtccggagttcaaatcccagcaaccacatggtggctcacaaccatccgtaacgagatctgactcccacttctggagtgtctgaagacaagctacagtgtacttacatataataaataaataaacaagtattaaaaaaaagagaacttcagactaatttcccttatgaacattgatgtaaaaatactcaataaaatatttgcaaaccaaacccaagaagacatcatctaccaagcaagatgctagagaggcaggagggtggccggaaggtcttacagagcagcctggtgtgacttacctccagaggtgatgagaggagctgagagcaatgttgctgaggttctggtctgaatacgccgacctgagaagagtgtgccaaaggactctctgaatccctcctccaattaccttcaggctgcatgtatagaagatgtaccttatacatctggaacctgtctctcacctcataggcagctaggaagtgtgtgtgtgtgtgcgcgcgtgtgtgtgcgtgtgtgcgtgtgtggtgtgaaagtgttgatcccattgggtgaaagtaagaacactatcacagtttttgagccaaattgctatgctggctaagacaatccatcctcaggattccgggagtatgtcaccaaggtacattaatcggaggtttataaagaaaggcaaaccccaaaaggctacatactttccacctttgtccaatcaggagcaagcaaacatcctggcatactctctgcttatgtacctccagcctacattcgatcaaacacatcctgtgcagatggggcaaccaagcttgtctaaagaagcaaacaaaggacttgtaatcttaaatgaacaacggccgacagcacgccaggaagttctctgtgctctggagagtagggcttacttgtcagaggcatttttcatttttcttttaggagggggaagggagatgggggggggagagggggaggnnnnnnnnnnnnnnnnnnnnaaaaaaaaaagagagagagagagagagagagagagagagagagagagagagagaatataaaagatccattatcggggctggtgagtgagatggctcagtggttaagagcactgactgctcttctggaggtcatgagttcaaatcccagcaaccacatggtggctcacaactatctgtaatgaaaaacaaataaaaaaacctatgggccggagtgaaagggaaggggaaaaaagggggaaagaagggggaaaaaaaagaaagatccgttatcaccaagcagcagctctaagtgagataggagaccttgcggtctgagcagctgttccagtaatatgaaggacagttaaaccaacgagtcataggtcctgttgagtaaacttgtctaaatcctctcatttcctgtgtgtggttgggaagaggaatctcagaagccgagccccattctgtagtaactcaattaaccatgggcgatggtgactcgccaatgtgcctctctgccgtttcattcaagggaataagatgctggctggacaaactgttactttgggctcttacaatttctatcacacgtaagcctgattcgatattttaagaattgactctgggacgggggggccagcacttggtggagcaaaggcaggtggatctctgtggagccagcctgatctacacagagttcatggccagccagggctacctagagagaccctgtcttgaaaagtcaaagacgaaaaaacaaacaagaatcatctctcaaaataatcacatgggaaatgaggttttttttctctaatcttccattttctctttcagttcagaatgctgcagtggattgtacgagggtggaaaataacggtaagtttcatttcctgaaagtatgggcatcaaaatggtcagatagctgactctgaacatgagcgttcacttactgggatttctgtgtttttagatcggcaaccaagagcaaagcctttctattatctgctaggaggccaatgagctgaggtttagagagggcattaattgtagcaattttgtttttccacctgaaacttggccgggcaaaatctgagattgttttttaccatgaaaacctccaaacttcctttgttatcacttttagctagaaaaccctcccgtgatttttgtaaatttttattaatttatttacttttgaggctgagcctcatgtaggtcaggctggcctcaaactctattacgtggccaaggctaaactagactaactcctaaactctcaaatgctgggacccagcccaccatgcccactcaaaccccttttaaattaattcaggcaactagtactatgcctaggtagagctctactgtggagtcagagtgctttgctgctgagcctggcttgctgctgcccagctggcaagccgggcacacaaactaatgacttttgagggtggtttctttcatcggtgagaaggggtggccccaatcctggttcctctgcagtctttgcggcacatcggtccttccgtgtaagctaaccacataaagttgaaagtgctgttgtgtgcaacccagcctgtcttccctcccctcccctccccatcccgaagcaggcagcttctttctgtggactgttggtgataagatcttgctacatagcctagcactcactatgtagccgaagctgatgctgaactcatgagaatccttctgcttcagcctgttaagtcctgagtgtgggagagcacacagtggagcagtctagatggacatctttgcgtcggtctgtggtgtcagagtttattgaatagcaataaattcaccagctatgttgcttctcttggctgtgattttccaagcagtcctgatttctcttgatagccagcagtcagtaaacatgagttcttttattccaattttaaatgtaatattaactctcagagcatatattacatatcttacagtaaacatacacatgagtatgtatgtataccagctcacagactggataccaaagccatagcagacagaatttaaggagttttaccaggccttactgaaggcaatctcacgtagcccaggctggcctagaactcactaggtcagcatagactgaccttgaattcttcatccatctgcctccatcccccaagtcctgaaattacaggagaaagaaagaccctggggaagcaggggcttcccagcaggagagcagaaaaggatgtgtcacaggatctgaattaaggttggttacttaatgaaagactccaagctacaggtctgcccctggcttataggaagtaaaatcgatgataagaaaagttggcaggtcttacctgaaaagcagtgcaaatgggaagttaaatccagtgtcaaagtcaaacaaaaacatagagaccgatgtgcaataaaggaatttttatctgggaaaaagcaaacgatatggaacacaagtgtgtagacccggtggcctctggcacacctgaagaacaaaggaaagattgggattgactggaggggcgggggggacgggggacaatttccctaaggtgcttgcttccacctggagaaggggcatattgtttttctcactactgtgagaaatgaaagattcaactaaatgtctgacaggaagcaactggaggaaggaagggtcaacctgggctcactgctcaaggggagataacctgggctcaaggggagataaggctcttgatgacgggtaagtcacgatgggaggggcctgaggcagctggtcacagagcatccacaatcaggagacagaggtaactggattgttaaagtttcttttattcgcctgatctaattgtcctctctgaagcttactgcttcagtctgctaacccaggcctggtcctggaagcttctagcctccgtacaatcttatctaggtctggaatgttttcagcctctgaggcttatgactaaataagatcactctttctagctctttctgaactctggctggctggtcaactcagttattctggctcaaaccccactccaagctgaccgattcaatctggcttctcacagttccttactgcattgctctgcttggtctcatgctaactttggcaatgtgttctaatcttctggctctttctcattctgtctccacctgtgtctagcttgtcctctctctgtaacctgtctcactagaactgtcccagtaaaactgcctctgaactccatgaactgaactgccccgaactccactgtatttcatctcaactcaaggtctcaagcaaactgactgacttgagctcagagatctgtatgcctctgtctcttgagtgctaggataaaggttgtgccgctgtgcctggaccccaacctttctttacctgaaacttgctttacaccaggctagccttgacctcagagatctacttgcctttgtctcctgggattaaaggcatgtctgcattccagctggatcacagagatcaagacagtcttagcatgtgagcccttgccagtagagcagccatgtagctggattaaaattcctcggcagtggatgcctgactcactgtctctctggtgttttttttttttttttaaattcagtctgggaacccaggcctccacacacattcagagtaggtcttcccacctcacttaatccactctagaaacttcctcgaggacatgcccagagacaatctctgaggtgactctagatcctgtaagccttacagtactaactatacactgggtctcatgtagcccagcctggctttgaactctctatacagctaaggatagccctgaactcttgatccctcttgcttccatctcccaagagctataattacaggcatcatgcctgatcgaagctgtgttcaggatggaatccaggactttgtgcgctaggcaagcactccccatgcaagttgcggttcaagccctgtctggtggttttcacgaagccttctgtgtcatttttgtcttcccagaattaccttctccaaatctgaactcaagtatgaacgtggtcaggatgggccaaaatgtatctctgtcttgttccaccaagaacacatcagtagacatcacctattcgctcttctggggtacaaaatatctagaaagcaagagaagacgagggggagctgtggatttccacctgaggatctccaatgccaacgagtcaggcccctacaaatgcaaagtcaatgtttccaacttgatgaaatacagtcaggatttcaacttcacaatggccagtaagtgcatctgtatacaatggaggctgggtggccagtgggactctctcctgtagaatgaagggcccttgggggttgaaagcattctgtcaagagtctgggaagaacatggctcatccatttagcacaactgctactttctttccttttcttttcttttctttgtttctttctctttgtttctctctctttctttctttctttcttcctttctttttttccttccttccttccttccttccttcccttccttccttcctttcttcctttcttcctttcttttttcttccttccttccttccttccttccctttccttccttccttccttccttccttccttccttccttcctcctccctccctccctccctccctccccctctctccttcctttctttctttctttctttctttctttctttctttcttccttccttccttccttccttccttccttccttccttccttccttcctttctttctttctttctttctttctttctttctttctttctttctttctttctttctttctttctttctattttccttctttttattccttatctgggccatcagtctaaaagatggtactccctgcttagctaatcctctatcctcggtgcccgcacttcaccgatcgcctagtccctccctaatctaatcaagattagtcagcagaccaatcttcgagttccctggaagcctgaagcttctcagcctgcagccttcctgcccagccatgcctcattagctctgattttctctctgttgtcttcctaccacacccatgcttttagccccacaccagtagcctcagctgtggataaggagtccctgggagagggagaaaggaatctaaacacattgtatctgcagttccctcataaagcaccactggctctccaggtctaccagcccacactcaagcatcaaaccacatgtatctacgcgaaattaaattcaaactagtcaaaatgatactaagaattctaggaccggcaagatggctggctcaatggggtaaaggtgcttgttgcacaagcctgagttcgatccctggaactccagtggaagagagagctgactctacagagtagatctctgacctccacacagtgcatgtctgcttgagtgctcgaacacgtttgtgcacacatatacctatgcattgcacatgtgcatgcatgcaaacactaataattaatagatacattttaaagagttcaatactacagggccgggcacacctttaattccagcaatccagaggcagaggcaggtggatctctgtgagttataaggccagcctgatctgtttagctacttccaggctagccagaactacatactgagacactgtcacaagataaataaataaaatgtaaaaaaaaccctcaagatcacagtcttgtcacatttctagtgtgcaagagtcaaaggtgcctggcacctgcgtacaggacagcagaggcacagaacatgtccaccactacagaaagttttgttagatggaaggccaggggaatggctctcagttttagggtgcaattgtctagttctaatctaacacagcaggggtatgctcaaaagaccaatgtgtcaatcacttgtttgttgctgtaacaaaatcacctggaggaaggaagagctgatttgggctcacagttcccggtaacacagtccatcctgacaggggacagggactgtttagcagcaggaatgggaggtggctggtagtcacatttcatccacatatcagcgcagagaaagagaggtaaattcttgtgctcactttactatctcttattttttaaatttaataattattactatttttttttagacacagtctgattatgtagccttggctagcctggaagtcactgtgtagaccaggctggcctcagactcagacatccatctgcgtctgctagggttaaaggaacatgccaaacaggttacattctctttcttattcaatctgggacttgtcccatggaatgatactggccacacttggggtaggcctgtccacctcagttcacctaatctatgcaacctatcatgacttgcccagacctttgagtcttaggggtttctagctctgatcaagttgaaaccactattaaccagcacagcttgaaggacaggttttggccacagttttatgcagttttatgctctgccaggagacaggcagagctcagggtgtgagctaagtggcgactgtggctgtcgtagaaatgagcagagaaaggaaagccaacacagaccaggagtagtggcttaacatatacccctctaccctgtgtggtgaggccacgaagctagcaatctctgcatgcgacctccctgcattttgttcaagtgacatattgtcctatcaaacacgatcatcttcaatgaagcctcacagataagtctctaccgattgccctctaggtatagacgattggtacttccaggacatcggtgacacctaagacatggtcaggtccccagccccatcagagtagatggttttgccataagcacaggttccttaatcatggattcacttatcagctaaggttccttcccggatgcaccacaccctggcttacattgattggttgctgctctcatggtggcctcttgtctagggggaagacacaaaacccaaacaaatggctcacaagctgtgccagctgttgtaaaggacacaagcacagtgtggagaaaggcaaggcatgaagaagggaccacctgggtaaggtaggagggcctgtccaaggcgctggaaagatgagcaggagctagctatatggggacactagttgaggtccttggcatatccagagctccagctttatctttcaagggctggttcaaggtggctgaaggtcagagaagaagcatgtgagccctgggtgctgagtttagaggggcccagagtagtgggaggagtgatgagtttgagtctaatctgggctacaggagactcttaacagcaggggttgggggtggggggtctcgctgtgcagttagtctgctatttgctagctctgtgaccttggcattcctttttttttttcttccccctttggaagtagcctctcaagtagcctaggctggctctatactcacacatgtagccaaggataaccctgactcctgattctcctagctctattttccaagttaccatgtgggtaacatgacagatggctatcctttcttctgtgtactatttttgttaataaaccacataacatatattgttgggttcttaaaaaacaagacaaacaaacaaacaaaaaccagagtaggggagctggagagatggataagaatacctactcatcttctagaggatccaggtttaattcctggcacccacatagtggatcaccgccatctttgactccaggcccagggaaatcaaagccttcttctggcctccatgggcaccatggtgaatacacatgcacgtggctcacacgtgcagaccgatttgaactcagagatgcacctgcttcccaagagttgggatcaaaggcgttccccaccaccacctggccagtgtgtttagtctctctttctctcttttttaaaaggtttatttatttatttatttatatgagtacactgtcgctgtcttcagacacaccagaagagggcatcagatcccattacagatggttgtgagccaccatgtggttgctgggaattgaactcaggacctctggaagagcagtcagtgttcttaactgctgagccatctctccagccccagattgtttattcttaagaatgactgctatcaaaaatttatttaaacccataaatgtgtcaaacgcatacaataaaataattctaagacagcacttgggaggcagaggcaggtggatctctgtgagtttaaggccagcctggtccatggagtttcaggacagccaagtctatacaaagagaccctgtttcaaaaaactaaaataaatagataaataaacaagtaaataaagcaaactaaataactctgtaaataaacaaattgtagaaaaagagtaggacttggcaggagaccagagtcctatatttcctgttccgcagttcctttgcaccaatttagcaaggccacttctgcttttcagaggaagtcaaggtacttgtgcaactgaattctatacatgaacacagggttagagaaatgagatactctggggctgagcatgagccaactctccactgcacacttggaactggatggctgacaaagtcatactcatagctcagtgaccggaggcaattgccaccaaatgtgaagatctgagcttgtcccctgagacccacatggcgtgaagaatcaactcccatagagtgtcttctgacttctacatgcatagtttatatggcttttacatgagtttaagtgggtgtaatggctattcctgttgtcaatttgactatctctgggattgaactatagtccagaattggagggcacccctgagatccagaattctcactcatctcctagaggatccaggctgaggctgaaaggcacagtttttgacctggatcttagcatggagatctcgaggcatagtggccatgaaaagcttaggctcaagcaaggtagtacacgcctttaatcccagaagactcggcaaggagatctctgagttcaagtcagcctgagacaaagcaagttctagatccaggaatggtggtacacacctttcatttgggccacaccttctgctggaggtctacataaaggacattggaagaatggagattcgctcttcacctgcttgcacttataccctttgactgccagcacgtctgttggagcctacttctccagaacaactctagcctcatggtactgagcaactactagattcttggacttcccatccacagttgcccactgttgggcaagtcagactgcagactataagacatcacaataagtttccttaatatatagagacattccataagttttgtgactctagggaatcccgactaatacagtgggtatatgaatacacactaaatgcattttgtgttttttttgttttgtttttttgagacagggtttctctttatagccatggctgtcctagaactcactctgtagaccaggctggtctcaaactcagaaatccacctgcctctgcctcccaggtgnnnnnnnnnnnnnnnnnnnnnnnnnnnnnnnnnnnnnnngcctgcgcctccacgtccgtccggccctaaatgcatttttaatagtagtcattcttaagagtaaacaaactggccagggggtggtgaaagcctttaatccctgcacttgggaggcagaagcagtcagatttctgagttcgagaccagcctagcctacagagtgagttccaggacagccagagctatacagagaaaccctgtctcgaaaaaccaaaagaaatatataaataaataaaatcaaaatacataaattaataaaaatcaacacaccgacagctgtgctccacatatctgtagtgccagcgggaagttggaaaaaggaggatcagaagtttaaggccttagctccatagcaagttcaaggaaagaaataataaatagaccttgacgccagtgcacatcagttccctgaagcagagatgcagtctctccccacccactcggcttgtgccacactgcacagggctggtcaggttggctctttgcctggcctgctgctcttgcttgtacccttcttgctcctcaggtcattcagcttgaggctaatgcactgcagtaaggggttggaccgtgcttggtgtgtttgggtattgtttccagacctgctgggatgatatccagaggtggtggcaaagaattgcccagtaaacaccagtgcctgtcttaccaggtcctagccgtgctgtgagggatccaaccatgaagtgctgggctgcgctgtgatgcccatggggaagggaggcacaagggtagctctaagaacctcatgcctcaacaaggggactctcatcatgagttgctgggatcaggcacacagtgtggtgatggtggtgaacacaggcaacagccaagacggcctttcctagagatcttaggtcagtgtcatagcaaaaggaagcccgtggtgacctaggaatactgttttcttgcagaagatgagagctgcccttcatgccggctgtcactgttgctcccagggctgttactggggatactggtaatagtcctagttctggcttatttgattcatctaaaatacaaaaaaggtaggttctccctggtgtgctcctgtgctgttcagactcagcagggcagagggggagaggaagcctggcggtggtggtggtggtggtgatggcgcatgcctttaattgcagcactaggacagaggcaggtgaatctctgggttggaggttagcctagtctagagagcaaattccaggacagttaggggtacacagagaaactccgtctcaaaaacgagagagagagagagagagagagagagagagagagaaattaagaggtggatagacagacttcatgaggttcatagagcactgcctttatgttccttctgatgtaggttgcctggagagccagcctcacatggacacaatttatacacacagccccatgaccccaaccccacgactggattagaagtctgtagctaccacctgaaaatcatcgataatttttgtactcttaaaggctcctggaaggtctagctggctggtttcgaactcacaatgatgctccatccagcctcagcttcagaatgctgagcagacgtctgcccctctgctcccagcttatacggcttttgaatctgggtcttttgtagctggggatggcgtcagactcgccacgcacttgagaatggccttgacttctggtcctcccgccttcacatccccagggcggggatcacacgcacagattccgacatccaatgtgtgcgtcagtgggcatacatgctagagttttctgcaggcaagactctaccacctgagccccagactgccttcataacgttatgctaaaatatacacatcatgagatctgctactctactctcccatctttctgttttcttttactgtgtgaggccctgtcatgtgctaaacaagagctctgcccagtcagactcagctcccagttcagctagttagtctgtgtgggtcaggaagtatctgtcacacttatctcttgactgtctgtcacacttagctctgttgtgaggccttcagtaaagccatacctgcctttgtcatcttccccggctgaaacccaacgcccttgagacagttcctcattctattcctcagctctgcaaccacattctactttctgtctctacagacagaactattctaggatttcattggagtgaaacagtccagttgtctcttgttgtattttgtgacagggtctcctgtatcccaggctttatcccagtagtcaggataaccttgaccttctggtcctcctgagtggctggattacaggcctgcagaaggaactcagggccccctgcttgctaggcaaggactcccgccagctgcaccacatcccccaggggctgtggtgtttggtttcctttgcatatcagatctttccttttaaggctggagaaccagctgatttgcgtgaaagcctctggttatttccccacactggtccccatgcttggccactgtcaacagtgcttctgacattcactgcattgcgtgtagtctgtgcaaagcagaagcccctcaaagggcggagccttctgcttctcagctgtccctgggggggcgggggggggggagcttggtgtgtgaacaagtctctgtcttcccaatagggacaacaacaaaccttcactctctgggtagaagattctccctgctcacctctcagcccttcgctggtaaagatttcaaagtggccctttcactgggcgcacatatgtgtggagaaatatctagatttgcataaaatagcatttgtgtcgcaagcacacaaggtgccaggcccagggctgttgggtacctggcgcctgcctttgtttctcccggcctccgccttccggcctatggaatagggctgtggagatactgtctgaattagtgagactcacagatatcaggtccctgtgctctctccatctctacatggataagggtcacggagggcagcagcactcagctgatacaaaagcaatggtacggcccctgcttagcttacacaagacccagcacagactccaagacaaacccatactcttaaagccccttgaaaacagacaccctacttaacccagcttctcaaacatctcaacaatgaaatcaccctgagtttttgcccaagtgccatgaagatgtttggtggaacatgctgctgatcccagcatttgggaggcagaggcaggcagacctttgagagttcaaggccagccttgtatactaagtgagtttcgggacagtcagggctacacagagaaaccctgtctcagaaaaatgaaaccaaccaatcaaccaaaaaaaaaatttttgattcctgccaacattagaagttagttgtattgctcatctcttgaagataactcaaggctctctactccatttcctcnnnnnnnnnnnnnnnnnnnnccccccccccccccgccattagttgaagccactggcatgtcacttagaatcatgagagattcttccccttggcagagaagaaaggaaaaacatgtctagatagttcaacctaatgattatgtcttgctttgtgggggagcaggaaagaagactcagagagaggaccagtccaagggttctggagatgcgcctgcacaggacgagctgtatgtcaacgcctgcaagactcagacaggtaaagggctttgctggctgttttgagcagtctggttgtttggtctgggggtgactgtatacacaggtgtgtatacacgtgtatatatgccatggcactggttcttgaccccaaggtgtccacacatgctagataagtactctacacagcgctgcttatttaaaataaaatgaaataaaaataaaataattctccagagacacaggctattttttaaaaaaggaagcaaaataataaccatatcagcttcccacctctgcctcccgtctcccagggtcttcggccagtgttcagagcccctcccagatgggtgattttccattctatcctttgatattttttttttcaggtgatatattttagagatgactttctttcagtttgggatgacccacgctctatcccagtctcttgtgatcattgtttaaagaagtttatgttgttcatttgttttcttttcagagtcatgccaagtagcccagactagcttcgaacttgttaccctcctgcctcagcctcttgagtgctgggatcaccggactatgatactacatccaacaaactgctctttaaaaatatcagtcttgacaacaaatgaaaactgtattagcatctagcctaggtcagctttgtactcactgtgtagcccaggatgatctcaaactcctaacaatcctcccaggtcctaggattaccaatgggacttaatttgtgtgtcatctttgcatagaggccatgaaaaccttctctgtgcgtctttctattttagtctgcatgctgcagaatcgagcacatctcattcttgtttgctggtttgtcttttacaatgcttgggatcaaacccaagggcgccacccgtgccagtcaagtgctagagaaaacgagataaaactgcttccttagcgctttacagggctgcagtattagctagagtcacccaactgtacactatttagtcacttatcaaagcagacattgtatgtcggatgcttcatggtggaaaggcccagctaacaaaggcctccaatttaatcagcccctcagagccctttgtacgttttgagcactgtgtaagccctgatacaccagcaccagctcccagtttctggtgttcccttcttgccaaggaggagcctgggtcggggctgggagtgacaatgtgtttccacaaccccagtggggaagtgcttggtctaggccccacaccactgccctcccatggacagaggatccaagctctggcccagtaacacttatgccctatcttttgcagagcaaccccaggagatacactatgccactccagtcttcaaggagatggcacccatggaagaaggtgagtggtgataggacaagagatgctgtagcaatgagtccccgagacatcactgtgaacaggggctttgtatctaaagaggggtttgcggactccaggctcccaacaaatcaacactaaccaatcacaactcctactaatgtaattaatgtaactttaatataatcacagtgacagctgtagaagtgcgtgtagggaaagcagggtaggggctatcctctaaatacttccaagacaggctggagaaatggctttgcatttatgagcgtgtactgtgctccagaggacccgagttcacatcccagcactcatatccagtggcttaggacccattgctacttcagcaccagagatatctgtgcttctggtctccacgggtacttatgttcacatgtacatactgccacacccccattagttaaaattaaaataaaatctccttttttcttctgggatatctctcattcattctctctctctctctctctctctctctatatatatatatatatattagactatctatctatctatctatattagatttatttatatgcgtacactgtagctgtcttcagacacaccagaagagggcacaggatatcattacagatggttgtgagccaccatgtggttgctgggaattgaactcaggacctctggaagagtagtcagtgctcttaacctctgagccatctctccagccctcttctgggtttttcaaggcagggttttctatgtgtagctctgatagaccaggctggtcttcaactcagaaaggtggtggtggaacacacctttaatcccaacactctgggagtcagaggcaagcagatctctgtaagtttgaggctagcctggtctacagagtgagttccaggacagccagagctacccagagaaaccctgttttgaaaacacaaacaaacaaacagattaaatagaacctcaacaactcaacaatgcccccctcccccaaaagaagttcccaatagaggacacagggtcactactaaaacattttcaggaagaaatcagtgctggggagatggctctggggctaagagcacttacctacctcacttgtgtgaggatttgagtttgaatcctgatctcttatgcaaaaagctgtgcttgggcctgtgagatgcagagatgcagagacttctggggctcactggcatccagcctagcttcaggtttagtgaaagaccctatctcaggagaataaggtaggaagtgataggacgggaaatgtaatggcctcctatggccttcatgaccccccatatacaccacacacacacacacacacacacacacacacacacagaataaattgttattaaactggaaaagaccagttaatacttgcttctttcaggttgcccatctagaaatggggattttaaataaaactaatctattatatttacttcttgtgtatgggccagcatatgccatggtatgtgcaggaagtcaggacaagctggaggagacagctctctccttcctccgtgtggagccctggcatagaactgatgtcatcaagcttggtggccagtgctgttggcccctaagccaacacacccgagaagggcgttctttttaagagtttctatgaactcatggctgtagcttactgagttattgtctctcttcaatttcagaaggtggtacggatggaaaagctgattacatctactctgaactcacccactgaagtgtgaagaaactgactgtatcccagtgtaaagactttccagtaagctgtgtatgagaaaataggaaactcacctggcacttaagagttccattctaggctgaggcaggaggatcctgagtttgaggccagctgggactacatagcaagaccttgtcttaaaacacaaaatcaaaaaaagatttaacctggtcacctatagtgagtgtattttacacatctggacactatttctttggctaatttgggcactaatcttgttatccaagtagccaggcttgataagagttaaaacatacttaggttttgtggccttccaccttctcccttcccaacacaattatcttggggccgaggaggtggttcagcagttaagagcagacactagggctggtgagatggctctgtgggtaagagcacggactgttcttccatcaaggtcctgagttcaaatcccagcaaccacatggtggctcacaaccaaccataataagatctgatgccctcttctggcgcatctgaagacagctacagtgtatttatgtataataataaataaatctaaaaaaaaaaaaaaaaaaaaagagcagacactactcttccaaaggatgggagtttgagtccagagtctacatcccacaactcaagctgccaataacattgtttccaaaggatccatcgccctcttctggcatctgcaggcactacactcatgtgcacagacacacctaaacacataattaaataaattggagttggagagattttctttttcttttttaagacatggtttctctgtgtaaccctggctgtcctggaactcactctgtaaaccagactggcctcaaactcagagatctgcctgccgctgtcacccgagtgctgggaagaaaggtgcataccactatgcctggctagttttgtgttcttaataaaccatgtctttagttagggttttactgctgtgaacagacaccatgaccaaggcaactctcataaagggcaacatttaactgggtctggctttcaggttcagaggttcagtccagtatcatcaaggcaagagcatggcagtgtccaggcaggtatcttaaagcccacacccacagtgacacacgtactccaaggccacacctccaaatagtgaaactccgtggggccatattcaaaccactacagaccatatcaaaaggacaataaaaaatgaatcaaatatctactttataaatacaaaagtccaaaactgtattaatgtaagcgaatgaactcaacagagaatatttattagagaatatgaagacctacacattgctagctgacgctaggtacttgaccaggaagtctctcagcttggatatgtgcatcatttccttcatcgtggtgtctctgctccgcagctggattagcccattttccagcgtagtctcagtgaccagaactgagaagaggacactcatctcatcgtacctgagagaacggttcaatgaaacgcatgagcgcctgggcagacatcagctcctcatctcatggacacccctgagcctgagctgctctcagctcagtcaggtggtcctttacgaagggccgaatcatgccctacccccactcccacttctaaagcatactcaaagggaaggtttgagcttactgtgttggcacctaaaggggtactatagatggcacctgaaggggtactataaatgaattcctcaatgacctcagtgttttgaattcaactttaatgatagcaaactatttgcagacaaaactctcttagaataaaccatattaaaaaaacataaggatttggtatacaacagatcacaacaaatccatactccatttatgacttaacatgttacttgctgtttctaattcgttaatcattgaatgaaacactagccttcccgctttccaaaatctactaaagatgaatttttaaacattttactgccgggcagtggtggcacgtgcttttaatcccagcacttgggaggcagaggcaggcggatttctgagttcgaggccagcctggtctacagagtgagttccaggacagccagggctacacagagaaaccctgaatcaaaaaaaccaaaaccaaccaaccaaaaaaccaaaaccatcttactgattttcactttacgcacatgagtgttttacttgtatgtatatctgcatgggcctggtgcctacggaggccacaagagggaattggatgccctgaaactggagttaatgaacagttgtgagctgccacatgagtgctggtcaccaaatctgtgttctctggtagagcagccagtgctcttaactactgagccttctttctggccccaaacattcagtttttaaaaactaggcatgtggattatatgtctatgatcccaacactcaggaaggggaggcaggacaatcgaagttcaaggtaataatactcaactacatactgagttcaaggccagcccagggcaaggctgagatgctatagaggacgtacgttgcatacagataagtactagggaaccaggaatgattaaaacatgaatactcctctcttcaaaggaaggacatgtttacctgtcttccatctgaaatgcgaaaagggtgcaggttacagtctggtgatgttttgtaatctgtagggccaggcatcacctgaataccccggaatattacttttgtttattccaggctacccccaaaatcttaagcattgcttctcactccataaaatccacctctgagatgtcacttcacagctaagtgacttctaaattctcttagggctgggccaaccctgactccctcagaccttctcctagagccttatctagggcattgtttctaagtcagcagaacccatctctatgggagaagcatatggactttgtacagagttacactgtaaatactttttttttttagagttatttattattatatctaggtacattgtagctgtcttcagacacaccagaagagggcatcagatctcattgcagatggttgtgaaccaccatgtggttgctgggatttgaactcaggacctttggaaggacagtcggcgatcttaactgctgagccatctcaccagcccccccatgtaaatgcttcttaagccttgttttacactagggactgagttaactgtcttcaggaaacttttccaaaattgtacagcgcgtaaatatgactaaatgaaagcacctggtgtgagactccggaagtctgacctagcactggctgagttgggctgaaccgagttccactcccgtctctcccaggattatattgctgcaggttgcagagtttgcagggatccccacagatgcagtctcaaaaaacaaaaacaaaacaaaacaaaaaaccacaaaaaccctgtaactccagttcctggggatctggtgccctcttctgtcctctgtgagcactgcacacacatggtgcacagatatgcatccaggcaaaatactcatgtactaaattaaaaaaaagtaacaacaacaacaacaacaacaacaaaaggattctggactgcaaatatgtgtcatggcacacccacagagagaaagaaacctagagaaaaatttaaatgacactccctcccaacaaacaagactttagagcacacagaaactaggaagttcaagttcccctccttcgttttatatctgaacaaacaccagttcttccattcccattttgcccttgctagagtctataaaacccaggccttgtgctcaccccgccccgagctatctaagccacacaccggggtctgttgctcctgctgagagctgtttccctgcagatagtatctggaaggtatattttagttatgcattgctttttagatacaggatctcattatgtaactcaagttggcctgatccttgtcatcctcctgcctcagcctacagagtgctgagatggaaggtatgagttaccacgccgacaaagtagaagaacaaaacacaaaatttcctaatcttagatatacattcaacacaaaaagctaatttttaaaaatcaagataagcataaaaggataaattatttttattaaaaaaaagaaataaaattgcaaattggcaatactagagagaatttaactataagatattttaaaaatcctgacaaaatattagtgactttgatctgggtggtggtgggaaggcagagcagtgttgagatctatacagaagctaggtgtatgtgcgatcacacctataacctcagcactccagatgaggaaagggctgtccatgattctgaggccagcacgagagacagaagatttagggtcagtctgggttacagtttgagactctgtattgagagatcttgagaataggtgagatgttgtgtgcacagacagacagacagacagacagaggttgagactgaggagttaagctctcaccatgtggtggtggactggattgggggaagcaatgaagatgtcttagactgaatatcccttatctgaaatgcttagaccagatgtgttttagagttaaacaaacaaaaacaaaacacactgaatatttaattatataattaattctcctggggctaggaccaacgtctgaatatgaaatttactcctgtttcatataagatgtaccttatacatacagcttaaaggtaattttagacagcgtctttgttttgactatagtctgtcataggtcaggtcatatggaaattttcgtttataaaaatgttagtgctcagaagtgtcagatgttggatttttcagtgagagatgattacctcgtcataaaaaagccaggaaaggccttccattcatgttacttcggttctgattctatacacctaactttcatccctgaaactggagaagctgaggtgaacatagaaatacttgacaggggctggtgagatggctcaatgggtaagagcacccgactgttcttccgaaggtccagagttcaaatcccagcaaccacatggtggctcacaaccatccctaacgagatctgactccctcttnnnnnnnnnnnnnnnnnnnncttacatataataaataaataaattaaaaaaaaaaaaaaagaaatacttgacagtactcttctttcctatggcaatcagctcaaggcacaaggtcctataaaaggaagagctaggagcattttgtaaaaagattgacttctttctattttacgtttgcttgcctgtatgtacaccatctgtgtgcctggtacccacagaagccaggagcctacagttacagaagtctgtgagcctccgtgtgggtgctgagaaccgacttctggccctctacaacagcagacactgttctccaatgccgaggtgttgctcactaatcatttgctatttttaaggatttatgttttgtgtgtgtgtgtgtgtgtgtgtgcagtgcctgtggaggacagaggaggttgctgaatccctgagcggctgcagctctgagccacctaacttggaggctgggaaccagacttagactctggaagaacagtaagcactcaaccactaagcctccctccagccccattttgcagattacatttagaagagattgtttctatctgtagaatgaaacatataatcaaaactaaacaatgagaagaaagggaattcttactttgaatggagttgctctaatgaggaatggacagtttccgaatagccaggccacacagaaatcccattttctagtaactcattaagtagcccttgacaaacctggaggaaaacaaaagagacttcaaatactaaagaaaagggcttgtgaaactgtaagccacgtgtaaactggttataatgttcctggttatatagtgttagagtttacacactgaacactttagaaactgcatattgcctctaaaagtaaagaaattaagcgggcgggaatgagcagggctagaggggggaaaaaagaaattaagcaatgccaaccgagtattgactgcagatctaccaagaaatagtttgataccaacaaagaattatcaccattatcgtccagaacacaaaacagaaaacaaaaaccctatggttggaagcagccatgttagctgtaaggcatgggaaggtgggaactgtgggaattgtgccctggggattttatttccacatcaggagaaagaagaacagcctgggaaaccccagcagggcactgcaaaagtcagctacacaaactgcttccggaccactgcttagcaactggtggcaagatggctcagaggggaaagttcctgccaagccgaggacccacaggatggaagaagggatcaatgcctaagcctaagctgtcttctgacctccaaaccgcccgtgcgcacacacagttgtaagaagtcgtggcaactcacctgtcggagttctaccgttgggcctttccccacatccaaagcgaccttaataggggctaaacaagggtgaagtttaagcacctgaagcaattaagggacaagaggaaaaagggaagcactgttaatgtgtaagaataaaaaaaacaaaacaaaaccaaaaacccccacataactttgttttttcgagactgtgtgaaatcgcaaaagcacctttctctggaggctcttcttcctggcaaaggagttctctgccagctggaaggaatcgtagaggtaagccagcgtgcccaggtctacgtccccacttacagacagaacgcaaggaaccacgtttttccgcccatctcgacccttcatagaagaaaacaaaataaaagtaccattagcagaaccttctattttctgtgcgcgcgcgtggatcttgtgtttgtctcaccgtgtagctctgtctgtccttgaactcaagagatcaacctacctgtacctctcaagtgccgggattcaaagcttgtgccactctgactggcaagcagaactttttcttaaagtcatatattttagacttatgcaatcagaatgaatcacagattcactttataaagcgcctactccatgacaggacactgctgagccccgggccccaaaaataacactttctttttaaaaatgtcaaccctcgcagctccagtcaccgggagtggacctaggtctcggaaccttttcaatgctgtttggaaaggcaacatctaggggtttgttgttgttttcttttgttgagagaggatttctgtatagctctagctgtcctggaacttgctctgtggaccaggctggcctccaactacgagatccacttggctctgcctcctgagagctaggatcaatggcgtgtgccaccactgcacagctggaaagggaacacttgtttaaatagttccttcactattattaagcgtgtgtgataatggggaggggggggtcacaagtacatctgatgtcacaggacctacgtgggttcatagttgctagtttcactacttgggctacaggaactgaactcagctgttaagatccatagtaagtgcttttaccagccaagtcatgtcaaaaacccaattttattttttaagccagtctcaccttgaaatctcctgtctcaacctcaggtgctctggggttcaaggcatgtcctacttacttgactggctcctgaatttatgttcactaagacttgggtttcatcctgagatataaatggaaatacactgcacagggctggagagatggatcaggggtcaagagaatttgttcttgcagaggaccggggttctagtctgagcactcacatggcggggtatatgtgtaactccagttccaggggatctgatggcctcttgggcactacatgcgtatgggccacggagatataagcaggtcaaacacccacacacagaataaaatacattaaaaaaaaaaataaatggatatacaccggcgaaacctaaaagacaccgttttaaccaagtgatgtaagataccacactaacacctggtggtgtttcctaatgtgtccagagaagggcacaccagctctgtcatagtcctggcagggcacaaatacaacagtcaggaaaagttcagaaagaactgctcaaaggctcactctacaatgcaactaacttcttccaaagtgccaggaacataagactagggaagatgaaaggaacttttcatctggagaagagagacgggacagctccatgcaaacggcgctctgggctggatcctgggcctgtgaggccaattccttggatatttggatattcaattccatctcctggggctttgtgggacggatgatcacggtgggtcactgttcatttcctaactttgatggctgcagttagggttatgcagttgttgggcactgcctaaaaaatgtacatcaggttaccggttcccaggacaccccacaattatccttcagtggttcagaagagaaagcctgggtaaagaacgtgtgggagctcggggtgacatacctgtatcgtagacacatttccaggatatgtgtgtaggagttcttgatctcctaggttccacagggtttctattggctcctttccccaggggaagctgtagtaaagtttgcttcccttgcgtcccaattcatcctgacaatcagcgctgctgaagttagagggactcatagcaaactgcaaaacaaagcgccccattgatttagtgaaatgctaatttatctatttatttttccttgagaaggtcctggagcttctagctggccaaagatctacctgcttctgctctttgaatgctgggattcactgacttctaattccacaggtctctctgagaattaaggttgcctgagacttttatccagcaacaggttgaaagtaagtctcaaacataaaggctcaggtacagtaacagcactcagcacatctgtaccaggagaacactgatatccactggtatgtgtcggatctgctattacaagttacgtctagcatcctgagagtgtagctcagcagagtgaatgcccagcacacgcaaggctttccagtttatatccaggaccgcaataaactgcaaacaaacgaactggaggggctggagattcacacctttaatcccgtctaaactaagaggattgccatgagctgtaggtccgactgagctgaaagtgaattccaggtcagcttgggttagaaggacgctttgtcacaaaaagccaaaattcgggccactgagatggttcagtaagcatgcctgccactcagacctgaatgtctgagttggatccctagaacccacagagtgcaaatagtattaactccgatctctacacatctgccatggcattcaggatgggctcgtccctatcccccccaaatgcagtaagtaatgtttttttttttttttttaaagatttattttgccaggtggtcgtggtacacactttaatctcagcactggagaggcaggcagatctctgtaaattcaaagactgctctacaaagtgacttcaaggacaaccaggcctagagaaaacctggagtggtgcgtgtgtgtcattttatttacatttacctgtctgtgtgctatatgtttacagaagccttcagaggccagaagaaggagtcagatcccttagaggtggagttacaggcagtgataagctgcctaacttgggtgctgggaaccaaattcttcctctagaataccactgaaccatctctccagctacacaataattttctttggaagaaactaaaactggcctggcagtggtggcacgctgcctttaatcccagcacttgggaggcagaggcacgtggatctctgcgttcaaggccagcctggtctatagagtgagttccaggacagccagggctacacagagaaaccctgtctggggggggtgggggggggggagaaaaaactaaaactaaaacacgaaacccaaaggtaaatcaagttctattcataagcccgatgaggtggagtatgtctgtaagtaagctcggtgctcaggaggcttagacataggaatccccaaactgggggtgatagctctcttcataatccctgagctcagacaagcagcaagttcaaggtcattct

SEQ ID NO: 3024 - DNA, 727 bp, Mus musculus
ctaaatcctctcatttcctgtgtgtggttgggaagaggaatctcagaagccgagccccattctgtagtaactcaattaaccatgggcgatggtgactcgccaatgtgcctctctgccgtttcattcaagggaataagatgctggctggacaaactgttactttgggctcttacaatttctatcacacttcagaatgctgcagtggattgtacgagggtggaaaataacgaattaccttctccaaatctgaactcaagtatgaacgtggtcaggatgggccaaaatgtatctctgtcttgttccaccaagaacacatcagtagacatcacctattcgctcttctggggtacaaaatatctagaaagcaagagaagacgagggggagctgtggatttccacctgaggatctccaatgccaacgagtcaggcccctacaaatgcaaagtcaatgtttccaacttgatgaaatacagtcaggatttcaacttcacaatggccagaaagaagactcagagagaggaccagtccaagggttctggagatgcgcctgcacaggacgagctgtatgtcaacgcctgcaagactcagacagagcaaccccaggagatacactatgccactccagtcttcaaggagatggcacccatggaagaagaaggtggtacggatggaaaagctgattacatctactctgaactcacccactgaagtgtgaagaaactgactg

SEQ ID NO: 3025 - protein, 235 aa, Mus musculus
LNPLISCVWLGRGISEAEPHSVVTQLTMGDGDSPMCLSAVSFKGIRCWLDKLLLWALTISITLQNAAVDCTRVENNELPSPNLNSSMNVVRMGQNVSLSCSTKNTSVDITYSLFWGTKYLESKRRRGGAVDFHLRISNANESGPYKCKVNVSNLMKYSQDFNFTMARKKTQREDQSKGSGDAPAQDELYVNACKTQTEQPQEIHYATPVFKEMAPMEEEGGTDGKADYIYSELTH

SEQ ID NO: 3026 - DNA, 841 bp, Mus musculus
ctaaatcctctcatttcctgtgtgtggttgggaagaggaatctcagaagccgagccccattctgtagtaactcaattaaccatgggcgatggtgactcgccaatgtgcctctctgccgtttcattcaagggaataagatgctggctggacaaactgttactttgggctcttacaatttctatcacacttcagaatgctgcagtggattgtacgagggtggaaaataacgaattaccttctccaaatctgaactcaagtatgaacgtggtcaggatgggccaaaatgtatctctgtcttgttccaccaagaacacatcagtagacatcacctattcgctcttctggggtacaaaatatctagaaagcaagagaagacgagggggagctgtggatttccacctgaggatctccaatgccaacgagtcaggcccctacaaatgcaaagtcaatgtttccaacttgatgaaatacagtcaggatttcaacttcacaatggccaaagatgagagctgcccttcatgccggctgtcactgttgctcccagggctgttactggggatactggtaatagtcctagttctggcttatttgattcatctaaaatacaaaaaaggaaagaagactcagagagaggaccagtccaagggttctggagatgcgcctgcacaggacgagctgtatgtcaacgcctgcaagactcagacagagcaaccccaggagatacactatgccactccagtcttcaaggagatggcacccatggaagaagaaggtggtacggatggaaaagctgattacatctactctgaactcacccactgaagtgtgaagaaactgactg

SEQ ID NO: 3027 - protein, 273 aa, Mus musculus
LNPLISCVWLGRGISEAEPHSVVTQLTMGDGDSPMCLSAVSFKGIRCWLDKLLLWALTISITLQNAAVDCTRVENNELPSPNLNSSMNVVRMGQNVSLSCSTKNTSVDITYSLFWGTKYLESKRRRGGAVDFHLRISNANESGPYKCKVNVSNLMKYSQDFNFTMAKDESCPSCRLSLLLPGLLLGILVIVLVLAYLIHLKYKKGKKTQREDQSKGSGDAPAQDELYVNACKTQTEQPQEIHYATPVFKEMAPMEEEGGTDGKADYIYSELTH

SEQ ID NO: 3028 - DNA, 39437 bp, Homo sapiens
  misc_feature (1)...(39437): n = A, C, G or T/U
tctgttgcccaggcgggagtgcagtggcatgatctcagcatactgcaacctctgcctcccaagttcaagcaatttttatgcctcaacctcctgagtagctgggattacaggcatgcacctccatggccagatatttttttaatttctagtagagacatggtttcaccatgttggccaggctggtcttgaactcctgagctcaagcagttctcacaccttggcctcccaaagtgctgggattgcaggcatgagccaccatgtccaaccatcttcttgtcttcttctgagccctccaaatttttccaacctctgcccattacccagttccaaagtcacttccatattttcaggtatctttatagcagtaccctactcctggtaccaattttctgtattagccagatttaacactgctataaacacctacttgaggnnnnnnnnnnnnnnnnnnnnnnnnnnnnnnnnnnnnnnnnnnnnnnnnnnnnnnnnnnnnnnnnnnnnnnnnnnnnnnnnnnnnnnnnnnnnnnnnnnnnnnnnnnnnnnnnnnnnnnnnnnnnnnnnnnnnnnnnnnnnnnnnnnnnnnnnnnnnnnnnnnnnnnnnnnnnnnnnnnnnnnnnnnnnnnnnnnnnnnnnnnnnnnnnnnnnnnnnnnnnnnnnnnnnnnnnnnnnnnnnnnnnnnnnnnnnnnnnnnnnnnnnnnnnnnnnnnnnnnnnnnnnnnnnnnnnnnnnnnnnnnnnnnnnnnnnnnnnnnacaaaggggaagcaagcaccttcttcacaaggcggcaggagagagagaggcagggggaactgccacactgccacacacttttaaaccattggatctcatgagaactcactatcacaagaaaagcatgggggaaccacccccatgatcaatcacctcccaccagatccctccttcaacacttggggattacaattcgagatgagatttaggcagggacacagagcgaaatcatatcattgggtatataaaattttcaaacagcatcatcatttgagctaaaacattttttttttttttttttttgagacggagtcttgctctgtcgcccaggctggagtgcagtggcgcaatcttggctcactgcaacctccgcctcccaggttcacgccgttctcctgcctcagcctcccgagtagctgggactacaggcgcctgccaccatgcccagctaatttttttgtatttttagtagagacagggtttcaccatgttagccaggatggtctcgatctcctgaccttatgacccgcctacctcggcctcccaaagtgctggaattacaggcatgagccactgcgcccagcaagctagaacatttttaaattttgtaattgttattgttcatcaggagttgaggatttaacaccatgaataatactattagtatgaagagaaattccctttttatggagaacatacgttacccagtggccatcaatttgaaagaacttattggaaaagttcaaggcccatgttaagtcatgccaggattcaaaagaccacaccatccacttctttttcttttcttttttttttttgagacagagtttcactattgtcgcccaggctggtgtgcagtggcgcaatcttagctcactgcaacctccgcctcccgggttcaattgattctcctgcctcagcctctaaagtaggtgggattacaggcatgtgccaccacgcccggctaattttgtatttttagtagagacaggttttctccatgtgggtgaggctggtctcgactcccgacctcaggtgatctgcctgcctcggcctcccagtgtgctgggattacagatgtgagcccggccatccatttctaaacatcaacaaaaccttggaaaatatgagaatggtgtgattaacaatttgtatgaaaacttctatctcttgataagtataagtagttttgtaatataggtcagttagagacaaagtgggggcagtggtgaaatctatttttaaatcttttatttatgtcttgagttatatatttatgttctcctactgattgttgttgttttttaatagagacagagtcttgttttgttgcccaggctggtctaaaaatcctggcttcaaggagtcctccagcctcagcctgccaaaggggtgagattacaggcatgagccaccttgcctggacagtaaatattttttataatacttctgcatttctcattagaagtttgtgaggattaaatgagattatcagtatgaatctcttagcacagcaaaaaggaatatagcaactttattgtgtgttactatatttaccgtcagtcttatcaatatggtaaattactgcagacctcaacaacatggatttggcatgattttgagaaatgtgtcaggtctatggggaaaatgttttctttttcaatttaagacttcacctctggtttattatgccacttttttttttgtagttgttgttgttttggttttggttttttaagacagtgtcttgctctgttgcccaggctggagtgcagtggcacaatcacagctcactgcagccctgatttgtcaggctcaagcaatcctcctgccatggtctcccaagtagctgggactacaggcacgtgccaccaagcccagttaattgtttcaattttttcaatttttttcaattttttttttttttttgtagagatggggtctcactctactacccaggctgatctcacactcctaggctcaaacgatactcctgcctcctactcagcctcccaaagtgcttggattacaggcatgagcccccacgcccagctgattaatattattccacttttgacaaatccgtcttccacggccttgctaaagcgctcctagcaatgtttgctaacagctgtaagcggtatttcccttggtttcctctgctgtctttggatcagatctgcggtcagcaagcttcctgcttgcagcagagaattctagacatgtcagctgttctgaaaggtccccagtcctcccaggcacgatggatctcaggggccccatccctccctctgcccaggctagcatggaggacacgctggtggggaaagtgtcttaactgtcatgcttacaaaacctccaattccctttagcagaaattctagcactgagagttatcccatcagagattaaacttgtagggttctttccatcctcgcttctttgctgagagaaattgccactgatgtcacagtatgaaaagcaccatgtcatctcttttagaagggaagtgcctgagaagtaatttttactgtaagagggaataaaggccttttgtgaactgagggttacagatgatttgctaccaggcagtggtggacaggtagggaggaagtgggatgagggcagcaggcccctggtggtggcagggtgtggcccctggggtggctgaccaccaggaggtgggccctggcgagcctggagtgagtcaacgctggggtggggaggatgtcctaggagaatctggacatgggcagagaactggctttcctacagagatgacacctgtctttggttttttttgttttttgtttgttttgttttgttttgagacagggtctcactctgtcacccaggctggaatggaatggcgtgatctcagctcactgcaacctctgcctcccaggttcaagtgattctcatgcctcagcctcccaagtagctgggattacaggcatgcaccacgcccagctaattttttatattatttgtagaggtggggtttcaccatgttggccaggctgatctcaaactcctgacctcagatgattcacacacctcagcctcccaaagtactgggattacaggcttgagccacctcgcctggcctgacgacacctgtctacaggaatgtgcaggacctacctacagggttaaccctgtgtggagacaagaatcagtaacccaggtgaccctgcctgatcatagggcttcctttcacttgggaagcccctcccatcatttcccacctcccacttcagactgatgagactggaatatgtggcgttactttgtgtacacttcagagagccaggagaattctggatcctgtagaagtgaaccaaccacaagctactccacattgttaatttagggattctgagacctcaagtcaagaaagttctgatcgtgggcactgggcagacagagacagtggaaaagaattgggagcccaggctatgacttcagacagatgaggaagttttgtttgttttatttttatttacttattctttatttttattttttgagacagggtctcgctcagctgcccaggctggcatgcagtggcaagtcatagctcactgcacccttgacctcccagactcaagtgatcctcctgcttcagtttcctgagtagctgggactacaggcgcacaccaccacacccggctaatttttatttttagcagagacaaggtctcagtatgttccccaggcgagtcttaaactcctgagctcaaatgattctcccgtcttggcctcccaaagtgctgggattacaggtgtgagccgctgtacccgacccacacagggtttgaatcccagccatgctacttcctagctgattttccccaaatgtataatggggacaataaccctctagagaattacaggagatcatgaggaaaaagcatttcacacaaggcctagtcaatacacaacagctgccactatgactatgaaccgaaattcatgataaactgcttctaacaatgcatgctatacccaacaaagaatgtatgcaggggacggggtgctaaagacattcctgggggcagggacaagcggaaatgaattatattcatgcctattggatattttctttggattttgtatgctgtttcgatttttataattttttttcttaaggaaaaaaacacatatttttttcttaaggaaatagacactggccaggcgtggtggctcacgcctgtaatcctagcactttgggaggccgaggcagggggatcacctgaggtcaggagttcgaaaccagcctggccaacatggtgaaaccccatctcaattaaaaataagaaataagccaggcatggtagtgcatgcctgtaatcccagttacttgggaggctgaggcaggaaaatcgcttgaactggggaggcggggaggcggaggttgcagtaggccgagattacactattccactccagcctgggcgacaaaagtgaaactctgtctcaaaaaaaaaaaaatagacactgttgttgcaagcctatgggttgcctgagggcaagtatgggctccaggtaggtcttttgaggaaaggatcttgttttttatctttcatgtaaaagttactttatctttctcaatacctcagtggttttgaacccaagcctctgggaaatgtcccaacctcctgtcctcactcagtgcaccatactaccaggnnnnnnnnnnnnnnnnnnnnnnnnnnnnnnnnnnnnnnnnnnnnnnnnnnnnnnnnnnnnnnnnnnnnnnnnnnnnnnnnnnnnnnnnnnnnnnnnnnnnnnnnnnnnnnnnnnnnnnnnnnnnnnnnnnnnnnnnnnnnnnnnnnnnnnnnnnnnnnnnnnnnnnnnnnnnnnnnnnnnnnnnnnnnnnnnnnnnnnnnnnnnnnnnnnnnnnnnnnnnnnnnnnnnnnnnnnnnnnnnnnnnnnnnnnnnnnnnnnnnnnnnnnnnnnnnnnnnnnnnnnnnnnnnnnnnnnnnnnnnnnnnnnnnnnnnnnnnnnnnnnnnnnnnnnnnnttcgagaacagcctggccaacatggtgaaaccccgtctctactaaaaatacaaaaattagccaggcgtggtggcaggcacctgtagtcccagctacttgggaggctgaggcaggagaattgcttgaacccaggaggcagaggttatagtgagccaagatcatgccgttgcactctagcttgggggacaagagcaagatttcatctcgaaaaaaaagaaagaggagctagaataagaaaataaaagctggagagaatgtggagaaataggaacgcttttacactgttggtgggagtgtaaattagttcaaccattgtggaagtcagtgtggtgattcttcaaggatctagaactagaaatatcatttgactcagcaatcccattactgggtatatacccaaaggattataaatcatgttactgtaaagacatatgcacacgtatgtttattgtggcactattcacaatagcaaagacttggaacccacccaaatgtccatcaatgatagactggattaagaaaatgtggcacatatacaccatggaatactatgcagccataaagaaggatgagttcatgtcctttgcagggacatggatgaagctggaaaccatcattctcagcaaactatcacaaggacagaaaaccaaacaccacatgttctcactcataggtgggaattgaacaatgagatcacttggatacagggaggggaacatcacacactggggcatgtcggggggttgggggttagggaagggatagcattaggagaaatacctaatgtaaatgatgagtttatgggtgcagcaaaccaacatggcacatgtatacctatgtatcaaacctgcacattgtgcacatgtaccctagaacttaaagtataataataaaaaaaataaaaataacattctactctccagatatagctattgttaacattttgagaaaatatccttccagatagtttttctctttctttctttcttcctttcctttcttttccttttttaatttagagacaaagtctcattatgagtctcccaaagtgctgagaatacaggcatgagccactgtgcccggcctccagatagtttttctatgtatacaaattatgcactttcttatttagaaaaatgatttatgttattacaactgttaataataccttttctcttttcttaagtatattgtgattctcttaccacatcatgaaatgttcttctacatcaccattaaaaattcttttttttttttttttgagacagtgtctttcaaaagtgcagttctgaatcaaggcagccttgaagtcttgttattatggcaagccctccagtgccaggagaactgaggtaggagtaaactcagatcagcctttgaaatagaatgtgtgaggccaggtgcagtggctcatgcctgtagtctcagcactttgggagactgaggtgggtagatcacttgagatcaggaatttgagaccagcctggtcaacatggcgaaacctcatctctagtaaaaattaaaaaaattagctgggcgtggtggcaagtgcctgtaatcccagctacttgggaacctgggaactgtggaggttgcagtggcccgagatggcgccactgcagctattactccagtttgaaaatactagaagttgccaatatatattttttccattgccagacttgtctgcaatttgtactggatctgatagagaaaccatttccatgggtctatatgaaaatgtggagccgggggtagtggctcacgcctgtaatcccacaacttcgggaggccgaggcaggcagatcacctgaggtcaggagttcgagaccagcctggccaatggggtgaaatcccgtctctactaaaaatacacaatttagccaggtgtggtggcacgtacctgtaatcccagttacttgggagggtgaggcaggagaatcccttgaacccaggaggtggaggttgcagtgagccgagatagcgccactgcactccagcctgggcaacagagcgagactccatctcaaaaaaaaaaaaaaaaaagagagagaaagaaaatgtgggtgcggggaatgattctatggttgtctgttcttttccagctggccagcagtggtagccaaaaagtgacaggatgctgatgaaaaacattgcagacgtgaagaaaagaaaaagttgatggaattttgcacatgtatctgacagttcacccatccaaacttttataaagtgctgtaaagttgttgtagtaagggttgggcatggtggttcatgcttgtaatcctagcacttttggaggccacacgcaggagaatcgcttgagcccaggagttcaaaaccagcctgggcaatatagtgagacttcatctctataaaaaagttaaaaacctagtagtgtatggtggtttgtgcctgtggtcccagctactagagaggctgaggtggaaagatagtttgattctggtaagtggagattgcagtgagccaagatggtgccactgtgctctagcttgggagacagagcaagattcagtatcaaacctcctagctagaggatgctagctaggtgacgctgagtcaataaggaaggatttggttacatcttgggacctaaggtacagagatgaatgtcccagctcaaggctgccccagccattcaactccttgcttcctctcttggtggacctgtcaattcttgcaagtgtcaaccagctgtcttgcccacctagccctatagtcatacctttctatccttttggtgatctccactccatcaagaagtggctctgcacattctatttcaactgactttttttttttttttttgagacagagttttgctctatcacccaggctggagtgcagtggtgcaatcttggctcactgcaacctccacctcccgggttcaaacgattcttctgcctcagcccctcaagtagctgggattataggcacgcatcaccacacccagttaagttttttgtatttttactagtgatgggatttcgctgtgttggccaggctggtgtcaaactcctgacctcgggtgatccgcctgcctcagccttccgaagtgctaggattacaggcatgagccaccgcacccagcctgcacgttctatttcaaaggctgatctaaggtaactcctacttcagatctcctggcactggagggcttgccgtaatatcaagtccccaaggctcccttgattcagaaatcactgaggcagcagcaccttgtacagatatttctcagccttcactgtgcgtaagaattgctcagggcccttgtttaaaaaaaaaaaaatcagcgtcctggacttgaaacccagtaagtctggagtggggtctaggaatcaacgtttaacaaaagcaggcatttttggccaggcacagtagctcacacctgtaatcccagcactttgggaggctgaggcgggaggatcacttgagctcaggagtttaacaccagcctgggcaactagacccctgtctttacaaataaaaataattagccagtcctgatggtgcacacctgtggtcccagctactcaggagcctgaggtgggacgagcacttgagcccaggagtttgaggctgcaatgagctatgatcacagcactccactccaacctgggtgacagagtgaggccagtctcaaaaaaaaaaagcaggcatttttgatacaatatttgtatgtatctgcttaagacagtcggtttgcttccaaagactaaatcaaacttccaccaaactccttttggcannnnnnnnnnnnnnnnnnnnnnnnnnnnnnnnnnnnnnnnnnnnnnnnnnnnnnnnnnnnnnnnnnnnnnnnnnnnnnnnnnnnnnnnnnnnnnnnnnnnnnnnnnnnnnnnnnnnnnnnnnnnnnnnnnnnnnnnnnnnnnnnnnnnnnnnnnnnnnnnnnnnnnnnnnnnnnnnnnnnnnnnnnnnnnnnnnnnnnnnnnnnnnnnnnnnnnnnnnnnnnnnnnnnnnnnnnnnnnnnnnnnnnnnggggagtggcaatctaccaaatatctctcttcttataggaactcacagaggaagacagattggtcgaacaaaccagtattatgcaaacctcatccaaaccctctgatttccttaacttggctaagaaaaagaggaagttctccgagtgactcaccactgtggttctactatgccttctgaccccgtcttggacttcaactgggagaatgtggagccatttgaacaggctcctcttctggagcatattttcttctgtcacttgtaagccccccttatcattctgaggctcgaacctccaagccaacgtgtcatgtggaaagtgagctttatcgtgttccttttctgtttcaggtagaaaagctgtattggattgtgaggcaatgaaaacaaatggtaagtttcatttacttctttcttattgaaaccattttcactgaagtggtgagacagtctgattgcaacataagcgtccattcaaaagtgtttctgagcttttatgaacaaccaaagaacagtcttttcaattatctatcatttaaaataaaatgattttagggaggggattgcagcatttttttctgagactcagtgagaaaaataatgaaatttgttttcacaatgaaagttttctaactttccttgttattgttgttttatggttgttgtgttttaactagaaagccaacacacaggctgggtgtggtgcctccggcctgtaatcgcagcactttggaaggctaatggggtaggattgcttgagctcaggagtttgagaccagcctgaacaacatagtgatacctcgtttcttaaaaaaacaaaacaaaataaaaaaacccacagaattattgtgaaataattcaagcaacactagaaatatacattgggaagtggtctaacctctggttctactagttactagccagcagcctgagctcatgacatacccagtttgaccttaatttctttctttctttctttctttctttttttttttgagatggagtctcagtctgtcgcccaggctggagtcagtggtgcaatctcggctcactgcaacctctgcctcccaggttcaagtgattctcctgcctcagcctcccgagtagctgggactacaggcgtgtgccaccaagcctggctaatgttttgtattttttgtagagacggggtttcacatcgttagccaggatggtctcgatctcctgacctcgtgatccgcccaccttggcctcccaaagtgctgggattacaggcgtgagacactgtaatttatttcatctgtgaagtgggctaataaaagcacctacctggtaggctagtgtgcagatcaaatgagacaatccctgctcctcgtcacagtgccaggcatatggtaaaccatccgtaagtgatagccaaggtggtggttgttactgtataaaatgtaaaagttctgttacaatcctcctccaatccttctccccttcctatccagaagcagccgttatcaacagtcactttatattcgttatctttttttgtttgtttgtttttgagacagagtttcactcttgttgcccaggctggagtacagtggcacaatctcggctcactgcaacctccgcctcctgggttcaagggatcctcctgcctcagcctcccgagtagctgggattacaggcacgtgccaccatgcctgggtaatttttgtattgttttttggtagagacggggtgtcatcatgttggccaggctgttcttgaactcttgacctcgtgatcctcctgcctctgcctcccaaagtgctggggttacaggcatgagctaccacaccagccttagctcctctttttcaacagctgcatggtattttaagactcagccatgattcgtttaaccatccttatttattgccctgctttttgggggcaatataaacaatgctacaataaacatccttgtacacaacgtcctttgtggatgcatgagagcttgaaagcatctctgtagaatgaaattctagaattgaaattgcaaggtcatagggcatacacatttaaattgttacagaccctgctaagttgccctcccaacaaggctgatcgtatcctatcagtcaccaacggtgggtgagtttccccacccactccccagtggtggatataatcacttttacttttaaattttatttagggttttttttttctttctttctttgagacagagtctctgctctgtcgcccaggctggagtgcagtggtgcgatcttagctttccgcagcctcgaccttccaagctcaattgatcctcccacctcagcctcctgagtagtgccatacaggtacgcaccatcatgcccagctaatttttgtatttttagtagagacagggtttcaccatttgcccaggctggtctcgaactcctggactcaagagatcnnnnnnnnnnnnnnnnnnnnggtttttcctgcctcagcctcccaaattgctgggattacaggcatgagccaccatgcctggccaatcatttttaaactttgtaccaatctgatgagtgaaaaatgatatctcagtgttgttttaatttgcagttgcctcattacttgtgaagttgagcatctttttcatgtttactggccacaaaagctctagcattcctagataaaaaaaacttagggatggctatttggttggaaaggtagtttaggtcttgtcttaaagttgagtttatatggcggggcacagtgactcacacctgtaatcccggcactttgggaggctgaagcaggcagtcacttgaggtcaggagttcccccccaccctggacaacatggtgaaaccctgtctctaccaaaactacaaaaattagctgggcatggtggtgtgtgcctatagttcagctactcaggaggctgaggcaggaggatcagttgagcctggaaggtggaggctgtggtgagtcaagatggtgccactgcgctccagcctgggcaacagagtgagactctgtctcaaaaaaaaaaaaaagttgagcttatataagactgagaaaatgttaattgtccagatcaaagagtgggaggagagtttactgcatttttaaaagcatttttgaagagtctaaatctgtcttccacccaagccatccattggtcccagctatgttttttttttttttttgttctgttttgttttttaaaaattagagacgaggtctcacttgttgcccaggctgttctcgaactcctgacctcaagtgaccctcccaccacagcctcccaaagtgctaggattataggcgtcaaccaccacacccaacttcaagaactttttatttattattatttttattttttgaggtagtctcactctgtcacccagcctggagtgcagtggcatgatcttggctcactgcaacctccgcctccctagttcaagcaattctcctgcctcagcctcctgagtagctgggattacaggtgcccaccaccatgccagctaatttttgtatttttagtagagacagggttttgccatgttgcccagactggtatcaaactcatggcctcaagtgatccacctgcctcggccgcccaaagtgctgggattacaggcgtgaaccaccttgcccggccaggatcttaagaaggactttttcttgtgtcattttgtttttcagaattcccttctccatgtttggactcaaagactaaggtggttatgaagggtcaaaatgtatctatgttttgttcccataagaacaaatcactgcagatcacctattcattgtttcgacgtaagacacacctgggaacccaggatggaaaaggtgaacctgcgatttttaacctaagcatcacagaagcccatgaatcaggcccctacaaatgcaaagcccaagttaccagctgttcaaaatacagtcgtgacttcagcttcacgattgtcggtaagtagagtgcctgttccttggagcccctataatttatagggtgctttctggttctatgaggggctctccatgatccttgtgaacacttaagaacctggaaagtatgttactgcgagctttattctttttttattttttatttatttttagacctggtcaacaggaagtatcttttaatttttnnnnnnnnnnnnnnnnnnnnnnnnnnnnnnnnnnnnnnnnnnnnnnnnnnnnnnnnnnnnnnnnnnnnnnnnnnnnnnnnnnnnnnnnnnnnnnnnnnnnnnnnnnnnnnnnnnnnnnnnnnnnnnnnnnnnnnnnnnnnnnnnnnnnnnnnnnnnntttttacttgagacgaggtttcaccatgttggtcaggctggtctcgaactcctgacctcaggtgatccgcctgcctcagcctcccaaaatgctgggattacagatgtaagccaccatgcccagtgagttctctattcttaatcattccgtttcaccttctctttcaaagactttcgaccatgtcagataatagtcttatatctttaggcaaaagtcttatatctcaacaataattgtggaggtcttttctagaaactttattctgtgattcccattgtgtgggcaaaaatcgctttttttttttttttttttttctgaagccttgggccccttggagagggtcttcaaagcctcacgcctttcccaccgcttccttagtgtcaggggccccatccgctagcactcttcctgcctagccacatctcactacttctgtgtttttctgtcccattttcctaccccaagcctgttactgcctagcattaagggcctcatccgtgaaggtgaccttgataatggactcctgtgggaggagagaaggcttctaggtaacacatgtatgttatacctggagtcttcaaagcgtagggaccctgacttcctgataactcttgagtggtcctctatgtctatgctatccagtacggtactgtttaaacttatttgtttattttgttttattttatttctttttttctttttttgagatggagtctcgccctgtcacccaggctggagtgcagtggtgcgatctcagctcacttcaacctccgcctttcgagttcaagcaattctcccacctcagcctcccgagtagctaggattacaggcatgcaccaccatgcccagctaatttttgtatttttaatagagatggggtttcaccatgttgaccaggctggtcttaactcctgacctcaggtgatccacccacctcagcctcccaaagtgctgggattacaggcatgtgccactgctcctggccaacatttatttatttaatagcctatgtcacccaggctggagtgcagaggctactcacaggcaatcaaagcccattgcagcctcaaactcctgttcttaagagatcctcccacctcagcatcctgaatagcttggattacaagcacgtgccataattaaaatcaagtcaattaaaattagatgaaataaaaaatttccctccacagtctcagttacatttcaaggctttgatagccacacctgtagctggtggctgccacattggacaacacagatgtagaccattcccatcatcacagaaagttctactgggtgacattgctgtagctcagtgattcttagctttttaggttataactgtcttaataatccaatgatagcaatgaatatcttctccagagaaatgctcataaaactacgtatacaaatttctgcataaggttttagagaatgctacggactccaggttagaaccaattatcttggccaggtgcgctgtctcacaggtgtaatcccagcactttgtgaggctgaggcgggaggatcacctgagcccaggagtttgagaccagcctgggaactatgtggagactgtgtgtctacaaaaagttaaaaaatatatatatgtagctgagcgtggtggcgtgcctatagtgccaactactcaggaggctgagttgggaggattgcctcagcccaggagttcaaggctgcagtgagctgtgattgcaccactgcactgcagcctgggtgacagagagagaccctgtctcaagaaaaaaaaaatcccaatgatctttggacataaactgagtatattccttgtgaaaggaaaaggaagaaggagggggaaaatccctgcaaacatggtactggaatacgatggatatgtgagggcaggaacacagctgatggtattctctagtggtcagactcctgctgcactcagcaataagcccatcagttcatatgttttttgtgcacgaccttcctgcaatttgttagggtaattacacagtctggtaataaaactatcttggtagattataaaactgtatcatcttcagttaggccagatcaataggcactacggagtacctactccatgcaagcaattgtactactgggtttttaatgaggcctaaaacatagtgttgtctccaacccagtaagggttgaaactatgagccataaacacaaattcattaatcactgattcactcatcaaaaaaaaattttttttttgagatggatcttgctctgtcactcagctggagtgcagtggcaccatctcggctcactgcaagctctgcctcccgggttcacacaattctcctgcctcagcctcccgagtaggtgggactacaggcgcctgccaccacgcctggctaattttttttttttttgtatttttagtagagacggggtttcaccatgttagccaggatggtctcaatctcctgacctcgtgatctgcccacctcggcctcccaaagtgctcactcatcaaatgtttaaagagaacacagggccggctgcagtggctcacgcctgtaatcccagcactttgggaggttgagtgggggcagatcacttgaggtcagtagttcaagaccagtctggccaacatggtgaaaccctgtctgtactaaaaatacaaaaattagctaggcatggtggtgggcacctgtaatccccagctacttgggaggctgaggcaggagaattgcttgaacctgggaggtagaggttgcaatgagctgagatcgtggcactgcactccaggttgggtgacagagtgagactccgtctcaaaacagaaaagaaagtaaataaaaaaaaaattgtttttaagtgtggactcttgaagtcagtcccaactcggccatttactagctgtgtgaccttgggcaaatttctcaatctctctgaagcacagttggttcatctgtggaatgggcatgatactatccacactacaagactgtcgtgaaggtcaaatgagatcatgtgactggcacgcctggcacatgatagatacttaacagcttttcttcctttcctataatactgtcttattaatgcattatatatatatataataaaatgtatagctgggtttttctgttaggtcatagaataggctatgatctaacagagtgtagcagacccatttcctgttgagaatttctcttgaatctagttagcagggttacttcctgctctttggaggaagtgaaagataattgtgcagctgagttctataaataaaagtacagttggagaaaacgatatttttggggctgggcatggtggctcacacctgaaatcccggcactttgggaggctgaggtgggaaaatcacttgaagccaagagtttgagaccagcccgggcaacatagtgagactctgtctctacaaaacatttaaaaattagccagcagtgtgcacctgtagtcccagctacagaggctgaggcaggaggatcacttgagcctgggagtttgaggttacagtgagctataattgtgccacttcactccagcatggttgaaagagcaaaaccctgtctctgaataaataaatacattgaaaagaaaatgatatttttggattaaaaaaacccactgtaaatttacaaggattgagaataaaagcacttcttgggccgggtgtggtggctcctgcctgtaaccacagcactttgggaattcaaggtgggaggatcacttgaggccaggagttcaagaccaacctggccaacatggtaaggccctatgtctataaaaaataaacataaaaaagcacttctcagcttcatacttagaactggatcattgacaaaattatattcattattaacaataaatagattgtgaattctaggaagggcaagcttgcaccccaattcctcaaagcagagagatgccctccactctctggctttctcagcactcagctgagaacctcggctaacaacacactgcacggggttggccacatgcccattggcctttcccagtgggccgtgaacttcttgacttctcaggaagggggtcgttcatcttggttccacagcctggagtggagtaagggttccactcatatttgtggtctgagtgagcacacccagtctgtttatccttttcatgttcactttcattcttccagacccggtgacttccccagtgctgaacattatggtcattcaaacagaaacagaccgacatataacattacattgcctctcagtcaatggctcgctgcccatcaattacactttctttgaaaaccatgttgccatatcaccagctatttccaagtatgacagggagcctgctgaatttaacttaaccaagaagaatcctggagaagaggaagagtataggtgtgaagctaaaaacagattgcctaactatgcaacatacagtcaccctgtcaccatgccctcaacaggtaagagcaacctgagttctttcagccaggtctgaactcacttccagaaactgcagctgctcctctgcccacccatttcccaccatggccacctgaccttccaggtccttctgaaggtgcatttgtcaaggtagaaggatagaaggaaaactaggtcgtgtgcagtggctcacacctgtaatcccagcactttggaaggttgtggctggcagatcacttgaagggtctctttggtagagtccatgcaaactctcatggggttgctttctgccataaaggaaccacagaaaggcctagaaactggagcaggagggggacttgtggcaaaactttctgccctgcctttccaatttgcatctgtcttagaactgccaggtcttttagttttctttgttttttcatcatttgtatgtctgcctttctttcttttccttccttccttccttccttcttgtatgcctgcctttctttcccttccttccttccttccctccttccttccttccttctttccttccttccttccttctttcttttcttttctttttttcagagtgtcactctgttgcccaggctggagtgcagtggtgtgatctcagctcattgcaacctttgcctcccaggttctagagattcttgtgcctcagcctcctgagtagctgggactacaggcacccgccaccacgcttggctaatttttgtattttcagtagagacgggttttcaccatgttggccagactggtctcgaactcctggccccaagcgatctgcccacctcggcctcccaaaatgctgggataacagctgtgagccactgtgcctggccatcttgtactgatttctaataccatgccctcctgcttggctgtttattgctccactgctaatgatgatgggtccagactcctgcaccacccttggctcagggcaagagaggcctctggccaagccctgtgtttagtgggctctggtctggtacctccaggctatgcaccttcccctaggctgaggggttcagggagccgtggggatgcagccacctgaaccctatactcccacttttctgctccacactctaggtacctggaccaaaatcccctgcccaatcagatcagaagccatttccagggcctgtaccagtctctcccccagctcatcctcccgagggtggcccacagtaagggtatgagcatccctgaacctgagccaagggagctgtttatggggggtgtggatggtgtttgcacatgtgggctggggcgtccacgtgcatgcaaggccccttagggtgcaggtcagagcccaggtcgggagcggggcagcccgggacttcagtgggttctgtccatgctgccacgtcctgatgccaaactctggaaagtctgagaattccagattcaaacctgaccttccaggtccttctgaaggtgcatttgtcaaggtaggaggatagaaggaaaactaggtcgtgtgcagtggctcacacctgtaattccagcattttggaaggttgtggctggcagatcacttgagcccaggagtttgagaccagcctgggtaacatggcaaaacccctgtctctacagaaaataaaaaaattagccgggtgtggtggtgcatgcctgtggtctcagctactcagaggatgaggtaggaggattgcttgagcctgagaggtcgaggctgcagtgagctgtgatcatcgtgccctgcattccagcctgcgtaacagagcgagaccctgtctcaaagaaaaaagaaaaagaaaaagaaagaaaagaaaaactaggttagcaaaggcacaaggcacacttggacattgaccacttcacccagccaggtcctcagaacagagcccacgccctggtattcagtgagtgtggtctaacaagtgaggcagcctgctggagtcaggcacttggctatgagtcacagcccttccattcactggctgtgtgaccttaggaaagtcatttcacctccctgagccttactcacctcatctataaaatgggagtgatgccaatgggataaataaggcaacacaggtgaagtgcctaacacagtgtctggcctgcagctaaaactcaacaactggcagttgtttggatgacacgaaacatgctgccagggctcagggccttgcccagtaaacacccaggcttttctggtgctcatgaccccagaaatgttgctggtattcgtcctgttaaattctgtgctgcttttctcttctttgggtggcccctgtggaagatgtgcttggtcatgactttttaaactttattattatttttttattttattttatttatttatttatttatttatttatttatttatttatttatttgagatggagtctcactcacccagtctggagtgcaatggcacgatctcggctcattgcaacctccgcctcctgggttcaagcgattctcatgcctcagcctcccaagtagctggaaatacaggcacgcgccaccaggcccagctaatttttatattttgggtagagacagggtttcaccatgttggccaggctggtctcaaactcctgacctcaggtgatctacctgccttggcctcccagagtgctaggattacaggtgtaagccactgagctcaacctatttttgtttatttattaacttatttatagagacagggtctggttctgtccctcaggctggagtgcagtggcacaatcatagctcactgcagtctccacctcccgggctcaagcgatcaccctgcctcagcctcctgagtagctgggatcataggcacatgccatcacacctggctaatttttatttatttatttattttgtagaaacagggcctcactatgttgcccaggccggtctcaaactcctggcctcaggcaatcctcccaccttgatctccgaaagtgctgggattacaggtgtgagccaccacgcccagtcaagaactttattgactaataagtcccgtgagttttagatgtcatgaccatttgggaacctgggtgcatagtacattggttaacttgggagacatcaccttttctaaaacacttactggcttaatgtcattggaaaagaaaatgctatggtcaccaatggatgcggtcttcttccaggcggagacagctgtcctttctgtctgaagctactacttccagggttattactgttgctggtggtgataatcctaattctggctttttgggtactgcccaaatacaaaacaagtaagttcttttagtcgctttaccacccgttttcccgtgggcttgggatacagacagcaggacagagggtgaggagaaagagaaaaggggattggaaatagaatagggagaaaatgaaaataggaggaaaacatgagaaaggggggcgggaatggaatagacttcctgaacggttcatgcagagggtaattctttctccagggaaagccttttctgtttgagggcaagcagagctggcttcacagacgtacagcctgtgctgtcacacagggccctgtgccaagaagaactccacatttggtatttgtttatttatttatttatttatttttgagacagagttttgctcttgttccccaggctggagtgcagtggtacgatctcggctcactgcagcttccgcctcctgggttcaagcaattctcctgcctcagcctcccaagaagctgggattacaggtttccgccaccatacccagctaattttttgtatttttagtagagacagggtttcaccatgttggccaggctggtcccgaactcccagcctcaggtgatccacctgcctcagtttcccaaagtgctgggattacaggtgtgagccactgctcccggctgcatcttgaaattcttcataattttttgtacgctcttttaaaaattgttaatggtggtaaaatatacataacactaaatgggccactttaacctgcttaaatgcatagttcggtggcattaagcacgttcccattgtcatgcacccttctccaccatccatgtccagaactttttcatcttcccaaactgaaactctgtccccattacacactagctccccatcccctcttcccccgggctctgccaaccaccattctgctttctatctccattagtttgactcctctaggcacctcatggaagtggaagcatttatcctttcataactggcttatttcacttcgattaatgtcctcaaggttcatccatgttgtcatatgtgtcagaatttccttccttgataagactgaagaatgtcccattgtacataaatacgccacactttgtttatccatttatcccccatgggtacccgggttgcttccaccttttgtctattgtttaataatgctaggaacgtgggtgtgaaattattaatgtttttaaacaagaggcccttttcctcgtatgactgcttgtgaaagatgtactcggtcctgactttaagaacttgtgttcctttttttctctctctctctcttctttttttattctatattaaatggagacggggcctcactatgttgcccaggctggtctcgaacacttgggctcaaacaatcctcccacctcggcctcccacagtgttgggattataggcgtgagccactgtgccgggccaagaacttgtgttcttaattaaacacaagtttaaggcctgtgaacagtgttcatttcgcactgggcgctgcaagtggtgcggctgctcctgactgcaagtgcctcaagcgagagctttgccttgagtgactctagatctgccacatacgtaggggaggttcagtgcatgaggacaaacaagcgtcatcccattagcacaaaagacaccttcaaaaggtttacaattgtttggggctggaagtattgaaaatattaggttggtgcataagtaattgcaatttttgccatacttttatggcaaaacccacaattactttttttttttttttgaaatggagtctcgctctgttgcccaggctggagtgcagtggtgcaatctcggctcacagcagcctctgtctccctggttcaagcgattctcctgcctcagcctcctgagtagctgggattacaggcacccaccaccatgtatttttagtaaagacagggtttcaccatgttggtcaggttggtcttgaactcctgacctcaggtgatctgctcgcctcagcctcccaaagtgctgggattacagatgtgagccattacgcccggcccacagttacttttgcaccaacctaatatatacatattttttatttctacatttctatgctttctagattttcaatgtagaagtataatctattctactataagattttttaaaaaactttattaaacacaccagactcaaaaaaacaaaaacagaaacaaaaaagcatcatttctctcttccccaccttaagtgctacatccagcagaaaacttgtcaatgttattagaagcctcagttacagcttttttaaaaaaatgttttttagagacggggtctcactgtgttgcctaggctggtcttgaactcctggactcaggcgatcctcccacctcagcctcccaaagtgctgggattacaggcatgagccactgcactcagcccagttactgcttttcattcctcacgtcttatggccaccactggttaagccttcaaagtggttttttcatttggtacacgagtgcagaaggatatgaagatttacacaaaagacagtttgggtctcagcactggcccccatcagcaagctgagggctgttggacaagcccctcaggctgttgcttctgagcctcagtgttctgagttgtggaatgggccatggagatattgtcagaactggcaagagaaccaattgagaaccatctccagagagtcacaactcagagaagtcagggactcagttgacataaaacttgaacacagaggtcacaagttatacatctgatgcatctttaagattttattttatttcatttcttttttttagagatggggcttcactgtgttgcccaggctggagtgcagtggtgccaccatagctcactgtaacctcccaccttagcctccctagtagctgggaatacaggtatgcaccacaactcctggctaattttttttttttttttttttttttnnnnnnnnnnnnnnnnnnnnctcactgcaacctttgcctcccaggttcaagcgtttctcctgcctcagcatcctgagtagctgggattacaggcgcccaccaccacgctaggctaatttttgtatttttagtagagatggggtttcactatgttggccaggctggtcttgaacttctgacctcgtgatccgcccaccgcggcctcccaaagtgctggggctggtgagccaccgcgcctgacatttttttttttttttttttttttgagacaggatctcacttccatcacccaaggctggagtgcggtggtgcaatcatggctcactgcagccttgacctcccaggcctcctcctgcctcagctacctgagtagttgggaccacaggcgcgcaccaccatgcctggctaattttttttttttttgtaggtttcaccatgtttcccaggctagtcttgaactcctggactcaaaccatcctcctgcctcagcctcccaaagtgctgggattacagttttttgttttttttttaattacaaaattctttttagagacaaggtctcactatgttccccagggtggtcttgaattcctggcttcaagtgatcctcccacctcagcttcccaaagcactgggattacaggcgtgagccactgcaccctggcccacatctcatatgtcttaaaaacatgtttctccttcttataaaaagtccaggttcttgcaaaagtggcattaatatttttgattactggctggagctacaatagaattcagtgaggctggccgggcacagtggctcatgcctgtagtcccagcactttgatcacctgaagtctggagtttgagaccagcctggctaacatggtgaagccccgcctctactaaaaatacaaaaaattagccaggcattgtggcacatgcctgtaatcccagctattcaggaggctgaggcaggagaatcgcttgaaaccaggatgcggaggttgcggtgagcggagattgcaccatggcactccagcctgggcaacagagcaagactccgtctcaaaaaaatacaaaaattagctgggcatggtggtgcacaactgtaatcccagctactcgggaggctgaggcaggaaaatcgcttgaaaccaggatgcggaggttgcggtgagccgagatcacgatagtgccactgcactccagcccaggcgacagagcgagactccatcttaaaaaaaaagaattcaataggccatttacactctcttgaagatattacaaagcttccacagactattctcttcagcgaaggaaagaaaataagtctggctagttcaggcataatctgataggcaaagcatgttcctctgaaggccaggaaaataaatcagaacagcccctggcttggaggagcggtgtctagactccctgttgagtctatagttttcctttgttagacaacagtttgggccattggagcaagtcactctctgtttcagaactttgagggaattctgctccttggccgaggagatgagaaaaatgtggctgaattggtttaatttgatgattcctacctatttacgtaggaaaagctatgagaaataatgtgcccagggaccgtggagacacagccatggaagttggaatctatgcaaatatccttgaaaaacaagcaagtaagagaactttgttgcgtgttttgggtggtttcaggtttttgtctttttattttgttaaggttgtacagacatacgggagtggggggtggagcaaaagggatagagttcaatgtctattgatgcccagtcccactttctaggggtaataaccagttttttaaatccttccacagatattctgtgtgtataataaacaaatggtagtgattgtagcatattgtaggtatgactttctacaccatgattttgtttttttttcatgtaacaacgtatcttggagatttttcacatctgttcagaatgatccacactgtgtttcacagtctttcacggtcacctctcaaagcaggcattgcatattgctttgcagtaaacaagacccagcgcctcggctgatgtattagtccattctcatgctactataaggacatacctgagatggggtagtttataaaggaaagaggtttaattgacccacagttccgcagggcttgggaggcctcgggagacttacaatcatggtggaaggggaagcaaacacatccttcttcccaaggcggtaggagagagaagaatgagagccaagggaagggggaaaccccttataaaaccatcagatcttgtgagaactaactcactgtcactagaagagtatgacagaaaccacccccatgatttaattatctccacctggtccctcccatgagatgtggggattatggggactacaattcaagatgtgatttgggtgaggacacagtcaaaccctatcatcagctgacaatggaacagtcccagcctacatggccacattccagacgcattgctgagcaatttaccgaccttttctaacacaaacgccaccaacccccaatttatgtcattctcattttacagaggaggaatctgtgccagaagtgggatccaggccgtgtgtttccacagcccaagatggtgagcatgttctgcagagtctattccactgccctcatgcgcttagaaattcacataattggcccaataattcctattccttatcttttgcccagaggccaaacactcccaggagctacagtatgccacccccgtgttccaggaggtggcaccaagagagcaaggtgagccacaggttgggataagaggtactggtgaaatgagacaggtggtccctctgatgtcattatattcaggggcttcaggagcccgttaatggggtggatgggagcaatgcaggcacactgcaaggaaccaatggcaaccagcaccccagctcctaaaaaaatctcatcaggagatggagggtgaggaagagggaaagatgtggtgggggaatgtcatagaaaaaaaacccagagaggaggatacaggatcactactcaaacatttccttccttccttccttccctctctccctccctccctctctctctttctttctttctctttctgtctctctttattttttctttttctttctttctctttctttctttctttctttcttctttctttcttttctttctctctctctctctttctttttctctttcttttctttctttcctgcctttctccttttttttgagactctcactctgttgcccaggctagagtgcagtggcacaatctcagctcactgcaccctctacctcttgggctgaagcagtcgtcccaccttagcctcctgagtagctgggactacaggtgtgcaccaccatgtctgactaattttttttttttttttggatagagacaagtatcttgctatattgcccaagctggtcttgaactcctgggctcaaccaatcttcctgcctcggcctcccaaagtgttgggattacaggcatgaggcattatgcccagctaacattttcaagaataaattatttaacacagtccaggaaaaaattagttaatacctggttctgtcaggccacccagctactagaaataggatttttaaaaacagccttgctggtcacatatcctaagtaaattattttcccttttatatttcagaagcctgtgattcttataaatctggatatgtctattctgaactcaacttctgaaatttacagaaacaaactacatctcagggtaagatgctttttatgaagctgatttccatgaacaaaaagcaaacttgaggctgaggcaggtggattacttgaggtcaggagttcgagaccagcctggccaacatggcaaaaaccccatctctactaaaaatacaaaaattagccaggtgtggtggtgtgtgtgtgtagtcccagctactcgggaggctgaggcaggagaatcacttgagcccgggaggcagaggttgcagtgagccaagatcgtgccactgcactacagcctgggcgacaagagcaagacttcatnnnnnnnnnnnnnnnnnnnnaaaaaaaaaaaaaaaaaaaaaagatattgatattcattgatgttcatgatttagctagccctccagatttagctaatgccaaaggtgtgccttgatgtgctgccagggagagagcccacagagttgagttgtgggggagggagaatgttttagtcccctagggctgctgccacaaatgaccacaagttggtggcttagagcaaccatttctgtagagccatgctccctccaaaagttgtggggaggaccctccttgcctcttccagcttctggggctccagacattgcttgtggttgcctcccttcaacttctgcctctgtcttcacgtggccttttatattctctcttgtctctctctttttttttttgagatggagtctcactctgttgcccaggctggagttcagtagcgcgatcttggctcacttcaatctccatcttcccagttcaagcgattctcatgcctcgacctcccgagtagctgggattacaggtgcccgctaccacgcccagctaatttttgtatttttagtagagatggggtttcactatggtggccaggctggtcttgaactcctgacctcagatgatctgcctgcctcggcctcccaaagtgctggaactacaagcctgagccaccgtgcccggccctgaatcgctttagtaaataaagggtctccaagaataaattcatccgaacatgcatccttctctgagccttctgactcttcaatattctgctcacacctgtctggcatctccatgatcttttccactggtcagcactgtcccaatagaaatataatgtcagccacatgggcacttgnnnnnnnnnnnnnnnnnnnnnnnnnnnnnnnnnnnnnnnnnnnnnnnnnnnnnnnnnnnnnnnnnnnnnnatcacttcaggtcaggagttcaagaccagcttggccaacatggtgaaaccccgtctgtactaaaaatcaaaaaaattagctgggcacagtggcgggcacttgtaattccatctacttaggaggctgaggcacgagaatcgcttaaatctgggaggcagaggttgcagtgagccaagatcgcaccacagcactccagcctgggcaaccaggaggtgagaccctgtgttaagaaaagaaaagagaaaagaagaaaagaaaagaaaaaggaaaaggaaggaaggaaggaaagagagaaaagaagagaaacaggtgaaatgaattggaataatatattttatttaacccagcatatccaaaatcctatcattttaacaagtacaactaccctatttccctcagaatgtagcattgcctctggtttgctgtggatcctgtattggaccactcagctgtagagtcctgtgggatccaagcttcaaggagacccatcatgcatgtttagggccagttccaggtgtccttgacatgacactaaacctccatttcctttgttttggagacggagtctggctctgtcgcccaggttggagtgccatggtacgaccttggctcactgcaacctccgcctcccggattaaagcgattctcctgcctcagcctctcaagtagctggcattataggcgtgtgccaccatgcccggctaatttttgtattttgtagtagagacagggttttgccatgttggccaggctggtcttcaactcctgacctcaagtgatccgcccacctcggactcccaaagtgctgggattacaggcgtgagccacctcgcctggccctccatttcctgatctagtcttatatccacgctcaccacctcagcacgctcagacccacgctgctgtgggctcctctggctcctggaagagtgcgtccgcagatgctgcagtctttgtgtggctcagcaattgccactcacatcaggaactgcctttaccctgtcaggctctactgagacccgaccctggttattaagctataggggagacaaggatggatcttaaagaagacaagcaaaatgtagtgaagcaaatagaatggtggttcctgggggatgggggcaggggacaacgaggagtgactggctaacagatacagcgtttcagtttggaaagacaaaaaagttctggaaaaaagatggaaggtggtgatggttgcacaataatatgagttttgttgttgttgttttttgagacagagtctctctctgttgcccaggctggagtgcaggggcacgatttcggctcactgcaacctctgcctcccgggttcaagcgattcttgtgcctcagcctcccaagtagctgggattacaggcacccaccaccatgcccagctaatttttgtatttttagtaaagatgaggtttcaccatgttggccaggctggtctcaaactcctgacctcaaatgattggcctgccttggcctcccaaagtgctgggattacaggcatgagctattgcgcccggcaatatgaatgaatgtttttaataccattgaattacacacctaaaattggttaaaatggtaaaaaattttatgttatgtataacttaccacaataatttaaaaaatattgtgaagcgcctgcctcatgtgaggtcttctaataagaggggctgttctccttctcaagagcgctcgcgggcattgggagtttcttattctcaaatgtccacatcccaaggcctaccccgtccctgtcagtgtcagaagttagcagagcagaactgctagatgtgctcactccatctcctccatggttggcccaccctttcgatcagatcctggaattggctttcagcacagccttccagctggctgtgataaatgagagtggcttaaaccctgtcatcagggtttcacagcttgccctgaaccgtagcctctcattttctccttgcaaatcttctaaggcagctaagagaagccaattaacttcacaatccacataattagcattgccccaaacctttcaagtgctggaatgctggcgtccactagtgcctcatttctttctaaacctcattccacatggcaggggaaggtcttaggaattgtggagctgtggcgttctaagggttctcactgcctacctatcaccagcaagggagtccttgttgccatccatccctagggggtaattttgttccctgaggctgctttctagggacttctggtcgcttgttttatcctggaccagacctgaaagcagagcctgaaataaggccttctatgcacatcatttatgtaggaggtggccctaggaagcaggcccaatgcgccatgggaaaaaccagtaccagggtgttttgctgagttgagcactgtggtgggcagctggacatgagcccactggaatcttctgaagagcccaagagcctcttctcagtattgtccacttgaggattgatagtgagaggcatttatccactggtgtccaacgctcactggttgaggatcaccccagaaagcgacacctcccccacttctagactagcatgtgggtattccaagcaggcttacctcagtgtctcaccccaggcactgcaaacaccccaggacagaaagtgaacatgtgtattgtgcaattgaagcaagacactatcagtgcaaagtgagtagaccctcagatgctgctgggtcagagggaaggcccagggatatgacacaggacacagaggtggcagatacaccacctcccaacatttcctctatcacagcaactagaacaatggcaacaataggggtgggtgtggtggctcacgcctataatcccaataccctgggaggccaaggcagaaggattgcttgagcccaggagttcaagactagcctgggcaacttggcgaaaccctgtctctacaaacatatttgtatgtgattgaacaagtagaacaatggaacggaaagtccagatgtagttctaaatatgtacaggaacttagtataggataaatatggcatcttaaatcaatggggaaaagatggattattcaacatattgtaaaaacttgagaatcacattaaaaaagttggactcctacctcattctttacaacaaaattaattctgatagatgtagtcacagaagagctagaagaatatgcaggggatttaaaaataatcttgaagtggggaggacttttataggtatgactcacaacccagaaaacataaaggattgttaaatttaattagataaatcatttaattagatgaaacatttaaaaattacatttagaaatcataaactaaatccaaagaataactaggggccgggcgcagtggctcacgtctgtaatcccatggggcaggtggatcacctgaggttgggagtttgagaccagcctgtccaacacggtgaaaccccgtctctactaaaaatacaaaaattagttggtgtggtggcacatacctgtagtccctgctactggggaggctgaggcatgagaattgcttgaacctgggaggtggaggttgcagtgagccaagatcgcgccactgcattccagcctgggcgacagagcaagactccatttcaaaaaaaaaaaaaaaaaaaaaaaaaaaaaaaagaataactagggagaaaacaccatgatgtgttgcataataacatttcagtcattcatggaccaaatataaaatggggtcccaaaaaactataataccgtgtttttactgtaccttttctatgtttagacacatttagatacacaaatacttaccattgtgctacaattgcctagtgttcagtagcatgctgtacaggtttatccctaggaagaatagactatcccacacaccctaggcgtgtagcaggctatgccatctaggtttgtgtgagtacactctatgctgttcaaacagtgacctccactgttaggtgaagcatgactgtattttgagcccaggtctcagatattgtatgaagtttcataatattatgagcttttacaaatcattaagagaaagaccaataatccagtagaaaactgggaaaaggtggcatctgcagggtaacaccagggcagcacagaaatcttgctgggatgaggagctgcaaacatgtgtggtcgactttttggccttctgcctcttctactctcagggatgggggattacaactaaagaagttgtcttttggccgggcgtggtggctcacgcctgtaatcccagcactttgggaggccgaggcgggtggatcacaaggtcaggagatcaagaccatcctggctaacacgatgaaaccccgtctctactaaaaaattcaaaaacattggccgggcgaggtggcgggcacctgtagtcccagctactcgggaggctgaggcagaagaattgtgtgaacccgggaggcggagcttgcagtgagcccagatcgcgccactgcactccagcctgggcgacagaggaaggctccgtctcaaaaaaaaaaaaaaaagaagaagttatcttttctcagtgttgcttctccctaaggatttaaaggggagacctggccagaggaatcatcaacagtggatttgtgatgactggagttcatttccttctttctcaactgtcctggaaggaaatggactagtgccttacctctgactcttccgcagcacacacccaccaccagagacagtaactgagatctgcagtagcacagaaacttacaggttagaaaaattagacacctaaggatttcatgactccagacctgtttccttagcataataccacaccagtaggagaaatacaacttacgaaatttctttgtaaataaattctataacattttgggtaaaaatttatcataaaaaaattattaaaagcaattgggttggaaggaagttctgtcaaaatacaatccaggtgtgcagttctctgataaatttagcagtggttactactgaggcagtctcaaaaaaaagtgtaaaaggactttaaggggtgatgaaaattttctacattgcctttgtggagatggttatacatttgtcaatactcatcaatttgtacatttaaaagaggtaaatttattgtatgtaaattgtatcttaataaaactgattaaaacagacatacaaaccccagaccctctgcagtcctgaatttgagtggaaaatattggtgtgaactcataatttatttttcatttgttattattattattattttggagatggagtctcaccctgttgcccaggctggagtgcagtggcatgatcttggctcactgcaatctctgcctcccaggtccaagcaattctcctgcttcaaactcccaagtagctgggattacaggcgcctgccaccatgcccagttaatttttgtatttgtagaagaaacggggtttcaccgtgttggccaggctgatcttgaactcttgacctcaaatgatccacccacctcagtctcccaaagtgctgggattacaggcgtgagccaccgtgcccggccttattttttattttttttgagacagggtcttgctctgttgcccaggcaggagtacagtggtgtgatccaagctccctgcggctttgactccccgggctcaagccgtccacacccatcagcttcccaagtagctgggactataggcctgagccactatgactggctaattttcaaagcttttttttttagagatgtggtctatgttgcctaggctggtctcgaactccaggactcaagtgatcctcctgtctcagcctcccaaagtattgggattacaggtatgagccaccacatctggccaatttttttttcagggaggaaatacacactctcctatatttgctagctcttaatactggaaaggcctagaaacaaagactgccttctatcaatgagcattcctagtatccaaagtatggtgtccacttttttccaataaaaaaaaccccagagctccttggaatatacaatctctacagtagttattagaaggaaattatcaaagactagtaaggtgtgtcaaaaagacttgaggctggccaggcacagtggctcacacttgtaattccaacactttgggaggctgaggtgggcagatcacctgaggtcaggagttcaagaccagcctggccaatatggtgaaactttactaaaaatacaaaaaattaaccacgtgtggtagcaggcgcctgtaatcccagctactcaggaggctgaggcagggaggctttaacccgggaggcagaggttgcagtaggccaagatcgcaccactgcactccagactgtgtgacagagcaagactgtctcaagaaaaaaaaaaaaaaagacttgaggccaacttgaggttcccattggccaaagatgggacaatttgagcatcaaaaggaataattactttaaataatccagcatttatcctacctttcccatacctctaggtaagcaaatactcggtgagaagcttttcttcatagaagtactctagcaaacggccgggtgcggtggctcatgcctgtaatcccagcactttgggaggccgaggcgggcggatcacctgaggtcgggagttcaagaccagcctgaccaacatggagaaaccccatctctactaaaaatacaaaattagcagggcatggtggcgcatgcctgtaatcccagctacttggaaaggctgaagcaggagaatcacttgaacctcggaggcggaggttgcagtgagctgagtttgcgccactgtactccagcctgggcaacaagagtgaaactccaactcaaaaaaaaaaaaaaacaacaaaaaaagtactctagccaacaaagaaggaagatagaatatcaccattttgcaagctttaatgaactcaccacttgaggtattaatcaatggttgctggccaccccaaaaaagaaacaaacagacactactaccacttcctttttttttttttttttttttttgagacagcgtctcactgtgtcacccaggctggagtacaatggcgcgatcttggctcactgcaacctctgcctcctgggttcaagcgattctcctgcctcagcctcccaagtagctgggattacaggcgcccaccaccacgcccagctaattttttgtatttttagtagtttcaccatgttggccaggctggtctcaaactcctgaccgcaggtaatccacctgcctcagcctcccaaagggttgggattacaagcgtcagccactggccaactcagtgctattcttatttcatctcccaccacttaaaaaagtttgttttaaacaggagaattataaagcaagtctcaattaccataaatgtatgtatctgtcagacaaggatttttttaaaaagaaaaatataaacatactaccattatcacacccaacaaaattgtaaataattccttgatatcatgtagtgttatttttttaatgtgataatagtgtggttattaacaaaagatccttaaatatttccagattaaatggtagctgctatctgccttgaaataatattcaaggaggccaggtgaggtggttcatgcctgtaatccccatattttgggaggctgagacaggaggatcacttgagcctaggagtttgagaccagcctgggccacatagtgagaccctgtctcttaaattaataaataaatgtaaataaataaattactgatataatatggaagggtggtattagtggatgaggtgggactggccaaaggttgattgttgttggtgctagatgatcactacatagaattagtacaattatatgtctgcttttaaaattctccataataaaaaaaagcataaaataaccaaaacaaggctaggtgcagtggctcaaaattgttatcccatcattttaggaggtcaaggcaggaggactacttgaggctcggagtgaaagatcagcttagccaacatagtgagaccctgtctctacaaaaaaaattaaaattaaaataaaaaaaaaaagagaaaaacctaccaagtaaaatcaattaagtcagtcaaacttttgaaatattttacaggcactatcagttggaatttttgtcaagttggtaacaatgggatattttacacaatcatatcaacacataaaagttaaaagatttcttataaacatagatattagacaggaaacaaactacaatatatgacatctaacatatattttagttgcttttcaaaaatccgtaaatactctaagttttaaaagtttagttttaggttaatttttgatatctgacagtatagatgtggcagattccataaagaccttttccttcctggtaacaaagcccatttctgagagagtaagatactattgcagcctcaagggataaattgcgtttgatctaaatcagatcattttcattcccttggatggtgatttgcctagaaattatcatgtgatttagttctgaccaaagagatgtaaagacatctcccgactgggatgtctggaaaagtttttacttccctaatttaaaagggaagagtgttggctgactagctcttgtctctttaacttttctcctaactagaatgataattaggctggaaatacagcagccacctaagatcccgaagcaacaatgataaacaccagcgtactaaacatggcagaacagaagggaagtgcctgggtccctaactatagaaacagtaatactagctttggacagtctacccgctagagttcttgtatgtaagaaaaacaaaccccaatttgcttaatccagtatagtagatttttgtttcttgtagctgaacatattcctgatacaatgaaagacataaaaaatataaacactgaatgaaagcaagcaccacaaatgtccactttataagtgcaaaggggctagaaataaatctaagtgaacataagacaaccaaattaggagagaagaatatttattatacaaatataaaaatctatacattcttagctgatgatatatacttaatcaaaaagtcttttaatttggatatatgcatcatttccttcattgtggtgtctctgcttctcagatgtattaatccattctccaaagtagtttcagtaaccaaaactgtgaagagaatactcatttcatcatacctaagaaaaaagtagttaaacagacacatgagcacaaatgtaaataataaattcctccacgttgccagctgtaattcagtgttcatgcactctcaagagtcacagactcagggcttaagggtggaccaaaaaaacccaacatttttaaagtttctgaattgtatttaaagtaatattttcagacagtttctaacttattgctagagctgaaaagtcataaaagaaaataaaatctgagaataaacactggtacctcaacacatcatttggggtgatatcacagaagaaccgcataataacctcagccttttggttcttggatgcaatccaagaacaattattttagactgaagtctcttacaataaacaatattataataaagatgcaatttggtataacaaattataccaaaatcatgtttcctttattgagtagctagcttatagcttctagttcagcaataaccaaacagatagatgcacggctgaccttctgtatgcttaccaagtcacactatctcattactgtttatttcctttgtaggactccatcagaaactttttatttctctgtttatttattgtctattttgtcctactagaatataagcttaacaagaatagtatggctgggcgtggtgactcatgcctgtaatcccagcactttgggaggctgaga

SEQ ID NO: 3029 - DNA, 1150 bp, Homo sapiens
tgtggagccatttgaacaggctcctcttctggagcatattttcttctgtcacttgtagaaaagctgtattggattgtgaggcaatgaaaacaaatgaattcccttctccatgtttggactcaaagactaaggtggttatgaagggtcaaaatgtatctatgttttgttcccataagaacaaatcactgcagatcacctattcattgtttcgacgtaagacacacctgggaacccaggatggaaaaggtgaacctgcgatttttaacctaagcatcacagaagcccatgaatcaggcccctacaaatgcaaagcccaagttaccagctgttcaaaatacagtcgtgacttcagcttcacgattgtcgacccggtgacttccccagtgctgaacattatggtcattcaaacagaaacagaccgacatataacattacattgcctctcagtcaatggctcgctgcccatcaattacactttctttgaaaaccatgttgccatatcaccagctatttccaagtatgacagggagcctgctgaatttaacttaaccaagaagaatcctggagaagaggaagagtataggtgtgaagctaaaaacagattgcctaactatgcaacatacagtcaccctgtcaccatgccctcaacaggcggagacagctgtcctttctgtctgaagctactacttccagggttattactgttgctggtggtgataatcctaattctggctttttgggtactgcccaaatacaaaacaagaaaagctatgagaaataatgtgcccagggaccgtggagacacagccatggaagttggaatctatgcaaatatccttgaaaaacaagcaaaggaggaatctgtgccagaagtgggatccaggccgtgtgtttccacagcccaagatgaggccaaacactcccaggagctacagtatgccacccccgtgttccaggaggtggcaccaagagagcaagaagcctgtgattcttataaatctggatatgtctattctgaactcctgacctcagatgatctgcctgcctcggcctcccaaagtgctggaactacaagcctgagccaccgtgcccggccctgaatcgctttagtaaataaagggtctccaagaataaattcatccgaacatgc

SEQ ID NO: 3030 - protein, 336 aa, Homo sapiens
MKTNEFPSPCLDSKTKVVMKGQNVSMFCSHKNKSLQITYSLFRRKTHLGTQDGKGEPAIFNLSITEAHESGPYKCKAQVTSCSKYSRDFSFTIVDPVTSPVLNIMVIQTETDRHITLHCLSVNGSLPINYTFFENHVAISPAISKYDREPAEFNLTKKNPGEEEEYRCEAKNRLPNYATYSHPVTMPSTGGDSCPFCLKLLLPGLLLLLVVIILILAFWVLPKYKTRKAMRNNVPRDRGDTAMEVGIYANIKQAKEESVPEVGSRPCVSTAQDEAKHSQELQYATPVFQEVAPREQEACDSYKSGYVYSELLTSDDLPASASQSAGTTSLSHRARP

SEQ ID NO: 3031 - DNA, 412039 bp, Mus musculus
  misc_feature (1)...(412039): n = A, C, G or T/U
ccggaagtccgggaaggctcccggagcaaaaggccggctggcttttcggcagcggaccagcgtcccgaggaaggcccgcagacgcctcccggtagcccgcggcggcgaggggcgggctcctccggcggaaggtgaggggtggggtccgccgggcggcgggggcggagggacgtggcgggttcggatcccggactgacctgcggggcccgtgggacccggggcgccacggagccggcctggcggaggcgggcgcagtattgatcggtggcctgcacggcgtccaccaggccctcggcgcagcggcgcatctggccgatggtgtccgccgcctcgatcaggtcgcggtaccgctcgcccaccatctgccgcagctcctccttcttgtgttcgatctcggctcggacctggcgctccagcccgcggatctcctccgctccatgagtctcgaagagcgcgttgggatcgcgcagatccagccgcttgagcgcggaggaggcggtcgcggccgccatggtgctaagccagggatccgccggccgcttccgcctgccagccccgccccgccctcccgccatcatggatgggggcggaagtgcttccgccaggtcgggagcctcggtggtcccagggactgagcctcggtggcagtgctgctctccagagcttatttttttactgttacaatctcccttctctctccttcactcttccttccttccctcttcctccccattctcaccctatgtaggtggagtacgtgcgacagaaacagatgcgcgcggaggtcataagttgcaggaggctcactcctgccatgaggatctcagtatagaattttagatggaattttatcggctttggcggcaatcgcctttgcctgctgtgccatctcgcctaccctgagcgctcgtttccttagagaagcgaaatagttaaggttgtacttggtggtcaaagtcttagtggcccggagccccttgcgtcgcacccaaaccctttcctggggagggaagagcttcaccgtggggttcattatggtaaagatgcacgtatggtcgtgttgctgtcggtcttacatgcatgcacgcttttgccttcgatagaccatcacagcaaccaggactgggccttgggactcttcccttaggacttggcagctggagatctgagtgacggctgtggtccaccttgttacctgggtcttctattttatttaaatattgtttagtggccacaaaatgggtttccctgttacaggcctcctgtggtggagaacgatggggagtccatgatgccagaggattggacatcctgagattgacccagtaagaaaacctggacgttctggcttgctgttcataagtccgttcagggcccttcgttttggaaaagtttgctgaagaattctttcctatgttaacacagagaaaacagtattgtgtgttcagcagccctgtaccacagacagcctctgggttttctctcccgttcaccactgccactacttcgaggcaaatgtcacagcaatagattgatatctaaataagggggtttacttacgacattccagcaagaagagtccctgctctatgcacaactgaagcccagggaattttacttacctcggggaagggggttaactcagaactcaagccacttggcttgagataccgcctacgcgtcagagttcccccagcacagcgcgccccctggtggcgcagcggtgacgtgcagtcctttctatagtcccgcgctaccggctgctttggtgctgttttgcttctgagcctgcagaatctgtcttccgtgtttggaagcgcttctctgtcaggcagaaactttccccaggacttcttgcacctactgtgccagcctggggcctgggactggtccacaagaccttcttgggcctttgaaggcagcgatgccctggtgcagggatttcagccttgtagaggctaggtctcacccacaacacctagtgtgcaggactggcagggacagtggctgcagctgtagtttcaggtgccagcgctggtgatgggtatctgcaggttggatcaccctgtggtataccttggattaggaatgttcgccctctctttgctcctgtctcttcagcttagttgcacatcctgcccagcagctcactgtgttatcaatacatccattttctctgaaaatcagaaccgtggtctgtagcttgccctgggagcctaacacttattcctcaagcttccagttccccaagagttagtaagctaacacctttcctacactgaggggaacacgataggctatgatcagttccatgtgggactaggggcttcttgtatgatggctttggcaaaggccactctgcccaatgtgttttgagaccggcatttgcttttccgtcttttgtgctgtttccttggctgagttcatcagacctgcctgaagatgctacggttgcctctctgcctgcagaagaactgctgctcggggctgtttccagatgtcttctcagcctgggcactgggaaagctccccaggcctttgggagatgtgtccttggctctgctctctaaggctccaggttttacttctgcacccagagagcagccccctcctttcctgatgctgtctgcctatcagccagaactatccaaaccagcaactgggccaagagctcagcccaagcagctagaggagtcactgtgccaggatgttggggacagacattgcttaagctcaggggtgctgctgtcatttagtgtagtttatgaccaggtgtaagtatgtgtcgagtgaagctttgatttaatttaatttattattactttatttatgagtgtgcgtttgtgtgtctgggcatgtttgtgcggtgcctacagagaccaaaaaagagttcagatcccctggagctgaagtcatgggagactgagcaagaaaccaaattccagtcctctgtaagagcagccagcactcttaaccgctgggccatctctccagccccttcagtctgagttctagtatcagtccttcatccttctagcttcaacctttaagttgtagctcttgaaatcaaagaggcattcctccataaccctagctgtcatttagagcatcactggccctttgcatctttcctctctgcttctcacaaggatcccacgcagaggcggcgttacagacagctaaggttccatcgaactgagtaacctaggtgaggtcaccaagcctgtcgatggtgaggcctgttgtcagggtgtcagctgccagctggacctagagtcacctgagaagagtgatgctcaaatgatgaatggccttgctcagattggcttgtgggtgtgtccatgaggcactttgtaagattgctaattgatgtacaaaggcctagcccactgagtcttgctgctcctgggcatgtggactcgggtgctataagagaggtaagcaagccagtaagcaatgttcttccatggtctctgctccaggttccggccttctgttcctgtcctgactgccctctgtgacggactgtgatccagaagtgaaaggttgtcaccacgggctttcccactcatgcccacattcccgaaataatgactctgacatttgctacttatgaataaatgcctaggccacaattcttctaatagattgtcactaattaatccctttattcttttctatgagtgccacatggctagttacctttcctcagtttcatgtgtctgtcttctcagagttgggggcaaatctcttcccaaacctgactctatcccagagttcctctctccctaccagaactcccacctcctatttcctgccatggctaataggccatgggctttttattgataggtaatgcttcccacagacaacaagagattctctctcggtacgatgaaataatttcccaagttgtttgtggccagaatgtttgatctgagcaacagaaaaccaaacagggacactcgtcttcagagacttgtgggttagctcaactctagaagtccttatcttttactggagtctcctgattagctttaaagaaagattgcagaacgttaagatgacccagcggaccagcgttcacatggtccccacagtttttccttcattccacctgagctgagatcactgcagttgcactgacagactggggaggcacggcatagccatacccgctgggcaagtatcaggacactagaggggggctgtctcttcaagctggggatatactgtgtttttctttaggcatgtccgtgtgtacccttgcctcactggggacactgaagggaaagacttctcttcagcttgttttgttcctctcctcaggctggcctgcagctcagcacgttgccagagctggtccattacaatactcctgctttagcctcgggagtgctagggttgcaggtgtgagagggcatgcttgtgtttctgtttttgtagtttgggtgtgtggaggaggggacagggtttccttgtatagttctaggttgaccttgagcataagactctcttgtctcagcctcttgaatgcttgggggtcataggtgagtgccaccttgcttggctcttccttacttaaaaaaaatcaaattatttttattttatgcatgtgggtgtttcatccgcgtgtatgtctgtgcactatatgcatgcagtgctcacggaggccagaagagggtgtcagaacctctgagagttgcatacagagagttgggagccaccataggatgctaagaacagaatccaggtgtcctgaaagagcagtcagtgcttataatggctgagccaactctctggctccttgtccttactttttaatacaaatatgggaaactagccagaataatccttaaaagagaagaatcttgctctactttggacattgagtgtccccctcaagtccccccagagaagaggttttgtccctagggtacttctgggatgtagggtctaatgtgagctcttaggtcactgagagcattcccttgaagagaacagtgagatctttgccccctccttgcttgatctttaccttcgggccataaggtacatgcccttttctgctacatgctcccactgtgacgtgttcccactgtgatgtgctcccactgtgatgtgctacctcacttcaggcccaaagcaataggttcaaccaatcactcaaactggatgaaaagtagcccttttctctttataagttgtttgcctctggtattttgttacagtcacaggtttttgacagattttaatagatactatgtctcctccttggggcagtctgtgaccaggggcctgggaaatggtcccatgtctttggctctcattcaaagctgatactttggaaatatgccatgcatttaggttatatagtgccaaggtgtctacataaaggatgcacaggaaaaggcatgtaggaatctgtgtgctagagagtgatctcatccagaccctgcaccatcccataccaaactcctcctagatatgagatggctgtgttcccgcatgcatacatagacctgaaagggctgtcagctttgtgcctcccattccttctgttggagggaatggtagtcacattcttgtgcatgctcagacagaagataggaagagagagagatactcacttgaaatggaaagcagaaatttagctctggctaaaggaggaagcaagaaagaaggagaaaagggggtggagggaggtggtgttgaggaagcagaggagagagagtgtcagtggaagccatgttgggtgcacagaaggctggattctatgcacatgcccagtggaattcagatgtttggtgtttactcttggtcggagatgccagtgagattaatgctcgctatcttgacttcttatctttatggcagcatttatcagcctgtgtctgctggaggtggcatttgtggtagaagggcctggcaactgacttggctgtttgcagatacttgagagattaccttccactaacagctaggcaagcatctctggtgaaggaacccgcatgtctgggctccctgggtctgcggtcctccatttgtgttggctgcgcatgctcctgccgtgtgggctggcggtgtgctggatgctgcggggaacatttatttgggtctgactttggcttgtcctcttgcacctttccaccccagcgtgtctttctgtgaatggcctcagagtcctacctctaaatctagcaagttgtcgtggtttttttggagataggatcttgtggagtccaggctggccacaaacttactacctagccaaggatgaccttgaactttggatcctcctgcctctacttctagtgcaatgggattataggcacgcacaacagacccgtttcacgtggtgctagggatcgagctaaaggcttagcagctcccatggtctctgtggcatagccacagtcaaagccacagccacgtaaaactagcaataggcagtagatgcttgcctgggagtggccatgttccagtcagtagggcctatgaaccaaaccaagcagagagccagtgttcactctccagccctggctcatggacccgttctttctcatctctgcttttaccacagtgaatcaactcaccagcgtctcagtggagccagagttaccctgcaattcctccagtttctactctgttcccctttagttcctgctccttgctgcaaaagccagccagatcctctctgttcatctctttgaatggttaaggccttgagtatctactgcacaaagccagaacatcctttcatttggtcagaggcaacggcaatgaccttcaaagcccagtcttctcctttctcctcctcctcctcctcctcctttctcctcttccttcctgctctttcgtgcttcctcctccttccttttctccttcctcctttcttctccttcctcctcctccttttcccccttcctccttccttctccctcctttctcctcctcctttctcctcttccttcctcctccttcctcatcccttctacttccttctcctccttcctgcttcctcctccctcctccttctccctccttcttcctcctctctcctcttccttcttcctcattcctcctcctccttcttccttcctcctccttcttcccccttccttcctccctccatcagcaacctccctggtctttgattctgtaagctgaggcttggtccctccctcctaaggctttcattcttgctgttccttttgccagatcaccccaggctgggaagccaacctggaccactgcaggtgaaataacagaggctcacactgaccaagcttcactgtgcgagcatccttactctgctctctccatccaccagtgctcagagctggatcctgcttcttatctttatggagcaggaaattgaggcagggaggtttttaattttctcccaatcacgaggagctactatgtaagtcagctgtctgtctctgggactggagccccagcctttactgcctatgtgttttcattgtagcatttgccgctgcactcaaattccaaggtcatttatttgtgtattttatacacacacacatatagacacatacatacatacatacatacatacatacatacatatacacatataaacacaaatatacatgcatacacacatatagacatatacatatacacacacatatatagatacaaacatacacgaatatgtatatacacacattcacactcacatacacatacatacacacacacacacacacacacacacacacacacacacacacacggggtattatgtgtgccattctgtgcaaatggaagtcagaggacaacttgcaggagtctcttctcttcttccaccttgtggggtgctgggacaacactcaggttgtcagacttggcaacagcgccgtcaccggaactacctcacaggtcagcttgcacacttcgaatcaaatgtctcccactacaaggagcagagaactgcactgtcttttgtcttcctggattccctgcttctagaacagcctctggcacataactgacatccagtatttgggggatacatgagcaatttaactttgtaactaagtgatttttttttttttggcatgccaaaaaaatgtatctgaaaatagtcacaccacctctcactctaatttctaaaggagagagtgaaaattcatgttgagttcatctctattgttctttctaagcttgtgtgtgtgtgtgtgtgtgtgtgtgtgtgtgtgtgtgtgtgtgtgcgnnnnnnnnnnnnnnnnnnnnccaaacatgttttgttattactgttttttttttttttgtttttgttttttttctcatcagcacacagtgatgtatatgggcgggtttttcatgctaaaaaaatgtatctgaaaatagtcacactacctctcactctcatttcatatgtgtagataactctgcttatattcatttttgttaccctccaccccttccttctcccatccttcccttctctttcccaattagtcaccctcccctgtctactttgaggtcgtttttggtgattttaatcagggttgctttcaggagcatcttcaggggaacatgggccacttaaccactggcaacactgagggaaatgcctctggttccccagcaactgttaaccgcctaagaggcggggctgcatgactcctcccccatttagcatccccacagaaagatggactcgatcttgttgctccatgagtttttacatgagtagcaactgctatgcatgcctcagggcatctcggaagacagtttcctgactcttccacctcttcatctggctcttacatcctttcttctggtcttcctcgactttctgaaagccttggccatggtggtacagagacacagttaaggtggagcattcagtggttattcagcacttagaccaatcgagagcctggcagtagctgccatccaccgcaggaggaaacccctcagaccacaaaggacagcagcagcactatcggataagcataaacatgatcattcagaaggcaatttgataggcacatcatgtccacctagcaggacaacagctgtagctgcccgctagggaccatgtcctcctgattttgactaggtctgcagtacccgttcatttgtattcaaatccaacattggcatcttccccccaaagcgtgagacaccttttgcacttgtggatgttgtatatagagttaggaagacatggctacccgggaaccttctgatcgcctgtctgcaagtttctgcactgtgcatgagtctgtttacatattcaccctctacaacagctgtactgaatatggcgattgtaatgataaatattagccatggtttcagtctcttgaatacatggtctccagttggtggtgctgattggggaggcttaggaggcgtgaccttgctggaggaagtttgccactgggcgggctttggggtttcaaagcctcatgccttttccaaagggctctctctctctctctcctctccgctatgtgcttgtggttcatgatgcttcgtgtccctacaacatgtcttctgtctgcccacatggccgtgtgggtgctgagaatcaaacgcaggtccactgcaagagggtcttttctaaactgaacattaagaagaacacagccattggaacgcatcattgaagggcctggacgtttaaacaaatgtattgattggggctagagagtcagctccgcggttaagagcgctggttgctcttccagagggtgtagtttggttctcagcacccacaaagcagctataattccagttccaggaaactgatgccctcttctggccacctcagacaccaggccatgtacacggtatacatatatacatgaagacaaggatttaacacataaaatatcaaaattaaatctattattattgatgtatgtaaactgccacggtgtggtcagaggacagtctcctggagttggtccttccattttaacatggctcccaagggttgtactcaggcccccaccttgctggagaagtctctacccactgagctatctcactgcccccttgcctttgctttcatttgagcttttggtagagatggaagcagcagtctcctgcagtttgaacactcatgcgctgaggtgccattttcctcaagggagatgccgagcaagattagcattgagtccttgggtgctgcccacttcaaacgccacccacgtggccagaaatcccattctccatctctgttacagtctgcagaggtccgggggttattttccgaagactctaggatttggagcactgtcacaactggaagccccaaggacccctcacacctgcctgtctcttgctctaagtgtttatttcattaacatcattattatttgtacgtgtggggtgtgtgcatgcttgtgtgtacacctatgtgtgtgcgctctcactggttcatgggtggaggccggagatcaacatcaagtgtctgaggaagctgatcttcgccttatttttttgagacagggtctctctcactggcctggatgagccgtgagcccttgggatctctgcctggttccattctgagctctgagcttacagacatgcaccactgtatcctgcttctgaatgggctctggggacccaaacccaggtccttgagcttgctatgcaagcatgtctatccatggaatcatctccccagcccccaagtgtttattcttatgtctttattgatcttgtcaatttaatgaccttattatttgcagtgctggcgactaaacccagggccacatgcatgctggcgaaatacttttgtcacccaggctataccctcagcctctcttgccggagatcacacctgccattctaacagagcccctggggatgactgtgaggatgctctacgcattctgtgcttaccattgcctcttgccacagttatgcagcggtgcctcgctgccctgttcccctgcggttgcttcaccgtctcagttgccctctggttccagttgaggcccgcaaagggagatcaaaggaatccactgtgattctggtggcaattagatgctctcacttcctcatgcttctctatgacatcattccctcctttactcctttgcctcaggactgaggcatctgatagggttctccgccgacaaaatgaaccaactgaagaccaatcagcagtatagggaaggtttattgagagggcgctctggcgcgaggaggtcagggaagtctcgcacctgggtcaaaccaaggaggttttatgggttttgggcaggcggtaatgacctatgagctgggattatgctcatataaggttaaaaaaaaaataaagccgagcccctgggtggtcatttgttggtgggtagcggaaacccggaaatgggtagagatgacgtgttagcccagagttttcttcttgtggtcggggttggaggaagacgagtaaacagggtttcttagcttgtgcaagggatgaactggggctccaagcaaccagtgtccaccttgacttcgggcctatccctggctgactcccttatgaccgcccattcctgtgcacgccgttccttccgttgtggcatgcgtttctcttgagtgcatcatctgtttctgttggacccatgactgacagacacaggagacgaaagactcaaagacaaaggtgcttctctttcggcttagcgctaagctctagaggctgaccatgatcccacaaccaaggagatgaaaagggtccagagcggcagctcaggggttaaatgcactgtggctcttcctgaggacctgggttcagttcccagcacccacacagtggttcacaactacctacaactttgttccaggaggtttgataccctcttctggcctcttctggttctaggcatgcacaccggtgtacacacacacatgcaagcaaaacagtgacacacataaaaaataagggagcaaaaataaaaccgcagctttatttaatcaaaggcataatgacactcatctgtgtagtcggctacctgagaagctgaggtgggaggatcatgtgagccaagcagttttagatcaacttgggcaacatagtgtgagaccctacttcaaaatctgtcagttaatcattataaagaaggtgaagagaatgtagaatttattggacacttctgtgactgattttttaaattccttccttcctcccttccttccttcctttcttctttccttcctttcccttttccaagacagggtttctctgtgtagccctggctgccctggaactcactctgtagaccaggctgacctccaactcagagatctatctgcctctgcctcctgagccctgggaataagggtgtgcaccatcactgccccgttagaaaatatttctctttggtctgatctttacaaaattctgtgacgcacagattaccccccgttttgcagattaccccccgttttgcagtgcagctctagaaggcactcatctagggcacacacccttcaggtagggtgggacgtggtgagccggggctctggggaagtcacagagctgtgcctcagtttacccatttgtagaatgagagacagaggagactcttttgggaattgagttagataaggcacataagtgcttagtgcagggtttggttttaaaaaatctatttatttatttatttatgtattgtatccaagtgttttgcctatgtatatgtatgagtaccgtcttcactgcatgcctagaggacacagttgtgagcttccgcctgctttgggagccaaactctggtcctcattaagagcactgtgtcatctctccagcctcttgttttatttagttaattaattaagttgttttatttatctttttatgtttgagtcagatctcactgtagtcctggctcgcctgggacttaactatgtagaccaggctagccctttaactcacggagatctgcctgcctctgtctccctgagtgctgagattaaaggcacgcactcccacacctgggctactttttgagacagggtcttgctaaattgcccaggatgatttgaacttgctatgtagccagagagggcttgcatttctgatcctcctgccttagcctcctgagtagctgggattacagggccgtgtcactaagcccagcttctaattgataattaagactatctaagcaactggtaattggtttggatttggaagaaaggataatgagatgataagttgtttcttggaccagtttccaaactctcagcatctctccgtagttaggttgccaccaagtctnnnnnnnnnnnnnnnnnnnncgccgtcaccggaactacctcacaggtcagcttgcacacttcgaatcaaatgtctcccactacaaggagcagagaactgcactgtcttttgtcttcctggattccctgcttctagaacagcctctggcacataactgacatccagtatttgggggatacatgagcaatttaactttgtaactaagtgattttttttttttggcatgccaaaaaaatgtatctgaaaatagtcacaccacctctcactctaatttctaaaggagagagtgaaaattcatgttgagttcatctctattgttctttctaagcttgtgtgtgtgtgtgtgtgtgtgtgtgtgtgtgtgtgtgtgcacgatttattttgattttgtgtttgctgctgctttgcctgcatggatctcagtgtgggagagttaaaagaactggaactggagtggcccatgggaatgagccaccgcgtgggtgctgggaattgaaccgggatccttggaagaacagcctgtgttcttaaccactgagccatctctctagccccaaacatgttttgttattactggttttttttttttttctcatcagcacacagtgatgtatatgggcgggtttttcatgctaaaaaaatgtatctgaaaatagtcacactacctctcactctcatttcatatgtgtagataactctgcttatattcatttttgttaccctccaccccttccttctcccatccttcccttctctttcccaattagtcaccctcccctgtctactttgaggtcgtttttggtggttttaatcagggttgctttcaggagcatcttcaggggaacatgggccacttaaccactggcaacactgagggaaatgcctctggttccccagcaactgttaaccgcctaagaggcggggctgcatgactcctcccccatttagcatccccacagaaagatggactcgatcttgttgctccatgagtttttacatgagtagcaactgctatgcatgcctcagggcatctcggaagacagtttcccgactcttccacctcttcatctggctcttacatcctttcttctggtcttcctcgactttctgaaagcnnnnnnnnnnnnnnnnnnnnnnnnnnnnnnnnnnnnnnnnnnnnnnnnnnnnnnnnnnnnnnnnnnnnnnnnnnnnnnnnnnnnnnnnnnnnnnnnnnnnnnnnnnnnnnnnnnnnnnnnnnnnnnnnnnnnnnnnnnnnnnnnnnnnnnnnnnnnnnnnnnnnnnnnnnnnnnnnnnnnnnnnnnnnnnnnnnnnnnnnnnnnnnnnnnnnnnnnnnnnnnnnnnnnnnnnnnnnnnnnnnnnnnnnnnnnnnnnnnnnnnnnnnnnnnnnnnnnnnnnnnnnnnnnnnnnnnnnnnnnnnnnnnnnnnnnnnnnnnnnnnnnnnnnnnnnnnnnnnnnnnnnnnnnnnnnnnnnnnnnnnnnnnnnnnnnnnnnnnnnnnnnnnnnnnnnnnnnnnnnnnnnnnnnnnnnnnnnnnnnnnnnnnnnnnnnnnnnnnnnnnnnnnnnnnnnnnnnnnnnnnnnnnnnnnnnnnnnnnnnnnnnnnnnnnnnnnnnnnnnnnnnnnnnnnnnnnnnnnnnnnnnnnnnnnnnnnnnnnnnnnnnnnnnnnnnnnnnnnnnnnnnnnnnnnnnnnnnnnnnnnnnnnnnnnnnnnnnnnnnnnnnnnnnnnnnnnnnnnnnnnnnnnnnnnnnnnnnnnnnnnnnnnnnnnnnnnnnnnnnnnnnnnnnnnnnnnnnnnnnnnnnnnnnnnnnnnnnnnnnnnnnnnnnnnnnnnnnnnnnnnnnnnnnnnnnnnnnnnnnnnnnnnnnnnnnnnnnnnnnnnnnnnnnnnnnnnnnnnnnnnnnnnnnnnnnnnnnnnnnnnnnnnnnnnnnnnnnnnnnnnnnnnnnnnnnnnnnnnnnnnnnnnnnnnnnnnnnnnnnnnnnnnnnnnnnnnnnnnnnnnnnnnnnnnnnnnnnnnnnnnnnnnnnnnnnnnnnnnnnnnnnnnnnnnnnnnnnnnnnnnnnnnnnnnnnnnnnnnnnnnnnnnnnnnnnnnnnnnnnnnnnnnnnnnnnnnnnnnnnnnnnnnnnnnnnnnnnnnnnnnnnnnnnnnnnnnnnnnnnnnnnnnnnnnnnnnnnnnnnnnnnnnnnnnnnnnnnnnnnnnnnnnnnnnnnnnnnnnnnnnnnnnnnnnnnnnnnnnnnnnnnnnnnnnnnnnnnnnnnnnnnnnnnnnnnnnnnnnnnnnnnnnnnnnnnnnnnnnnnnnnnnnnnnnnnnnnnnnnnnnnnnnnnnnnnnnnnnnnnnnnnnnnnnnnnnnnnnnnnnnnnnnnnnnnnnnnnnnnnnnnnnnnnnnnnnnnnnnnnnnnnnnnnnnnnnnnnnnnnnnnnnnnnnnnnnnnnnnnnnnnnnnnnnnnnnnnnnnnnnnnnnnnnnnnnnnnnnnnnnnnnnnnnnnnnnnnnnnnnnnnnnnnnnnnnnnnnnnnnnnnnnnnnnnnnnnnnnnnnnnnnnnnnnnnnnnnnnnnnnnnnnnnnnnnnnnnnnnnnnnnnnnnnnnnnnnnnnnnnnnnnnnnnnnnnnnnnnnnnnnnnnnnnnnnnnnnnnnnnnnnnnnnnnnnnnnnnnnnnnnnnnnnnnnnnnnnnnnnnnnnnnnnnnnnnnnnnnnnnnnnnnnnnnnnnnnnnnnnnnnnnnnnnnnnnnnnnnnnnnnnnnnnnnnnnnnnnnnnnnnnnnnnnnnnnnnnnnnnnnnnnnnnnnnnnnnnnnnnnnnnnnnnnnnnnnnnnnnnnnnnnnnnnnnnnnnnnnnnnnnnnnnnnnnnnnnnnnnnnnnnnnnnnnnnnnnnnnnnnnnnnnnnnnnnnnnnnnnnnnnnnnnnnnnnnnnnnnnnnnnnnnnnnnnnnnnnnnnnnnnnnnnnnnnnnnnnnnnnnnnnnnnnnnnnnnnnnnnnnnnnnnnnnnnnnnnnnnnnnnnnnnnnnnnnnnnnnnnnnnnnnnnnnnnnnnnnnnnnnnnnnnnnnnnnnnnnnnnnnnnnnnnnnnnnnnnnnnnnnnnnnnnnnnnnnnnnnnnnnnnnnnnnnnnnnnnnnnnnnnnnnnnnnnnnnnnnnnnnnnnnnnnnnnnnnnnnnnnnnnnnnnnnnnnnnnnnnnnnnnnnnnnnnnnnnnnnnnnnnnnnnnnnnnnnnnnnnnnnnnnnnnnnnnnnnnnnnnnnnnnnnnnnnnnnnnnnnnnnnnnnnnnnnnnnnnnnnnnnnnnnnnnnnnnnnnnnnnnnnnnnnnnnnnnnnnnnnnnnnnnnnnnnnnnnnnnnnnnnnnnnnnnnnnnnnnnnnnnnnnnnnnnnnnnnnnnnnnnnnnnnnnnnnnnnnnnnnnnnnnnnnnnnnnnnnnnnnnnnnnnnnnnnnnnnnnnnnnnnnnnnnnnnnnnnnnnnnnnnnnnnnnnnnnnnnnnnnnnnnnnnnnnnnnnnnnnnnnnnnnnnnnnnnnnnnnnnnnnnnnnnnnnnnnnnnnnnnnnnnnnnnnnnnnnnnnnnnnnnnnnnnnnnnnnnnnnnnnnnnnnnnnnnnnnnnnnnnnnnnnnnnnnnnnnnnnnnnnnnnnnnnnnnnnnnnnnnnnnnnnnnnnnnnnnnnnnnnnnnnnnnnnnnnnnnnnnnnnnnnnnnnnnnnnnnnnnnnnnnnnnnnnnnnnnnnnnnnnnnnnnnnnnnnnnnnnnnnnnnnnnnnnnnnnnnnnnnnnnnnnnnnnnnnnnnnnnnnnnnnnnnnnnnnnnnnnnnnnnnnnnnnnnnnnnnnnnnnnnnnnnnnnnnnnnnnnnnnnnnnnnnnnnnnnnnnnnnnnnnnnnnnnnnnnnnnnnnnnnnnnnnnnnnnnnnnnnnnnnnnnnnnnnnnnnnnnnnnnnnnnnnnnnnnnnnnnnnnnnnnnnnnnnnnnnnnnnnnnnnnnnnnnnnnnnnnnnnnnnnnnnnnnnnnnnnnnnnnnnnnnnnnnnnnnnnnnnnnnnnnnnnnnnnnnnnnnnnnnnnnnnnnnnnnnnnnnnnnnnnnnnnnnnnnnnnnnnnnnnnnnnnnnnnnnnnnnnnnnnnnnnnnnnnnnnnnnnnnnnnnnnnnnnnnnnnnnnnnnnnnnnnnnnnnnnnnnnnnnnnnnnnnnnnnnnnnnnnnnnnnnnnnnnnnnnnnnnnnnnnnnnnnnnnnnnnnnnnnnnnnnnnnnnnnnnnnnnnnnnnnnnnnnnnnnnnnnnnnnnnnnnnnnnnnnnnnnnnnnnnnnnnnnnnnnnnnnnnnnnnnnnnnnnnnnnnnnnnnnnnnnnnnnnnnnnnnnnnnnnnnnnnnnnnnnnnnnnnnnnnnnnnnnnnnnnnnnnnnnnnnnnnnnnnnnnnnnnnnnnnnnnnnnnnnnnnnnnnnnnnnnnnnnnnnnnnnnnnnnnnnnnnnnnnnnnnnnnnnnnnnnnnnnnnnnnnnnnnnnnnnnnnnnnnnnnnnnnnnnnnnnnnnnnnnnnnnnnnnnnnnnnnnnnnnnnnnnnnnnnnnnnnnnnnnnnnnnnnnnnnnnnnnnnnnnnnnnnnnnnnnnnnnnnnnnnnnnnnnnnnnnnnnnnnnnnnnnnnnnnnnnnnnnnnnnnnnnnnnnnnnnnnnnnnnnnnnnnnnnnnnnnnnnnnnnnnnnnnnnnnnnnnnnnnnnnnnnnnnnnnnnnnnnnnnnnnnnnnnnnnnnnnnnnnnnnnnnnnnnnnnnnnnnnnnnnnnnnnnnnnnnnnnnnnnnnnnnnnnnnnnnnnnnnnnnnnnnnnnnnnnnnnnnnnnnnnnnnnnnnnnnnnnnnnnnnnnnnnnnnnnnnnnnnnnnnnnnnnnnnnnnnnnnnnnnnnnnnnnnnnnnnnnnnnnnnnnnnnnnnnnnnnnnnnnnnnnnnnnnnnnnnnnnnnnnnnnnnnnnnnnnnnnnnnnnnnnnnnnnnnnnnnnnnnnnnnnnnnnnnnnnnnnnnnnnnnnnnnnnnnnnnnnnnnnnnnnnnnnnnnnnnnnnnnnnnnnnnnnnnnnnnnnnnnnnnnnnnnnnnnnnnnnnnnnnnnnnnnnnnnnnnnnnnnnnnnnnnnnnnnnnnnnnnnnnnnnnnnnnnnnnnnnnnnnnnnnnnnnnnnnnnnnnnnnnnnnnnnnnnnnnnnnnnnnnnnnnnnnnnnnnnnnnnnnnnnnnnnnnnnnnnnnnnnnnnnnnnnnnnnnnnnnnnnnnnnnnnnnnnnnnnnnnnnnnnnnnnnnnnnnnnnnnnnnnnnnnnnnnnnnnnnnnnnnnnnnnnnnnnnnnnnnnnnnnnnnnnnnnnnnnnnnnnnnnnnnnnnnnnnnnnnnnnnnnnnnnnnnnnnnnnnnnnnnnnnnnnnnnnnnnnnnnnnnnnnnnnnnnnnnnnnnnnnnnnnnnnnnnnnnnnnnnnnnnnnnnnnnnnnnnnnnnnnnnnnnnnnnnnnnnnnnnnnnnnnnnnnnnnnnnnnnnnnnnnnnnnnnnnnnnnnnnnnnnnnnnnnnnnnnnnnnnnnnnnnnnnnnnnnnnnnnnnnnnnnnnnnnnnnnnnnnnnnnnnnnnnnnnnnnnnnnnnnnnnnnnnnnnnnnnnnnnnnnnnnnnnnnnnnnnnnnnnnnnnnnnnnnnnnnnnnnnnnnnnnnnnnnnnnnnnnnnnnnnnnnnnnnnnnnnnnnnnnnnnnnnnnnnnnnnnnnnnnnnnnnnnnnnnnnnnnnnnnnnnnnnnnnnnnnnnnnnnnnnnnnnnnnnnnnnnnnnnnnnnnnnnnnnnnnnnnnnnnnnnnnnnnnnnnnnnnnnnnnnnnnnnnnnnnnnnnnnnnnnnnnnnnnnnnnnnnnnnnnnnnnnnnnnnnnnnnnnnnnnnnnnnnnnnnnnnnnnnnnnnnnnnnnnnnnnnnnnnnnnnnnnnnnnnnnnnnnnnnnnnnnnnnnnnnnnnnnnnnnnnnnnnnnnnnnnnnnnnnnnnnnnnnnnnnnnnnnnnnnnnnnnnnnnnnnnnnnnnnnnnnnnnnnnnnnnnnnnnnnnnnnnnnnnnnnnnnnnnnnnnnnnnnnnnnnnnnnnnnnnnnnnnnnnnnnnnnnnnnnnnnnnnnnnnnnnnnnnnnnnnnnnnnnnnnnnnnnnnnnnnnnnnnnnnnnnnnnnnnnnnnnnnnnnnnnnnnnnnnnnnnnnnnnnnnnnnnnnnnnnnnnnnnnnnnnnnnnnnnnnnnnnnnnnnnnnnnnnnnnnnnnnnnnnnnnnnnnnnnnnnnnnnnnnnnnnnnnnnnnnnnnnnnnnnnnnnnnnnnnnnnnnnnnnnnnnnnnnnnnnnnnnnnnnnnnnnnnnnnnnnnnnnnnnnnnnnnnnnnnnnnnnnnnnnnnnnnnnnnnnnnnnnnnnnnnnnnnnnnnnnnnnnnnnnnnnnnnnnnnnnnnnnnnnnnnnnnnnnnnnnnnnnnnnnnnnnnnnnnnnnnnnnnnnnnnnnnnnnnnnnnnnnnnnnnnnnnnnnnnnnnnnnnnnnnnnnnnnnnnnnnnnnnnnnnnnnnnnnnnnnnnnnnnnnnnnnnnnnnnnnnnnnnnnnnnnnnnnnnnnnnnnnnnnnnnnnnnnnnnnnnnnnnnnnnnnnnnnnnnnnnnnnnnnnnnnnnnnnnnnnnnnnnnnnnnnnnnnnnnnnnnnnnnnnnnnnnnnnnnnnnnnnnnnnnnnnnnnnnnnnnnnnnnnnnnnnnnnnnnnnnnnnnnnnnnnnnnnnnnnnnnnnnnnnnnnnnnnnnnnnnnnnnnnnnnnnnnnnnnnnnnnnnnnnnnnnnnnnnnnnnnnnnnnnnnnnnnnnnnnnnnnnnnnnnnnnnnnnnnnnnnnnnnnnnnnnnnnnnnnnnnnnnnnnnnnnnnnnnnnnnnnnnnnnnnnnnnnnnnnnnnnnnnnnnnnnnnnnnnnnnnnnnnnnnnnnnnnnnnnnnnnnnnnnnnnnnnnnnnnnnnnnnnnnnnnnnnnnnnnnnnnnnnnnnnnnnnnnnnnnnnnnnnnnnnnnnnnnnnnnnnnnnnnnnnnnnnnnnnnnnnnnnnnnnnnnnnnnnnnnnnnnnnnnnnnnnnnnnnnnnnnnnnnnnnnnnnnnnnnnnnnnnnnnnnnnnnnnnnnnnnnnnnnnnnnnnnnnnnnnnnnnnnnnnnnnnnnnnnnnnnnnnnnnnnnnnnnnnnnnnnnnnnnnnnnnnnnnnnnnnnnnnnnnnnnnnnnnnnnnnnnnnnnnnnnnnnnnnnnnnnnnnnnnnnnnnnnnnnnnnnnnnnnnnnnnnnnnnnnnnnnnnnnnnnnnnnnnnnnnnnnnnnnnnnnnnnnnnnnnnnnnnnnnnnnnnnnnnnnnnnnnnnnnnnnnnnnnnnnnnnnnnnnnnnnnnnnnnnnnnnnnnnnnnnnnnnnnnnnnnnnnnnnnnnnnnnnnnnnnnnnnnnnnnnnnnnnnnnnnnnnnnnnnnnnnnnnnnnnnnnnnnnnnnnnnnnnnnnnnnnnnnnnnnnnnnnnnnnnnnnnnnnnnnnnnnnnnnnnnnnnnnnnnnnnnnnnnnnnnnnnnnnnnnnnnnnnnnnnnnnnnnnnnnnnnnnnnnnnnnnnnnnnnnnnnnnnnnnnnnnnnnnnnnnnnnnnnnnnnnnnnnnnnnnnnnnnnnnnnnnnnnnnnnnnnnnnnnnnnnnnnnnnnnnnnnnnnnnnnnnnnnnnnnnnnnnnnnnnnnnnnnnnnnnnnnnnnnggtagggcagtcagccattctgaccctcagtaacccttgcttatggagccagaagaagaaagggcattttaaagtacagttgaagtctacatgcgggatgctaagtgtcatgcttactgtgaacctggagtgggtagcaccatccacatacctgcccttgtatttcttcatatcctacagctgtggtcaaccaaggggctgagggctgaattgtttcttgtctcttgtacacaaatagggagatatcacccgtggtgtaaggaaccgcttaattagcatatctaatgaataatgaacagcctatttagcatatccaagcattacattacctgtatgacacctcatgcatgtacagctgaggaaggtggtgacacagcggtcccagcctgggaagggtggggctcccagccttcacacacacacacacacacacacacacacacacaccccgcacacacctgtatactcctttagctggccttttttttttttttttttagtttttcgagacagggtttctctgtatagccctggctgtcctggaactcaatttgtagaccaggctggcctcaaactccgcctgcctctgcctcccgagtgctgggatcaaaggtgtgcgccaccacgcccagctcttagctggccttaattgtttcataagcactgttcctgagtcttcatttctgtgaatttcataatgcacacctttgtataaaattctttagagagcatatttttcccccacttgctccagccccctttgctccggcctagttatttattatacataagttcactgtagctatcttcagataccccagaagagggcgccagatctcattacagttgtgagccaccatgtagctgctaggatttgaactcatgacctctgggagatcagtcagtgctcttaaccgctgagccatctctccagccctagagatcatatttgagagctggggagatgactttacaggtgaaggcgtttgctgagcaaagcctggtgacctgaatttggtccccacaacccacataaaggtggaaggcagggaccagccccataaagttgttcagacatccatccacacatgtgccacggcaagtgtgccaacccctccccattaataataaatacataaaaatacctctgagagctggggagacggcttatttggataacacatttgctgcccaagtgcaaggacatgaatctggatcctcagagcacataaaactcatctgggcgtggccgaccatttataaaaccggagcttgagtggtggagacgggatcctcgaggcaagccggctcacttgaccagaaggcttcgcgttcagcaagagaccctgtctcagtaaagttagtcaatgatgtagggaggtagcagtatcagcctctagcctgcacacacataagtacacgcgcgcacacacacacacacacagaggcataaacacacatacccactgcatacacataagacaggaagaaacaacaaccacctgtccccaagaacaaaccaaccaaggacaagccaacccaaagcacctttaaggagttgtggaattacagttctgttttctttcattaagaaatcctacctggcattaaaaacaagacaacttcatggttgcccttaaaggcataattctacttcttttttcttttcattattatttgtgtgtgtgtgtgtgtgtatgaactcacacaggcacaggtatgtgttgaggagaaaattgtttccccatgggaatcatagtctggtttttgcctctcaggctcctgacccctcccttccccaatggtttccgaagcgaaaggaatttgaggagagaaatctataatctgatctcaaagcaggcttcgtcctgataaatggcatgctctatggccacaacccttaaagtccttttgggtaaatgaataactgatcgtatctgagagttacattcaaacccgagtttacattctgactctcacagaatattctcactgtctcttcttactccaacttcacgtgcttgaaattgatgaaatacccttcctggcgcaggcgcagtgcctgcgaggctaggaccatatatatgacaggggccctctagggataaagaatacaaaaccaccttactttcaatttttttttacaaaaacatattattatattattctatgaacatattattatattatcctatgaacatacatactgctcatgctcctccagtgtctggggatggcccatgcaagacagatgctggaagcttagattggactgactgtgacgtggcgagtccttttcttcaggttcagcgttgtggtaactgtccacctatactagacgcacacgaactagctacttgggcttacaaacacgggacatgtttgggtggaccgggggagggggagaatatacaaannnnnnnnnnnnnnnnnnnnnnnnnnnnnnnnnnnnnnnnnnnnnnnnnnnnnnnnnnnnnnnnnnnnnnnnnnnnnnnnnnnnnnnnnnnnnnnnnnnnnnnnnnnnnnnnnnnnnnnnnnnnnnnnnnnnnnnnnnnnnnnnnnnnnnnnnnnnnnnnnnnnnnnnnnnnnnnnnnnnnnnnnnnnnnnnnnnnnnnnnnnnnnnnnnnnnnnnnnnnnnnnnnnnnnnnnnnnnnnnnnnnnnnnnnnnnnnnnnnnnnnnnnnnnnnnnnnnnnnnnnnnnnnnnnnnnnnnnnnnnnnnnnnnnnnnnnnnnnnnnnnnnnnnnnnnnnnnnnnnnnnnnnnnnnnnnnnnnnnnnnnnnnnnnnnnnnnnnnnnnnnnnnnnnnnnnnnnnnnnnnnnnnnnnnnnnnnnnnnnnnnnnnnnnnnnnnnnnnnnnnnnnnnnnnnnnnnnnnnnnnnnnnnnnnnnnnnnnnnnnnnnnnnnnnnnnnnnnnnnnnnnnnnnnnnnnnnnnnnnnnnnnnnnnnnnnnnnnnnnnnnnnnnnnnnnnnnnnnnnnnnnnnnnnnnnnnnnnnnnnnnnnnnnnnnnnnnnnnnnnnnnnnnnnnnnnnnnnnnnnnnnnnnnnnnnnnnnnnnnnnnnnnnnnnnnnnnnnnnnnnnnnnnnnnnnnnnnnnnnnnnnnnnnnnnnnnnnnnnnnnnnnnnnnnnnnnnnnnnnnnnnnnnnnnnnnnnnnnnnnnnnnnnnnnnnnnnnnnnnnnnnnnnnnnnnnnnnnnnnnnnnnnnnnnnnnnnnnnnnnnnnnnnnnnnnnnnnnnnnnnnnnnnnnnnnnnnnnnnnnnnnnnnnnnnnnnnnnnnnnnnnnnnnnnnnnnnnnnnnnnnnnnnnnnnnnnnnnnnnnnnnnnnnnnnnnnnnnnnnnnnnnnnnnnnnnnnnnnnnnnnnnnnnnnnnnnnnnnnnnnnnnnnnnnnnnnnnnnnnnnnnnnnnnnnnnnnnnnnnnnnnnnnnnnnnnnnnnnnnnnnnnnnnnnnnnnnnnnnnnnnnnnnnnnnnnnnnnnnnnnnnnnnnnnnnnnnnnnnnnnnnnnnnnnnnnnnnnnnnnnnnnnnnnnnnnnnnnnnnnnnnnnnnnnnnnnnnnnnnnnnnnnnnnnnnnnnnnnnnnnnnnnnnnnnnnnnnnnnnnnnnnnnnnnnnnnnnnnnnnnnnnnnnnnnnnnnnnnnnnnnnnnnnnnnnnnnnnnnnnnnnnnnnnnnnnnnnnnnnnnnnnnnnnnnnnnnnnnnnnnnnnnnnnnnnnnnnnnnnnnnnnnnnnnnnnnnnnnnnnnnnnnnnnnnnnnnnnnnnnnnnnnnnnnnnnnnnnnnnnnnnnnnnnnnnnnnnnnnnnnnnnnnnnnnnnnnnnnnnnnnnnnnnnnnnnnnnnnnnnnnnnnnnnnnnnnnnnnnnnnnnnnnnnnnnnnnnnnnnnnnnnnnnnnnnnnnnnnnnnnnnnnnnnnnnnnnnnnnnnnnnnnnnnnnnnnnnnnnnnnnnnnnnnnnnnnnnnnnnnnnnnnnnnnnnnnnnnnnnnnnnnnnnnnnnnnnnnnnnnnnnnnnnnnnnnnnnnnnnnnnnnnnnnnnnnnnnnnnnnnnnnnnnnnnnnnnnnnnnnnnnnnnnnnnnnnnnnnnnnnnnnnnnnnnnnnnnnnnnnnnnnnnnnnnnnnnnnnnnnnnnnnnnnnnnnnnnnnnnnnnnnnnnnnnnnnnnnnnnnnnnnnnnnnnnnnnnnnnnnnnnnnnnnnnnnnnnnnnnnnnnnnnnnnnnnnnnnnnnnnnnnnnnnnnnnnnnnnnnnnnnnnnnnnnnnnnnnnnnnnnnnnnnnnnnnnnnnnnnnnnnnnnnnnnnnnnnnnnnnnnnnnnnnnnnnnnnnnnnnnnnnnnnnnnnnnnnnnnnnnnnnnnnnnnnnnnnnnnnnnnnnnnnnnnnnnnnnnnnnnnnnnnnnnnnnnnnnnnnnnnnnnnnnnnnnnnnnnnnnnnnnnnnnnnnnnnnnnnnnnnnnnnnnnnnnnnnnnnnnnnnnnnnnnnnnnnnnnnnnnnnnnnnnnnnnnnnnnnnnnnnnnnnnnnnnnnnnnnnnnnnnnnnnnnnnnnnnnnnnnnnnnnnnnnnnnnnnnnnnnnnnnnnnnnnnnnnnnnnnnnnnnnnnnnnnnnnnnnnnnnnnnnnnnnnnnnnnnnnnnnnnnnnnnnnnnnnnnnnnnnnnnnnnnnnnnnnnnnnnnnnnnnnnnnnnnnnnnnnnnnnnnnnnnnnnnnnnnnnnnnnnnnnnnnnnnnnnnnnnnnnnnnnnnnnnnnnnnnnnnnnnnnnnnnnnnnnnnnnnnnnnnnnnnnnnnnnnnnnnnnnnnnnnnnnnnnnnnnnnnnnnnnnnnnnnnnnnnnnnnnnnnnnnnnnnnnnnnnnnnnnnnnnnnnnnnnnnnnnnnnnnnnnnnnnnnnnnnnnnnnnnnnnnnnnnnnnnnnnnnnnnnnnnnnnnnnnnnnnnnnnnnnnnnnnnnnnnnnnnnnnnnnnnnnnnnnnnnnnnnnnnnnnnnnnnnnnnnnnnnnnnnnnnnnnnnnnnnnnnnnnnnnnnnnnnnnnnnnnnnnnnnnnnnnnnnnnnnnnnnnnnnnnnnnnnnnnnnnnnnnnnnnnnnnnnnnnnnnnnnnnnnnnnnnnnnnnnnnnnnnnnnnnnnnnnnnnnnnnnnnnnnnnnnnnnnnnnnnnnnnnnnnnnnnnnnnnnnnnnnnnnnnnnnnnnnnnnnnnnnnnnnnnnnnnnnnnnnnnnnnnnnnnnnnnnnnnnnnnnnnnnnnnnnnnnnnnnnnnnnnnnnnnnnnnnnnnnnnnnnnnnnnnnnnnnnnnnnnnnnnnnnnnnnnnnnnnnnnnnnnnnnnnnnnnnnnnnnnnnnnnnnnnnnnnnnnnnnnnnnnnnnnnnnnnnnnnnnnnnnnnnnnnnnnnnnnnnnnnnnnnnnnnnnnnnnnnnnnnnnnnnnnnnnnnnnnnnnnnnnnnnnnnnnnnnnnnnnnnnnnnnnnnnnnnnnnnnnnnnnnnnnnnnnnnnnnnnnnnnnnnnnnnnnnnnnnnnnnnnnnnnnnnnnnnnnnnnnnnnnnnnnnnnnnnnnnnnnnnnnnnnnnnnnnnnnnnnnnnnnnnnnnnnnnnnnnnnnnnnnnnnnnnnnnnnnnnnnnnnnnnnnnnnnnnnnnnnnnnnnnnnnnnnnnnnnnnnnnnnnnnnnnnnnnnnnnnnnnnnnnnnnnnnnnnnnnnnnnnnnnnnnnnnnnnnnnnnnnnnnnnnnnnnnnnnnnnnnnnnnnnnnnnnnnnnnnnnnnnnnnnnnnnnnnnnnnnnnnnnnnnnnnnnnnnnnnnnnnnnnnnnnnnnnnnnnnnnnnnnnnnnnnnnnnnnnnnnnnnnnnnnnnnnnnnnnnnnnnnnnnnnnnnnnnnnnnnnnnnnnnnnnnnnnnnnnnnnnnnnnnnnnnnnnnnnnnnnnnnnnnnnnnnnnnnnnnnnnnnnnnnnnnnnnnnnnnnnnnnnnnnnnnnnnnnnnnnnnnnnnnnnnnnnnnnnnnnnnnnnnnnnnnnnnnnnnnnnnnnnnnnnnnnnnnnnnnnnnnnnnnnnnnnnnnnnnnnnnnnnnnnnnnnnnnnnnnnnnnnnnnnnnnnnnnnnnnnnnnnnnnnnnnnnnnnnnnnnnnnnnnnnnnnnnnnnnnnnnnnnnnnnnnnnnnnnnnnnnnnnnnnnnnnnnnnnnnnnnnnnnnnnnnnnnnnnnnnnnnnnnnnnnnnnnnnnnnnnnnnnnnnnnnnnnnnnnnnnnnnnnnnnnnnnnnnnnnnnnnnnnnnnnnnnnnnnnnnnnnnnnnnnnnnnnnnnnnnnnnnnnnnnnnnnnnnnnnnnnnnnnnnnnnnnnnnnnnnnnnnnnnnnnnnnnnnnnnnnnnnnnnnnnnnnnnnnnnnnnnnnnnnnnnnnnnnnnnnnnnnnnnnnnnnnnnnnnnnnnnnnnnnnnnnnnnnnnnnnnnnnnnnnnnnnnnnnnnnnnnnnnnnnnnnnnnnnnnnnnnnnnnnnnnnnnnnnnnnnnnnnnnnnnnnnnnnnnnnnnnnnnnnnnnnnnnnnnnnnnnnnnnnnnnnnnnnnnnnnnnnnnnnnnnnnnnnnnnnnnnnnnnnnnnnnnnnnnnnnnnnnnnnnnnnnnnnnnnnnnnnnnnnnnnnnnnnnnnnnnnnnnnnnnnnnnnnnnnnnnnnnnnnnnnnnnnnnnnnnnnnnnnnnnnnnnnnnnnnnnnnnnnnnnnnnnnnnnnnnnnnnnnnnnnnnnnnnnnnnnnnnnnnnnnnnnnnnnnnnnnnnnnnnnnnnnnnnnnnnnnnnnnnnnnnnnnnnnnnnnnnnnnnnnnnnnnnnnnnnnnnnnnnnnnnnnnnnnnnnnnnnnnnnnnnnnnnnnnnnnnnnnnnnnnnnnnnnnnnnnnnnnnnnnnnnnnnnnnnnnnnnnnnnnnnnnnnnnnnnnnnnnnnnnnnnnnnnnnnnnnnnnnnnnnnnnnnnnnnnnnnnnnnnnnnnnnnnnnnnnnnnnnnnnnnnnnnnnnnnnnnnnnnnnnnnnnnnnnnnnnnnnnnnnnnnnnnnnnnnnnnnnnnnnnnnnnnnnnnnnnnnnnnnnnnnnnnnnnnnnnnnnnnnnnnnnnnnnnnnnnnnnnnnnnnnnnnnnnnnnnnnnnnnnnnnnnnnnnnnnnnnnnnnnnnnnnnnnnnnnnnnnnnnnnnnnnnnnnnnnnnnnnnnnnnnnnnnnnnnnnnnnnnnnnnnnnnnnnnnnnnnnnnnnnnnnnnnnnnnnnnnnnnnnnnnnnnnnnnnnnnnnnnnnnnnnnnnnnnnnnnnnnnnnnnnnnnnnnnnnnnnnnnnnnnnnnnnnnnnnnnnnnnnnnnnnnnnnnnnnnnnnnnnnnnnnnnnnnnnnnnnnnnnnnnnnnnnnnnnnnnnnnnnnnnnnnnnnnnnnnnnnnnnnnnnnnnnnnnnnnnnnnnnnnnnnnnnnnnnnnnnnnnnnnnnnnnnnnnnnnnnnnnnnnnnnnnnnnnnnnnnnnnnnnnnnnnnnnnnnnnnnnnnnnnnnnnnnnnnnnnnnnnnnnnnnnnnnnnnnnnnnnnnnnnnnnnnnnnnnnnnnnnnnnnnnnnnnnnnnnnnnnnnnnnnnnnnnnnnnnnnnnnnnnnnnnnnnnnnnnnnnnnnnnnnnnnnnnnnnnnnnnnnnnnnnnnnnnnnnnnnnnnnnnnnnnnnnnnnnnnnnnnnnnnnnnnnnnnnnnnnnnnnnnnnnnnnnnnnnnnnnnnnnnnnnnnnnnnnnnnnnnnnnnnnnnnnnnnnnnnnnnnnnnnnnnnnnnnnnnnnnnnnnnnnnnnnnnnnnnnnnnnnnnnnnnnnnnnnnnnnnnnnnnnnnnnnnnnnnnnnnnnnnnnnnnnnnnnnnnnnnnnnnnnnnnnnnnnnnnnnnnnnnnnnnnnnnnnnnnnnnnnnnnnnnnnnnnnnnnnnnnnnnnnnnnnnnnnnnnnnnnnnnnnnnnnnnnnnnnnnnnnnnnnnnnnnnnnnnnnnnnnnnnnnnnnnnnnnnnnnnnnnnnnnnnnnnnnnnnnnnnnnnnnnnnnnnnnnnnnnnnnnnnnnnnnnnnnnnnnnnnnnnnnnnnnnnnnnnnnnnnnnnnnnnnnnnnnnnnnnnnnnnnnnnnnnnnnnnnnnnnnnnnnnnnnnnnnnnnnnnnnnnnnnnnnnnnnnnnnnnnnnnnnnnnnnnnnnnnnnnnnnnnnnnnnnnnnnnnnnnnnnnnnnnnnnnnnnnnnnnnnnnnnnnnnnnnnnnnnnnnnnnnnnnnnnnnnnnnnnnnnnnnnnnnnnnnnnnnnnnnnnnnnnnnnnnnnnnnnnnnnnnnnnnnnnnnnnnnnnnnnnnnnnnnnnnnnnnnnnnnnnnnnnnnnnnnnnnnnnnnnnnnnnnnnnnnnnnnnnnnnnnnnnnnnnnnnnnnnnnnnnnnnnnnnnnnnnnnnnnnnnnnnnnnnnnnnnnnnnnnnnnnnnnnnnnnnnnnnnnnnnnnnnnnnnnnnnnnnnnnnnnnnnnnnnnnnnnnnnnnnnnnnnnnnnnnnnnnnnnnnnnnnnnnnnnnnnnnnnnnnnnnnnnnnnnnnnnnnnnnnnnnnnnnnnnnnnnnnnnnnnnnnnnnnnnnnnnnnnnnnnnnnnnnnnnnnnnnnnnnnnnnnnnnnnnnnnnnnnnnnnnnnnnnnnnnnnnnnnnnnnnnnnnnnnnnnnnnnnnnnnnnnnnnnnnnnnnnnnnnnnnnnnnnnnnnnnnnnnnnnnnnnnnnnnnnnnnnnnnnnnnnnnnnnnnnnnnnnnnnnnnnnnnnnnnnnnnnnnnnnnnnnnnnnnnnnnnnnnnnnnnnnnnnnnnnnnnnnnnnnnnnnnnnnnnnnnnnnnnnnnnnnnnnnnnnnnnnnnnnnnnnnnnnnnnnnnnnnnnnnnnnnnnnnnnnnnnnnnnnnnnnnnnnnnnnnnnnnnnnnnnnnnnnnnnnnnnnnnnnnnnnnnnnnnnnnnnnnnnnnnnnnnnnnnnnnnnnnnnnnnnnnnnnnnnnnnnnnnnnnnnnnnnnnnnnnnnnnnnnnnnnnnnnnnnnnnnnnnnnnnnnnnnnnnnnnnnnnnnnnnnnnnnnnnnnnnnnnnnnnnnnnnnnnnnnnnnnnnnnnnnnnnnnnnnnnnnnnnnnnnnnnnnnnnnnnnnnnnnnnnnnnnnnnnnnnnnnnnnnnnnnnnnnnnnnnnnnnnnnnnnnnnnnnnnnnnnnnnnnnnnnnnnnnnnnnnnnnnnnnnnnnnnnnnnnnnnnnnnnnnnnnnnnnnnnnnnnnnnnnnnnnnnnnnnnnnnnnnnnnnnnnnnnnnnnnnnnnnnnnnnnnnnnnnnnnnnnnnnnnnnnnnnnnnnnnnnnnnnnnnnnnnnnnnnnnnnnnnnnnnnnnnnnnnnnnnnnnnnnnnnnnnnnnnnnnnnnnnnnnnnnnnnnnnnnnnnnnnnnnnnnnnnnnnnnnnnnnnnnnnnnnnnnnnnnnnnnnnnnnnnnnnnnnnnnnnnnnnnnnnnnnnnnnnnnnnnnnnnnnnnnnnnnnnnnnnnnnnnnnnnnnnnnnnnnnnnnnnnnnnnnnnnnnnnnnnnnnnnnnnnnnnnnnnnnnnnnnnnnnnnnnnnnnnnnnnnnnnnnnnnnnnnnnnnnnnnnnnnnnnnnnnnnnnnnnnnnnnnnnnnnnnnnnnnnnnnnnnnnnnnnnnnnnnnnnnnnnnnnnnnnnnnnnnnnnnnnnnnnnnnnnnnnnnnnnnnnnnnnnnnnnnnnnnnnnnnnnnnnnnnnnnnnnnnnnnnnnnnnnnnnnnnnnnnnnnnnnnnnnnnnnnnnnnnnnnnnnnnnnnnnnnnnnnnnnnnnnnnnnnnnnnnnnnnnnnnnnnnnnnnnnnnnnnnnnnnnnnnnnnnnnnnnnnnnnnnnnnnnnnnnnnnnnnnnnnnnnnnnnnnnnnnnnnnnnnnnnnnnnnnnnnnnnnnnnnnnnnnnnnnnnnnnnnnnnnnnnnnnnnnnnnnnnnnnnnnnnnnnnnnnnnnnnnnnnnnnnnnnnnnnnnnnnnnnnnnnnnnnnnnnnnnnnnnnnnnnnnnnnnnnnnnnnnnnnnnnnnnnnnnnnnnnnnnnnnnnnnnnnnnnnnnnnnnnnnnnnnnnnnnnnnnnnnnnnnnnnnnnnnnnnnnnnnnnnnnnnnnnnnnnnnnnnnnnnnnnnnnnnnnnnnnnnnnnnnnnnnnnnnnnnnnnnnnnnnnnnnnnnnnnnnnnnnnnnnnnnnnnnnnnnnnnnnnnnnnnnnnnnnnnnnnnnnnnnnnnnnnnnnnnnnnnnnnnnnnnnnnnnnnnnnnnnnnnnnnnnnnnnnnnnnnnnnnnnnnnnnnnnnnnnnnnnnnnnnnnnnnnnnnnnnnnnnnnnnnnnnnnnnnnnnnnnnnnnnnnnnnnnnnnnnnnnnnnnnnnnnnnnnnnnnnnnnnnnnnnnnnnnnnnnnnnnnnnnnnnnnnnnnnnnnnnnnnnnnnnnnnnnnnnnnnnnnnnnnnnnnnnnnnnnnnnnnnnnnnnnnnnnnnnnnnnnnnnnnnnnnnnnnnnnnnnnnnnnnnnnnnnnnnnnnnnnnnnnnnnnnnnnnnnnnnnnnnnnnnnnnnnnnnnnnnnnnnnnnnnnnnnnnnnnnnnnnnnnnnnnnnnnnnnnnnnnnnnnnnnnnnnnnnnnnnnnnnnnnnnnnnnnnnnnnnnnnnnnnnnnnnnnnnnnnnnnnnnnnnnnnnnnnnnnnnnnnnnnnnnnnnnnnnntcaggtctgccaggctcagccccaatggatagatgaaaccagggcatgcctatttcttttgcagctaggcccccgtgagatctgaacactttgaccttgagagcagaaaaggtcatctagaacaattattgattttgtccggtccggttgtgtgcctctctcccctcccccgacctgtgaatgcctccacagagctctgagatcacctttggcttctctgcaccgcccctccagcctccaggtttgagttcccattcctggtttgacaataataccctgcccttttgacacccacccagcaatctgccgcaggcctgtccttcctcaacagcccctttagtaactatgtaacgagaccttgaaccagaaaaatacacgggttgcaaaagagataacctcctcactggcttgcttggtatcttttttttttttaagatttatttatttatttttatgtatgtgagtacactgtagctttcttcagacacaccagaagagggcatccaatcccattacagatggttgtgagctcttgtttgctgggaattgaattcaggatctctggaagagcagtcagtgctcttagccactgagccatctctccagccccttgcttggtatctttaagccaatgaaacaaacacctcttcatttttgcacttaccagagggactctaggtggcaggaaatgaagaacggtaatggcctgggagttcagcagacaacggaccgggaactctcaagtaggtcattctgtctggtcgcttagaggctttatcaactaaatggagagcaattgttcctctgctgtccatttggtggaagcaaatgttgcagtttagcttatggtggaagcagtttagcttagaggaaagtgtgaggcataggagaactggattgattggtggtgttgaatggcaggccaggcatctggcacagggtctgtcatctgcacatgtggcatttctatggacggagaaagagcaaggcccccttaagctgcagcatgtcaaatgtggggtgctttggaactcactgtgnnnnnnnnnnnnnnnnnnnnttttcttcaggttcagcgttgtggtaactgtccacctatactagacgcacacgaactagctacttgggcttacaaacacgggacatgtttgtgtgaccggggaggggagaatatacaaatgtaaatatcagatcacaagatttacgtaacgtgttagcacacatacacacaggactttgatttagttttggtttttccggtttctgccgggcagctgttttccaccaggtcacacccaggcaatgatgtcttccgctccggattgtgaattgtctgcctgcacgaaaacgttcactttaggggagacgtgaccagaggggtatactttcggacaagccagactcaaatcctgttctctgaacggggcgcgtgtagaacacagctctgttctagaagccgggtgtgatggataggggaggcgggaagccagggaatgggagacacactgacaggagtcagggcttggctagtgtgtgtgcatgttgcgttcctgggttgttcagatactggtttggaggtctccattgaggagggtcctctgggtctccgtggtctcattcagccgggatttgtcctgcttactgtcgctcctctccccatcctccgtaccactcaccttgaccaagcaaagaacattctggaagctcttcttgaagttgtcagacaagaaggcgtacaggatggggttggcgcagctgttggcataggtgaggatcaccacaaagtcaaacatgcctttcagggctggggtgggactgatggccacagacacggaagagacgttgaagatgtagaaggggagccagcagaagatgaagacagccactacgatggacaccatgcgggtcacctttttctctgactttttcctcttggatgatcccactcggattccagaggacttcaccttgatgatgatgaacaggtagcagagacaaatgatggtaaggggtaccaggaaccccaggatgaaggcgtagataatgaaacctgtgtaccacgccccggattcgcctggccagttgatggtacagctgcttctgccccactggttgctccggaggccggcgtatatcatgatgggcaaaatgacgagcagagacacacaccacacagccacattgatcatcttggctgtccggggtcgcctccatttggctgacttaatggggtgcaccacggccaggtagcggtcgatgctcatgaccgtcaagcagaagatactggtgaactgattgatgccatctacagtcatgaccacccggcagatggccttgccaaaaggccagtggactagcgccacctgcatggccaagaagggcagccctagcatgaagagttcatctgcaatggccaggttaaggatgtagatgttggtgatggtcttcatcttggcatagcggaggatgacataaatgaccagcgtgttgccgcacagcccgacaacacacaccacgaagtagatgaacgtgaggacggcgttgcttgtcatgtcgtaatatggctcggtctggttggagccattgcttggccccagtgagccgttgaggtcaaatggagaggacacccacacttggctcccattcaactgctcagagctcatctccatggctgctttccactccgtctagaaccaagctgcctagagatcttcctctcgcctcacaggactctgggggccaagattctactgtgacatctgggaaaagaagcagaaaaagtagccgtcagtcccaggctacttaggctccctctgtttcttgttcatcttcttagtttcacgttccatgcccccccaattcctcttttttttcatgtattcatgtgtgctgctgcatggtgtatgtgtgtgtttgtgtgtgtgtgtttacataggtttgatagcctcacccttttttgagtcatgatgtttcaccatgtagcttgggctagctgttcagtgagctgcagagatccacctgtgtctgcctcccccacggctgtgattacagatatgtatcaaatataccggcagttttatgtggttctggaggttgaactcaggtcttcttgcttgcaagtcaggtgctttattgacggagccatctccccctcttcctccctccttccttcttttctttccttcccacatcactccctctctcccttcttcttcctcctctcttcttcctcctcctcctcccctctctccctcctccctttcccctcctccttcttccttgagctgagctagcctggagctcactatgtagccttagctgactttcatgcgtagcactcccatgcctgggcctctgctgtttggagtcacagtgagctaccaatcccttgttccccttctatgcatttttcaattgaaaagcaagttttttttttttttttttttttttttctgtctagctgccagcccacctgtcagcctgaagactttttgaggtctttttttcaatggtgggggaagggtttgagttaaaccatcatcctagatgacacacatgtggcagacggctatggcttcaaacacatagactttgacccctaaggaattgaccgatccagactggaaaaaggcagatcttggagggtttcagcccctgtccctggaggagtctgacaccagcatttggggaccccaagaacaactctatgctggcttgatgtctgccaccatcagagatacccccgcccccgtggtgggaaaactcaagaagttaaagggagaacaaactttggctccagagttgagccccacgtgaccccatgcccagcccttaactgctgtaactctcctttgtcaacacaggggtgtcatgaaggttaaacaagagaaagtgtgtgcaaatcctagcattgtgcaggcttataatcagagcctcataaacgttacctccccccctctactgtctcattatctctaatttattgaagtctgcctacacagtgaatcaagttatagtcttcaatattaaaagtaagagtctggcttttttttttaaatgatgctttaggccctctcctcttcctccctcttctcttccccctctttctcttctcctcctcctggttctgattttgtaacatcaatgttctccattctccactccatctctgcttgggaaggctctctcctaaagaccttttgcctgcagttctctgacttaggacaaaaaaacccagggaactaggggagggatgtaggcttttcatgaatgtcaaagatgcttttgttatttatttatttatttatttatttatttatttatttatttatcaagaattaaagtgtttcttgggctggagagatggttaagagctctgactactcttttagaggtcctgagttcaattcccagcaaccacatggtggctcacaaccatttgtaatgggatccggtgcctcttctggtgtgtatgaagagaacaatggtgtactcacattcactaaataaataaataaataaataaataaataaataaataaataaataaaataaaaaaccggatggagtctagtcacacccattgtccccattgtccccaggaggtgaggattccgtcctccctcagtggaaactgaggcttagagagttaaagtgcttggtggagtgagcacttggacgagaaccagctggccccaagtcttctgtgactttcaccatgtcccagctgatgctcagtgggtcgaagctggtggctggtaccttaggccttagttggaagccactggctcaagtgacctccatgctgagaaaataatgagaattctgttggcttggcttaagatgtgaagcaccaggtcaacccacaattaagctatctatcacagttataaaatgtgtgtgtgtgtgtgtgtgtgtgtgtgtgtnnnnnnnnnnnnnnnnnnnnnnnnnnnnnnnnnnnnnnnnnnnnnnnnnnnnnnnnnnnnnnnnnnnnnnnnnnnnnnnnnnnnnnnnnnnnnnnnnnnnnnnnnnnnnnnnnnnnnnnnnnnaagaactggtcaagggcggaagtgtccagcatctctagttcacgtgcctgagcacgtttcattgaagcagagggcttctccaagtgattgcctaacactggtcgaggctgcagggcacgttaaagatgtagcaagcaacaggcaggtgcgattgattcgtgcccacctctgtctctgattcgttctcaaggccaagtgatggcctggcttttctttctgcagtaatttccccagcacatgcttggtcagtgaggtctggggttttcgcatttgcattttggggacccatggcattgtgtctacattgggtaagcaagcagaagcaggcagccattacaaccagaagccataaagaaactccttttagtatccccagattaacttgggttatttcccctgtcttccccccacccccttctttctcatcctgtcagtgacttaattctatagacccagaatcctattcaggctccctacagtgagacctcacagtaaccaggagctcatgacatctatggacagtgagagggtacttcaatgtctgactaggactgaagacctcccctgggctgttgaatccctgtctaaagccaaaaggaggagtgggggagggggaggaggaggaagaaggaggggaaagaggaagacagaggtgggacaaggccggatgtgtttcttcagccctcactgtgcagaaccagaatgaatggcggggggtctaggggtgtgtgtggagggggtgtcacctttctctgaaatgagctgagacacatctccactttggggagggaagtctgggaaggtgggtggaggtcatatgctgggaaccccatgtctgaggaagacacgagcttagaacctaggcgccctatgtaacaagcccaagacctccaagtggcgtcttttccttttccaatcatctcactgcaagnnnnnnnnnnnnnnnnnnnnnnnnnnnnnnnnnnnnnnnnnnnnnnnnnnnnnnnnnnnnnnnnnnnnnnnnnnnnnnnnnnnnnnnnnnnnnnnnnnnnnnnnnnnnnnnnnnnnnnnnnnnnnnnnnnnnnnnnnnnnnnnnnnnnnnnnnnnnnnnnnnnnnnnnnnnnnnnnnnnnnnnnnnnnnnnnnnnnnnnnnccaccgggcgatacttgttgaattgtgcttaaattaaatgccctgggaaagtcaggctctctgctttgctgctaaatactggcctgtagcttggtgggtggcgtcccctggctccgatggaaagaagggtttccactcaggaaccccctctttccctcccacagactgctccacaactagaggagggacaggtgggtttagtttctttccagcatctttctgttgtgagccctcaagacctccccatctccaagcctaccagacacctacacacacacacacacacacacacacacacacacacacacacacacctccaagaatctgaggttggaacttgcagcagccctgtgtagcccaccacgatgctagagtgcccctcgccattggggcgaaggtggataagcgaggctcaggacgatggagttagtgtgaggaaaatatttagggtcataactcgctgactctggaaacaacgtgttccctaagggatctttaccgtttctaggcagactaagggagagtggattgcggtgcctgcaatgttcagcttcgaaacgcagaggggactgaggtgccaggggcagctaggagcgctgacagtcgcttggggatctgaccattcagtagctggttctctccaatctagacagattctctgcctgagggcggcgggtgtgtgtgtggggggggaggagggagggggacctgaccgcagacgaatctgggctgcctccccatggggcgataaagagcccccgaagaatctgctttccttctttttcggtgacgttcccatcactgtccctccctaacttaggtctcagactgtggaccctgtggtggcacttggcatgtcccttctcttttagctggtctcgcttttctcggaccagggctgtttcgcaggtggctaggaaacaagttgtccccatcggactcgcagggcacacgccacggtacttgggcattttctttgagaacaaatccgtcccggaacacactacctttccaccccagacaccacgatatgcatctttcatccacctgtcacctccaaaggcacaaaagcagagaatttgcgcgccgggaccaacgtgcaggtcgccgggatcggcggtctatccccagaacagatgcatgcaggtgcccaaagtgtgcttgtccctccctccatctcacggtgacacacgcgtatgcacactggcacccctcaccttggttttcctcgagcactcgcttccctgtgttctctagcacccagaagctgttcttttacccagctgggcgtccaggagcacagcaggcttagcgggtgtttggcgctcagcagtggctcccggggctcccagcttccttggctggctcgtgctggcccttctggcgtctgagagagcttgcccgggccccgagagagctagcttggcctgtagatcattgacgcccagccgcggactggtgctccaggcgccggtggcctcgcgagcgcgccggtggctgcgccgctagcagtggcccgggcgggtggcagcccctgggcacacttccccacgcccccgcccgtgacgtcacggcagcttggctccgcctgccgggtcctgttggacccggtgagcagagtggagaaaacctgcgggtggcccaggataagacagcagaccttgatgctgttggatggtgaagcgatgtcagtgtctccacgactcctccctatgagggcgcgcgtggctttctttccgatttcagtgactcggtctggttttacccaacaaattccaggcagctggtgcggcgacttgggtgacctagactagctccgggacctttaagacgtgttctcaagtttgcaaagccgtgcctaccacggtccagtccggggaacagggcacaggttgcagagtcaggctaagggcagaggaaaaaggggtgacagcagcaagcgtgtctcccgtgcaggcgcctgcaggtgtgcatgcgcggggcacctggcttcagttcctgcagccagcaggctccgcgggctccaccgctctcccaactggaggccccgggccatgcagtctcttctagctttaatttagcccgtcagtcactgcttgctggtctgacccagccccagcccaaccgttccgcctacgcgcgctgtggcgctctgcgggagcaaggagggactcacaagaagtgggagatgtgtcgcatcaagttgcagctatttattttttgactgtgatgattcagccgatgttccaatagtttaataagtcataatcaatcctgtagcctcccttccttcacctcttaacactcccccagagagagagagagagagagagagagagagagaggagagagagaggagagagaggggagagagaggagagagagaggggcagagacagacagacagacagagacagtgagtgcaccctggtggtttctagaacatgaaaaatcagaaaacaaacccccccccccccgattagctttctctgtgggtcctgatgcagccatcctgtttttgatctgcttgcgggttcatcggggaaaagcataaatccaggagttgtgtatgtgcggtgagttttgacagggagccaggcagcaggtaaaagcagcccggaattcttgtaagtcagagtgtcgctcactggcaccatctctacgagatgtgtgggctctgtggacttgatggagattgaagcagtggttgtcgggtcctagtgttgtgtgggttggcttgtctttaggtttttttatgggcggggttgaagggttgaatagtgcagctctcagaacgaggggagtggccctgggggaaagaaggggccctgagtgagctcaggcctcctcctccctgagacacagttgttacaatgcctattgccccctctagttaaaaacccttccgggaacagagaaggatgaagagccaggaagtgtccattctgagctcggctctcttcgagtgtcatgagaccttgtaaaagttcgtcacctgttgctgcagtttgtgtattgtctagcaaaatagctcattcaaaaacaggaacccctggttctcagtagttccttctctcatacacaaggtgacccccagggggcagtgtacaggtttttttggtttctgtacttttggttccatatcaacaccaccagcaaaaaagcaggctgtccttatcagctaaataatcctttcccaaacaacgtggggatcatttctgtatgctcttaacatgctgagcacacacaataaaatccaccctccgtgcacttgggaagtcttccctcagctctctcagagtcaggtctgccaggctcagccccaatggatagatgaaaccagggcatgcctatctcttttgcagctgggccccgtgagatctgaacactttgaccttgagagcagaaaaggtcatctagaacaattattgattttgtccggtccggttgtgtgcctctctcccctcccccgacctgtgaatgcctccacagagctctgagatcacctttggcttcgctgcaccgcccctccagcctccaggtttgagttcccaatcctggtttgacaataccctgcccttttgacacccacccagcaatctgccgcaggcctgtccttcctcaacagctcctttagtaactatgtaacgagaccttgaaccagaaaaatacacgggttgcaaaagagataacctcctcactggcttgcttggtatcttttttttttttttaaagattttttatttatttttatgtatgtgagtacactgtagctctcttcggacacaccagaagagggcatccaatcccattacagatggttgtgagctgcttgtttgctgcgaattgaattcaggatctctggaagagcagtcagtgctcttaaccactgagccatctctccagccccttgcttggtatctttaagccaatgaaacaaacacctcttcatttttgcacttaccagagggacgctaggtggcaggaaatgaagaacggtaatggcctgggagttcagcagacaacggaccgggaactctcaagtaggtcattctgtctggtcgcttagaggctttatcaactaaatggagagcaattgttcctctgctgtccatttggtggaagcaaatgttgcagtttagcttatggtggaagcagtttagcttagaggaacgtgtgaggcataggagaactggattgattggtggtgttgaatggcaggccaggcatctggcacagggtctgtcatctgcacatgtgacatttctatggatggagaaagagcaaggccccttaagctgcagcatgttaaatgtggggtgctttggaactcactgtgtagttcaggctggcctcaaacatgtgacgatccttgactgcctctgcctctgcctctgcctctgcctctgcctctgcctctgcctctgcctctgcctctgcctctgcctctgcctctgcctctgcctctgcctctgcctctgcctctgcctctgcctctgcctctgcctcaagagctgggactgcaggtctgtgaggccacacctggacttgatgttttgtttggaaactatggcatgtgattaccatgaatttttaaggacatgcccattggcctagagggcttgaggtctctttagattcagcaggggtgacaggagcccctttcttcccttctctctccctgcttatggaacctccttggaaactgctcctcagaatcccttctctctctcctcttcctacttccttctccatcttgctggaagtgcattaagaatgctggtcccaagagggacctcggagcctctgatcaagaaagccaatgccacgtagttgtgtaagtgagaaaaccagactcagagatgccaagtgacttgcccaagatcattcagccagggactagaaaggcaggagtcgagttggctgacagtgtcaggctatgaaaccctggatgaggggagggagtccttccccactaccagcctgagcatctctcttcccctcgtctgtcatgcctgttaacataacaaggttcctcatcactcatcctggaacaagtcctcggtgagagttggcaaagagcaagctgtctccaaggacattccctggtccttactggagtgctcatctgtcacaggcccttcagggggagagcatggacagctcagaaagggtggccatcacacctgccttgcaggtgcagtgtgcctcctgagaacaccacgaggtgccattcattcctggcccattggcttgcatggggcacaaggctatgatctcagtaaccctgaatacctctggtactgccactggcaccattcatttggtcatttgaagacatcttgaggtaagaaactggctggcctttatctaccccagtgtttcacacttgatttagctccgagaaccttcctatgaatccatttgaacacatattgagtgcttaccccgtgctgcactggatgctttgtgttaattcttttttctttttcttttttttttttttccgagacagggtttctctgtatagcccaggctgtcctggaactcactttgtagaccaggctggcctcgaactcagaaatccgcctgcctctgcctcctgagtgctgggactaaaggcgtgagccaccatgcccggctcctttgtgttatttcttggcatcctcactgcagtctttcaaagcccaatcagtgttcctttttctgaatggaccaaccaaggcacagagagactgagttcttcagggttgcaaagctaccagttcaagctgcctgctttgtgagtacccacagtgcagttacccagagcaacagaggctggcagatccatcttgtacaacttgatcagatggaagaggaactattcccctaatgggtagctcctctcctctctctctctnnnnnnnnnnnnnnnnnnnntttttattttatttatttatttatttatttatttatttatttatttatttatttagtgaatgtgagtacaccattgttctcttcatacacaccagaagaggcaccggatcccattacaaatggttgtgagccaccatgtggttgctgggaattgaactcaggacctctaaaagagtagtcagagctcttaaccatctctccagcccaagaaacactttaattcttgataaataaataaataaataaataaacctctcactccccccctccccctgtaataaccacaactggggactcaaccagtatgcttgccctgctgtcaagcacaagggatgcacctgtctccgcttcctggcacgggcatttcagccacgcacccacccatactttccggcccaccccttaagtgtgggttctagggatcaaactcagatactcaaacacagcaaacccttaacggactgagccgtctccagcatggttttagttatctgcagttgtccttagcttcaggaagtctttgtagatgggttctgactagttcccaaatactctggggttctgaccagttatctggtcctcccctgagctgatttcctgctcagaactgtccgattgtcacctgcagggcaggagggtgatctgctactcttcgggcagaggggagaaagaacacttaattatagggtgggacttctgcccgcctgtgcagaggcagctgagactttttataaggaagattgtgttagctctgctcttgagatatcctgattcgtccggctcagcactttggagctcttcgggtggttccactgtgagctggaaaggaggtgccccagaagctaaatctctttgttttagatgatggagaaagaagactgccccggggcagcccccaagtaactaggtctcttttcactctagagtcattttgagcttcattgcagttccagcctgagaccctcacctctgtgtaagtgggggcaggcacaaggccttgggaagctctgtgctgctgcaccagaccagagttttagaatctgtcacctagcctgtgccctcgggtgtgatagaaccaggataggagggcagcatctctgccttctggtcagttcccaccctaagcatgctgcgtcttacaggaatggtttgtctcagcttgcgagagtcaccgcagcccacaaatggtccagaagctgtgcgtggctctccgaggccctgtttgcacctagtgtgaggagtcagtgttgcttgggctcagggatacaatggaggcttcggatgggatcctcctccttccttgagtccacatgcctgtgtgccaccaggagtcaggggattctgcgaggagtcctgctctgtcccctcgctgctctgaacactgtccttgcccatttcttcctgtcctagagcaaataaaaggacatcctttccttaatgggacactcacatttgcattttgacatgactttgtgggggtgggggggagggggaggtacaaacccatggaaggtctccaggtggagatgatggcatggtgttggtggtgaattgtgtttcatttctttgtggattctagctccagcttggagtcagacatttctactgctgaagggcctctatccctagcaagcaaaagctgagaattgctacagtaactacagcagactgacaggtattttcctatctctgtgggggttgctctctgagactgccacccagtaccgaaccctaggtaaggttttacttccagctatgtactcaatgataaacttttttttttaaaaaaagatttatttattttatgtatgtaagtacactgtagctatacaaatggttgtgagccttcatgtggtttgttgggaattgaactttttaggacctctgctcgctccagtcaaccccactcactcccatcaactctgcttgctcaggcccaaagatttatttattattatacataagtacattgtagctgacttcagatgattttgttacaggtggttgtgagccaccaagtattgctgggatttgaactcaggaccttcagaagagcagtcagtggtcttacccgctgagccatcttaccagccctaacaataaactttttaaaatttaggcatagctgggcagtggtggcacacacctttaatcccagcacttgagaggcagaggcaggtgtatttctgagttggaggccagcctggtctacagagtgagttccaggacagccagggctacacagagaaaccctgtctcgaaaaacaaacaaacaaacaacacagaaaaaagtaggcatagtaaaaaaaaaaaagaacaataaaaactaataatgagatatgataatatagtaggatataagaaaagtttttctaagttgtgaatgactcgtttctggaattttcatttcatattttcagacctgggtttaccgtgagaatctgagactgtagaaagagaaccctggaaggaaggggctttaaaccctatgagctgcagttcccatgccggcctcagggtggcgtgagcacacagaactcctctcggagtctaccctgttctcagctccagccctgcagaatggaacccaaaaggcccctctacagctgtgctttttctcttcttcttctttctctgtccttctgccattcttgagaagtgactcagaatgatggccgcggtgccatttagggaagagtcaccatggatggggagagagaatgtcaggagctcttataagggattggcttcagagacatggccctcctggagagcggaactgctggattcttttacttcggcctcacaagtagctgagagtacagacgcctcctgtatcccgcgtctggcagaagaaagtctgatagaaagagcggtgttacccaagtggatgtgggcaggctcttgaaaggctgttgccaggagccgcctgcctgtgtctgccgagtgctttggaggccggaagcacttgcccttcccttcacagtgacacaggagtgggctccctagagccccggatttcagttgcaggaccaggagggggctttgttcagctgggtggtgaccagggatgggctctggctactttccaaagtgacagttcaatggtagcttctcccctcgtgggacagctggctggttgactttgttcggtggtccggctgctagtccccaagcttcacggtactcgcctgctctggggccccagaacagatggccagttcagggaggggctgtgggaggcttcttcatcctgcgagtcattatctgtcttctcttgtccacccctcgcccccggccccctgaaagggctatggtgtgcttctgtcctgctccctcccccagttgctctcctgtgactggatctcttctaaacagattggcccggtggctgctgccagggcctcatttctccatgctacttcagacactcaatctctctctccagaaagactgttttatttgggagttaggaagcatgccgatcctgtttgtttgtttgttttgccagctaagatatgtaactgttttgaataatggggtgccaggcttaggagaagtccttacacttagaagaggcatgactctgcagacggacttagtaagcttactcaaacagagctcaaacaatgtttatgctacatatatatgcacagcatataaaaatgtctaagcgacttaagagacttaggctgtatctagacttaggtccacctcccccatgaagaggcggcaccaacattctgctctgaactttgtggtttcagctccaagttgaattttcaaggacaaattccaaaaagtgatttggcagtggtggctcagaatgcatatttagttttctaggacaagcgcttccgagcgtaagttgacttagactgtttagaaatggcaaccactcactggatctatagaaatagcaaccactcactcgatgtacagttctaatacgatcggtgcaaacaaaacaccagcctaaaactcacaatggacaatggattatatgagcctgtgaagactctctctttatgttatgttcctatgtaggtataagcaccttcatctatccatccatccagtctattttacccatctacccatccatgcagctccatccagtcaccatccacccacccacccatccatccacccacccatccatccatccatccatccatccatccatccatctattcatccatccatccatccatctattcatccatccatccatcatccatccacccatccatccattattcatcatccatccatccatccatccatccacccagtcaacatacaaacaaaaagtatatcagagaaaagggagaaatcttgttttctaagccctgaggttgaacttctgacagtcgtactcttgagaccaggaaagccataaatcttcacctcgagtcttgaatcagtagcaggaaacatgtcgggaggtatttatagattcgggatgcctctgcctctgtggctcttccagaaatcgggtgtttttcatgggttcttacaagagaggctccagggttcttatgtctaaagctgtttctgtccctgtttttggtactttgccacaaagctggcggtttgtcaaaaagcaattagtggaacatgactttgtgactacttgatgcacttgtgtggtgggctgggagggagggcagctttggcctcctgtgtggatagaggctgcctggtgggcttggattagtcatcctggttaatgtctcctaaacttacatcatcctctgcaatttgaggcataaatagtaaaatatatgctgattatatgagccaagctttaatacggggcagtagcaggatttgtttggccagtaaaaccttctgatttgagttgagctttctgtttattaagttatagatgaagatgttttagagaggcaaagggcaggagtaggctgctgaggaccggctgcatggccccaccccatccctccacttcaggtaccctctcaaggacaggcaattctaattatttctgctatttttttcctattgatttacttaaatgtgttgtaaatggcgcaaggcacctctctctctatttttttttgaattttctttcttagatactgttgacttcccacggtaaaagatgcctaactcaatactttgaaatctccnnnnnnnnnnnnnnnnnnnnnnnnnnnnnnnnnnnnnnnnnnnnnnnnnnnnnnnnnnnnnnnnnnnnnnnnnnnnnnnnnnnnnnnnnnnnnnnnnnnnnnnnnnnnnnnnnnnnnnnnnnnnnnnnnnnnnnnnnnnnnnnnnnnnnnnnnnnnnnnnnnnnnnnnnnnnnnnnnnnnnnnnnnnnnnnnnnnnnnnnnnnnnnnnnnnnnnnnnnnnnnnnnnnnnnnnnnnnnnnnnnnnnnnnnnnnnnnnnnnnnnnnnnnnnnnnnnnnnnnnnnnnnnnnnnnnnnnnnnnnnnnnnnnnnnnnnnnnnnnnnnnnnnnnnnnnnnnnnnnnnnnnnnntcttcctgcctctgcctcccgagtgctgggattaaaggccaccaccgcccggcgattgcttcattctcaaattctgacagttgcgggtttggtcattgtgttactcttctcttactctgaaaggcacttctttttattttatgtgtgcgagtgttttgcctgcacgcatatctatttagcacaggtgttgcagaagaaggaaggcatcgaattcccttggggctggcgttacaggttacagatggccgtcagggtggcaggaaccccacctgggtcctctagaaaagcagccggtgctcttggccactgagccatctcttcaggcctggcttccttgcctcattctgggcttgttttacttggctatgcgggtggagcatcacctccagagcagtggttcttaacctgcgggtcacaatgccctggggatggggagcgctgtcaaatggctctttcactggggtcacctaagacctttggaaaacacagatctttacattatgattcataacagtagcaaaacgacagctatgaagtagcaacgaaaataatgtcatggttccccacagcatgaggaactatattaaagggtcgcagcgtgaggaaggttgagtaccactggtgtttcagaggaagactatattacagccagactcagagatgatctgagtccctggtacaagtagcctatgttactcacaccccctgggacaccacccgtgttgatgtgatggtagtgatgatatttcacttcctgaatcaggggtggggggagagcttttctgaagtgtgtgtgtgtccacgtgtttgtgtgtatacatgtagagatcagagcacagcctcaagtgcgattccttaggctccttccaccttttgtttgagacagggtctcgatctgtggtcctggctagcctagaacttgctctgcagaccaggtttgccttgacctcaagagcctcctgagggctctgtaaagccctgtgccaccaaacttgagcacattccttagtctctctttttttaaaaaagagaggcttaataaagcatattttgcattttataaggatttatttacttttatcttatgtgtgcaggggtttgctcgctatgtgcatgcagtgcccatagaggccagaaggggccatggagtccctggaactgaagttacagatggttgtgagtcaccatttgggagtgccgagaaccaaaccctattctattgttactttaggtgcttggaataccctctctttactttctttttttctggtgtttttattctgcagctacacctcatttttcattcccttggcttaattttttttctctttatttctgttgttttacttatatatatttttaaaagatttatttatttattttctacgtatgagtacactgttgctctcttcaattggatcccattacagatggttgtgagccaccatgtggttgctgagaactgctgatccatttctccagcccctctggaaaaaaactctctaggccctctgtatgatattttgttcctaattcttgttttgttttaagatgtcatgcccttccccccccccccccacacacacgtaggtgtggctctggtgttggagaacccttgtgtgttattacatttctcatcatgttgacagaatttgtttgtttgttcgagacaggtttctctgtatagcctcactttgtagaccaggcctcgaactcagaagtctgcctgcctctgtttcccaagtgctgggactaaagcgtgcgacaccactgccggctttcttaaggttcattttgtgtcactgtttaagagcgccgacgattggtgggaaaggcaggtgggaggagcctgaggcggctggtcacatgacatctgctgtcttgaaggagagggcgatgaatgcaaagtcatctcgcttctcagctcgcttttctcctcagcttgctctctccttttatttattttttgattttggtcttttcgagacaggatttctctgtgtagccctggctatcctggaactcactttgtagatcaggcaggtcttgaactcagaaatccgcctgcctctgccttccgagtgctgagattaaaggcgtgcgccaccacgcacggctgctctctccttttttatgtagttcagggccctggcctgcataccggtgttgctcatatttaagatggacctacccacctcagtcaacccgatctagaaacatgacgctcccacccacaatatacccagaagtttgtctcctcagtaattctagattctgtccagttgacccttgctataaactgccatgttctacactgccccccgccccagattgttcaaatcggcttctcgcatccccagagctccagcctagatctagagtcctgtaacaccggctccttctaatgcttgtggagccaaatgggaggggtggtataggatgtcaccattagggattccagatgtgtatttaattcccttctttatagcctggtagcccatcctcacctcctggtagaccccatagcccagcgtccggagcctgatctgtccaacccttgcaaagagaacagcttgtgggagagctgccactgtgaggtagcaggtctaagcatccggctgcttagcatgtcctccaccaaccaacctcttctccccaaccccgagctctcagttgttcctggacagctttggagttttgtgatgtgagcagagtttctgtttgatgattgtttgtttgtttgtttgtttgcttgcttgttttccaggcaggacgatgttttgtttttctctcccttttgaagctgtctccctggttgctttccactttcccaaagtggtgttgcagttttcttgcttaacatcattttttttcttcatttgcttttcacttctgtcttagttagggttttactgctgtgaacagacaccatgaccaaggcaactcttataaggacaacatttaattggggctggcttacaggttcagaggttcagttcagtatcatcaaggcaggaacatggcagtatgtagtcagagatgagagttctacatcttcatctgaagactacttgtggaagactgacttccaggcagctagagtgagggtcttaaagcccacacccacagtgacacacctcctccaacagggccacacctcctaatagtgctactccctgagccaaccatatacaaaccatcacatctttgaacaaatttttccctcactgtcattttagagtagtgccatgctctgagtgcaaatggccctcttcagctcaagtgtttgaatgcttgtttctgaagttggtggaactgtttggcaaggattaggaggtgtgggcttgttggaggacgtgtgtcactgggggtggctttgacatttgaaaagcccactctaggcgcatctcttgctctctgcttgctgcctgtggatcagctgttgctccagtgccatgcctgtctgcctcccatcatgatgatcatggactatgtaaccctccaaaactgtaagtgagccctcaattgcatgctttcttttataagagttgccttgttcatagggtctcttaatagcagtagaatagtcactaagatgtggattacctgatgtattttatataatattttattttagtgtttatatgtgtggttaaggtcactgtgggtatgcagtacctgaggagaccagaagagggcgttggatcccctggaaatggaattacaggcagttgtgaagtgcctgatgtgggagctgggaacttgaactgaggtcttctggaagagcagcaagtgctgttagccattgaacaatctcttccggcccttcatcttctgtagttaaacagacatcttaacaggtagtctgcatttgggtgctgtttgattttgttaatttgtatgtggatatattttttaaagattggtttacttttcttttgtgtatgagtaccggcagcggtcagaagagggtatcggatcccctagagttggacttacagatggcagtgaatcaccatgtgggtgctgggaagcaaacccaggtcttttgcaggagcagcaagtgctcttgaccagcgagccatctctccagcactaggtggagacattttcaattctcatgtagttgcttataaccagttgaacattgttgaactggccagctttggacttgcttattaatttgtttggccaaatgcttttccgttgaggcagctcacacagggtccccaccccagagattctctggagtctcactctgggtcagtctgagtgagcgggtggtgaggctacactaccgggctgtccttcaagcaatgccattgttgttatgtctgcctttgcaaccgcagctgacttgacttctacacacatacacagacacacaccccttctctacgaataggttctctagttggtgacatgtgctggcgaagtcagatgtacagatatgctatctctgtctctttagggtacctcctcatgacatgtgtgtccctttggtcctgtgggggtccctttctagtccatgaccctctctttacttgagctgtcctccttgggtctcactgcttctttctgtcttcccttcctctctcatctcctcagtccctctatattcacctaatcagatctgtcgagtatttgttctgtgcccgttcctgcccaaggggaggtggacacacacctgtcacactagatgcctgtcatactagatgcctgtcacactagatgcccagggctctaatggctagataaaaggaaaaagatcaagccagcgattgtgactttgcctggaaggaatgggattacaaacacccattaggtaactatctgtaacatacggaaggatggggaagatctttccaggtagaccagctgagaagagacacgcttgcctgtgaggctttcccagaagcctcagtgtggcatgtgtgcttgcaaaggctctgtgctccgcgctctggtttaaagctataagctgcctctcccagctgcatgcttgtagcattgatggagaggcatgccgatggtctgtgtgcatcatgctctgcgttctgtctgtagattgatgtcctttcagagacgtggtgtgttatgagagagaattaaggagagaaaaaggcaggtagggctgcggttgaggtgagagggcctcaggtactgttggcggttgagtggtatttcccagaaggcttctaacccctggctcccagaacttggcctccttgataattaagtgtttgattgtttgcagctgtaatggagcatgggctaaatggagactactcctgggagaactagtgagagctcttcgttcagagcttgctggagcaaggggtccaccacctgctgagactagaagctgggtacaggcaccaggaaagctacagtgcagacagaaggaaggttcagagtgggaactgttggaatggcatagggcctcccagcaggactccctgcatgcttggttaggaaatatatctgactttcttcagcgtgtttgactgctgtcttactcagggtttctattcctgtacaaacttcatgaccaagaagcagttggggaggaaagggtttattcggcttaaatttccacattgctgttcatcaccaaaggaagtcaggactggaactcaagcaggtcaggaagcaggagctgatgcagaggccaaggagggatgctccttactggcttgcttcccctggcttgctcagcctgctcttttacagagcccaagactaccatcctagagatggcaccacccacaaggggacctccccacttgatcactgagaaaatgccttacagctggatctcatggaggcatccccaactgaatctcctttctctgtagtaactccagcctgtgtcaagttgacacacaaaaccagccagtacaactgccctatggggcttttaaggcagctatctcaagacttctcaagtcctggctattgtgtgtgtgtgtgggggggtgcatttatgacaaggttagcttcctggcctggtcactgcagacaatcttgagtaaggcgaaggttctggcatagatctgtttctgtacatggtctggccattgcttgactattcaaacccttcggagttaaatggaagccattagggtgaatcctactccaacagaactagtgtccttgtgagaaaacagacacaggggctgaggctcaggggaagggccagatgataatgtaggcaacggtgtgagcagtgtagctaggaccgaggctaatgaaacaaggaagtcctccctaaagcctctgagaggagggggaggtcctccctgaagcctcctggggaatgaggctttgcctgtgccttcactccaacttctggcctgaagaactttgagactatggggacagaagaggtgttgggtctcctggaactggagttatagatagctgttagctgccatgtgggtgctaggacaggaaccaggatcttctggaaaaatagctagtgttcttaactgggcctacatggttgtcttagggttttactgctgtgagcagacaccatgaccaagacaactcttatagggacaacatttaaaaatggcagagtccaggcaggcatggtgcaggaggagttgagagttctacatcttgttccaaaggcaaacaggagaagactggcttccaggcagcttggacaggggtattaaagcctgagcccacaatgacacacctattccaacaaggccacacctccaaatagtgccactccctgggctaggcatactcaagccaccacaatggtggaaggagaggaccaattcttgaaagttgtcctctgacctccattcacttgctacagcacaggagtgggctgcagacatgcacacgtgtgtgcatacacacacacacacacacacacacacacacacacacgatagatagataaaatatttgtatttatttggtaaaaaataaaaccaccacaaaagccccacagttgatcatcattcccagactttggtagaacactcttgtggccttctggtcttttctaggccaacctgtagcttccttcggctccatcctcttcaccaagagcagttagctcttggcttctccagcctgttcagttcactctctccctaatccctcactctctggggactgctgcagctgacaggaagccttgcccccttttgttcctcccaccagtctctgggtgacatgctgcaacctgacatagccatctctaaagagccagtctcctgtctcctgcccttctccctgcctaagcaccaaggcagatcctaatacatttacatcttggcacagcaaactgaggagagtctggaacccaggttcctgctggtgttttgaaaaaattaaacagctccatatgtgtctgcctccctctgttgccctcctgtctttgcagagtctctctcctggaagcccacgggtcatcctgtcccctccatcctcaccgcccacactgtcccccaccctagtgtccgcggagagttattttatttggagatacaaagtgtaagctacttcagaaccaggaagaaacccttttccatgcaaatgcagtgtgccagcaatgaagaccctggggctggaagaagcaggcagctcctctcaaactgaatattcttcaaagttagcccaggaccaatcaaagcagcagctagggcggggcgggggggggtctcttctggaagcattcaaaggtgtagcgatttctgtttaattaggaaatcatgggagtagggagcaaggctgggtggcttatctgtattcagtataaggctttctctgtattgtaggcagattttcaagtccctttgaaagctgtacaatcaataggagtgccgcagctggcaggagctctgtgcagatcctcggctctcgcgtgcaccacagattgagagggagtgggaggtgaccatttgctaccagccttcaaggcacctcacctaaggatcgtatttggggagggggtggaatcccgtgggatctcaaacaatacatgggggctctctgtgtgggagaaacaaactccccgctttgattccagttaacttcctaattgatacgtaattggagggcccagttttgcttttcttcccagcgttactgaagtagcatcagccagtggaagtttcaggcgcacggcaggtgagtttatgcatatgtagtgacacggtctacaccatcaagatcaagttaatttgccctgttacgtctcgaatatgcaggggaaaggtatcactctcttagaaacccaacgccacgccttcccacactcttcccgaacactgaagatgtcacaggcattcagaagaaatgctactatatcctggctcagaaggccccagcactgcctggagacagctttgggctttcaggaagtggaaataaaactggaaaacgttcttcagagatccaagagtccagggtgcttctggaagaaagagggagagtgctctaggggagacggctgacagatggcgaaggcgccatgtcagctccatcttcctgaccagctgtcactgaggaaatgtgccctaggctggaagggagccagagagagaaaggaagatgaggaatccaggcatccggaagaccctccctcggtccttatgctccaggtccagatgacagtggtctccatggatgtagacgggaagggagggccttgaagcatctcactcccgtgggtagcctgggtcttgtggtgtttatctggagccgactctccttcctgacacccctgtccactgtcaggttacccgcaggtccacctgcgtgggctgctgtttgcacacgctagctctggtttgatagccagccagtgggcgactgcacgacctcagggcctggccacctgacagcagcattgccaggcagcagccggctcacttctcacggatcagtggctgggctcctcttgacctaactctgtccacccttctgcagaagcatttcctctaggacgcagacacagggcaatagtaccgtgttacacattggtcaaaaaccaaccaaccaaccaaccaaccaaaagccaaaaaccccaaggtcaaaagcatttatattgcagtacagttcggctgcagatagtgtgtctaagaggtgtcgctcacggaagaactgatagttttactgtatgataaggacagttccatagtactttacaaacttttaaacatgcatgtattgtgcgcatgtgcatgttgttgtgtgtatgtgggtgtggaggccagagggaaacctctgccgtcctcaggaatgccagccagctcctctgagaaagaggctctcactgcacaggactcaccaaattgtctagacgggctggtcagtaagccccaggaatcctcctgtctttccctccctccctccttccccatgtctctccctccccagcttggggttgaacgcatgcgccaccccacccagcaattctccatgggttctgaggagagcccaggtcctcatgcctgcaaggtaagcaccaactgtccaaattagcttccgccgtcagtgtgccacagcctagagcagtggctctcaaccttcctaaaaccacaacccttcattacagctcctcgtgctgtggtgacccccaggcagaacattattttcatggttacttcagaactgtcattttgctactgttaggaatcggaacgtaaacatttgtgttttccactggccttaggtgacccctgtgaatgggtcattggactcccaaaggggtctcgagacgcacagttcagaactgctggtctagaatcaaatgaggaactcttcattgtggggttgcctggattagccggtggtcatgtctgtgagggattgtgttgattgatgattgacgcgggaggacacagtctgcggtggggagcaccatccctaggcacgtggacctgaactgtatgaaaaagttagctaactggacatgacttcatactcctttaagcctagaactcagaagggagaggcacttgggtctctgtgagttcaaggccagtctgctttacgtaccgagttccaggccaaccgaagctatgtagagagaacgtgtctcaaaagaaataataggtaaatgaataaggaaaggaaagaaagtcagctaaacattagcattaagccaatgatggagcccacgagcaggattcctccctggtctctgcgtcagctcctctgtcagtgatggaccctgacctggaagtgggagctgaactaaatgctcttgccaagtgccattgatcacaacgtgcctcagaaagctcgctgagccactccctcagcccccttccatgcttgaaagtagaaatgaagctgtctagggagcagagggcccatgggaatgaaatgaaagagaaatgaaagaggaggtgggcacaggtgccatggcatcatggcatgcttagggggtcagaggaccatttgcaaaagtcagctctcttcttccaccaggtgggtcctctgattgaactcaggtctccagacttggccgcaagcacctttacctgccgagtcatcttcttggccctgaaatttttttttttttttttttggagagcccccaccaccccgcagctttccatagtgaccgtctcagttttatattcccacccacagcatgtatatatttctatcttctattttgtatatggaatttgttctcatgaattatgggctttctggctgtacctaacactgggcttattatgaatcttagctctcaggaggccaaggcagggcagttgagaattccaggcttgcctaagctttccagcaagatcttgacttggaataaataaatgatgagtaaaaatgaaagaaaatgacaaagttgacttttcccctattccacaacagaactgtaatgaattgatgagaaacaacttaaaaatgaggactataaaataggaagaaaatgagctgtaagaaagtagctaacgctactttgaagtattgtgctgtgtctaatagatggggtagccaggactcttagttagggttttactgctgtgaacagacactatgaccaagccaactcttacaaaaacaacatgtattggctcataggttcagaagttcagtctagtaccatcaaggtgggggcatgacagtgttcaggaaggcatggtgcaggcagagctgagagttctacaccttcatctgaaggctgctatgaggagactcacttccaggcatctaggatgagggttttaaagcccacacccacagtgacacacctactccaacaagtctacacctcctaatagtgccactccatgggccaagcacatacaaaccatcacatcagggatagtagctcaggagatattgtatggatacgtatatgatatgatatagatgatatatgtttatatgtgtatgatataggtgatatatgtttatgatgtatatatctgcatatatatgtatacacacacacatggccttctttgtgagacagccttgatggcctcacattcctgaccttttcaccacagcctcccaggtgctgagattacagctgtgtatcagcatatccgatgatgtctcctttttgggggggggtggtctaccataacaatgatctcctgtacaggcatcgccatctcctgtctggaaacttctaggcatcagatctccctagtctcctttgcaactgagacctgggtgccattgctggcgcatgctggtcacacccacccacataagctggtaacagaagcagggaacgggtacagtgttcatgtgagggcagcagcagcagcagctgtgtccagtctgcagaagtcacaaggctctggtcctggaaatagtatatagggctctggtggccagggctgtaccaggggctatagtttcactgctgttgctggttggctttgtgtcatatgatccttgatggtgccagggattgaaaccagggcttcaagcatatgaggcaagcaccctaccaactgagcttcacccccagccgagtcctgtgctctattatggattccacctgacttttgactctatgtcttgctctgtccctttgagcattctgtctgtgtctcagaaatcatggagcacgcatctgaacatacatgcaaccatacaacttgtatgtatgttttctgggtagttttaaccagtggtctgtctcttttatgtctgtctttttgtatgcttgtgtgtgtgtgtatatatatgtgaaagtacacatgcatacatatgtaaatgcacatgaaggacagaagccgatatgtcattcctcaggatgtgttctcctttatttttttattttttattttattttttgaggcaggatctctcactagtctagcacacacccattaggtaagatgggtctggccatcgagccccagggatttagctgcctgtcactacctcgccagccctgggattatgaatgtgtgacgccacacctggatttcttttaagtgggttctgggactcaaactcaggccctcatgtgtgcaccagccgagacatcatcccagttttagccaatggcgtccttatgcaataaaatatagacagttgtctcagtcagggtttctattcctgcacaaacatcaggaccaagaagcaagttggggaggaaagggtttatttggattacacttccatactgctgttcatcaccaaaggaagtcaggactggaactcaagcaggtcagaaagcaggagctgatgcagagaccatggagggatgttctttactagcttgcttcctctggcttgctcagcctgctctcttatagaaccaagactaccggcccagagatggtcccacccacaaggggcctttcccccttgatcactaattgaggaaatgccttccagttggatctcatggaggcatttcctcaactgaagctcctttctctgtgataactccaactgtgccaagttgacacaaaactagccagtacaacagtattactaggaaatactttcatgattaagaattttccagaagaacttggggttttggaaatgatctaagacattgcatgattaataatatgagatatttgcatgagtgatttaagattaaaattttgtggaagtcatcgaaaacaattctggagggaacttgtctcttttagctaataactgggtcatatattgaaatttccaaaggccaagcaggttgggatgaaaatattacttctaatgagtctcacgcttagtcattttcccaagcggagtatatttccataacggcgggagttggtgatgaaaccttttgatttcccatattgcttcagtgctacctggttagcattgtggtacagcatattactaataacccgtaggtcagcctcgaaccgctgagatctcagtgcttggggaaaaccaagagaaaggaaatgcagccagctgtccttcttccgtacagaagcagcacaccacatgctgatgtaaagaagtgtttccagtggggtgagggaggagggagagggaggagggagaagggaagagggaggagggagactggtttatttagtcaacaacaacatgccttcctcaagtgctctgacatgcattgcttgcagttagcttcaactccaagcaatggaaagtcctaaataactgccctttgtcttagagagaaaaaagtctgaggccagtgttgtgtcccaaaacatcaagtgacactggctgctttggccttgttgttctgtagaaggtggctttcatcttcaggttcctttgtagtccaaaagggctgctagaaacacagctattgcttcaggtttccaccagcaggagggccgaagcagaaaagagcagtctttttactacagaacatttccaggctaaaaccccattcagagcacacagctgcaagggattctgggaaatgtagactagaggtctgcacgtccaaccaagaactagagtttcttctagggaagaaagaggacagtaggttcccatagataactagttgtctctgtcccaagtagttgtaaacaaattagacaaggttagccatagtgagtgatgcatacctttaatcccagcactcagatggatctctgcaagttggagaccaacttgtgctgttcggcaagttcggggccagccagggctccattgtaagaccctgactcaaaaataattaactagataactaactaacttactaacaaaacaaacaaacaagtaaataaatggatacttgggcttatttaccaggggcttgagtcgacctactatgtgtcatacttatagaggtttattttccaggggatggaatcgacctactatgtgttgtcaattctgcccactgtatacgagagaagagccttcagagtggccagaagggagaccagtataaggcagtgcagaattatcagccctggtctaggatttcactgcctgggtgtgaatttggctttggcttttcctggctaggtgaccttagaggaactccaaaacctcttgcttttgagagtggctgcttgaagcatgtcatgaatgacacccagtgacccagtacttgatggacactgatactaaaaagttacttcctgaaacgtttttcatggtttgtattattctttgagaattttgtacgatgtactctgatcataactttccccgactcctctcaggcccacccctgtttttcacccactcaagtttatatgtccatttatttatttattgttgttgatattatacccataaaggttagttgcggctcatgtgttcttagttgtgtggccttctgttgcagcatggttgattcaccagggaccacactcttttttttttttttttaatattatttacttattattctttataccagtacactgtcgctgtcttcagacacagacaccagaagagagcatctgatcccattagagatggttgtgagccaccatgtggttgctgggatttaaactcaggacctctggaagagcagtcagtgctcttaagctctgagccatctctccagccccagggaccacactcttaaagacacttcaaaagccatttctcccttgcactccaactcctgcggaggcccatggttcctttcctgacatggtaacacgaccccttgctttggcgttcagaccctttagatggcttcagtgttcagcaggagaagagaggctgctctcaacaccagtctgagtcacacatgattaggaagatacatctgccaggggagggggcaagggagaggggtgactattagcctgtggaaccattataatttttttttttttttttgccagatctgtggctaggagcagctcccaacacaactgagagttggcagtgtttagatgtagaccggtgaggaaaaaaaaacagaagagaataggagattatcagtccttgactaagaaatgaaggaagcaccattttacccattaccatggattgattgcaaggctgcctctagagcaagtggttctcaacctgtgggtcgcgacccctccctagctgatatcctgtgcatcatatatttatttatttatattatgattcataacagtagcaaaatcacagtatgaaggagcaataagataattttatggttgggggtcaccacaaggtgaagaactgtcttaaagaatggcagcattaggggaaggttgagaaccgctgctcttgggtgacacgccacaaacttttcctacacacacacacacggctgcagagaagctatgtgaagctttgaggaccacaaactctctgctgtaaatagtgaccactcttactgtggaaaaaggagccattggcatcccagtaacacttcatccatgcgggctaaggagatgactgtcaataaagagccattccagcctggggaatggaatttgatcctcagcgcaagggaagaggctgggtgtggtgtgtgagccttcagtgtgggctctgggatcaggaggaactcagtggccaaccagcttagctggaccgcgagctccaggttcagtgagagaccctgtctcaaaacctgtctcaaaacctcaagtagagagcaattgaggaagacatccaatggtgacttcaggcctcaacacatataagcacacacgtgtgtgtactcatgtgttcttccttccccgtgtaccctttatgaaaccaggtagtcaccaggtttggcctttgcgccgtgctaatctttggactaacattgagtgcccgaataggccatttcacgtcttctcctcttcttcctttgtatgttccaagtatgtgggttaacatatagccctctgctgactcagtccctagaggggtggcagggtccactgccttgcaggagagacccactttgccactgatcttaatgttttcagggctaagattcgtagctttctggcagaggcgcacttcagctggcatcttgttaacgactcgtgttacattggtgggtttggatggtctctctggtgctccaaccagtcatagaacaggttttcaatttaagctgatgggctccaggggacgggagttagagctgactcgcctccagagctttggcacccaaagtaccacccaccgggatggccttcacccaggcgcaggcagcagggcgctcagagatttctaaaaagttaaggatgcgtggctgtgcactggtttgtatgtatgtgagaggaaaaaaaaaacccatatctttcagttcaccatgttaatcatctgtgtgtatgtgcatgtgtgtgtgtgtgtgtgtgtgtgtgtgcaagcatgaatgcgtgtgtatgtgtgaatgtgtgtatacatgagccctcttgttatttgctgctgtgtagctcaggttagtcatcctatgagattctgggaattgtatctccattgcccatctctcagtgggtatatccagcttgacttggatgctgtcaatccaaactcatgcccccatacttgggaggcaagcatgctacccactgagtcatccctccagccagcttttgttatttattatttatttgtttatttattttaaagaggaccatgggctggtgacactcacctggaacccgatctcagagacccacatggtggaagaggagaatcaggcttgcagttgtctcttgacttccagtggtgtgccctggtacacattctcctcccagaaataaataaataaataaatatagttttttttaaagcaaaagcagaagaaaactgcaaacaggataacctttagtctcacaactatttgagtgctgttatgggtgtatgccccaggttaaggcagtgggctactctgctctcttcaaattctcatcttttaaggacaaagtcaataaacaagtagactaccaaagaagagagagtaatttggctgcagtgtcttgaagggagcagtaagcgctggagagatgattcactgggtaagggactggctgctcttccagtgggcgagggagggttcaagtctcagaacccacatggcgggtcacaactgtttgtatctctaattccaggggaacctgatgccctctcctgacctctgagggcaccaggcatgcatgtgcacagacatccatgaaggcagagcacccatacacatagaatgaagtaaataaatcttttcttttgtgctagcaagcattccagagcagaagtggagggagccgccctgcttacaagcccgtcccacatcaggctcatgtgcctgtctgcagaaacccacggctggaacttaattacaataagcctactcagcagacatttgaaagacgaaggtgcgattcaggtaacaaccgatcaaatattttctttctttcttttattaaaattatttttagccgggcggtggtggtgcacgcctttaatcccagcacttgggaggcagaggcaggcagatttctgagtttgaggccagcctggtctacaaagtgagttccagggcagccagggctatacagagaaaccctatctcgaaaaacaaacaaacaaacaaaattatttcatatctgtgagcgttttgcctgcctgcatgtctgttttaccataggcatatgcagtacctgtagaggtgggaaggggggtgtcagatccgctgggactggggtcatagacagctttgagccaccatgtgggtggtgggaattgaaccctgatcctctgcaggagtagccagtgctcttgagtacagagccctctctccagccctaccattttcaacgaaagatgaagtgccacttacaggactcacacccactccctccatgtacatccaaacccctttcctcactgtgaaataaaaccccatatccattaagtgtctctactcatctcttcctgtagccccctagcaaccacaggtcctctttctcttctatggagttacccactctggccagtttttatgtggggaattacacatgatgtggtcctttgtgtctggcttcttttactgtgatatgtatcactcaatacttcattttcctggttgtataacattccattgtatagctatagcctatatattcatccatccaccagcccttggccatttgggttgcatttgtctcttgactgtcgtaagtagtgtttctagtcatatttcggcacaaggattgtttgtttctattcagttttcttggtgaggaaggggattttgtaagcatagtataatggctatttctggttgtcaactcgactgtctctggaatgaactaccacccagaattggagggctcccctgtgatccaaatctttaagctggaagacacaagtctctgacctggatcttggcatggagatctttaggcatagtggctatgaaaagcttaggcccaggcaaggtagtacacgcctttaatcccaggagactaaggcgaggagatctctgagttcaaggtcagcctgggacaaagcgtccaccaggcgtggtggtacacacctttaatctgggccacaccttctgctggagacctacgtaaggactttgggaaaaggaagcttcactcttcttggcctgtttgcactttactagccagcacatctgtcggaacctacttctacagaagaccagctgaaacaactagcctcgtgggaccgagcaaccactagatccttggacttcccattcccagctggccattgttggggagttggactatatggactgctaagtcatcatataaactccctcagtatctggacagacataccatacgccctgtgactctagagaaccctgactaatacacagagcttgtcttagatgtccctcagtttccaaaccatccttcctaaggagaaggagctgtaccttctctttcatctccttactgagcccagagcttgcgttctcagacctgggatctttaaaagtctgttgttcttgttccaaaagaaggtcaccacatcagctatcctgttgtcccagagccgagggctgcatgtctccccaccaggccctgctttatggtgtcttgatggtgtctctcaagatcctaccttgggggagctggatcagggctggggagactgggacaggtattgggaacccctttcccaggaggagagcagacccttcttggtggatttcccccatgagtcagcccaccacctcccccagtggatggggaagttgtactcaccccaggcctgggatctgtgagattttagggttcactgtacagccttgtttctgagcgattcccctccatctcacatagcccaggctgggacttggactagatgtgtagccacagatgaccttgtatttctgatcttcctgcctcttctccagcgcgacaccctgcttttctgatttctcttttgggatatttatttctatttcagctcaaggggttagtgaactgccaagcatctctctttggtgctactaggagtgactctgtgagcgcgaagcaggggacgaggagggggaaaatagaacatacagagttaaagacacgcacagagagaggagagggcacggagccatgggccagctctttctctgtctttgagtgggaaggcttagtttctctagcatttcagactccccagcacacagcagagacaagagctcagtatgaggaagactatcagctcaccccatgggagggaggcaggatggagcccgtacagttcccctggcacagctgtgccctgcccttgaggattccccatcctaggatggaaaaagcacaactaggcatccttcattacgacagaggtttaattttggaactgctcttgtgtcttgcccaggtcaccctgtcttcagactccccattgtctattagaccaaactctggggaccctgtgttcacttgttagtctaatgggtggcctagtccttggcttcccagggcagggccactttcattgtcagctgggtgccttgggtgtaacttacctctgggggacttctgcattatctaatgtattcctttgaagcattttattcttgctgattgctgcttaaaggtcatttccaaataaacatggactgaaaggtcactgtacccagctgcagactcatctgaaagcagctttgatcctgtttagcgccaaccccgacctcctctgaccttccctgctgcctattctggtggcctgtggttaatcgagttgctgcttgcttttgggcactggaattggatatggggctggtagtggtggagcatagtatagatgatgggtggaaatggcattgcaaacttaaattgtgtgtgtgtatgtgtaagcaagaggtcaaattttgggtgtcattccccaggagccatctgttgattttttaaaattatctatttatttatggctttttgagaagggtgtcgctatatatctctaactggcctggagcttgctatgtagaccaggctgaccgcaaactcacagagattcatctgcctctgcctcctgagtgcaaggattaaaggtgtgtcccaccacacccaactgtgtgtgtgtatattatgtgtgtttccaggtatgccacagcacatgggtggcagtcagatatcaacttatatgagttggttcctttcttccagtgtgtgggactctggggttgaacttaggtcttcttagacagggtagcaagcgtttttacctgctgagccatctttctggccctactctggttttttccaggtctgttgctaccctgtaactgtcagatttggctaggcaggtcagccagcaagctccaggatcctccctcctatcttctctgcctcacaagcattggggttgtaaactttcccctctatgctcgccctttgcacacgggtttagagagtcctgtcctcatgccttcaatccccggctccccaatgccaatctgtaccgaagcgcaaatagttgtaaggaagtgggaacggagccatctccagatgtcactgaggagtcctactgaagtcactgtgcagccacgcacctgtccacaatgaatcagctacctccggataaacccatgagatccaggggttgattgagcagattctggttgaacgtagggcagcaaaattacagcaaaggaccagggaagtgtgcctttgcatttcccaaataataaagagggaaaaacgctacctctgtccaaggcttgctaggaaaccgccagtccgagtccatgcacctcagatggattgtacaacagacaagccacgtggaaagtcacagttgactatgcccttcacttgctgtgtcggcttgggtggtgggaagtcacgagcgctgtgaccgtgggcccaccgactgtcagaaagcatggctcatctctcctgggcaagacaggtgggctcaagaaccacctacggaataagccagtcagatgtggacccaagggagggtttctggggggggtaagatgggtcactgtggtacaggagggtgagcctgatatctcagcacccaacattgggatcttggtgagcatccatgactaactttcaggaaaatgaagactttcctttcatctataatggcatggagtgtggagaccactttgctttttttttttaacacttatttatttattatatgtaagtacactgtagctgtcttcagacaccccagaagagggcattagatctcattacagatggttgtgagccatcatgtggttgctgggatttgaactcacgaccttcagaagagcagttggcactcttaaccgctgagccatctctccagcccaatggagaccactttgaagagcctgatttggcaatgtctgtcaaaatgaagcgggcccatcccttatgaccaagggataaggcacatccatgaagggatgctatggcaacctcctcaccagtaccttaacaacacatacttaagagcgctgtctatgccagggagaacgtagaggcgtctggaaagtttctcaggaagatggtgtcaatccgcaatgcacagccccacagtggacaccacactggacatgcagagggagaggtgacttggtcacagcggctcagaaagtgcctgtgctaggccaccaagtcatccagtgtgtctgaggaaactgcctaacgtaaaacataaccatccactaccacactttatagtcatataagtaaatgtgaacaaacataacttacctctatagacagccatgcgtgtatctctgtaaagatagattggcgaatatacatgtgtatcgatatatacatacatgtgcgcatttgtgtatgactcacaaaaatattttagaagaagacacttggaactgctaatactggttaccactctcagtgaccatttaactctgccctttaaaggctgcaggaccttaataatgccacactggggcaagctcctgacacatgaacctctagggaacacaacagctgcccagggaaggaagagcacacccaggccccaggggtaaaccggcttccaagagaggcagaaatctggttaaaggtgggtggtctgatgcttgttttgcttggttgccaggggcagcctctctgggtaccacaggaggttttaattcatagtccatcgcagatgctccgactcagtctgcggcaggaggggaacgtcaccctcagcttcctactcggccagccctgtcttttgttttagatctgctgtaactggggaggggcacagaggagttggagagagttgggggagaagcctaaggcatcacctaacgcaggacccctgcaggaagagcccagtggggccaacaaggttgagaaagatgtctagaaggcggtgactgactgtaggctcgtcactgaagaaaaggccttactgtgacctccagacttctaggctagactaagcagggtcaaagttcatggtttcccatctgagtctaagcccctgccagcctgagtgagtactattatactgtgatcctccaagaaagaagaaaggctgccccaaactataattcccatttctgcttcaaaaatctagcttatgccaactaaaagaactcttttagggcctgggagatggcttcaccccaaaattattccttcttttagaacaagggccaaattccattcttcataatccaggtaaaaaaaaaaaagccaagtctcatagtgtacacctgttaaccccgggggtcaagaggccccctggaactcactggctaggcagccacggtcagtcagtgagctgcgggtcctgtgagagatcctgcctcaaaagctttgaaagcgatagaggaagacagctggtgttggcctctgacctacacatgtgcacatgtgcacccatgcatgtgtgcgcacacacgtgcatgcacacacacagacacacacacacagacacagcacacagacatcatgcacacttatacatacagaaaccagaagaaaattcagaactcttttaggcttagtttgatcacatcatatccataaaggaaattatatatataatttatatatgcaaacataggaataggatccttacatacacagaaaaataatgggataatgggataaaccggaagagggattatttgatatccttgtcatttgagtatgatactttacctttttcaaatcgctcaaactcaaggtagctttttatttttatttttttcacagtatttgcctggggccctactgatgctaatccagactggtaggtttaagacatacattcaagtcaggcttggtggtgtgtatctggaaactgaggtaggggagtcatgtgttcctggccagttggggtcatgaggagagtttaaaattagcctgggtacattggtactttggaactccatctcaaaagaaaatgtgtgtgcaggggtggtgagatggcttggcgaataaaggggcttgctgttaaacctgacaacctgagttcgattccctgggtttacaaaatggatggagagcaccaacttctaccaccaagttgtcctctgtcatgtgctgtggtgtgcacaggtttttggtgtgtgagtgtatgtgtgtgtttgagacaaggtcacatgtattccaggcaggactcaaacttattctgtatccatggacaagtttaaactccttccctcaggaggcgggggattacaggtgtgtactgccacacccagttcatactatacagaggatgaaacctagggcctagtgcatgctgggtaagctacagtcccccaatccagcttttccaagatgctaaattgtgctgggaggaggtcaagaacacatttttttttttcaagacagggtttctctgtatagccctggctgtcctggaactcactctgtacaccaggctggcctcgaactcagaaatctgcctgcctctgcctctgagtgctgggattaaaggagtgcgccaccatgccccacaagaacacattttataattggcaaaatatatacaggcttgccttcctcccatgcagtaagggtgggtaaggcccctgcccctgcccctgcccctgcccctgctggcctggaggcagttattggaggcttttggcagtccccaaacatcacgctgtgacacaaatagtaaacagcactcctctgcagtgggggcagagctgtgagtgccccagcctgggatggcttctcagctgccttctgttagatagctggggaggatgcagatggatcaccgtggctatcaacaacaatcacttccccacccccttttagacaacgccatcagaaagcggctgatgtgactcagaatggtccgggaatgaaaggcaaaaggcttcttattgccttctgtgggttaaataatagagagcagttgtgggtggaggggcagatggcacgagctcccagcagctggaggctgcttgtcttcattactgtcaccaacagaaggcttcctcttagacatgggatagcctttggtcacccagctgattctcttcaggagcctgcagggttcaacctggcctctttttcaagactctaatgaacccgttagctggcaggaggctcacactcactcctgtaagcacctctctcctttgtccggacttgtggtccttaactggggccctctctggtcccatgggagactgccttagctgttacatccgagtttctgctaagcaggctattgtgtgtgccctgtctggcttgggtactcctctgcgctgtgtttgggaagctgtagccaaacaaagcagcctctgaggtccagatgatccggttgccccaccctttcctgaaacacagagacaagaaaatggaccaaggatttggttggtgtctggtgcagcctcttacagggcaaggccctaattgtatacaaaatgctgtctttcacccagcactgaatttggaaggttccccttggtgtaaacacaagaagaaatagtgcatgcctggagccgtagatagagtgagggacaactcccatgtagtggttcggtatccttcgtgcatgtcctggggagctggctgaggtttgggcccagggtcatccactcagaagcctagcactctgcatctttaatagacccccgtctgtgctgggtgtgtgagcatcacaggttgagaggcaaggcataaacctgacccctgagttcccgtggttaggactggtattgttcctttcagggctaaaacggggaagcccttcttgaagctctgtagctgtgtgttcagctttccttcactgttgcgacccagcagcctgggcactgactcaatggccctgggaagatctggatggttggtcacccgggggagggctgtgtggttatgtgtgtgtaagtgtgtgtgtgtacacacatggggaggccggaggataactttggctgttattcccaggaggactgtccatcttctttcaggacatctccttgtcctgaagctcattaatgaggctagcttggagccagggatcttcccagtctctacctatcacggaggggattgtcggggacaacttaggtgtcaacctcaatcttgcaccttgtctgagacaggctctcttgattgattgcttacagttgtgtacctcagattagctggccctcgagggcttcaggttatcctcctggattgtagttcctctgcctgccatcttgccacaggaatgctgggacggcagatgtggccaggatgcctggcttcatgtggcctcttgtgattcagactcaggtcgtcgtgctttggaagtaagcacttgatgcacttgccacccggttgggcgttttgactgtcccttggtgaagaaagttctctgaataccctggtgtgtaaatctcagtgctatagacacctgtgacgtcatgaattttcctgactcatggcagagtccaattttgaccactggatagtttctcgcccgccacaggacttgcgttctctatcccagcatccctttgctccaatcttttcttcttcccttcccagtaactcactgctcccagattcttctctggccatactgtgagcaggccatattctcgactgtgaactttaaattatttcttgccatataattctcaagtttttacctttgaggaaatgagtttggggtgtgtaatggctattcttggttgtcaagttgactgtctctggaatgaactacaatccagaattcgaaggctcacctgtgatccagatcttgaggctggaaggcacaggcttctgacctggatcttagcatggagatctcgaggcatagtggctatgaaaagcttaggcccaggcaaggtagtacaggcctttaattccaggagactaaggcaaggagatctctgagttcaaggtcagcctgggacgaagcaagtcccagatccaggcatggtggtatacacctttaatctgggccacaccttctactggagaccttcataaggacattggaagaaggaagcttcactcttcttggcctgtttgcacttactagctagaacgtctgttggaacctacttctacagaagactagctgaaacaactagcctcgtgggaccgagcaactatagattcttggacttctaactcacagctgaccattgttggggaattggactacagactgtaagtcatcataataaattccttcaatatagagagacatttcatatgttctgtgactctagagaaccctgactatacagggtgaatagaaaaaaaaaagaccatttttccaactcaggagtaacttctacgcctagtagatggggaatctacctaagcaatatatacattaaggtcaaaaggattttgtgatgaagggttgcattgctgggtgggatgtggggctgcatggatgtgggtttggatgaagcctggcagactcagccaccatgcctgcttaaactcccagggcaatggcttggctaaatattattggccagtttcttgctgttaatttctgcctctttgcatcgagttgtttttgcttggttttgttttgttttgttttgttttgttttgttttgttttgtttctggagtcaagagttattcttgtatagcccaggctggcctagagttgccccagtctcctgagaactggcattatggatccaaataccattatcataaccataatcccaacaatgcctaacaatgcccaggttgggctaggggtgtgagccaccacagagcaatggtaggacctttctcatgcacgaagcccccattacatccctagccccaccaaaccccaaacagaacaagaaaggaaaaagtaaggattacttccatctcacaaccctcagatcctccatatcctctgagggtcctgcctcaccatccacagcgtccctactacagcccttaatgacctctgctccaggatgtttggccctcattggtcatggcatggtgttccagggagagtggtaaccatagcatagccaacaagggctccgtaggggagatgaagaagagaatgttagctcttcaaggagcagggttattttagggtgagctctcccatgccccttgccagtctggttaccagaagtctcaccagccttctgtaacagaagctgtgctcacttctttgattaattcctggcttaggggtagtcgtgagatagtcaccaggcgtctggctgggcagtctgtactgtaaagattgattgtcttaaaaatgtggaccgccattcatttatttgacaaatgcttattaaatgcctcccccccaccccccctgcaccagagagggaagttacacacacactcactgcaatccccttcagggctgaacaagctaattggtatacgtgttaggagagtgggacaggggctggaagctacttggctagttgaactatttggagtgatgtatttctgtgaccatgctccctgtttctcaagactgacatctgtggatttcatttcttccttatgccccacagcagtgatttccagcctgcagcatctgagattgaaggaactgcctcctatcacattatcaattattaatatttccaaaagccgagcgaggcagaggcaaattaaaatccgattttcttgctctgggctctaacagcagacccttagttcgctagtgtggttgatcacattgatcccaagggctgattggtagtggcatctgtgtgctttttgatgcataaaaaataggagaaataattaattcttaactagtatattttgcttgaaaaatctgtttcagaccaattttaaaaatagatttattgggctggagagatggctcagcggttaagagcactgactgctctcccaaaggtcctgggttcaattcctagcaaccacacggtgactcacaaccatctgtaatgggatctgatactctcttctggtgtgtctgaagacagctacagtgtacttgccatatatacaaaatgaataaataaaatcttttaaaaaatgaaaaaaaagatttacttttattttatgtgtttgcatgttttgtctgcacttatgtatgtatgcctcatgaggcctggtgaccttaaagaccataagagggacctggatcctctagaactggagttatagatgttgggtattgagccaccatatatgtgctgggggctgatctgtatcttctgcaagagcagccggtgctcttagctcctgagccatcactccagaccctttcaaaccattttgtggttgtgggttatagagctgagttagtctagtctttatagtcagcagagaactgctcaatgattattaaaattaatacaaagtagatttttgttaaagagagcgtgttaccaaaggttctagaagaactgtgtagccttctcaaccccagacacagccatatcaagatatactttctaaagtctactaggtgagccctggtagtcacttggattgaacgcaaagcctatgtattctaattttctgagttggggaaggagaaaaggagtccggggtgtagatatcttgccttgacctcatggttatctgggaacatgtaaggagtctgaagtgttcagaggaactggggcctctggtatatggagggctctgcagggttggaggctcgtagcctgagccaaggcctcaccagccgtctatggatcttgtagggagtcagagaaggtcattcagttgtcaaggctggtctggtggtgacaggcagccctggggcctgtgggaagaggggtgggggatgtacaatgagggagggtgccttccttaggactttgcctctggtcatatgacacttgcccattctgcagctggcctatggaagggagaaaattcttgagaaatgacagattaaaattagttgtgacaattctcgtgaacacttgggagttccaaactggtaaggatgtcaaagcgctcaagaggccttgggcagaaagatggagagtcttgtgttcagtattaggggtgtcttagtcagggtttctattcctgcacaaacatcatgaccaagaagcaatttgaggaggaaagggtttattcagcttacatttccacattgctgttcatcactgaaagaagtcaggactggaactcaagcaggtcaggaagcaggagctgatgcagaggccatggagggatattacttactggctttctcagcttgctttcttatagaacccaagactaccagcccagggatggcactacctacaatgggtggggccctcccatccttgatcactaattgagaaaatgccttacagctggatctcatgaaggcatttcctcaagggaggcgcctttctcggtgataactgtgtcaagttgacatacaaaaccagccagtacaatgggtctgggtttcttggctgggtttattaagtaatcacagaaagatttgatttggggcctagagagatggctcagctgttaagagaaatggctggttttccagaggacccaggttcaattcccagcacccacatgtcagcttacacccgtctgtaactcctgtttcaggggatctgactccctcacacagacatacatgcagtcaaaacaccaatggacttaaaacaaaaataaatagattaattaaaaaagatttgattcagcatttttatagcttaataaaaatatccctgggggctgttgagatggctcagtgggtaagagcacccgactgttcttccgaaggtcctgagttcaaagcccagcaaccacatggtggctcacaaccatccctaacgagatctgactccctcttctggagtgtctgaagacagctacagtgtacttacatataataaataaataaatcttaaaaaaaaatccctaagttgtgaaaggagcccaagaaaagcaggggtctcttctgttttcttcttcttcttcctcttcttcttcttcttnnnnnnnnnnnnnnnnnnnnnnnnnnnnnnnnnnnnnnnnnnnnnnnnnnnnnnnnnnnnnnnnnnnnnnnnnnnnnnnnnnnnnnnnnnnttcttcttcttcttcttcttctccttttttctgttttcattttgacccagggttctagctattaatgcataattggaatgacttcctgtctgacctctgtcaggggcatataattttcttattgtgatgacaactggtatattttttaatataccaaagtccttgtgcccttagtccacatggctaaagctctgactcgctagcatgtggagcttgctcactttcctgtcatacaaatgacaaaaatctgcgtctattagtttcttagggctggcttgataaaaaccagagcaaaatgcttgtctaccaggtagtgtagagattttattctcttgctgttctaaggccaacggtcgaaagatgaaggtgtcaccagtgccatgcagtctctgaagggtcctgaggaagggtttcctgcctcctccagcttttggtggctccttgccttctttggcttgtgtctacattgctctaacttctgattctgtctccgaatgatctccaggtctgtcccagagccgccgcattgctcctcccacggtgtgacacaaacccttgagccaccggagttgctgctccttctgtctcttacagtgcaagtgtcactgagtttaggggccacttgcttaaagcacatgatcgcaccctcagattttatttaatgatatctgctcttcagatgacgtcgttacaggttctggggcctggggtgtgagcatctttatgttcagaggcaatccattcacaagacctcagcggacctcactcagagcccacatgaccaacactggcctccatttagtgccgtgggttgtggagttcctcctcctgctcccttcctgactgtgcacaggtgagggactggctttgcaaaggttaaactcagcttggggtctagaatcaccttggagccaagtctctgggcgttcagtttaggataatggaggaggaagccccacccactgtgggcggcaccattccctggaatgggatctgggactgtataaggagtaagtgggcggaacacagcatttacctctctttgtttcttggctatggatgtagtgtgaccagctgccccaagctcctactgttgtgactttttcatcatgattggctgtacccttggattctgagccaaaagaaaccctttctccctacgtagcttccatgagaatattttatcacagcaacaggagaaactaataacaatcccggctttcccctctgtgtgtgtgtgtgtgtgtgtgtgtgtgtgtgtgtgtgtgcgcgcgcgcgcactacgtactcttttctcacgctccctccctgacaccgcatcttttggaggtcttggcttgtggtcacattccctggtgtgatggtatcagcaggaagctaccctcctctgaggaaggcaatgcccagcctctctctggcatcagctaaactgcatgggatgagttttggtggaagaatagcatcttgaaacccttgctctgacttcatcccaggtctatggatacctgaaagttctgttttattttgttttgttttgtttttcaaggaaaaaaaaattgggtaccaaagttaaaatgctcctacatttcaaataaagaaattcaacccctccccaaagtcaaaaagaagtttttgtaaatttgcttttgaagtgcttcatttaatttacgattggctatgatttcttggcttgtgttgtgcatgcttaagaattctctggatgtgagaaaagtcaaccctcagattagtttttgaatgcgattaaatttttatgaatactaaagtcaataattaagaagggctaatgggcgttaagctaaacattcattaatttaggtctctgcaggtgtgtttttcttttgagtcaacatatttattttgccccaattcttagccattcctcaggccccgaggaagcttggaggccccgattctagcccagtcactttttatttctgaggttcctctgctttttttctctccttgtctatcttttaattcccactatgagttagggatattctccttccaatattcaacccaaggccccagcctgaggtactcaggctctagtgtgagattcctggggctgcctcctgcttcccctacctgggctgactggctgtaggtctcacgtattcagttctcaacccatgggtcgtgccacacaaacctcttctctccaaaaatatctacactaagattcataacagtagcaaacattacagttaagaagtagcaatggaataattttctgggtgggggtcaccacaccatgaagaactgtattaaagggtcacggcattaggagggttgagaaccgttgatctatagccttctagtgctaaacctttttgggacagtttgaccaaatccttaaccttcacctgatttgtcacttcgatctctctctctctctctctctctctctctctctctctctctgtgtgtgtgtgtgtgtgtgtgtgtgtgtgtgtgtgtgtgtgtatgtggttgagattataagtacatcctttctaccttccttttcctctcttcaagtcctcctatatatccaagttcctgctttgatcttgggatcgcctcaccttgctcctgttacaccagcctctggcacaccacccaccccacagacgcagtcattcgaaagacccaaacttggcttcatacttaggtttcattgccttgagatccttaatcagtttatnnnnnnnnnnnnnnnnnnnntgggctgactggctgtaggtctcacgtattcagttctcaacccatgggtcgtgccacacaaacctcttctctccaaaaatatctacactaagattcataacagtagcaaacattacagttaagaagtagcaatggaataattttctgggtgggggtcaccacaccatgaagaactgtattaaagggtcgcagcattaggcgggttgagaaccgttgatctatagccttctagtgctaaacctttttgggacagtttgaccaaatccttaaccttcacccgatttgtcacttcgatctgtgtgtgtgtgtgtgtgtgtatgtggttgagattataagtacatcctttctaccttccttttcctctctttaagtcctcctatatatccaagttcctgctttgatcttgggatctcctcaccttgctcctgttacaccagcctctggcacaccacccaccccacagacgcagtcattcgaaagacccaaacttggcttcatacttaggtttcattgccttgagatccttaatcagtttatcttctatcttgggctttggaagcaatgcatgttggtctgtctgtctgtctgtctgtctgttctgcttcccccccccatccccgtatataatgttttcatgtgtatgtgcacatattctcaagtatgtgtgtgtgtgtgtgtgtatgtgtgtgtgcatgtgtgcacacgtgcacacaatgtgcatgtaggagtcagaggctaatcttgacctctaccttgtttgatatagggttttatcaccgatgcacacgccagatgcacacgccagatgcactagccggtgagcttcccaggattctcctgggatcacctcccagctcatggcaagagcactcttgttacagacttgcaccactctgaggtctggagagccaaatttttgatctcatatttgtgtgcagatgttttaaccactgagccgtctctccagccctccgataccttcctgaacaccgcttctcctccatttaaagaaaacaaaaacagaaacaaacaaaaaaaaacagagtctcaccataaattcctggtttgcctgtagactaggctggccttgaactcacagaggtcagcctgcctctgcctcctctaagagctgggataaaggatatatgctactgtgccagcttctgcactctatgttttgaataaggggcttcccatttggatctcctaccaggccccataagccatgtagttctctgccatagtaatgacagtgcaatattgctaagtaatgacagtgggcaagatccagcctggctcctggtggttcactgggccactgcttccaagcaaaaggaggtgtatgagttaatttttgctgctgtgacaggctaaaatcttggtggtttaaagctacattgattgggttttggttatgtctcagagggaggctgcttgcttttgcttttgctttgcaaagccctgagtttgaactccagcactgtgaccggctaggggttacaagtcctgaaagtcaaggtatgtgaaagcagtattccttccagatgctccgggtaggtctatttcctgaccctttccagcttcaggtgcttgcccactgaccttggcttctgcctgcatttcgctgatctctgtgaccagggccacctctgccattcttctttccccgttgtctccctcttgtccctcatcgggaccactggaatgtcatggacccaccacgtgatccaggatcatttctttaccttaagacccttcacctaatcacacggggcaaagatccttttattatataaggatgacgtcatagttgattctgattgccagtttgtctaggatttggaatcaccgtggaaacacacctctgagtgtatctgtgagggtgtttccaggaaggatgaagactcaccctaattatgggtggtgccagtctgtgagctggggtcctgggctgaataaaaagaagtgaggggagcggagacttttatcttcctctgcttcctgtttgcggctgcagtgtgaccagctgctttgggttccctcctgtcatgtctttctcaggatggactccactcttcagctgtgagctagaataaccccttcctccccgaagctgattttaccggatggttcgtcaatgagaagcataactgatctagatgccatggttaaacaggtcataggtgtaaaggtagatagttttgggcagcaggtatgtgaccgcctgttcggagatgctgctgggtttctggttcaaatctctaaacatcaatccatagcatactcagtgtctgtggtttctggggctaattctgagggtttctgaaatacagcaaacagaaccaggtgtggtggcatcgtcttagcatgtaggaggctgaggctggaggatcggggaattcagagccctctttggatccacaaagagtccctgtttcaaaacaaaacaacggcaaaaaagaacaagtagaatttttggcacaaaaataagccttacttcagaataagaagaaaccacgcattttcagagcgttggttctgagggatctctggtcagtttttcagcgttgtcgacgtgcctcaaatatggtctcctccctgctaccatggccccgggtatgggttgcatggtccattgctctgctgccctgtcttacctagctggagagacccacaacatccctcaggggaaggaaggcatgaatgtccatggcatccttgaataatacaaggcttcagtactaagccttggtttatgtggtacagccaacatagggcagagcaaggtatctgagcagcatggtaaagccatggtttggactgatgccccatgttggtgcacacccagcaactcccacatcccatcccatcactgatgtgtggtgaacatttgctgaggaattggacaagcaggtctctccagtgagtggcgatgcgatggggtaggctggaaactgaacttaaaacattgagccagatcggttttgttagtatgcttgttaacacggcctctgtggacttacagactgggagataggagaaaaggcaggttttgttttgaattttgagacagggtcttgttctgaactcctaatggccctgctttgtttctggagtggctgggtacgccacgcctggtttggaggagttatttaaagcaacaccagtagggaaggggaaaattgatttctgctaattattgtctcagattatatcacccgagggttgattccatattcaattcgtggtggtttttacttagtaattggtatcttattaagctagcagtcgagcaagccaagtatgaattttaaacaccttgttcaggactaggaacttatatctctacagtggatttccataagtcagcaggatcgtgtgcctaagcctctctagagcatttgtattacaggctcagagccaaatgttagacaaaggcgaggaggggccagagtgctgactctgtttctttcctgagccctggagaacagctcttgtctgcaacaggctcagagaagtggtgcctggttgctgtggacttctctgcgtaggttagaggctagctagaatgttctctttatggtttacctgtttgcatcagggagcgaatctgaaggggagaaggcagatctgtcccaactgtgaaggcactgtcccactgtgtcccctgtcctggtaactgtcaacttggcacagcctagacatctaagaggagaatctttgggggatgagttgcttaaatcagattggtccatgactatgtctgtgagaggattgtcttaaagtaggtgggcccaaccagtagtgccagggaaatgttagtggttcccccccccccccacctcccaaaaaccagatagtagctaatcagatgtaatcacagtagggcctttttattcgagctagctcgggcccttagtgcacaggatggcttttgtgatgaggaacccgaaatagctatcagggcaagactttatagtaaggagtaagcggggcgtggggtgagtgtgcaagctattatgacctttagcataattggttggtgttgggagccatatcataaactttactgcttccctctacattggtggtcattaggcagggggcagaattgtaacctgggggtgcacatttgttgcaggcataacctggacatgctggtcttgttgggggtgtaacctggagacacaggtcttgttgggtgttagcttggagactggagctgggcttgtgctctgttaggggataacttgggaaataactaaataacttttagattgcttgagttcaagctctctaaaatggagcctgaatttataagatttgacctctcaaacccactatgggcagtaccattccttaggcaggtggtcctgggctgtgtaagaaagttaactaagcatgattctggaagcaagccagcaagctgtgtttctccatggtccatgccactaggttcatgtcccaatttcactcaatattggactgtggcctggaaggataagccaaaataatctactgccttttttttttttttttgtaagatttatttatttattataggtaagtacactgttgctgttctcagacatgccagaagagagcatcaggtcccattacggatggttgtgagccactgtgtggttgctgggatttgaactcaggacttccagaagagcagtcagtgcttttaactgctgagccaactgtccagactcctctatttccttttctatattgctttggtcatggtgttttaccacaacagagaagaagctagatcacactgccagagtccttctagaagtttccatgtatgtggctttgggatataccagtgtgatgatgctaccagagagtttcagatgaccgggaaggagcagagctagtgggatgtttgttgtagtgattttcaagttgtgctggggtatgaagatgatcagttctcaagtgttatggtaggccacatgctaaccagtgactgaataaatattttttttaaaaaaaattaagttttgttttgtttagttgtaggatgtgtgtgtgtgtgtgtgtgtatgtgtgtgtgtgtgtaccctcattctgtggtgaatgaatggatatcagaggatgacttgtgggtgttctcaccgtccactgtgtcagtcctggggctagaactcaggtcctcaggcttggctgcagatacatttacccactgagctgtctccttggctcaatagagtcttcttgagactcatgtaaaacgttactgagtgatttgttctgagatttataggatgacaccagagagtcacagggttggcttttgtactgctgacattttgagtcagatagctccttatcccggagttgggatactgtaggagagttaacactcctggcttctagcctgcagatgctaggagcgctccccaactccatcactaaatgcctcactgagcagcgataagagcaaaattatttttgctgataacctctgcatgataccgtggtaggtgcaatgggattcctggaacaatttgatccagcagacacacatcattttcctaataactcttaagaaagtctttataaagtgcagccaacagataatgctcttatccctggttgatttattcattcagtaaataggggccatctgctctgcactaagtcccagggagacagaggtacacaaggcaggcgtggtgctgttctcaggagtttgcccttagggagaacaaggaagacaagaaaggtctgtgttaggtcagatattcatggaatgcccttttgaagggtaacatttgaggcaaggtctgaatgacaggagggtccagctaggtgaccctgtgtgctaggtgcttcaggcagagtcagcagcaggtgcagacactgtgagaaggagaaaggtctgtggggtcagaggttgttggtctgtctggctaggacttggggccagattccaggagctgaagaggggagttcgatttcctcaagggcagtgagaagtcctgggggtggcgtgggggctgcaggagtcatggacatgattagactgatcccagaggtacagaaactgggttgttgggaggacagaatggaaggatgctccctgtctggtgagcggggcaggggaagagcgttgtgggggggatggagagactccattgaagggtagggtagtgagcaattcctagaggttgtggatatgattacatatgtaatgtgcacagcagttttcacaccctctattatatattatataaatgagactttttaaaagtccacctagcaaatgataaagatgataaacccttctaacttcagtagcacagctcagagatcttgatgccgtgagggtggcacaagtcaattgtcttctggtcagaaagcaagctggcactacggtctttactgtctcagcatcaaagcactctatctgcctgcctgctacaagggcatagtcatgctctagccaatcacactctagcattgcatcatgggttattgcatcatgagttattacatcatgggtcattacatcatgagttattacatcatgggtcattacatcatgggttattgcatcatgggttattacatcatgggctattacatcactctcatctactacacacagctgacatgaactgattgctcattgctatagcatcctactggatcctgatcttacttctcatttacatgttctctacaaaaacatttaattggggctggctcacagtgttagaggttcggtccattatcatcatggaggaaagcatggcagcattcaggcaggcagacatagctctagaggagccaagagttctacaccttgatccacaggcagcagaaggagactgcatgcagactgggcatagcttgagcatcaaagcctctgctcccacagtgacttactttctccaaaaggggccacacctcctgatagtgccactccctatgaccaagctttcaaacacctgaatctgttggggccatgcctattcaaaccaccaaagaaaggtagaggcattaaagctcaaagtccatgcctagtgacttacttcctccagcaagggtccacctcctaaaggtttcacaacacaaccttccccctacagcactaacagctggggaccgagtattttaaacacaaggctgaaatcctgggactgagtgctgatgtcatcagtgaagttagcttctcccatgtgggctgaagagacacaagtcctggcacagttaatgtttctccatttgatatatctgggaggaaggaatctcaactgaagaattgcctctatcagattggcctacaggtatagctacggggcattttcttgattgctgattattgtgtgggtccattccccctggggtaccatccttgggcaggtgattgtgggctgtgttaaggaagttagcagagcaagccaggggaagcaggccaatgtgtaacatttctctgtggtctctgcttcagttcctgccttgatttccctcgattatggactgaaacctgtaatcctacctcctcaagtttttttttttttttccaccccaacagaaaggagaccaggacaaatttgtagaaaccatacaacgtccctgccattcctaggggggtggacacctgttctctaaacaggattagaacaggagattacatttaactcactttgagggaagcagggacttaaataggggaatgaggagacagggtggtggccttgagtagtgtcttagttagggttttactgctgtgaacagacaccatgaccaaggcaagtcttataaaaaacaacatttaattggggctggcttacagattcagaggttcagtccattatcatcaaggtgggagcatggcagtatccaggcaggcatggcgcaggaggagctgagagttctatgtcttcatccaaaggctgctagtggaagactgacctagggtgaggatcttatacccacacccacagtgacacacccattccaaccaggtcacacctattccaacaaggccacaccttcagatggtgccactccatggtccaaggatatacaaaccatcacaagtagaaagggttaaagggagaccgaggagcagggaggtgggaggggaggctcctcatgcttcacacagcttaaccaggaaatgggtgggcaaggtggatcccaagaagtctgtctgtgaccttagaggaaggtcaggaggccgcatgctcaaagtggaaaagaagggaccaggcaggagacaccctgggcaggttgatttaaaaacaaaacagaaacaaaaacaaagagaaaacccaaccaaccaaccaaccaaccaaaagtcttggttaactctccattctgaaaattttaaatgcataggaaagtaggaaaattcagggactccctgtgcggctgctctccagcttcaacgggtgtgaacccgtgagtgcgctcagttttgtttaatctcaactccatccactttggctttccatagaattctgtggcacatccaaggcgctgcattcaaggcaccgtactgtgtaatggctggcacagtgggggagtgctgcgaccctttttttttgtgtgttggaactgaagacctcgccccctgggccttgttttgtgctgtttagtaataagctggtgtttgtttttgagacagggtcttgttgtatagctcaggttggttcttagccatacccctatttttcagttccccaagtagtaggtcacaggcatgtggcaccttgcctggcctgggaggtggcgggtctcttgaggggcataagaccatccctccaggtcacctcctgacacggcacagtgcctgtggggtgacagttggcatgagtagctgattcttgctggactgatgtaggtggaactcagaactcggagttaagagttagatagaactgggattagaaaggacttcctaatagatttgcttaggagaaaagtcacacaaatccacatcagatcacacaagtggaatttaactaaggagcacaactttcaaaataccccaaagataataagcagtgtgcacaaagacctgttagagaaaagcgaagcttaggaatgctaggatgtgagtatttactctccaggatcgctcaatcgttagactttgattcccacgacaagggagacgaccctgacttaacaaccagccattaggtttttcccatatggaagacatacccctaaagggcagttggggctggggtggatgggagtgcagggtcacaaccattgttaaatccaggtctgccatgaaatcctttgtgctgctgtctagaaaaccatcattccaccaggtggacaagatgaccctgggtaacaactattcagaaagagaacagcaccggctgcactcaaaatcgttctggcagcgtgcaatgtctttgctgtgtaaatctcctagctgcctatgtggccagacttgcagtctgcagcctctttttaagttgctcaaagggttacctgggtccaggacctgagattgaaggatgtcaatgtatgtgaaatgcttaagcctagcgtgtatataagttaataaaacctggtgggagctgattgggcattcgctgagagctggacaaccaccctaagagagttcttccttcatcgctgcgaatacagagtggtcctcactaggaaggcacaccgctctctaagagggtaatagatgcctgctcttactgtcttctttgtatactccaactgcaggctgttctcctgtcctgagtactttatgcttgggctgccaaatgcaacactgaccactcatttaactttacatttcaaaaaacagtcatgacatttgcatgtgtgcatcccttacagggcacagggcatacttataataagaaactatttgttgttttcctgacattcaaattgaaccagatatctggccttcattttattgcagctaaatctagtcaaggtgttttcatagaagccctggagcggaaagcctatgacctggggtgatgcttcgcatatgtggccctcagtgggtcctcaatattgacattgacaggctgtagtcagcaagtgaaagattgcaagctcaagtagaatgcagagcctgggcatccttctaatggaaggtattgaccttgagaataaagccattgaccttcagaatgttgcccatcttgacactggctccgtagctcagttaggacctatgttgtcatgtttaggacatatgacaaaagatgtagacaacattaagtatgtcagaactgatccaaagtgccccttctttgggtgtctgtagcctccccaagatttcctggggtgtgtgcactgccctaggccttcgcctttgcatttgtggacttgggggaaggggagagtgctgcttttgcccgcccgcctctgttcctgcgagcacggaagcctgtgaacctgagactttattctccaggcaggattcgccggttgcgaaggggcggggcccggcggtggagggccacgtgtgctggagtgaagcaggaagtgaccgcgagagtggagccgggcgagcgagtggcatcgggggctgatggaagtggagagggggctggagagggcaccctagtgagtcgccttttctctccttcaggcccggggtgccgggcagtctcaagaatgtgcagcggcctggagcttgcaaaggggtgccctaaggtgcaagtcctggaagagcagcaggggctgtgacaggtggcagggggaggagggtgtttgggacccctctgctccaccctaggatgagctggagacagtgatgcgaagctcctgagtgcacagccaagggtctcttcattcattgtttcatggtggtgtgtataggggacaagggacctgtggtatcagtggcagccattcggaggcccctcccacctccacctgtggcaggtctgggggaggctggagagccggcagcatgcctgcctcctggagaactttttcatgttcatgctagtggtccagatcctgaatctgtctcatgggcgtctctggtaaagtccggtccacgagttctgtgccagctcccttaagcccacgcagtgcctcgctttaactaaaccagcgttttgaagtgcggaggcaacatttaaaagacagggaaagagacagaaaaggacagaaggaaatttactggagtcatgggagctggctgctctgtgctgtcagcccgctgttggcttctctcaagttataggatgggtggagaatggtcccctgtcctggtcactggtccagtttatgatgtcaatatccagctctggagaaagtctgaagcagactgcctggcaagatttaactcccccatggagttaaataaggtgcagatttggggaatcccacaagtgtgtgatgtcgcctgcgccctgtgcttttacgtagctccaacggctggagatggagcccctatggtagagtgcttgcttaccatgtacaaagctctgagtttgattccccagtaccacaaaaaccagctattgtagcacactctggcaattccggctttgggaggtggaaggcaggaggatcaggagttcaaagccactctctgctacacagtaagttccaggttacattaaaaaaaaaaaaaaaaaacatcatctaagtagctctcaagagggaccagacatctggctttccaccacccttagagagtagccagagttttcaaacagtgagtggaagaagaggcgtgctgggctcacactgtgataagtggtgggtggccagggctctgtctgagttctcaggaactcagttatgcagtgaacttagaagagtgttttcctatctctctggccgccatggagacgcacaactccctttggtttgattttgctggctggcaaatgggaatcgtttcttttaaccagtagctgtcaaaagacacaatgaggtacttgggggatgttttacgctgtgatctgtctcggatagtgagacttgagaggatgctagctccatctcggtctttgtgtatgtttaacattttactcacaagcaactgggagcgatcagtgtgttaatgctctaggatttcagctaaaaaacaaacaaaaaaaatccaacaaattcaaaaaacaaaaaatactcaagtctctcatttttgttttttgttagtttgttttgttttgttttgacaaagaatcttactatatggccctggctgtcctgaaactcactaagtagaccaggctagcctcaaacttgcagaaacctgctggtatttgcctcttcaaggtctgggactaaaaggtttctgctgccatgcccagcacacaccactcttttgaggttgacttgactcagggagggtggaaaaggctatttttttgcttgattttttttctttttaaactttttaaaatgtgtgcagtcgctgtcttgagttcctctgtcatgtgtgcccaacctgcactcggtatagagatgtgtgcagcccaacacaaaatagtaagcttacttagacgatgtgagatttggggaagggtgcattttaaaactacctctatgtgtgtgtgttttgcggggtggggtcggggggcttgtgcatccatggtgcaaatgccgaggtcagaggagagctgttggttctctccctcaggtgggcgtcaggaaccaagctcaggttgccagacttggcagtttttcgttatttgcttttttgcttcttggttgtggggttctccagtgtcatcgtcaaaaggctgcatatgcttggaatccgaacccataaatggttagaccttagacctagcatgggggcccagcgggactcatctgagcccacagccttttctgagtgtgggctgtgcccagggccctgtccatactctgccaaggcttcctctaagggcagctgagggaacctctttagcccttgatatgcaggcatataactcctgcctgttcagctctgagggagccaagccaggtggggtcaggtccagccctgtggatgctagagggccgaaagggaactgaatgaggcctttgagttgatgcccacacctagcttgtatgtgtatgtgagtgccaggacacacggccgcttcgcaagtggacttctctgccttgtaactttccgtaggcgaagcctgacatttgcaatctaggacaggatggacaggatatggtctcagtcttgagcatagttcattctgaggaggttctctgggcccatatgagagagggccctttcttttcttaggggacagcggtgccccttcgccggcagcagctatgcgcagagccgtttatggttctatttccttgtgttctctggctctcctttctgggtaagctggctcctcctccttaagcaggtagtttgcagcggatggccatgcctgctttcacaaggctgtgggaaagtgtcttcaccattctcaagcagttacaaagttaggttatgaatgtaggcaggcccctatagaaaacagcaaagacgtgtgtttggacatggtgtgtgtgtgtgtgtgtgtgtgtgtgtgtgtgtgtgagagtaggtagtcatagaaggtttcatcacagacctggcatgaggtgggccttagaggaggctcttgggtttcgagggcaggagccatggagggaaggcctccccgaaggggcttacggaaacggaaccttggaggcacagctgtctgggttgtaaaggtgccctgatgagttaagttgaatgggagcgtagggcccagactgcatgctgccggactttgtctggagagtccatggcggtgggaaggtctgtcggtggaatttatgtttagccaggaggctggcttggggagccaggaaggtgtgactgggaatcagatggaaggtatctagaggacagtttgagctaggggcctgttgtttggcagggtctgaggagaaatagcaggcagggacagatgcatgaatgagcgggcctctggggagagcttcctggcctctttctcccagtgtcctcacgtcgcctttcaatgtccctgtgctggtactgggatggtgaggcctgctgcattggtttgacttggatgtgcagaccacctaccctgacagagggcagctcaggcagtggctcaggacatgtgtatgtcacaatcggggcccctcagcatctgcctgaccctctgctcttctgtgcccagcagtatccagcatgctccaaggttacagctccgtggtccaggccttgctggggaccttcttcacctgggcaatgacagcagccggggcagctctcgtgttcatattctccagcgggcaggtgagtcgcttcgcttctggggattggcagggaccctttggtgacctttggaacctgccccttgccacacagcaccgccgggcagcggccacacaggcaggtggtgggatgctaattcttcccatcttccttgttttctctctgtttccttactaggccagggagcaggcacccattagtggtacacaagccgggcattgtcttcccctcacctgcccctggcacccaaactcaaaagggccagggggtgagggagtagccattgtgccttcattaacctgctgcctcattccgagctcccgtctaattccctgcacgcccagagcaggagtactacgcagggcccaagacgattagctttcaggtggaactgccctccctgtggccatgattgagctagacagttggttaggggttgtgggaaggaaggggtctgtttctctactaccccagcccagggcatttcagtcctccccactggctgaagatcggcaggctcccctcctcaatcccctgtagacttctgtctacccacctcagtccccacatgctctcccccccccccccaatgaatactgataggtctgcttcctcgttctctctcctgataacctgtgagcctgcccttgccatgagcgcatcccctctcctggatgagcgctgacagccaccttgtccatatgcatactgagtctcctcagcccttcccctcatatgtcctccgtgcatcctacagagagcccccagtgtccttagtcactctcaggccatatgttctggcctcacatcctcacgagatcttgtgcatctccccatcttttcttcctctgcaccccacatccctggcatccctcatccaccctccctctacacacaccctgccttactctacaccacaagcacaccctgtgcccacctcctatgcctgaaatcccattctcctcccaccctgagctgctcccagtttcaagcccagagccactcatggctgtcttgaagaatgtaaccctcgccttgctcaagggcagttgtagatgctgcaggagtggcccatgaagaaggcaacttagatctctttaaacacactgagccctggatctagaaaggaaaacttgtgtagaaagtcagtgtctcgggccccttgtgttatagaccagtttggcaggtcctggctccagctatactatcctgcctcccacactgctgcccccaccctaacagggggagggtggtgagcacaaatctatcatttggagacttgggtctccaactacacaaccaggaattacagggtactcaagatttcagtgcgtaagacacctagggaggccgaattcatagataggaatagaatggcttttggcagtagctaggaggaggaagagaagaagaaggaggaagaagaggaggaggaggaagaggaggagggagggaggaatcgaaaacatcttgtttaaaaacatctttttattggaatagatgtactcagaaaggtgcacattttatacctatgcagtttgattattattttataaaggcccatgtatctggacctagatcaggtgccagcttctcacggtcccttcaggctccttcccagtcaccacgcccactcagactttcactccatgcaaaacactcccacgctgcccgtctctcctacagtgtagacatcacccctgtttggctgctgctgtcaggttctctgctcacatagctgctactgttctgtgttgggctgaatctaccctgctcagttcccagtttacttaatgcttctgcctgttgtgtacatacatgcatgcacacacacagtgtgttctttgtgtgtgcaatgtgtgggcatgttttctctgccctgtggtatttgggtgttcttgttggtctatctgtcttaaagagtccttaaagaggactttgtgcagtctctggtttggggctcttggtaacagcgcgtggatttggggattcccagaatgcatttctgtcatttctcagcagtgacgagtatactgcagtcacttgctgtcagtcccactacacggctttctgtgtgacgtggctgtgccagtttgtgtccccacccgtgtgactgtttgtgttgctccagtgttcctcactagcccttggtcatttccacattttagatcaactacttcctaagggcattaggggtgctgggtaagaaataaggtgtgggcctgtgcattccaagaccacctctcctgccaacttctggttgacactggaatgggtgtcatgtttaactgtgtccatgtcttcctcctccttcccctgtttttggcccattctgtaaggtcaggaggtcaccaccagcttagaagtaggtcagtgacctttgagccctttgggctttatgacagtctccgtactgatgccacacacaccatcctgtggtccttggagactgaaacatctccctttttcatttgcagaggcggatcttagacggaagcctgggctttgccgcaggggtgagttcacagtgggtgaagtgtgttgattctaatctttccctccctggggctggtgccagcccttctccacacccgtcctgatgtgctctctgtaggagctaactcctcctctgactgtcttcactccccagcttacgaggtactctctactctttccatggagaagggagtggttcaggacttaggaaataagatgacatcaagactagcctgataaatgacaggaatttaatgtctccttttcttctccttgaagggcgttcaaaaggatttttttttgtatctttattatgtgtatgtgtcgggggcggggtctcgggtggtgtgtgcatctgagtacaggtgccccctccacaggtcagcgatgtcagacctcactagagctgaaattacaagaggttgcaaagctcctgctatgggtgctgggaatcgaacttgtcatctgtaagaacaatatgtgctcttgactgcttccccgtctctccagccccaggaatttttattttaggtactttaaagcacacaagaaaaaaaaaatcacccataatctttagcctcactacgcagtacccaccttcagtcatgattgacacttggcaaatctcattttatctgtctcccttctgccttcttgggagctgagaatgttttataaaagcaaatcccagatccatgtaatttcacctgtaaattcaatatgtatctcaaactgagtgacttcctgtgaaaccgcgaatcagtatggcagcgtctcatctgacagaaggcaaacagcgattcttctctgtgagcgaatgcccgagccgtgttcacattccaagggggcccccccgcgagattgttctgcaagagcggatccaaagagaatttgctggctgttttctctaagtcgctcaggtctcccccattgcgacccccccacaagctggtaatttgttggagaagctgggccttttttgtttctagaaggttccacattctgagtttggtgggtccttctgttcttgatctctgcaaactcaagagatagtcctagaggcttagttcagattttatcttttttcaaaaatcatttcaatgagccaatcgattgtgcctgcatgtgagcgtacctgtgccacagcatatgtgtagaggtcaaagggcagcttgcaggaattggtttactaatactgccatgtgtgacctgagaatcagactctcgtttttaggtttgaaggaaagcttcctcccctgcccccgcccccccccccccagcaactttgcaagcccggattttatttttcatgtgtgagcacattatggtggtgctgtatagtccagctgtatggctgtatcagaaggcacagactgggggctttctctttgagtagagcagagcgcggttcttactgccgtctccatagtcctttgagctggaaaaacttgttttggggtgggacctcgctgaagtcatctaagccactgactgtcagaccagagcctgtccttagggaacctggagattcccaagctataaacaggtgcacaagagttgtagcagaatccatccctaggccttcagcttgcatatattcctctccataaaactcctctgcctgaaaatgctctggaagccagctctctttccagccgtctccagacagaagacctcagccttgccttatttcagcagtaaaaactcctggcagaagttgagatttagggtcacattaccccccttttaggcatgcctcctgtggcctatggacggctcataaagccccatttttcaaatgttcggttaccacccaacattacacttacagagctgtgagggttattccatagcaacttggtaggactctgagcttcctgccgagcgatcccatttgacaagctggtatgttgtaatgtgtgaagatcctgagagcccttctccagccattgttccagcctcacctcaggctcctccacagcactgttgttaagtgatgggtgagatccttagggttggcatcatgccagcctctcaccttttctgtctttggactcagcccgactctcatggcccccaagtgctagcgatctctgaaggctcaagggtattgtggtggcatctctggccccagcctcccctttgccccctctacatgtgcagtcatgatggagggtggcctgttcagcagttctaacgcctgacaggcaatgctaggagaacagtctatggcgagatgagggggcgaggcacagtagggagagagccaatcgggaagaagacagattattgttgttatgattgtatttttccgtttgatttcacgctcagacttccagtgtgactgtaaacagtgtgagggagggaatgacttatgtcaccgtctcctccacagggctgggatgcagtgatgtttgtcttggtggaagggtcccttgctttctcttgccctaatgagtacccggggtggcgtgacccctaaggtcatgagtccttcctctgtagtctcccgaatagtcaccacccttctgcgtagcccactccccccatcttgcttgtactgtacccagttagtgtgaaggggtggcttacccctagcctgcattcctgcccggctcccctttattcccctgccctgctttgtaggtctgggcccactgtgcagattggctacagtatccttgggatactgtacatggtccttattgatcatgatgcccccattgtccctgtaaggagatggtgaaattgatgtgaacaggagagaaaaggcccagagatcaggtatggctcagttgaagagcacatatgtagcatgtacaaggcccagggttcaatccccaccatttcccccaaatgaaacaaacacccagagattcaggctacactttcacatggccctctgtatgttgagtcaccccacctctgtaggttctctgttggaactggtagatgtctagtagctgcccctttaatggtactggctcaggccggtgctcacaagatgctcttttttagcacgactgagccatgtcgcacccgtctgtccagccagtagctcctctctccattcatccagcggaaacctgttccaattccctcaccgtgtcaacttctgcctgtcaagaagttgtgatccatgggaggggtgtgccaaccagtctggtgggctaaatccacctgcttcctgttcttgtgaatgtagacagtgcacgggagcgagccacgcctacatgtcacagtgcctgtggctgcttttgcatcactgagctccagttgagcctgtggctcacaaagccagagctgtccgttctttggactttaaaaaaagtttgctggttcctgaggtggtgttgggggctgggtattccgagggtctggtggcggtgtgaatagccaaaaaggaaaagaccactgctctgatccactgggcccaactgtgggttctagaatgctctctggagtgtctagtgttcctgagtaggtgatttcctgggaaacgctgggtttgtgtggaccttgcagaagaggcttggtcctttttccttccttcgccgaggtcctgcgaagccttcagaggatggctttgtagcgtagtgtggtgacttatgcggactcttacaccatttttcatgtcacctaggacacagagtttcaggactagagagatggtccagttaagaatgtgtgctgctctctcaaaatacctgagtttggttcccaacacccacattgggcagctcacaactgactccacgggggtagggatgtgactcctctgacttccctggactccgtgggcacctgtactctcttgcttacatcttcacagagatacagacatgcacagaattcaattatagtaataaatcttaagaaggaggtctccagagatggtcagggccaaggcgttgtaatggtcaatgttgactgtgaacttgatgggacgtaggatcagagggaaacaaacctctggaagtgtctgtaagggagcgtctacagcagtttaccaaaagtgggaagatgcaccgccccacagaccagggtcctggactgaccacagggagagaatgagctgaggaccagcatccctctcttctgcttgctgcctgtgaaagcaggggactagctgccttttgtccttgttgtcatgatgtccccccatcccctgccatggccgacggcatcccctcagaccataagccagaataaaccttaagttgctttttaactgggtattttgtcatggcactgagagaaagggactaattccagtgtgtaatgggagattgtgaaagcaagccacgatttcagcacaaacccagctcagttttacagctgcctttcttagcactggcctagcagagccgtttgccctggagcctttggctgttgagttaagtagcccgggtctggagtggttgtcttcacacctatgtagtagtaggctgcatgttgcaatcacctggaaagattatattaagttttaagatacatttgtttgtttagtctgattcctggaggtcagagggcagccttctaccctgtgagtcccagggatcaaactcaggttctcagggttggtggcaagcacttttatccactgaaccaccttgcttgccctcacctggtgagctttgattgtgtcatacttgcagtgcccctgggcacaccctgtactaactacatcagcctatcaggctgctgggagccggttgtgtgtgagcatcccagtgttaagggttccggtctcctggaaaccacgttcgaatgaaggatgagctggtgtttggaggagtcaagctcccctcagtcaccagtcattgtgagcctcaagacggaacaccatcagttcttagcgttaggatcttgccacgtttccagatgtggaggacagaggcctgaactggctgggagaagtcgggaagaagctctttgtccacgcagccctgtctgctgaaggccttatagcatccattgtggacttgctagatgactggctcccaaccctggtccatctagcctggcaaagcaggcagctgccatacccctggctcatttccagccgatcaggcgatattggccagccaccagtcaggaacacaggctctcttgcttatttggctcttgcaaaagaaagaacaggaggcaggagcttggaaaactcgagcttgggggtgaactccccacctgatggctgagcgctcattggattacatagcgtgtgtgaaatatcacaggactggtggggacttgcgggagtcatctctggctggcatcagacagggcaaggcttcactggatccagacagatggtgggagcagagattgttccccaagacttctgtgaagcaggatttcattttttaagaacctgattgaatgtttagctggctcggaataagcttatctgatctcagtaccttcttctgtgtttgaatagttagtgttagctggcactgtctctcgtaggcattttcataccagtcctgttcaaaagcatgatgttaaatgtcagctctctttgaaagatgttcttaagtgactgattgcccaggatccgagcccggatcggctcacttctgtcctcttagcctctgcgtgtcagggccaaatctctacacgtccttaaggcgagtgctccgtggaagggctgccgctcctccacacaggatcactttttagcattcagtcacacataagagggagatgagccagtaatctgtgccttgtaagaggctgggagacagtcatttaccaggcagtcaaacgtgttcagtttgcaaaatagccgtgggagcagagcttcagatcctagtgagagtcacactgaatggaggggcctggagcgatggctcggtggccaggcggacctgctgctctttcagagaatgggagtccagttcctagcacccacatggtgaccctcggagaccaagtgtgactccagctctaggggatctggtgctcccttctgtccttcagggccacagcactcatgtgcacatacatacacatatacagaagcacaaatgtacacataaagaatacagtaaaccttataaaaaccccaaatgatggctcctgaggaaaacaaccaaggttggcatccagtcttcacatacatgtctacacatgtatgtgcatacatgtacatatatacctctatctatctatctatctatctatatctatatctatagagaggagagagagagagagagagagagagagagagagagagaggttgccgatgggtttgtccgggatataactgtggaatagctgcctgagacccagatgcatacaccttgaggcactgtggtgaagcattggttctttctttagatagatggcaggagtccctagaagcgtgggggatgggcagaagagcagagctgtgtttgggtagcgtgcaagggaagtgcaaagccaaggggagcattacagaaaaaaaaactagagcctgaatagccagaggctgaggagtcaggagtgagatccaagggtggtcctgcccttaggctcagagggctgattggcaggcatctgaaggtgaaggaggccaaagaggtcgtgtgtctggtgccaccttttccagggctggcatcaccatctggctcatgggaggagggggattctaccagaatggggaggggctcctttaggcttacaagaggactttttttcccctggtctttctcttggagtgagtttgtattttggaatctggatgtattggggtggtctccatggcaaccagacacctacagtttgcagtgctgacggtgatgcatcttcgtccccaccccacccccacactgtctgttaggattagatttgacccgggactgaggttcagaaaagcgacccgaacaagtagtgtggagacggacgggaaaagtgggtccacgagtcagctggagtcggggtctaatccttcactgctttgccccgacagctactctcttttcctttctgctccaaagtggctgcatgagctctggtcatcacatttgtcttccaggcaatgggatggggaagggggccttccctgtaagcccaggagaacagctgtccttgtatttcactgaccaggacttgctcaggtgatcaaatccaactgcaaagacagttaggagacacggtcctttagcaagtcagccacgtgtctaggtaaacactggggttctgttactgcaggttggcagcgaacagaaggtggggtgggccatgcgcatgctccgtctcagggcctagtgtggagagaacgttgagcctcggtgttcttcctggtttagccttctctgtgtgcattttatgcccaagttagttttccattgctgtgatgaaacgtcacgactagaagcaactcggggaggaaagggtttatattgtcttacacttggaggtagcagcccatcactgagtgaagtcagggtagggacaagggggagctctgcttatttgtcctgattctcatgccctgctcagcccactttcttgtactacccaggaccacctgccaggggtggcaccacccgcagtgagctgaatccttctgcatcaatcatccatcaagaaaacgcccatcaggcttgtcctgggccaatctgggaggggcactttctcagctgagggtccctcttctcaaatgactctagcctgtgttcagttgacataaaactatccagcatattttatatgtcactttctctacaagtcatgctatgcatccagtaatgagtttctttctaaatgattgagtataatgtaggaaactgataaaggagcgctacacagagcacacgatgaaacaaaccctttgctctctgcaccagccagggcagagcaagccatagtaaggctaattcaggctggcataagggttagacgcgtgcattacaactcttttgtgtgtatctgtgcttatgtgtagatgcacatgagtgtgtttgtgtgtgcacgcacacgtgtgtgtgcactcgaggggcagagggcagtgctgtcatttcttaagtggcatccctgttagacctgctagtacaccaagctggctggtcaggaggtggatctgcccgtgtctgcctcctaggtgctaagattacacgtgcatactatcatgcccagcatttttatgccctcatgtttgcaaagtaagggctttatcgactgagccacctttcgagcccttcaggccttaccactctccaggaattgacctgtgggtcagacgggagcattcggatatctgtctggctttttcctatgaggctccattatcaagaagtccggaaaggtgctttcttctgtgaccttgtcattgactttcatgattgggtgtaactggcttggttttggatgcaaaagcatccctcaagactgctcctcttggctaggagatcaggatgcaatagacctggcctgacccgtgtcgctttctcctggcttccctcatcccctgattagaataaaatacaacgacaaatcccgactgaatgagaggacaagtggccccatcaaagtaagatgaatgttggtgactgaagtaggtgtggtgaggagggatcggtgaccttaggcggatcacccaaacacacgctgtgatgatgatggacagctgacaggaggtgggtcacccgaacacagcacagcctgcaactcacagaggatgcaccttgacattctgttgacatgcctcacatgcttcgacatacagccaagacccccatgttcttagagtattgttaggaaccattataatacatagtggttaagtcaaggacaacttactatttattatgttatccagggtgcttgcactcaggtgggtggctcttctgctggcctggcctcactctgtagctcacacttcggctgtcaggagctcccgtagaccatgagtggacaagagtgccacttgaagctctgtggctctgatgctgttgcttgctctcctctctgtgtgtccaggcttggctcgggtttctctcccagggtttcctaccatggtgagggagagtagcaaggggctgggcaagaagctgaggggcctttggagacccagacttggagcccagagcaccttaactcacctttccttgaccgaagcaagtcaagtcaaggcctacttacacccaaggtttagaaaacagactcaggttctttcatagggagggagcctgtgagacatggggacttagatggctagcgtgaattaatttgagacaatctagaaccagagttggcctgtgggcatgtctgtgactgagtatcttaatgaagttagtcgatgtaggaaggccattgtgggtggtgtcatttcctaggcaggggtttctgagctgtgtggaaggggataaacaagctgagcacaagcaagagagggagaaaggaagcaagggagaaagtatgtatgcaagcacttccctctactcttgactgtgcatgtgatgtgtctagtttcaagattaaaaagtagatttaattttatttatgctatgtatatgagtacactgtagctgtcttcagacacaccagaagagggcattagatcccattacagatggttgtgagccaccacgtggttgctggggattgaactcaggacctctggaagagcagttaaccactcttaaccactgagccatctctccagccccttacttatgttatgagtgttttaccaccatgtacatatgtgtatcaaatgggtgctgggtgcccatggtagtcagaagagggcattggattcccagaagttggagttacagatagttgtaaaccaaaacttgggggttgaggacagagcccagcttctctgtaagagcagcaagtgctcttcacctctgagccatctctccagcctgtgactagggttttttcttttttctttttttatttattttttattagatattttctttatatacatttcaaatgctatcccaaaagttccctatatcctccctccgccctgctcccctacccacccactcccacttcttggccctggcattcccctgtactggggcatataaagtttgcaataccaaggggcctctcttcccagtgatggccgactaggccatcttctgctacatatgcagctagagacacaagctctgggggtactggttagttcatattgttgttccacctataggattgcagaccccttcagctccttgggtgctttctctagcttctccattgggggccatgtgttccatcttacagatgactgtgagcatccacttctgtatttgccaggcactggcatagcctcatacgaaacagctataacagggtcccttcagcaaaatctttctggtatatgcaatagtgtctgtgtttggtggctgattatgggatggataccgggtggggtagtctctggatagtccatccttttgttttagctccaaactttgtctctgtaactcctttcgtgggtattttgttccctattctaaggaggaatgaagtatccacccattggtcttccctcttcttgattttcttgtgttttgcaaattgtatcttgggtgttctatgtttctgggctaatattcacttatcagtgagtacatatcaagtgacttcttttgtgattgggttacctcaatcaggatgatatcctccagatacatccatttgtctaagaatttcataaatccattgtttttcatagctgagtagtgctccattatgtaaatgtaccacattttctgtatccattcttctgttgagggacatctgggttctttccagcttctggctattataaataaagctgctatgaacatagtggagcatgtgttcttattaccagttggaacttcttctgggtatatgcccaggagaggtattgctggatcttccggtagtattatgttcaattttctgaggaacctccagactgacttccagagtggttgtacaagcttgcaatcccaccaacaatggaggagtgttcctctttctccacatcctcgccagcatctgctgtcacctgaattattgatcttagccattctgactggtgtgaggtggaatctcaaggttgttttgatttgaatttccctgatgattaaggatgttgaacattttttcacgtgcttctcagccattcagtattcctcaggtgagaattctttgtttagctcgtgactagggttttgaagttactgccttgatttcagcgcaataatggctgtaacttagaattctgaggtgaaacttaccccattcttctcaagtgtctttttatcagggcattttatcataggaatagaaatggcactgggatagaggcccagcagtctatacttccctttgctgggtcccatactcgggcccctgcctcactgtcttcaacttgcctccaaggtctgtgcactggctctcatttggtaagaacaagggtagccttcttagcgtcccctcagtgttctcctgtgaacatctagggacccgacctctgtctgtgggctgcagaggagctaagcctcaagaactcaggtcagttgtggttgtttatattctttttttttttttctgagacagggtttctctgtgtagccctggctgtcctggaactcactctgtagaccaggctggcctcgaactcagaaatccacctgcctctgcctcccaagtgctgggattaaaggtgtgtgccaccatgcccggcccgggtgtttatattcattcagtggaagtgctcgggttgcattcttggggctgtgttgttccagaattaaagaactctggataagctggcatcctatggccgtcagagatgtaatacccccagaatctccaagtgagcagggtatagggtcccagagaacagggccagcttggctgtggaattggaagaagcaggggctatgtatatgtatgtgtatgtgtttgtgtatatgtatgtatgtatgtatgtatgtatgtatgtatgtatgtatctatctatctatctatctatctatctatctatctatctatctatctatgtgtgtgtatatattttatatataacctgctcagtctgtatgatgttttcagtgctgaatatattctgtactagataaccaactggtgtgatctagggaagactgcttctccagctcccagcattccctacttgtctgcagttctttgtgtggggctatggccttctgggctttcccccacccatgttagcaggtctgttggtgttcttgtgcagctctagttagtgagactttatgagtgtagctctgacattcctaggagacccagtgtcatagcaaactccctgatcctctggttcttgcagtctttcagtcccctctcccacaatgtttcccgagccttaggtgtgagagctgtcatagagtttttgatagtgtgtgctggtctggtggttccccctgcctcagcctctcaagtgctggtattacaagtatgtacgacttgaggcttgtcttttttggggggcgggggaacggaacaggatgactttgaacccacagcagttttcctatctttgtttcccaggtgctgggcttataggagtgcaccatcatgctcaatttttgttaatttccacctttaatcaagaagttctctttctgaatcaggactcaggctacttttgtctttgtcagggaggctgtgtcgcctttctcgtgtctctggtggattgtgtggtagctgtagcctctgtggcagtagcagcccatgtggcagtagtagcctgtgtgtagttggtgacgtgacaagccctgatttgttctggttaccaccagctcttggtgggcaggaaggatccagcctctggcttgtaactaagctgtttacaatccttaccattaaggagacaggccctttaacatccaggaggcagaacccttcctctcctagcttgtgcccctggcgaggttagcttagttagatccagccctgactgtttaatgtttccattgccttccagagaaaataaaccacaaaataccagggaggtgagggtgttcatcgctggtggctgcaagctgctttttgatgctgccaccggagggaggaccacaacatcaccggctgcacgcttgcctgcgcgtctatgtcctttcttcttgactctctcttctgccctggcatttctttggtaacctctactctgtgtctgaagctccacccccctttggaagaaatcacccatgacagccccagagctaagtgaattagctctctgggagggcggacaaaaccggatatctgctaagtttcataaataaggcaaaaacagattagcgctgcatttaagataaggaagaggcacagccatctttaaataggctctgagcttgagtttgctcagatttctgtggggcacaagtttccctgcaagaaacactggcacctttggggctcctgcgaccctgtgttgtcaggcgacattatttcctcatatttttcaaagcacattctcacccacaacccccaactcttgcaccgactgggcagcagtaggctttatctgtcatttgcatctggtagatgaaaactggactggacctggtgctaggctctttcatctgctctgttcatgggatgctcaggacagtatgggaaaaaagaggctctgcaggtccccctggtccctgaagtgtgtgtcttaaaggacagcactgcacagctctctccctgtgaacttgtaaatcacccatccattggacaagtcttcattggcaacactagagttggaccttgtacacactgcatgcgctaggccagcgttctatcactgacccgtgttcacagcccttcttccactgtatcgcttgggttacttaggttggtattgaactcatgactaaccctctgggtattgggattacaggcatgtaccaccatacctggtttatgccgttctggggcttgaaatggggcttcatgagtgctaggttaacactctaccatctgatatctccagctctcatttttgtcttttgagacagtattatatggttcaggttggtttcagtctctctccctggtcttgggctggtgttgaacttctggctctccttccactgcctcctgggtgctgggactgtaggtgtgagcctacatcctacatacctggctcacaaaatattctgaagtaagtgtggggctcaggtgtcaccggtgctggtggggttttctttttcgtttgcttgcttgcttgcttgcttgcttgcttccttccttcctatcttccttccttccttccttccttccttccttccttccttccttccttccttcctttctttctttctttctttctttctttctttctttctttctttctttctttctttctttctttctttctttctttctttctggttgattgcagccttaaccctgcttctcctgacctcttttgcatgccagagcatcagtctacgatctcagagcaggcactgagaaaccatctctcccgaggctttaagggacgcaccgaggtgactctcccaatgaaggcagaaagtaattgaatgcagactcattacttctctgaaggcctttgaacatcttcccatgatttaattctgatgagcatttcaggatgcagccaggccaggaaatgtctcaaatggttggccagagccgggtgagcttaggagaggtgcagtggggtccagggtggagccttctatcagccgggcagatgggtgaactcacggagatctgtttgcttctgctcctgagtgctgggaataaaggtgttgcataagcatgccaattttaacgagtggcttgttagacattgaaattatttttatgtttttgagtgtcccctacccctttaaattcaaagactagatgcacattcaggatgctaataagaggcctatagagcaaaggacacaggctctcctcccactcagtccctcctctccaggaggaaccttatgtcggtttcttgagaaactttctgctcacatttctagatggatttcgagtttctgggtttggaagctggggccctcccgcctcttaccctcttgcagcctgtggttctttggttagttgcctggtgggcctctcgcaccttcctcttccctctgtgtgtcagctgtggctctttcccttcatcaaccttaactccagcaatagaggaagtgctccttctgtaaatgtgttcagaactcattgctgttgtctctataaaactcctctacttccttcttcagtgccaagaagaaaacaggctcatcccacacattcggacctctctgacacgagtccaggttttcctttccacagccgttgacatttcgagttctctagtttccgccagaggcctgccttcttcctgcttggttgctgtggtctcctttagcaatgctggagatccagactgaaacacagtctctcattgggtagatggtgccagtgatcagcatggccaggattccttgtgcccactgtggtcaggtagcccatgcttgcccactgtggtcaggtagcccatgctcgcccactgtggtcagatagcacgtgtttgcccactgtggtcaggtagcccatgctcgcccactgtggtcaggtagcacgtgtctgcccactgtggtcaggtagcccatgctcgcccactgtggtcaggtagcccatgctcgcccactgtggtcaggtagcccatgctcgcccactgtggtcaggtagcccatgctcgcccactgtggtcaggtagcccatgctcgcccactgtggtcaggtagcccatgctcgcccactgtggtcaggtagcacatgctcgcccactgtggtcaggtagcacatgctcgcccactgtggtcaggtagcatgtgtttgcccactgtggtcaggtagcacatgctagcccatcgtgtcctcctacttgaaggagctggggactgtcatggcagtcttggggatgacagaaagccatttatcctcagcccttggggttctcagtgtctccctaagcctggcaatggggctttccctcctgcttcttggactacagacaaggttgggcccctgctgtgttccttggtaaccccgtaggtagcggtttctttggttgggagttgctgatttatgcccttccctggcttgttgcattaagtgtgttgtgcacgtgtgtgcaggtgcatgtggaggctagacatcagcctcaggtatcgtccctggtgccatccacttgttttgcaagtcagggtctctagctgatcctgatttagctacactgaccagccagccagtctccatccacaccctccttagtgttggggttgcaagtgtgcaccgctacgcctgtttgtttttaaacttggattcttggtattgaagtccggtatcacgcacacgtgtcggtattttaccaactaatctgtctctcctgctccagtttgtagtttaggttacttttgaatttatgtactttatttgtgtgtatgtgagtatggatatgtataatgtgtatgtgtgcacgtgtgtatgtgtgcgcatgtgtgcatgcatgcatgtatatgtttattgcatacgtgtgtgtatgcatttcgtgaatgtgcatgacttgcgtgtagaggccagaagacaatttgaagaagtcagctctctcattccatatgtagggcctggcccagcggcttcagcgcacggtgactgctggctctgcccctgcgctgccccaaggcttcttttctcagttaagagcaccacagttttcaggatggataattatggcttaaaatcctgttatcctatgctgccttggacctcccgctgcctgaccatatttgcccttgggggttggggatgaggtggtgccgaaccaagggctccgactccgggaacaggtgagaactcgggtgatgaaaccacagcaggaaggaacaatgcccgcggctgcaagctcatttcttaatcctcgggtaccaccctttatcccctccacccgtgtcccattggtcccaagcaagcttgtcttccaagtggcacttcccggttggctgccattgtccgtgtccccaatctttaggctctcaggcagtcttcagttaggtccgcacacggaagttgcctccacagctgtgcagcccctgacgtttatacggaggcagccgttgcttcgtcagtgaggccagttgctccttctgcaactctacataggtatagactggaggactttggttcaacctcttgtctcaggtcaccggctgttgttagcagtgggaatagtggcatagcaacatgtagtacctgacatgcctgggcctgctcttttgtccagcattttacacggacaaactcagtaatccttgtaccaacccttggagagatcaccttctgggaagaaggcagagtgcacagtgggaatggtatggctccttataaacctccaagcctgccccaagtgacacagttccctcaacaagtccacacctcctaatccttcccaaacggttgcagaaactactttacaataggttccgtttgctgaaccagacactcctagagggggcttttccccctatgtcaaccccctcttgagatcctgcgttggcactctctctttacccagtctcttcctcttcgaggaatcactgccattggacaggcgggattattctcttctctctgggaagtctagggcaggaaacacttccacttctgtccgtgttacttttctattgctgtaataaaacactgtgaccaaagcaacttataaaattacaaaccgctaattggacttagggtttcagaggcttagagccaatgatgatagagcagaggcctggtggcaggtgagagagagctcatatcttgattgactagtaggagccagagaggaagcacactgataatgatgggagtctttgaaacctcaaagtccatcccccagtgacacaccccctccagcaaggccacacctcctaatccttcccaaacagttccatcaaccgaggcccaagtattcataccaccacagccaagcacctgtattagtcactcctgcatagccatgtctgtaatacctgacaggtacaacttagaggaacgaaggatatatttcggctctttgttgttgtttttaatttatttttatttcatgtgcattggtgttttacttgcgtgtctgtctgcgtgagggtatcagatcttggagttacagttgtgagctgccatgtaaatgtcgggaattgaacccgggtcctctgggagagcatttggtgctcttaagccctgagccatctctccagcccagcttttgggtttttagccagaatacaagagcacatgactacctgccactggcagatgccaatgagcagagacaggaaccgtatcgcaaaaccgtgctgcttcattcagagagccagaaatctgagaagacagtggactgatatcttagacaccctgtcttccacctcatgttcatctggcacattctttagggaaaggcaggaaatggggccatcggtcagctgtcctggagctctgaattgcccctctggttagatgctcagggtggttttagaatgatatttgtgacccctcacacctgtcactcatgttctggatgtccgaactcaggtgatgcttaagacagggggattctaattaatgtcttctgctatcaacattgtatttcagactggccgggttgggttgggaataactcagaacaaacaagccatggacagtgcttataggctgacccccctactcacatgcacgtatgtactaattctttttcagagtgtggggttcaagagtgtctttatgatacagaatgtgaaagtgttgctaccctgtcccatacccttcctcctggcccctactggtttcagtgcattgtgggagaaaagctttacatggaacaacttcgttcatggccattgtagcatataacaagaggctgttcacatcatgttcacaccatataacaagtaggctgttcacatcatgttcacaccatataacaagaggctattcacatcatgttcacatcatataacaagaggctgttcacatcatgttcacatcatataacaaggaggctgttcacatcatgttcacatcatataacaagaggctgttcacatcatgttcacaccatataacaagagcctgttcacatcatgttcacaccatataacaagagcctgttcacatcatggtggaccagaagatagagagtcaggcatgaagtaggctgccttaacatatccccaagaactcactctttagtgagcttcttctatttgggctgtatctctcaggtttctagaaccttccaaaatagcactaccaggtccagactaagtatttaaaacacttgggtattccatattccaaccacagagttgtgtttttccaagtggtgggatgatctgtgagtctgtttggaaggggaggagtctgtttggaaggggaggagtctgtttggaaggagaggaggcatcttttcttcttgccctttaagggcctgcccccgcgtcctagtgccagcgatagctgagagaggcacaaaacctctccagagagagagagagagagagagagagagagagagagagagagagagagagatgagcaactttgggagaagctcattcctagatctctgagttttctctcaatggagccacgcagctcaccctgctcccctcgtgccagtgtgggctgggctgcttcctagccaccagatcgggcagattggctcagcgtgagtgagtggtagtgttggggcggggaagcccggccagctggtgcaattgtccatcaccaagcccccagcgagaggtgctgatggattggtggctggctgccatgggaggctgctgagggcaatgtgttcacacccttctggcgggcagctggtgaaaagatttggtgagcgtgctctccccttcgccatcaccctcggctttgttttttcttttgtcttcatggatttaacagttttggcgatctaagtagttgattcttctgggagtcgtttttttttttttttttcacttaggcagtctgggtctgccctgaaagagccgaggtaataaatatgcttgtccgtctgtcaatcccagtaatagatttgtggaaaaggagcgttgaattcaaacaaagaaacttaagtcttgggactgagggttgtttgatgttgccagtcgggtgtttgccatgcacgcatgtggacttgggcttggattcctgggaccattgcacagggcaggcagggcagcatgttcctgtaatctcaatgctggggaagctgagacagaggggtctctggggctcactgagcagccaaactggtggaaatgatgttcagtgagagaccttgtctcaagcaaacaatgtggggaacaaatgaggaagtcaccccgtgttgacctctggcctacacacacacacacacacacacacacacacacacacactcacacacacacacacgaacatgttaactcacaccactaagtatcatttgacgttgtgatctcccttagggagtcgctaaggccaaagctcctgggagctccagttcaggtgggcattgcacatgggacctgcttgtaagcagttgaattgtacttagagcttagatttaaaacgagaccaggctgaggggccaattgcttttcagctctgcttccacagtgcagtgggagtcagtgttacatcagactggatgtttgaagcccagatatgtcctgggtgacggtgtttgctttaagaaacgtatttcctggaatttcatcagtgatgatctatggcagttggttaggtgctggaaggcccctttggctctagtcttgctggtattcaagtatttcatgagagcttggctctcagctctgggcccagaccttgccaggcacttggggattacagtggtgactcaagcctattgcacagggaccatttcagggtggactctagaacccatatgccaagcataggtgtacaccatgttctcatgagttggcttccttccgtaggaacagtgcacacttccttccaaagatttacaaatggatataacttatagcacccccaggtccaatacagctatttcttttaagaaactgaataggaatattaattgcgactttatttgtattgccctctattaaaatcagcctaaaggtcttattgcaactgagtagaagcacaaattgaggcctagccatgtaaagccatgcataaataaaaacaataaggtacttgagcatatagagtgattggatctctcaataacaacgaagggagacaaatgtagaagaaaatggatctgagctagaatgaaggctcagtggttaggagcaccagctgatcttccaggggacctggattcagttcccagcactcacatggtggctcacaagcatcggtaactagttccaggggatcagatgctctctctggcctcagcagccacctacacttaggtggtgccggaccacacatatacacgtaaactaaacacataaatataaagaagaaagcaaacattatgatttcatccacttaaaataccacaaacggcaagcgagttgacagaaggacaatgagtcactgactgtggcatgagaagacagggagtgacaatcagtaggccatgtgactctggcggtggcaagtatatgtgctactgtgatcacaaggtcttgagtttaaacctactcagaaatggcagtcctcaaccccgtgggtctccacctctctggggtttgaatgggtctttcacaggggtcatgtgttgtttatcttgtgtatcagatgtttatatcacaatttatgagaatggcaagattacagtcatgaagtagtcacaaaaataactttatggttggggtcaccagaacatgaggaactatattaaagggtcacagcatcaggaaggttgagaaccactgtaaaaagtcacattttatccttcaaacatggacggtttctatcacttccattttaaaagtgatcccacccaccaagaccaaacacaaacaagaaactcctgggccatccgtttcccttgagaaactgtatttagcaatacacacgtcagttcaagcccagtccgccccagcctttggcaagggccgcactacttgactggaagtgaagccccacggcgttgacaactgggcaggggagatggctgagtgagtgaggcctttgccacccaaccatgaagaccagttcacatccccagaaacacataaagcctgccatgctagcacacacgtgtaataccagtacttttatgatgaaggagacatggagacaggagactccccaagagcatgtgggccgctcacctgtcacactcagcagtgaactgtaaagaagccctgtgttaaatgaggaagaaagtgaagacttaacactttggaatgtcctttcacttctataagtggggtgtggcatatgtatacccatatacagacacacacacatacacacacgcacgaacgcacaggaaacgtcaaagttgtttctttgtgagtcaccaaagacattgttctagactggaatttttctgctgccagccttttcctttcctctgcagccacagactcaaatcaagcagctcagaggccacttgaatgcagaaaagcctttagattttctgaggctgactgtatccttgagagagatttgagcgcacagaccctgagtgcatccggaccgtcaccctccaggcccttggtgacagaaccacagtgtctgtgcaggtgcttttctctgcagcgcctcgcttccgacccccctccagctagctgttgtccatgtgctgtgacattatgtcaggtggctggggacttcctgccaggaaagggatgaagaacccagaggcgtgtcactgagcatgttggggtgacctctcgacgcttacagactggtgggtgtgagtggcttcaggtccagggactgatggtgacacacaccaggctaaggatttggggaggttagggagtggaggccagatctctgtacacatctgcctctcagaggacgctccagtgtggcaatggtgtgtgacaatcgtacacacctgtatacacttccccaagtgagatgaagaaaatccatgtttcctcccagggagttcttgttccctgagtcactgtcatgcagacattgaagacttctggaagttttgtgttgtgtgttcttgagcttaagtgacatcaggtactacacacacacacagtgcgtgcgctgtcttctttcaatcaacatagcagttttgaggttcctccacccccgtggctgtaacacttgcaatttactcccttttattacttatttaacgctgaataccttgattttatgtacatgggagtttttcttgcatgtatgactttttaccgtatgcgtgcctagtgctggcagaggcccgaggaaggggttgggtctcctggaactggagttacagatgtttgtgagctgccatgcgggtgctggggaaccgaatctgcctctcatggaagagtcgccagagcccttaatcactgaaccatctcagtagcccctatgatcttttatttatttttaaaaatgtgaaatgtgttatcctgggttacataggtctttttcatgcaagtaataatatactttaagcttttagccagttccccctttatttatttatttttttaaatttgttcttttgagacacagtatcttagtcagggttgctgttgctgtgataaaacaccatgaccaaagcaccacggcgaggaaaggggttattccgcttgcccttccacactgctgcttatcatcaaaagaagtcaggacaggaactcaagcagggcaggaatgtggaggcaggagctgatgcagaggtcatgggggggggtgcggtttactggcttgctcagcctgctttctaaaagaacccaggaccaccaggccatggatggccccacccacaatgggctgccacctccctacatcaatcaccaattaagacgaatgctctatagtcaaattttatggaggcattttctcagttgaagctctttcctttcagataactcttaacttgtgccaagttgacacaaaaccaacttgcacacatggtctcctgcaccacaggctagcctttacttgctgtggcactcgaagatgacattgaatttcttgatccctctgcctctacctccagattgctgggttgacaaaccacccaccacgacgtgcgtttcctggggggggctgccgatggagttcttaatgcgtgctgtgtacacagcctgccaactgagccacactcccggctccttctcagtcttgcaaaacaccataatattttcatttccttgacaatttcatacatgtatacaatgcattttgacaatatccgtcccactcctcccagtcaattcttggcaatcatttttgctggctctctttctctacttgacttctgcacatcagatgaatcaggttctagccttagcaccactctgttccatgcccgatgtctcggagctgttttgttggtaaggggcatcttctctcttaaaagtactacgatgcgtctttccatttcactgttgatggtcatcagggatggttccagtttggagctcccatgagtcgggctgctgggagcattctcgtataaggcattgtgtggatgtgtactgcactgtgtgcaactggcagagaaaggattcccaggactgtactgtagatgcccctcctggggatgtgatgaatcctcttctgtagcttggaatgcgtaaggcaagctctgcctgtctctggcagagatgggcatgctgagtgggcacggctaaggaacattagccatgacagttaacaactgtaactgcatgaagctgactctttccgaggaatttgccgatcacatcaccttacatagactgagcccccgtatgaatcagactcacgcctgagtcatgactgatcactgacatgccagatcggaaagctgacccctgtgcccacttgaatcttgtgattcaagaccgagggatgcggagggaggggccacctcactcgggagggacccctgtttgtttcttccttctttctgctctatctccttcaccatcatgtctgtagcccggcaactggcccctcagtttccagccttcttaacttctccctgctgtctgacgccaccgtataaggacgggtgcctcctttccatcattcaagactgcttctggtggtctgacatcaaactgctcggtcccagcagccatgcttccccagggtctccaaatgctgtgcccagggctctgccccggcagggtctgtttcactaggtgttggagtagtgccagcatctatctcagtgattctgttgtgcaggcagagatggaagcaattgcccactgcctgagcgtggagccatgctgcctggactgtgtttccactccctgtgtcttagttaggattactgtgacgaaacactgtgaccagaagcaattaagggagggaaggggttatttgtcttacacttccacatcttggggggtccatcatcacaggaagctaggacaggaactcaagcagggcagggagctggaggcaggagctgatgcagaggctatggagggggctgctcacggaacccagggccaccagcccaggggtagccctccccacatcaagcactaactaagaaaatgctgtatacgcttgcttacagcccagtcttatggaggtgttttcatgattgcagtttcttcccctcaaagggctctagcctgtggcaagtcgacataaaattagccagcgtacctttctccactttttgtttgtttgttttgagaaaaggtcttatgtagcccggtctggcctccaactgaggtcacaggcatgctggggtcccaggcatcccgaccatgaccagcctggactcttcactatacccagctatgtcttcatgccctggcacatattcttcccctacgaaggnnnnnnnnnnnnnnnnnnnnaaggatggttccagtttggagctcccatgagtcgggctgctgggagcattctcgtataaggcattgtgtggatgtgtactgcactgtgtgcaactggcagagaaaggattcccaggactgtactgtagatgcccctcctggggatgtgatgaatcctcttctgtagcttggaatgcgtaaggcaagctctgcctgtctctggcagagatgggcatgctgagtgggcacggctaaggaacattagccatgacagttaacaactgtaactgcatgaagctgactctttccgaggaatttgccgatcacatcaccttacatagactgagcccccgtatgaatcagactcacgcctgagtcatgactgatcactgacatgccagatcggaaagctgacccctgtgcccacttgaatcacgtgattcaagaccgagggatgcggagggaggggcccctgtttgtttcttccttcttcctgctctatctccttcaccatcatgtctgtagcccggcaactggcccctcagtttccagccttcttcttttttttttttttttttttttaagatttatttattattatatctaagtacactgtagctgtcttcagatgcaccagaagagggcattagatctcattatggatggttgtgagccaccatgtggttgctgggatttgaactcaggacctacagaagagcagtcggtgctcttaaccactgagccatctcttcagcccagtttccagccttcttaacttctccctgctgtctgacgccaccgtataaggacgggtgcctcctttccatcattcaagactgcttctggtggtctgacatcaaactgctcggtcccagcagccatgcttccccagggtctccaaatgctgtgcccagggccctgccccggcagggtctgcttccctaggtgttggagtagtgccagcatctacattccaactatctcagtgattctgttgtgcaggcagagatggaagcaattgcccactgcctgagcttggagccatgctgcctggactgtgtttctactccccgtgtcttagttaggattactgtgacgaaacactgtgaccagaagcaactaagggagggaaggggttatttgtcttacacttccacatcttgagggggtccatcattccaggaagctaggacaggaactcaagcagggcagggagctggaggcaggagctgatgcagaggctatggagggggctgctcacggaacccagggccaccagcccaggggtagccctccccacatcaagcactaactaagaaaatgctgtatacgcttgcttacagcccagtcttatggaggtgttttcatgattgcagtttcttcccctcaaagggctctagcctgtggcaagtcgacataaaattagccagcgtacctttctccactttttgtttgtttgttttgagaaaaggtcttatgtagcccggtctggcctccaactgaggtcacaggcatgctggggtcccaggcatcccgaccatgaccagcctggactcttcactatacccagctatgtcttcatgccctggcacatattcttcccctacgaaggcgggtctccttgaagtcccattacagaggccctggatgctgcttgctagactccgtctagcatcttattttctaaccaagaggtttgctgtgccgtgtgatctgtgcagctctgcatcacaccctcaggttcctaaccaacccgtgtccagcctccgagaggcacgccgtgcggtcttcgaggctctgcttcgcactctttcatgggatggcagtgaactccgtgtatcagtctagatgcccctgtgtgtatgtctcggatgtcttccgcaacctgtcttatggtggagcatagtcagctcctggtaaaggcagggcacaggtcctctctggctcttctcctccttcctttcagccctccgggatagtgaaagttgcatactcacttcccaagtatttgttggttgaagggagaaatgtttatatctgatttggagacagaacttagagacattacttggctctgtaccttgggagtaattattaccttgatttttaatgagttgtaagtttgtgcctattagttaattatactgtagctgtggatgtgcgagtgtgtgtgtgtgtgtaatatgtgaatatgtggaggcctcaggacccattcagtctggttcacttgagacagagtctctcagtggggcctagagcccaccggttaggccagccagtgagcctcaggggtctgcctttcccaccttacccaaaactgggattagaagcacacacctgatctttgatgctgattttggggatcacacttgggtacttatgcttccttagcgggcattttactgatgaagtcctcttcccaggccctctaaggtaacggttctcaacctccctaatgctgccgagaccctgtaatacagttcctcgtgttgtggcgacccctccccgcaaccatgaaatttgtttctacttcataaccgttactttagatctgatatgcaaccccggtgaaagggtcatggtgacccccccaaaggttcacaacccaccgctgcaaggttagagtccacgttcatttcctgtgtcccccatttacagaggacctgttctgcagcagatacagagcccagtgatgggactttgaactgtttctttcagtcttctctcgagtggacagggtggtgcagtagaagcatgtgcagctatttctggtccccctttctctttaagatggggatttcgctctgtccttcagagtttctttctgtgtttacaccgccattgcttcgataaagggaaggcttgatagcacccgtcacgccagagcgttggccgtggcccttagagagctcttcataaacccgcttctatttccagaggcggaattgttcctggtggagcaccacacggagatgaggaggctcacttcctgtgctggctggctaggtgctcacctggctgtgattattctgtgctggtacctctgacaccaggggagagccactagcggtaggaagggtgggaccttgagatgggatattttcagagcatggagcacatcacgagcgctgctggattgtaagaaggacagcagggaaatgaagactttactctaagggaacataagagagaacctggatattctgtttcctgagcttccttctaacatatgtgtgtttgaatgtgtcggtaaatatgagcttgtgtgtgtgagtgtgtgtgtgtgtgtgtgtgtgtatgttgcatgcatgtgtatgtgtgcagaggcctgaggaggatttctgggtatcctgacatatgactttctaacccatcacctgagattagacctctcaataatgctagagctannnnnnnnnnnnnnnnnnnnnnnnnnnnnnnnnnnnnnnnnnnnnnnnnnnnnnnnnnnnnnnnnnnnnnnnnnnnnnnnnnnnnnnnnnnnnnnnnnnnnnnnnnnnnnnnnnnnnnnnnnnnnnnnnnnnnnnnnnnnnnnnnnnnnnnnnnnnnnnnnnnnnnnnnnnnnnnnnnnnnnnnnnnnttgatgtttcccccctgcccagccagttgtcccaaaagtacttaatgagtaatctcctcctttacatgttactgaaatgttgtagctggactttggctactttgtgcattcctttttcttccactctcctccaccctttcccaccctttcaacccctttttcttccactctcctccacccctttcccacccattcaaccccctaacactagataggagagaaaaaaaggatagaggggaatgggggcaacgttgtcattagactacttcctgctgatcaggggtgttgagttccttagggacaagtttgatctttgtcatcaggatatctaatatctgatttcttctccttgttgtttcttctttgcacatgactacttaacaaaccattaccaacaacaaccaaccaacaaccatcaacccaccaatagccaactcttttggggccctagcatttatatatcctctgaagagtttctagaatcccaaatgtcacacaattgcagaaattatctgccgctgacaaaaaatcacacccctgctagagcatgaggcaaatcatagtcagctgctgcggacaatctgaagcagctccatatcccacacctgggattaaaacaaaaacatattctttgttttgttttgttttgtttttaaggaaccaacattctcatgacaaaatgtcccagtttctagtaataaaatccacatacctgctgaaacaggcagcagcaataacaaaaagctagatgagtgtcaagcagcaagaggtggtgtgtgcggcttctgggtggggactatgaggctggggtcaggcccccgtttcaaatcctggtgtggtccttttcagcagagtattagagggagagggagggggagggggnnnnnnnnnnnnnnnnnnnnnnnnnnnnnnnnnnnnnnnnnnnnnnnnnnnnnnnnnnnnnnnnnnnnnnnnnnnnnnnnnnnnnnnnnnnnnnnnnnnnnnnnnnnnnnnnnnnnnnnnnnnnnnnnnnnnnnnnnnnnnnnnnnnnnnnnnnnccaggttctaaagtcccataatatacttcctttagcaatgttgcatccatctctaaattttttccctttatttttattttatgcatttgggtgctttgcctgtacgtgtatctatgcaccatgaataagtgtagcctgaggaggctgtcagatattctcggaccgtgtgagccatcatgttggggctgggactcgaacttaggttctttggaagaacagccacttgtcctagggatagagctatccagctccaagcctccatgtttgaaaggttccacaacctttccacatagcaccgccaactggggaccaagtatcccaggggaacatttctcattaaaactgcctcacacgggaatgtaagagtaaccaaaacccaggctgtgggcaccccccccccccccgtcccttcttcattcgtgtgctgcgtgccttgtaggctcccgtccagagtagatgtcacgtggagcctcctgtggtgcaggtcaccccagaggagtaaggtgtggagtccgttgtgtgcatgcttggttttgccgttccaaactcgaactgtgcttccaggcggcgaatcacactgtgatctttaactgcctgtttgcctctctacatctccgacacttgggggctattagagaagtaaatttatgaggccccctttcctcttccagatgcaggttctagtaggctcgtccagttgttcactagtcgcctgacgttctggcataagcagaagtgtgcctcgcgcattgacaccctcgctttattgccttcaggtatctccccagctgcatcgctgtatcatgtgacagttctatttttaatttttcaaggaacctccacgttctccatgacagctgtgttagtgtataaccccatcaatagtgcgtttttgctacatccctgccaacatctgataccttccatgttgctgatgctgatgtcacgcccccaccccattatcccagaatcctttgcctgatgaagacaggtggtagcctacacctggtctttactcagaggtttccagaatttcacaaaggactgcatcttggcggggttagaggatggtactaactttttggaggttgggccagtcagtcatgtctgacatcatttagctctggggcctttgggaaagccactttatgtagctgagtcttgcctaccctacctgttaagtgaagtgtttggactaagtaattggctacagttgctctcaacagcaagggaatcaccgattctttcagtagattgttcagtatgttatccacagagacttgcaaagtctatgctggcttcccacccttgaaacactccctgatttcaagcaattactcagccagcgtttgtcagagtgagggcatctgtgtgagcctgtgcgttactttaatttggaaggttaaaaaaaaatcactttaaaaattcagacaatagactcaaaaacgagggtttaaacacttcctgtcatacgttcttgtctccctgcccccactgctccccttcatcagcagggatgacagaattcatctaggcaacagatattaaacaagtctctgtccaaggctgctctgctgggtggtgcagcacacagagatgctccaagcatgagccaggtcccgtcgtctgcacgctcctgggagattgtagagaacaaatccagtgagacagacaagggccccgggcagagggggagctgcgcaggatcagggaggaggaacaaacttggtgggcacagctttgggaagtgggattatctaaaataacacctgcctcctgccagctcctgggttggcatgctggccctgttgctacattcttctagtagccctggttggtggcatccctgccagttggccaaactgagcaacagaagcctcatttagtttgctggggccaccccatttggttcggtaggtgccagagccaagcttctgagtccaaattctgcattttgttgtcatggacatgaactggcagccaagggtcagagacgccgggagaaaggccagccgagatagatcttggcattgccacagatggagactcagaggtgttccccagaaactgtagagtgcagcacacctctgagggcagtcatgcaaggccaggtccttacagttgattaggtcagccctaactttttaaaataggttgtgatggacttacaccacacaacagtgaccattcagtggtcattgtgacaaccagtgaccacaacaagtggtcaatgaattgagaaaatgaacattcactgtctcgtccgctctcgaccagcaagaacgacacgaccaccagtccttctaacagcagtttattcagcaaacttcagtcttcatctctctctcttcaactttatctctctctttatctctctctctctttatctctctccccaacctgggcctctcactcttatatactctcagcccccatccactcatggcaggcccatcacctcaccaggcacgcagctttagctaatcagggcagcaggggcatgtctccaccaaaatggattcgccagtaccctggtgcacctgcgcagctctcacgatggtcgtggcttattttcaggtgtatgaggaagttaggtgcaagtcataagacttagctgcagtcccgggcaccatcttgggactgctgccacaattgctcctcacaattcacaatggtcaactgtcccattttctattcccagatagcaaccaccagtgtactcggtctctgggtttctacatttgggtatttcaagtcccttctctccagctgtactcacaccctcgtaaggctccttggcacagcattggccccactctgatgtccacagctatctcttccatctcagtgtggtcagtgtggtcacacctgcagaattccttctgccacaggaaatgagaaagtcacaggtctgaccattagcacctgggcatcttgcctgccactcgtgtccttgtaataacttatctttaggccccgcccacttttgatggaaaccctttgccatgaacagattgtcctgtaggcactcctcggtttatgtgtaaatcagggagctggcaaggaaattaaaaaatgaaggcactccaacagggctctggatttgactagaagggtgaagaaaggtggcttccatcgagcagtccgcctgtactgtctggaatgttcttccaacccaagcatccccgagtccagcatggcctttgcaagaactggctgccttctccacaataaataatgtatctgtgagaacttggcatgtttctcatgcacaaaaacatgagttagttgtggtggccctcttgaggacctggtagaataaatcacattaaggtgaattttattagattgtcttatgtgatgtagtctgactgtccatcaatgtctggtgaggctgagaatctctcggtcggtaagtctagatggcaagatttcccagcagtcccgatttggtgttgaagacctggagggcttctggagaacttctggtattcagtctgcattggaagcctgggcatgtcggttctgttattggtgaagaagtgcttcagctacagagcagatgagcttgccagcagagtggaaggcaagtaggcaaaaactgaaggtttttttttttttctccatctctctttatctgggttcctcttggaggttccacccacatttaggggagctcttccctcttcagagaatgtgatcagggaaatctcttaccgcactcagcgctgattccagacccaggcaggttgacaacccggattagccatcacaggcagaaaacagtcttggtcccagagatgccaaaggaagacgttggaacaggcattgcaataggaatgagccagaggctggtaaggagttgagatgatgctggccagagtcgcttcattgccttgtaatgtgtagagagatttcggagggtctgatgaatggctttccctggttcttatgggtttgaaactgttgaagaaggaactgaatggaggagggatttctggttgggtcaagttcacagaggagaatgaggaaggattggtgtccatctctgtgcagatggtgagcttacaagggctatggaagttaatgagtaggattgtggatggggaggggggtccctggatccttttgcggtcttttgtgacagagcagactcgtggtatgaactggtcaatctctgcacccatctggttgagatgatatacgttcatgttttctggagcctcggaggcagaggcagagttccatgggtgacattaagatctttgctgggacaatccattccagggcgagctgttttgtgtgagcaatggctggcagaaggcaccccatggcttcctacatggattgttcttcgtcttgccaccctaatgcctggttgtcactctgcgtgttattttggagacgggtgatgcggcataattaagtaaaatttagaaacccattcaacattgtatatgtcgtctgtgactgttacgacaggtggtgggtggactctagccatgacgatgtcacagcgtgcgtaagattaaaaagccacaggcaaatgattaattcggtcagctccggagaacagtttgtcaaattgagcttgttgacctgtgagagcagctgcacgcgtctcttctggtcactgggttgattgtggcgctggttggtcggcatctgccgcttactgcatgggtggaaggaacaacttgcctccgtattttcgagtcaacctctttcccctttgaagtgtgtatgagtgtgcacgtggggatgtccttgtttgtttttctgtcggtgtgataaaacactgaccaaaagcaacttggggaaagaaaagggtttattttatcttacagctaagtccaaggtcacagcccttcgcagagggccatcaaggcagaagtcgaggcagaaccctgggtagaaaatcacacagagacaacggtgcactgcttgtaccgagcctcacattcggcttcctttctcgtgtagcccagaacctacctccccaggggtgtcactgcccacagtgggccggaccctttcacatctggcaagaaaatgccacacagacaaatgcctacaggccattctgatggaggcagttcctcacttgagattctctcttcctggtgtgtgaagtcgacaaccaagattagccagcacagtgggtaggcatctttgtacacttttgtgaaggccagagatcaactctggtgttgttatatactttgtttattgagctagggtctctcatggaacccagagctgccaatttgtctaggctggttggccagcaaacccccgggtatccacttgtctccactccccggagctgggattacaagcttaggctgccacagtcagctttttaaacagggactcagggggatttgacttaggtcctcctgcctgcctaggaaatactttactcttcgagcccatattcccagcctgcgatacagttccttttctcacaaataacaacagaaaacatctgcctcgcagggtggggaggacaagacaagatatcaaatacaaaccttggtgcctagaaatggctgttaatcgatagttgttagctcactagtcagtttcagagatgaggacactgcagagaccaatctgacgttgatggactgacatcctcagatttgtcaaacgctgtcacatgatacgagggaggaggcccaccattgttgatgtgccagagattggggaacgagcaaggtggcacgaatggagggagacacatgtcacccaacaccaagaagatctctataataatcagctgtgttctagtggtgaagcccatgtaattatgagcagtttgtcttgggagcttgaaattgaaacatccgggcgtggtggcgcacgcctttaatcccagcactcgggaggcagaggcaggcagatttctgagttcgaagccagcctggtctacagagggagttccaggatagccagagctacacagagaaaccctgtctcgaaaaaccaaaaaaaaaaaaaaaaaaaaaaaaagagaagaaacagcatctctcagcagccttaggacgctcatctgaggccaccatggctcttggttgacaggggctgtgatgtcagtgggaggatgtttatcactgaatgtagcctcctgccccaccctcactgtgacaaggtgacttttagcaatgtcacctgtccgtggagtgcaaaaaaatcatgtttggataagaactccagggtcagagcctacacaggagcaaatgagactccgtcctctcagatctgccctgccccaaactgggttcctttaatttatgtgtttttatcggcatgcataattttcttacacatagtaatggatctcatgatgacattttcatacatatatgtaaggtatcttgatcatatttgctccccttaccctcttgccgcccctccctttcccattgacgcctttcctcatctcagctagatccccactactttcatgcctttgtggttgacccaatgtgttttcacgcttacagggacacgggtgaagggttatttacagaagcatggttcgtttgccagttggttcgcctttgtcaagttaggtttatgaacaggaattctgggaggaacttttgctagtctccaggggtagtctttgattgagctggtacctaccacctgaggttaaaggccttacaagtgtgaaatcgtgcggcttattttaggatatagagaacaatgtaggccttatgtgttgactctcgccacccccaaagccttatgggttggttttcctctgtggtttggagttaagcgttgttcccctaccccaaaaagccttatggttggttaatgactaatttctccctgtgctttctccaggtcatgttagcggcttcctactggtcgctgcttgcaccagcggtggagatggcgacatcctcggggggcttcggagcctttgccttcttcccagtggctgttggcttcaccctgggggccgcctttgtctacctggctgacctcctgatgcctcacctggtgagtatcgacgtcccgctccccgcagcagacttgcttctgtttgcctcggtggatccattcatacgtcaggtagtcggcagattctaaacagacaggtcgccagagggagtgagcggtgattccttccatcaagaaagtactcgcctgttggcatgactaatgaatgcctcactgttcacatcttgctaacttcagattttgaacgtcagatctgtcagttgtagctgacgatgtagagcaccaatacgagagcaaccggaactggggggaggggggagcttaggatcgtggttcagggagagctggagagctgatggagtcatcagggagatgacaacacagccaaggatagaaagacctttactagtttgtcacatgttaacgggaagtggcaggtggagtgggagtctgggaggtcagagttcacctctgacatgtatgaccacgtgtctctcagctccaggtttccttcctaccatctggagactgtaagatgccaacagcaacgaaaacaccactgttggggagaaccagagctgtggagcttctgggcgggaaccaggcaggtggtttgagcatcactttctggcctgagctgctttgccaagcagagagccaaggccaggctgtgctacagcagccagaggaagcctttggctaaacttgttaccacagtgcatgctactggcagaggagagaagggttgatgtcagccacagggtgggatgtgtggcatgtccccgtaccacacacatgggtcttagaggtgggcggaagtacctccgagttggtgcccggattcactgatcacccagaaaggggagaagtatgtgaagaaaatgagattgtttttctgttagatcgtagggagtcggggggtatgtgctccaggacacagcgaaagggctcttgtgtgtgtactctccccctctgcttttcctgtattcctactccctgacatagtctccctttcttcctctctccctgtctccttccctcccacctttcctgtcttcctctttctccttccttccctccttcctttcatgtcttcctctttctccttccttccctcctaccttcctttttctctctctttccttctttccttctttctttccttccttccttccttccttccttccttccttccttccttccttccttccttccttccttttatgtaacccagattagccttgaactcacaatcttcccgcttcacctcccaaacgctgggatttcaggcctgtgcagccatgtctgagcccttcctcctgtctcaccttaaattaccaaccagagagggaaaaggatgatctctgggaaccgagattgctgggccccagggctgcctgctgcaaaacttaccgcttgcagggcacacacactcgagcccattccctggatccggcagaggatgcgatggccgcagggccggctgtgacagtttcctaaggagccaccatctgtcagctgttgtctttccactggaagcttgaatgacagagcctgtttctgccccctggatgtttggtttctttgctgtcagatctaactgtccgtgccggtggcttttagagcctgtcctgggagtgctgcggattctcctcttaaaacggtctagctacgtgtaaacttcttactggaagatttcctactcagtggcccgagctcctgagcagggggttgaagtggttcggttgttctatacagtcctggctagaccccattctcagtactcagtggggccacgagggctcctaagccagtcatcattaagggcccttccagtcatcattggtcctccttactgggacctgggagagaggggaatggtggaggtaccaggcttggcggcaggtgtatttgaccagctggccgagcagaggggatttctctgggcaatgtaaatagtcacagactaatttgtactgtgcttcgtgctttctttgttgttattgttaatcttcggttcgtgtttgttttacaatatacgctttagatacagagatgctcccagggggcaagctctggatagataatacagaaaagcagaaattgttgcggagtggatggatgctaactgctgtggggtggggttggggaggggctgggaaagaggcgccctaaccatcagggcccagacctcacttgttggcagaagattcagtaaacatctgatctgggacattggagaggaaattaattgccgctgttaatgtgtgaaggggaacgtgtctcagaaggtctcataaacaggcaggcttctgattaccccagcttctgaatacaaatggccagagtcgtgcgcacaagaagcccgctgccctgtgctccgaggcccgctaaagccttccctcccgtgtctctgtcaatttgcttcccagacctgaaaaggaccgcagcttggcccttccacaggggccaagtggcgtgtcaattaatgggttttgatagcggaatccccgtggctatcccgtatcgactgagcacaggcagggagggtatggaccttctggggcagccagacttgattccctgaacgcttactgctcctagaatttgtgagccaaccacttctgaggctgtgggagagtttgggtggggggtggtgttgaacttgaggcctcttcggtttttaatccattgagccttaccacagagtcagagtaggcagtcaatggtcttggaggagcagggggaggtaggaggcctgaaagccttcactcgctgttggctggctgttcttcctcttcatgcccgtgtgtgcccgtgtgtgcctcagaatggaatcttgttttctgctttctgaaaaaaacaaatgctaacactgcctgtgttggtgctgcctgctttcctcagcttgcctccgtcttggcacacttacccagagaagtgcgctctccccaccccctccctattggcttcccacatctcagagaggctgcacaagagggaggaagcagcaggcgcttgtggctctccctccgtggctttctcctgggtgcagtactgtatgtccctcctaagcaggctccgggtgggagtaggggacaccagcttcctcccaggtctaattatgtccccagcatctatcaggtctcattgtgttggccaggacgatggctttataaaaatgcaactgtgtgggacaggcatagcacgctcaggctggtgacaggttttggagggcaggggctgcttccaggaactacacacgatcgatgtctgaagtggcatgttgcatgaggcaaactttgaccaccagaggggcatttgcgtgcatctctgtccttcatagatggtctccacagggaaccctgtgctgttctagtcacaggttggtgggatggataaagctggcgcttgggggagggggtgctgattggagctacagcagaatcgagaccctggtcctctctgtcagacttcccattgcttttagcctctatatgtagtcctgcctctctctctgagctacacttcagactagagtcacacacacacacacacacacacacacacacagagtgagtatgtgtgtgtgtatctgtgagtgtgtatagatgccagaggtcaactttaggtgttgaccttgttcttttgagacagggtctttaactgggtcccggggttcactgattcagccaggcaggctggtcagcctactccagcagtctgaacacagcaagcactttactgatggatccacccccacagcccctgggcaaacgccccctcttgatacttgtagggctaagctagagagatgctgtggtagaggaagcttgtcctgtggatgtcgccgtaagccacccggcaggcacagtgtgttcttaagcagaggccaccctggacatctcttccctccctaagcgcctgctggtggctgggtggggcttccctgagggccacgctgtgcccaggaatctgagactctgattaacactccagcttcttcttggagaaacagcatgtgtgtgaccgtggggggcctgcctaggggacatgagggaaggtttcctgtttacagagcttcaccgactgagggactcctggcatcttgacaccccaggctttgcctagataaggctttagggagtggcatgcctagtttcttttctcaggtacaaatggcatagcctggtggaggcagcctctccagctgttggggatacctagaagtgtagtcccacacagcttgggggtcccattgacttgaggcaacttcctaatatagtaatactcactgacgcttagagaacacggcggcttggaccggagatgtcctgcactgtctgagcctctgccgagaaaggcttgtgattctgggttcccttctcagtaccacaaaacagcaagagtacatagacaaaaagccaagcagtctaaccattctgtggacatgtgtgagtacccatgcggatggtgggactccatgctgtgaactgtctctctccctgactgtgtgctatgtcttctggggcgggcagtgtaggtggctctatgtattgtaagaccccccgaagctgggcctccgctcaagtcccaggctgagctggccagcaccccagtgacccgagagaaaaccacacctgatgcaaactgcaagaggttttactatcagctagctgaggatgaagtccctccgctgtgcagggcaggggagttcgaccctgagcggtgacagtagggggcttttaacagctagctgaggaattgggaggagttgggaagagttcttctcttccaggtgtccttggtgaaatttacaaggcaggaatggggaatgagttctttctgaatttttatctccgtgtcctcgacacaggaaggcaggcatctctggttgtaaagtatagaaacaaaaaaggctttttgctggctatagagaacaaagagcctctttctggctgtgtttttagagatcagggaaaacaagcttggggaacgtgcagggctttaccttccagggagaaacgctctaagtcggggtcccacggtatctgtgcttgtgttttagctgattctgttgtcctggctcaccgagatggcagaggaccaggaggttacaaattacatctttaatttnnnnnnnnnnnnnnnnnnnnnnnnnnnnnnnnnnnnnnnnnnnnnnnnnnnnnnnnnnnnnnnnnnnnnnnnnnnnnnnncacacacacacacacacacacacacacacacacacacgctttctgagggaaactttgtaagcctccagtggtttttgtcatcacagaccatcttgatagggatgcttaaatcctaccaagtgatttaaatcctaccatgtggagcatgtatgatgcttggaaccttctaaaacccacgttgattccccccatcttttcgatgttaggccataaagttgtgacgatcctctcttgccatggcttgagtcaggaaacatttcaggttccacatatctagaacttagaacttatgggcagttgggggtagaaaagacactgagtgtgcgcttaagataggggcatcctcctattcctcatgggagctgggacagggctggtttgcccatagtctgcagctctctctccagtcaggtggctgatgcttcacagaacctgccttgctgtatctcactgctcgtcggatctcagattgattgggccaaggagtcagagtcgcagggagttggagggaaaaggcagtgtcagggaaaaaacagacagcgaggttttgggacagagatgaggtttggctagtttgtactggaggggggaggggacccagttaaacccagtgtgataagtcattctctctcacatgcagccttggggatgccttaggttggatagaggagaaacactggacctctgatcacagccagcatctcagagtcctctggaaattccctattcccaacacacaggtgaaaagagggagagttgccgctcccttgatgtgtatgggggtggggtgttgagaacttaatacacaaatcataaaatcataaggttggcaagagtcgtgtgggcctgtgggttcctgtttcttcctgttgaagggcatggggctgagcatgtgtgttttgttatatacacatgtgaccccttgtgaggtgagagaaggccctgagaccaagttaagctggttaccctccggcagcctccctgcccccgtctctacagcaggttcccttgctagtagccatccccatcctcccaggcttcctctctttacgactgtgcagtgctccctgtatcccctggaccgggccagctttaaccaaagggctggacttgctgctcactctgaatgcgggaaaaggccctcgtgcatgcccacacctgtgccagcaacagggctgacatgctgggaggattccagttttctctgaacgtaaacctacaaggagaagcagcaggtcgaataccactggagaagctgtgaacagagcagcccagcatccggtggctaagataagcatcctttagagctgaagatctgcctccatagcacaagggctcgcctggtggtcgtgcactctgggtcgcttggctacaaggttttaatcagcggcttgttctctgctgatcatcagcaaagtgagatcaggcatgtgttcccataagtggttgtagacagtggaaatgtaggtgcatttccacacacattgacacttgcatatgtgcagtttagaaggcgtgggcacacacacacacacacacacacacacacacactctctctctctctcacatgcacactcatgaacatgtgtcttcagggtagctcccgtcccatcagcctcatgaactaaggaccttctgttgaacaggatggcagtgactccatagtgcagaagagtggctagggacaggccgacagaagcagcctctggcagaagctggtgttcagccctgatgtctggaagttccaagaagaagcctgaaggtagccagtgtctgccacaggcatgatttgtacagcagtggttttggctgcaggagctgaggcagacttgagagcagtgtgctgcccagagctcctcgagacagtgtgggctgtcactgtcatctggagcagcgcagtgccacgccagcctctttgaggagattactcatcggttcaccacgctatcctgagggacagcagagcagacgacacctaagagtgtcccagctgtcttttgggtcgcaccgccgtaacaaaacaccactcagggatgcttaaataacacactgtctcaaggctctggctgatttgattacaggtgagggccctatcttcccggtttgcagatggctgccttcccattgtgtctgtacacaagtcgaggcagagagagagatggtgagcctctctgatggggacttttctcatcaatacactagttcagtcatgcctcatctaaccttatcacccccagaggcctcagtgacattggacatagcttcaacacagcaagtctttttgggggctgggtatgacacagacattgtgtttgttaaaacctgctgtaaaaaaagtggaggaattttcttcttgcatattttgggcataagagtgctttgtgaaattttcggagcagaacactgactagacaactctctggccagtaggcagcactctctggccagggggaagagagctgtagactttcagaggagtaacgttgatgatgctttttgtattaacctccattttgttctagtaagaacagctggtccagtggccctctagtagtgtgtactcatgtgtctttacacttaataaacaatagaattaggtcttaccttttttattttagtgtgtatacattcatgtttgcatgtgtgcatatatgtgtgcatgggtgtgcagaggccagaagtcaaactcttgggtgtttttcacaattattttctacttttttcttttctttctttccctttttttttttttttttttttttgagacaatacctctcactgaacttaaagctaaccagtttggctaggctggctggccagtgcaccctgagatcctcctgtccctggctccccagagctgtgactacagctgtgcactgctacacctggttcctttgcatagttgctggccatgaagctcaaactgtcacgcagtttactgagccttctcccagccttaggctcactttctcatgaggtcctttttagttaatgttgtgtcacgttcatgtctcccgttgtatgtcgtaccgttaccccccgtacactccttccggtttttgttgtttctagtgttcttctggagctcctgtcccgccagcttctgggagtagtgtcccattcattctattttctcgactgaatttaagaatatgtaatatgtctccaggggctgtggggatggcttgagaaagagcccttgtcagacaagcatggggattagtttttgaatacccagcacccatgtaaaaacactgtggttggcacacagaaaagccaggctcagcaacacatgcttttaattccagcactggggaggtggaggcaggaaaatcccaggaacctgctagtctagcagaattggtttaatcttagtgctctgggtgagtgatggagacaggaggatgcctgagtcttgctgtgtcagcctggctccaggtagagtgagaaaccctgtcctagggaataaagcagagagcaccagtgcatgacacctggtgcagtcctctagcctctgtgcctgtgcatgggtggatgaccccctcatgaatattcaccatacatacacacacacacacacacacacacacacacacaagcatacacacacnnnnnnnnnnnnnnnnnnnnnnnnnnnnnnnnnnnnnnnnnnnnnnnnnnnnnnnnnnnnnnnnnnnnnnnnnnnnnnnnnnnnnnnnnnnnnnnnnnnnnnnnnnnnnnnnnnnnnnnnnnnnnnnnnnnnnnnnnnnnnnnnnnnnnnnnnnnnnnnnnnnnnnnnnnnnnnnnnnnnnnnnnnnnnnnnnnnnnnnnnnnnnnnnnnnnnnnnnnnnnnnnnnnnnnnnnnnnnnnnnnnnnnnnnnnnnnnnnnnnnnnnnnnnnnnnnnnnnnnnnnnnnnnnnnnnnnnnnnnnnnnnnnnnnnnnnnnnnnnnnnnnnnnnnnnnnnnnnnnnnnnnnnnnnnnnnnnnnnnnnnnnnnnnnnnnnnnnnnnnnnnnnnnnnnnnnnnnnnnnnnnnnnnnnnnnnnnnnnnnnnnnnnnnnnnnnnnnnnnnnnnnnnnnnnnnnnnnnnnnnnnnnnnnnnnnnnnnnnnnnnnnnnnnnnnnnnnnnnnnnnnnnnnnnnnnnnnnnnnnnnnnnnnnnnnnnnnnnnnnnnnnnnnnnnnnnnnnnnnnnnnnnnnnnnnnnnnnnnnnnnnnnnnnnnnnnnnnnnnnnnnnnnnnnnnnnnnnnnnnnnnnnnnnnnnnnnnnnnnnnnnnnnnnnnnnnnnnnnnnnnnnnnnnnnnnnnnnnnnnnnnnnnnnnnnnnnnnnnnnnnnnnnnnnnnnnnnnnnnnnnnnnnnnnnnnnnnnnnnnnnnnnnnnnnnnnnnnnnnnnnnnnnnnnnnnnnnnnnnnnnnnnnnnnnnnnnnnnnnnnnnnnnnnnnnnnnnnnnnnnnnnnnnnnnnnnnnnnnnnnnnnnnnnnnnnnnnnnnnnnnnnnnnnnnnnnnnnnnnnnnnnnnnnnnnnnnnnnnnnnnnnnnnnnnnnnnnnnnnnnnnnnnnnnnnnnnnnnnnnnnnnnnnnnnnnnnnnnnnnnnnnnnnnnnnnnnnnnnnnnnnnnnnnnnnnnnnnnnnnnnnnnnnnnnnnnnnnnnnnnnnnnnnnnnnnnnnnnnnnnnnnnnnnnntaccacacacacataatgacacacactactatgcaaacaccataatacatacacaccacacatatacatacatctacatgcacagcaaacacatacatatacccacacatacacaacacacatacagacataccacacacacacacaccacatacagagacccccccctcccaattaaaaaaacaacctatatactcttgtgtttgtgtgttgcctagtgatcactgaatcagagttaccactgggctatttccgatgaggtctcacagctacccagtggcaggcgctcccccctacccccacccctgggcccatcacattgctttgtcacacatttttccgtctccgagtttcccgaaatagtcagcacacggccagtgctttggcttcgaacagtccatcacctttaatggaaaatgtgaaattgtgcatctcaccttctgtgaggatcacggcccggtgcagcccgttcaccagttcctggaaacccttggagtgtgctttcacctgttgttctgcagagcccgaaacagaaaggcaccgtgaacttaaactggaccgctgcatcagagtcactgcaagataccttgtcctcgctccaccctctgggccccattgcctctcaaatggaggtggcttaattgtaagatcattgtgtgtgtgtgtgtgtggggggggcagtaatggtgcatggatgtgtgtgtgtgtatacagtaacagtacacggggtgtgcctgtgtgtggaggctgacggatgaccttgagggtcttcactgctcaccttgttgttttaggcaggctctctcacagaaccaattctgctagactagcaggttcttgggattttcctgcctccacctccccagtgctggaattaaaagcatgtgttgctgagcctggcttttctgtgttgttgttatggctccatctcaggccgtccatgcttgtgcggcgagctctttatccattgacccatctcccagccctcaggtcattttgaagagaaagccacgtaggtttctgagccaaagtttctttctttatcttctctctctctcttttttaaatccccagttcggtgtctgtttctggaatattggctgtgttctagctgcatactttaaagactttaattagctggcactcaagtggtgagcttgagtctctccatcctgatgtttaatggagtgttgcctcggatggcaggaatcatggtaattggatcatagctgggactctggctgattcacaaaatcagccaaaggtgtcactcccgagaaggcgactaggtttagctccggctcaggggttccgaagcattgtcccagctgccgatgcctctccgtttcaaggagactctgagaaaatcacctctgggcaaccacgggattaagtgctcttggagggattctgtatgccgaagcttgtgtgtacattagacacaacatgctttttaaaacaacagcttcccgaagctctccctccctgaaagtctctctatgcagggagctggagcggagctagggctctgcgtttttaccaagtgtcccagaggattctgaggtaggaaatccacagatttgctgtgtctgataaactttatataacaattttagcaactggatattttcccttgcttaatttatttacctccaagacagcatagaggcagcgtagtcatcactgactcccgatgcaggtggtgaccttgaggtcatgagcatcttgatagggggcaaggatggagcccaggtgacccacgggctcctgggcccatggacctcagctggtgatgccgaggtgtaatggttcatattaattgtcaacttgacagtctatagaatcaccaaggagatgaatacctatgtatcttttacaaggaagcttctagattggattggctgaggtgggaagttctaccttatctgtgtaaggcctcattctgccggggaggggccggacagagtcaaagggaagagtgggcggagcactcattctacaggggaggggagtgggcggagcactcattctacaggggaggggccagacagagtcaaagggaaagagtgggcggagcactcattctacagaggaggggccggacagagtcaaagggaaagagtgagcggagcactcattctacaggggaggggtaggatggagtcaaagggagtgggcagagcaccaccactcatccctctctgcttcctgaatgtggacaccatgtgaccagctgcctcatgctcctgctggcgtgccttgcctggcctgatgggctgtgccctaaaagcacactttttcttccttagattgtttttgtctgctgttccacagcaacaagaagagtgatggacacacatggtctgagatgggaaggtatcctctttttgcatttttctctctccatgcaacttccttcctgatgtagaaatactgttcccctgagtctggtgtcttttaaagcgctctgagctacagagtacccacgccacccgcaaggcgctagctattttcctgggtgtggtggccgagggaaagttgggtttctgcatagctgtgacctggtcagtctttgtctcttaacctgacagtggatactcgggattcttcagaagggcgagacaagatacctagggaccatctggaagcttggatggtggcattggatggtagactaggtgtgtgagtgggctgatgccagtggatatgggtggagagcctcgtgggacatggggaatgggacatgtcttctctgggcagcatgcaggctggagagtcgtacactgttggtaagggtcgtccacagcatggggatatttcatgtaagagtaggtggcataagggactggctcagtttggttcagagctggcatgcagaccagagtcagaagacgaatgcaccaggaagagagccatatgtggctaagagtgggtagaaccagggcctcaaaagctggccagctcctttgggactcagtgaggcaacgtaggccccaaggcggctttggtccacccacatggctgctcacatagcacatagcagctgatttgtaaaggaacagatctgccaggagagaagactaatgttaccacagtactggaggtacaggcctctcgtatctttcgccaggccaggtcaaggcttactggccagttcctcctgaagaaagaggtgtctgagaggccacactgatataatgnnnnnnnnnnnnnnnnnnnnaaccatccacttttctcctctcacccctgcatctcccttccccatcccctctccctaaccctccctcctcacccctttcgtctttcttctttccatggttgtactatatagcccaggctgactgcaaactcttcatcctcctgcctcagcctctgatgtgctggaattacagtcctgtagatccttctctcccgtcctgtgaatatattttcaaaacttttttttaattatgtgaatgtgtgtgtaggtaatcagaggggccagaagagagcatcaggttccctggggctggagcagcaggcagtagagagttgccgccagcgtgggtatcaggaatggagacacgctccctaccagctttgcagtgaccgctctgagcctcccagccatctctgccatccctcctgtgaatatttccctaccggcggttgactgactgcagatacagaaccctcacatacagatggccagtggttgggggcagagctatttccctatctggccctttgcagaatcagctgctgacccttgctgtgagcacacctcacttaatcttttctctctgtacttccatctccactatccggggacccatcacctctggcttcaggttataatttgcagcatcattcacagcctgagagttccgtcttgagtctgccttaaacctgtccaagggctcctggtgccctgggtgacaggcttcgtcagccctcgctgctctggcccttgatgccctccacagcctctcctgtgctaaccatctttagcagcacactagatgtccttcctgtctgccaggctttgcaccagctagctcctctgcctagagcagcagttttcaacctgtgggtctcgacccccacaggattcacagatccgatctcctgtattatcaggttatttacattatgactcacaacagtagcaaaattacagctatgaagtagcaatgaaaataatttatggttggggatcaccacatgaagaactgtattaaagggttgcagcattaggaaggctaggaaccacggggctagagcattgcccctttggggcctatcacactctctccagtttttctccagcttgctttgtgctccttcctcagaaggctcccagctttgcctgtgacaggatccactttaggcccttgtcttcttgtgaggacctgggtgctgtgtcccatgcaaggtggagacacaccaacctgtgttctctgttgctgtgctaaaacagtgatcaaaagccacgtgggcaggaaagggtgtgtttcaatttacaggttataggcaggaacttgaagtgaaacccaccagggaacactgcttactggctggctcagctaccttccttaggcgcctccctcagtggcctggacctctccagtgtgaaaagaaaatgccccacagacctggctccaggccagtatgatggaggtgactcttcagtggaggttcctgcttccttggtgacgttaggtttacgtcaggttggcaagttggcagtggacgctcactaagacacaggcctgccttgttctctgcggggtcctggttagcaaagagcccgttatataacagatcttcaggaagtgttcgatgggtgaaggagtgagcagggaccttgagatctttataaaaacccttcctttcactttgtaagctgaataacatgaggcaatgtgtctgtgcccttttcaattgaccactttcttagcactctaaacacaaggctcagataattaaacatgcaggaggtgaaaaaaaatgtaaattttaatgtgcacattgaatgtgttctgtggtggttcatgctttatttactttcataattatgtttgcctaagaagctgaaagacctctgccatttataatcagcgcttttgagctggcagggaaggcggaggagcaggaaagctgattgctcagaacaaggctgatggtggaatctccccaccgggaatccccatcccctatatccaagtgtattagttagggctttactgctgtgaacagacaccacgaccaaggcaagtcttataaaaaacaacatttaattggggctggcttacaggttcagaggttcagtccattatcatcaaggtgggagcatggcagcatccaggcaggcatggtgcaggaggagctgagagttctacatcttcatccaaaggctgctagtggaagactgacttccaggcgactagggtgaggatcttatgcccacatccatagtgacacacctactccaaccaggtcacaccaattccaacaaggccacacctccaaatggtgccactccctggtccaagaatatacaaacaatcacaccagggcacaggcatgtgtgcatgtgcgcacatgtatgtgtctgtgtgcatatgtatttatgtatgcatgcatgcatgtatgcatatcctctctctgacacctatacccagccacagccgcctgccaccaagggctgtctcgctcttgcttctgtcaaggtcctggattttggatgtcattgtcattgaagtgaagtacattccccttcccctttgaggccagagtcatcttatttattacaaagacttctttttttgcaagggtactttcttgtctctcttactctcaccctcttgctccccctctctccacatggccatggctgccctctacttctctactctctccctctctctgcctttctacaataaatgccttaaaaccatggactgcctcttctcattgggacccgccatgctggagcgatagaacaggtcttcctctaacaggtagtgtgtctaacctcccgagggaagcctctctgagttcccagtctgaaggactgactgtctagatgaggtcagcctctggacatggctgtaagggattattcacattaggttaattgaggcaggaggacccgtgctaactcccggacaaaaacttgtgagcttgtggtcagtttggtggcattaataatatattcagtcactaataatacatccatgttgcattaagggaagaaatcaatgaagcatttttcctcagagtcacttaaacaagagtgagtccagatttgaattctcggccacatgctccctatgtcttctgtcgtgccggtgtgttgcaggagttgaatttgtggctgcctgaaggctgtcttgtgaatctgtccctgtgtctttcttcatctgtgtgtctgcgactatgtgcatgtctgtgtcagtcagtgtgtgtgagtgtgtgtgtgtgtgtgtgtgtgtctgtatgtctgtgactgtgtgtctgtgtgtgtttgtatatgtctgtcagtatgtgtgtctgtcagtgtacgtggtctgtctgttgtatgattgtgtctgtccttaacaaagggctttgttctgattttattgaacagcacagggaaggaatgtgatactgtacagaaatctttaactgagttttacaggggattaagtcattggccccaacttacccaggtaacaaacagttctacagactttatcaagctggacccaagtgctgtgttcaaaatttatggtggatatgcctttcataaggttcctttcaacctgcactctatgtttccagcaaatgactatcgcagctcaggtagaaacacatacactactcttggtcaaggaccttgaggagtacacaattgcagattacagcgtgcgttagctcaggttgtaaaagttgattctgtgggaaatccaaggcaaataaggttggttgttaaattagtctctaagacaggttaagcaaacaggctgagtggagccacagcaggacacagtcaagtctccagtgacctcaagtggagtcattgactctggctgcaaggtctagcacaaattgcaggcccttagaacgtaggagagagtcttaccataaggcactaccatgcactctcttgctttgtttcatggaaggaacctgtgaatagacgtgctcactggcacagagagctagtcaaggcgtggtgcaacgtggggcagcctgagtcagcaccgccttgttccccttggtccttttgataagctggccaaggcgactgggaggaggagggagacacgtagaatggccattcctataaaaggctgtatcttaaggttgatcctgagaagtgaatataatgggtaaactgggcaagcaccaaacaccacctcgaggtgtttattcagaagacgggaacttacagtctgtagtttgggtggactgaattaaggccactgatgctgtagcagcggtaaccgtggcagttatgatagccgtaataaccatcccaatgactgtggttgtacctatatgtcccaaggcataattaagttgctcccttaggccacagatgagtcaggtgaacaggaattcagcaatggacttattgtccaaggattaatatagaagaatcttgaacagagacacagtctctctctcttgcttgtggacatgatgtgaccaccagcttatgtgccagtatgggttgtgccttcttcaaacttagcagacgaaagcccttcctcccttcaggtgctacttggtttgtttatttgttttgtttgtttgttttgttttttgagacagggtttctctatgtagccctggctgtcctggaactcactctgtagatcaggctggccttgaactcagaaagttcttgagttgtttctgcctcccaagagctgagattaaaggcgtgagccaccactgccccactccatcaggtgattcttgttaattatttggccataactatgagaaaagtatccaatgatatttcattgacatccctgtgacatccctggacggcggtcgggtgagcaggccagtgtgggtgcagccagctgcctgccggctgccctgcgttgcatcttttccacacagatatgtcagatgcagctgctgcctcgactgtgttagccaacaccagaaagagtgactgacttgaagataaacggctggcttgatttcttcagtgccagcctgatcatgtgacacaggctacctcgatgccaagaaagttttctagccctttgagttctgctgatgagaaggggtgtcggcatgggagcccccagaagaaaggcagccacccggaacaatggggtttagtgttcactagcaggaagtaggagcccttgcctctggaatcttctcagccgagtctgcagccttgggcacacccattgccaaaggtttgcacacacagagcatgcatgtggagaacaaccttaggatccttggtaatttcagcttcactcatcagttctcctgagaggagccatgccaaggggaatcttacccacagagtgccaagcaccatggaatacctgggccaacgggacctttgggggcccaatgtagtttttaaaataatttttcagcagcctctcataatgggaaggccaaatattgttgcactacaggtgggtccagctgggggcagaactagagagactggcctgcttctgactcccgagtgctgggattaaagttgtgcaccgcccctgcctggctgtttttgttttttgttttgtttttaaagttaactttattatttgacaaatgtgattactctcttacctttctcccttctctgtccactctgttcttcctacctgtccctctcatgttagtgattctgggtttggttttgtgcttcatttagttcaacgatgaccatgtgtgtgaccattggataggagccacccattggagtctggtggacaactgatggacaatgattgcccccccacttctccctgttctatcagtagaaaggtattcagtagtcaaggttagggtccctgatcccccctcatcatacaatgtatttgatcctatctactcctctaggtcttatttttaaaagtgaattattttgtgctttaacagtatttttcttgataaaaatccttttatttattaaatatattttatatatgtggactatcttttcttatttttcccaccctgcccatgttccaacttcttttatgtctccctgaccatccccattgactatcaagtgcttggactctttttacacatacatcccccccccccaaggaatatagaatacacccatatatcagtacacatacacacacacacacaccaaggaatataaaatacacacccatatatcagtatataattacaaccctaaattccattcagtgttgcttatgtatatatgcttttagggctggccacttgctattgggttatcaattgggagcttatcccaagggaagaataattctccgtctttcagtagtccttgccaggaaccgcctgttctcactcagcccgtgcaggtgtcagggctgctgtgaattggtgattacaatggctgggctccctgaaggtagcttttcgcagccctccctgctgttttccagctctgagtttctttgcaccccatcggctacaatgcttctggggctttagaagagatggcctatgagacggtatacatgtcttcttaagggccaagcccctgtcttttgatacgtggggtcactgcatggagaagggtgtcaggaaggtcttcgttcttatcaccttaagactgctgttttctccagccactcctctgtggcctcagagaaagccacggctctcaaaagttccacctcccaggatcagggaatttcagttgatttccctggtactaactggctgggtttcttcatgtatctgggggccagccaggggttcacccaccttcccaatattaagatctaagtttgcaggttggtagagtgtctccaagtacctgccatctgctcagaccttgggtgtgttcttctcatggcaagaacagaggcctgaagagggagaacagaagccgacaagtctctgaaggctacggtgtaaatggacaccgagacctttctgccctgtgtcgcccgagtcgtcagatcccacgcaaggcttgtgagaggactttggcagtctctgtagctgataagacaccagtgtctagaaaaatggcctcccataaatactcgaggaaagggcaagccatgctgaacaccaacaaccaccaaaatgagtaaatgccttgattaggagtttaagatggaaaaactgcccaggcccaataaatccatgaaaagacaccaagcctcctgtggctaggatgtgcaacctattatacttgcccccagatgacacagaaggatttgggtaactgagagcgtgtccacagtgggcgctggtgggagtgcaggctggtccggccagctgctaagttatttgttatatctagtgaagttaaagacgtttgtatcccgtggtcagacaattccaagtttagcgagcagtatctaaacaattctacagactcgtgtgaggagacactgcatgctcattaccgtatttcttttcgtaatggtgattaactagattcagataaaatatcaataacctgaaaaatggatatttaagttgtggtcaatccatgaggcagtgcgcagacagccacgtgtgaaggctgcagagtgccctgtactgtttgttaactatcagttaccacttgaaaacatgaaaggatagtgtgcatatttgtagtgacaaggttgacatggtctattatggggtgtggccatgaaggccatccagggtctttcccagatgttgagcttatctcataggcaggcatcgaaaggaacgggcttcccttccttctgtaatggctaattactaggtgtcgagttcctgttttcttctccttgccctctgtacgtttacacacggctgggcatgcctgagtgacttaagggggagagatgaaatggccctgaaggcgaggtacttggagtggagtcttggatttagtaggtctcccttagatctcccttccagatgtggtagtaacagccccctggtctttgatggttctggaacgtatgtgccttacctttttcacgtctagtatagttcatctgcagatttcatgtctagaaatctataaggctttggtgtgtgtgtgagagagagagagagaagggtgtggggagaatgtatgcttattgcttttgggctttactgagatcttgatatgagggctggcttatgagggctggtgagatggcttagtgggtaaagggtgcttgctgacaagcctgacaaggctgagttagctctctagggacccccagggtgaaaggagagaactgactcctgtatgcaatgctctgacccccactccatacacgagcatgcatgtgtgcacactcacctgaaataaataaagaagtcagtccgtcctgctctggtcaggaacctgattctgtttattcccttgtacttgaaccccaacctgtgactccttcctggctgttttcccagtgactaccataacactaagctacaaaaactactgagaaaagtggtctggatttgccaacctctgggtttgtaacacacaggaaaatcaattctgtaactccaagtgcaccacactgcccagcgtctcggcggtctcactgcagccctgggcaggagcaggtcgcttgctctcatcacacctaacggcggtctcactgcagccctgggcaggagcaggtcacttgctctcatcacacctaacgaagcttgcttgctcccgaggtgggtgtgtgtggtgctgcgcctgttctataacgagacgcctcagcccctgacagcatcatctgcacgtgcttggatctccatccactgtaatttctcactgaaagagggagttacttgactgaaggagacaaagggaattgccagagagccccttacacgtgcattcattccatccaagatgacaggtaggaccctaaataattcagcttcagtaattaggttttgtcacatacatacatgaagcttgtcagggaggggacactacgcccgggcttaaatgccggtgcttaccacaagtgataaccggcttactgttcaaggtggcagcttagcacccttccttgatgactgccacgttcaacacttcacctcttgaaataatggcacaagagaaactgtcttccctccaagtcccggcttgataaattgtgggggtgaggatgcctgacaaactgtcatgatgagttagcagacgttgtaagcctgatgataatttcttagaacagtggatgcccttgcaaatattctgttagaaggaaaagaaaaaccccgaaaaccagactagattgtttaaaggtaatcggtgtcctgaagacacatcttgagatggtttgaataagagaaactgacaagaacagagtgtgttctcctgtcgctgtcgtattagaaggcatggtggctgctcccagtgctgtaagagaaacttgtgtggcttttaggatggattcgattcattgtagataaaaatcttaaaagttagaggaagggagattctagagtctggaaaacgttgggaaatgcagccaaggtcattttataccgaggcacgccggtgctgtcacctgttttccgtgatggtagcttgggtttgttttcctgtcgttgtgaaaaaataccacagccttggccctccttctttaccaggcttcagtgtgtgattcagagtccagtacaatcacatcactgcggcaacgatttccagacccagaatccaacacccattaaaggattaaactccctcttgttcactgccccaaccgtgaggaggcagagcctgtgctaagtgaccattctgccacacagggcacctgtacttatggacatttgcatatttggtggctacttgataggagagaagcttagctcccaggcggagcttcttggtctggcgtgtgagcgaaaggactccattgttgtagtgtttccttttcctgtgagacagcttggaagtgccgctgaagacagtggagagcgtctccttttctttttcctgggcttctgtatggcttgtatcacatgtatgtttgactctcagtcctcagtggccccaggaggcagatctctgcagcacactgctttacagatcaaagagttgaggcccagagtgtgataggttggggtctgaccgactatactattcaacgctgcctctcaaaagtcatttggacttattcttcttttcttttaatcattccccttacatccccgggacgacttttaccccagaatatgtccttgattcacctgggggatcctattaaaacatacgttcatggcccattcctgtaatcccagcacttgggaggctgaggcaggaggactgctgtgagtccagcctgggctacagtatgaaattctggctcagaaacagaaagcagggctggagagagtgagcgctcagtcagtagagtgctttgccttgcaagcacgagaacccaacggagttcagcctccagaagccgtgggaaacggcatggtgtggacaggcttgaaatcccagcaccgggaggcaaagacaaaagtatctggggcttgctgtccaatccttccagcctggtcagtgagctccgggcctgtcggagaactcttaaaggaagtagattgccaggtgctgcccctggtattctcatgtaagaggcttggggtgcagttcagggctctgcgttgtgaaaagcttcatggtggcttcgggtgcatccccaggttccggactcaccctttgtcagagtcccctaacgtcatcatcgccccctggtggccaggtggtgactgggttgagctgggttggggaggcagctacaggggccatctttcctttggggaaaacaggaatctcacggtagaatgcattgctttgcaatggttgctctgataacgggccatgacttgagtggcttcaactacaggaatctactgtctctgttctggaggctaagactttctagaaagttctagacacgaaagatcaaggtagaagagagtcatatttccctgaagatactgggaaaggctcttccccaggcctcccccgcatcctggcccttcattcggcctctgtatacacgactccagccttcccaggtagcctctatccctctccacatatacaaatcccagtttttaatatggaccctataggtccgcagagcagggtccatgcttctgagtacagttgtatgtcctgggagccatgacatcatttgggaggctgcagtccaccctgtgatagggacatatggtgtagatattggggggtggattaataactcaaaggcaacatgaaaaagccagacactggtatttagagaggggaactggggtcctatgtgaacatgaagagtttggctggaaatgaaaggcagtaatggatgccaccagctgtgtgggacagcagccagtaggtaccacttgatcctccctgggtagatgctgtgtgttgcactcccttgctcagtggctctttcctcgaagcccctggtgggtctctctcccatgccctgtgcctggcatgtggcagagggctatacaccattctgggtgctaggagagcaacctagatactttgttttcacctgcctctagcccgggcttcctgcagtgctctgacgaacaaattgaagtcaatgcaattcatagagggaagacgtctttgctcctaagcagaagaaaatcggtcctgtaagaggattcttggtggtgggatcagttaggaaccatattggttatcagaattactagccttggaaagaatggaaggtgacttggcatgctgctgtgttgcaggtaaacaaatggccgtattcacttagcattctgatcccaggagaagagtcgaagagtcgaagctgtgtgacttggccttccttggcgactgtgagaggcacagggcataactggaagctcttcctcagactcctgggaccgctaccctgtgtgcaggttcaggatggctgaccagggtcctggagtttgcatttctggctagttcctgggtgttgctgatgatgcaccaccccccgaccctattttgagaactgctatccttctgaagttagattctgcatatctgcagatttctagtgccccataatgcttgggggaaaaggactctagtttattgagttggcgagaagtgctggtccagctgactccattatttaaaaagtcatttttcagataacattcactaaagtagtgtgtgtgtgtgtgtgtgtgtgtgtgtgtgtgtgtgtctgtgtgtgtgtgtgtctgtgtgtgtgtgtgcgcacaaatgcatatggaagcagagggcaacctccagtgttgttcctcaggacagccttggtttgtgagataagctctccctctgggtcccagggctccctggttaggctaggttagctggccagtgagccccagggagccttcacagtgctagctgggattacaaatccaagccaccatgaccagctttaaaactgtgttttgtctgtgtgtctgtgcgtatgtctgtgtctgtttgtctgtatgtgcatgtgtatgatggtgcctacaggggccagaagaggtcgttgaatactctgagcggactctgagttactggtgactgggagctgcctggtgtgggtgctgggaaccgaatccaggtggtctgcacaagcagcaaacggtcctaaccttagagccctctctctagccccaaggcgtgttagtaaaagtgagattacaccatgatttgtgacttttctgtcttcaattggaaatttccacttggcctcggcagagcttggatccatctatgatctcaccaacagtgtatacagaggatgctcttacctggattcgtcactccaagcttttagcaaagtaaagaaaggtgcaaaaaaaaaaaaaatcacatttcgtagtgggttagatggacccgcgcgccttcctgtgtgtgtgtgtcactctggccatcggtgtctttctcctgtttcccagggacattgctgcgcttgcttgcaggtcacctcagagttccttacacaccgaggaaataacgtctcgtgttttgcttcctgtctgtcacttacgactccgtctgtcgcgcttctgactatgagggcttttatttcgtttgtgctttgttactgcttctagaacaatgcatgcggagacttcatcattccaacccagttaaggcattatctatttttctatgattttattcttacttttgcatttgaatactgtgtgtgtgtgtgtttgcaggagtgtgtgcatgcgcacgcgccagtctgtatgagtgcatatgaatgtgagtgcaggtatttggagggcagaggccatcctggaatattattcctcaggagccaccccatctcctctcttctgagacaccttttctcctcgacctggaaccttctggagagccccaaagggataaacttatcttcatcaacctgacacccagattacaagcatgcgccagcacacctgggtttaacttggattctgggaatcaaagtcaggttcaaacgctcatgctacaagcactttactgactgggtcatctccctgacatatatacttaaactaaatacttaagccatcccaagcccatcctgtttaaagaagggaggcggggattcaggtgggcataattcctctcgggcccagaagccccagaaccattgctggggagacctcacctttccttcatggatatgaaatgggtataatctaccaagttaaagggtgcttgggtgctttttttttcaaatctcttaagatcctaagatagtgtactggccattaaccctgtgtgcctgccggacacttaaccttggtttggttcaaatgaaaatctgctgtaagggtaatctacattccacattatcgagacgtactagaaaaattcatataaaatagctcattagcattttttacattgcttgcctactggaacagcaacattttggctatactgggtaaaataaaatatattatcaaaattaattttacccgttcctctttcctttgtttctaactgcctctagaaaatttaaaattctatttgtggctcacattatatttttattgctccacgaggcgctaatcttttctgctttctgcgttgtcttcccagccgcagtgctgtttcacttacgaggactctatgctctgtcaccccaccgttcccggtagtactttccctcgtccaaagtttctcagtgcttctgacaacattcctttccatatggcctttggacgccctgctctccttccccaggggtcctctaggtatctatttatgttgtatctatttgcttgcttttgctgccattgtttgagaagtacagacatacttaggcagcagtgacagggtggtcgtgctgtgtgcttctgaaggcagagcacgccaccccatctccgtgctgccctcaatcacgtcagcctgcagaatcttcagttttcttcgcaagcctgctgcatttctggtccagcgaattctggactttttgcttcctttggtaactatcacagaagggatctttctgttcaaaacgctgaccacgtggctgtcattctgcccaagaaaagctattgggtttttttttttccatactagttttgttctgagttgccaatctgagtgtgtatgtgtatatatatatatatatatatattttttttttaagatttatatatttaagatttatttatttaaatacactgtagctgtcttcagacacaccagaagagggcatcagatctcattacagatggttgtgagccgccatgtggctgctgggatttgaactcaggacctctgggaagagcagtcaatgctcttaaccactgagccatctctccagccccaatctgagtatttttaattttttgtttttgttttttgcttatgtgcacatgatcatgtatgtgtgcacatgcgtgactgcacacgagagacccaaggtcagcacgggtatctctcttgctctccactctaatttgttaagaccgagtctctcattcaacttggaacttacctaatcaggctagaccagtgagccccagagtctcagcctccccagtgctgggatgacaggcacaggttctcagggactagactgggatctcatgcttgcacagtgttcaccttactgactgagccatctctacagccacacatcaaatagatcccatgtaagcaatcatccctgatgcttctttaagtttcatacgtatacaaaagtacctttaggaatggggctggttctctagaccaccccctctgccctccacccgccgtcttttttattatatctttcatgtttcatttctcctgtcctgagtctgttcttcttgtatctgtggcttggctcttactcgtcagacacattgcttctccccaggctcatttctgtcttctccccatcccctccccaggctgaagtttgtgttttacttgtgttgggctgttccttccttcccctgaggtagtcatatgagtgacagagctgcctggcccggagagcctctgggtacaatgacattatggaatggagcccttttacaaccaataattaaaaatattttcctgccacacttgacacggaaattagggtccctgtggtgaggctcatcagccggagacatttccctttcatttctcttcttcccctgaagacggagctgggctctgtctgggtggctctagcgacgacgctcactcttgtgtccttatgtcgttttaaggatgagtcacctacggctttaataactgttttgctgcagcacccaggtgtgatctggcacaggccatcttctcagtggggtcacatgtcatggtctgttgatccccttagggccttcaggcatctcctatcttttgacattgtgacagacagtaccatcctcaaagtccctgcccgggaaccttgcaatcaagttaccaaaaaaaaattgaaaagaaaaaccccttaatgttgtaattcaatttagggttttgtttcggactgtgttcatagctctcctggtgtgcaggtagactatgggccctggttggacactcctgatcgctgtgtactgtctaagagcctagtgcctttctgagcattgtggtgggacacagtgtagagcacagctgtgaccttctgaagcaagtagactctaagggggcaaacccaggtatcgcaaaggacacagagcactcggagacctttatcaagcctgaagggcacagagaacgcaagcatgtatctctcatcaggggttcttgaagatgggtaggagaagagagaggattgtctacatttggggaacagctgtaagggggctgtatcaggagacacatctgtgtgtggaccatcaagggcaggtggtgtcaggtatgaaggatttgtgacaatgatagatgacacagaacaagactcaaggctaccccaccttgtgtgaagtcagttgttaagtagcaaggagaagcgatgagagcatgggctatttgagctagcagagactcccagagacttctcctcctggtcccagcccacatagaggtcttctcattgactcccccagaaatgggctgtgcagctttgcctgagcagtgatggcgatctctccattagccaggtggccctggctcgtttcctgtagcaacatctgtgaagaaatccaatcctttcctttcctttcctttcctttcctttcctttcctttcctttcctttcctttcctttcctttcctttcctttcctttctttctttccttctttctttcaaaggattacttattttatgtatgtgagtacactgttgctgacttcagacacaccagaagagggcatctgatcccattacagatggttgtgagccaccatgaggttgctgggaattgaactcaggacctctggaagagcagcagtcagcgctcttaacggctgagccatctctccagcccccaggaaataattttctaaaggctgaactgaattcttttgaacaagtcattttaaagatcagataatgtcaaataggaatcctggtttctttctcttcatgtgttgtgcatgtacgtgtattcctatgtgcgtgtgcttatatgtgtgctgctggaggccagaggttggctctggatgtccatgccagtcgttttccatctcagtttttgagacagagcctcactgaaccctgagctcactggattggctagactcttggccagcaggccctaaggatcaacttctctttgctgtctgacgctcaccagtcctgggatcatggcccaacctggctttgtaaatgagtcctagggaatcccagctctggtcctggtacttgtacatcaagtgtttttccaagtaaccattctccccaagaatcctcatctttgatgcttctcttttggcaaacggagcctggcatcccagttgggccactgtcagcttggtcatggtggctgctgccccttgcaggagagcctgagctcttcttcagcccacagaatatgagctcatctctgcccacacaagttcctcatctcgagcctgctgagcacttggccctcgcctttgaattttggggattctatctaatacaagtagctgattagcagctggaatggggattccacattacaggaaattggtgctttgctagtatttctgaatgtatctgaactcagagatagcaactgaccctgtgctaaaaggctcaaacgtgctgaagatgactcttgaatccagtcttttgtgattctaaaagccccatgcttttttttttttttcctcttcaggacagtgggaacaatttggtcttcgcctccataaggaaagctttagaaagatgggctgagtatgggattagtgtaacagaggtaggaacacggaagcatctcctatcaggtggcaaagaggtgctgtaagtaatgccataacgtcaaaggagaagccccaaggtgaaagagatcgggtggttccccaaccctaaccccggcacagaaccttggctttgtgctcatctgcccttggttcaagtgggcgggctctctgcactggacttttagtgctccataaggaagcatgttttatttctgaactccttggagaaaaaggaatttctccataaaaacaaggcccagaagggtctgagacgatagctcggtggtagcttcataggaagtggttgcctagcatgtccgaggccctgggttcgttccctagccctacatagagggtgggtaaggtgctggtacctgcctataatccctgcactcaggaggtagacccttggctacataaggctacataaggaatcctaggctagcctgatctacataaaaccccatctctaaaaaggaaagaggagactgaggagtgagacaaagaggctgagagttgaacatctggaattctctgtggctgtgatgggcagattctttctctccctaagaaggggaggctgagaggtgaacatctggagttctctgtggctctgatgggcagattctttctctccctaagaaagggaggctgagaggtgaacatctggagttctctgtggctctgatgggcagattctttttctacgaggaagcacttgcagtcagacagctctgaagaacaaacagcagtcccacgctctcgagcaggggcgaggccgtgggctgtgcttctgccgagccgccccgccttcatggtgggtgactgctctgggggtcagaggacagctgatggttttgggaaatggggaatctttctttttcagttcatgtgggatttcacttaaatgccatacaactttagaagattccctggagagtttctcccatannnnnnnnnnnnnnnnnnnnctaaccccggcacagaaccttggctttgtgctcatctgcccttggttcaagtgggcgggctctctgcactggacttttagtgctccataaggaagcatgttttatttctgaactccttggagaaaaaggaatttctccataaaaacaagacccagaagggtctgagacgatagctcagtggtagcttcataggaagtggttgcctagcatgtccgaggccctgggttcgttccctagccctacatagagggtgggtaaggtgctggtacctgcctataatccctgcactcaggaggtagaaccttggctacataaggctacataaggaatcctaggctagcctgagctacataaaaccccatctctaaaaaggaaagaggagactgaggagtgagacaaagaggctgagaggtgaacatctggagttctctgtggctctgatgggcagattctttttctacgaggaagcacttgcagtcagacagctctgaagaacaaacagcagtcccacgctctcgagcaggggcgaggccgtgggctgtgcttctgccgagccgccccgccttcatggtgggtgactgctctgggggtcagaggacagctgatggttttgggaaatggggaatctttctttttcagttcatgtgggatttcacttaaatgccatacaactttagaagattccctggagagtttctcccatatcctgtctcagcccttgttgtaggttgaggtctgtggctgatggtgcgaatccacatgcctttggggaaagagagagctttgccaggaagtcacccttagatgagtttacatttagtggtttcctggcttcagcagccacctcccttggccacatacatatttttttctgagtcccacgagggacaggcggcatttttacaagctgggaaatatagttgaagaggttcccactcactagggatttcagtagcttttagtcagctcagcagagtgtacgcagagacaaaactgagctggccaaaatattccagtggccggccacacacagaaagcgcatttgagctgtcgtggatttttgtggatgtctggcttgactgttttgagtgatgctggtgatggaagccagggcccttcatatgctcataagtgctctacccgtgagctatcttcagtcctgttgtgaatatgtttgatgcagataaagtgaggccgtctgacatgagttttcttggctcctcgtcttgagtacgaaagggactgtggacataactcccgctgtctaggtagctgtttgattgtgctgtgtttgacaaacactcaacagactgtaaccaatctggaaatgcaaatcccaaaggagccattggatcccctgtatcggcagaaatagaaatggtctttggtgatggtgagctctggagagggctagtcacaagcttcgctgaggtagcatcgaagaagcccgagtcagggacctcattgtatgtgccattcaagagctgtgggctggggcgtggctcagcgtggagtgtggctcagccatgctaaggcctgcagctctgatggcaaagcgccttttgtgctagcacagggacctgattctgggtcaccagcacctaaaaggaaaggccaagtgtagttgcttgtgcctgtaacccttgggggtggaggtgtcggggtggggacagcacggtcctagagttgccctgccagctgctccagccaactggtgaacgttgggttcagtgagagaacctgtcttaaaagacaaggtggaaagcgattgacgagaacacctgacattggcttctggcttacacacgcatacacatgcatgtgcttaagcatccacgcgtgcctacgcatgtgaacacccactcagaaaacaaagaagagaaaaccagggtgctaagccacaggactgagcaggacatgaggtttcagaggctttctgaagagatggagggatggcttccctctttcaaaagagcgttttggaagagctgagaggtggtgggaggcggggagggtggcagttgtaagagcaaaggtgtaggagtttgggggggcggttaagtgcaaatgtcttaaaaaggctacctatgatttcttagttactgtgacgtaacagctaacaaaggaaggggttgttacgtctcatggtagaaggtaggcctgtcacggtgggaaaggcagagtgaggcagctggtccagtggtgtccgcagccagggagcagagagcaatgcatgctggggcacagctcccttgctcctcggcatgcagcccgtgaccctgtccgtggaacggggccacccacatttagagtggatagtgcaacctctactaactcagcctggaaacttcatcaaacatgcccagggggttgtttccatagcgatggtaaatcccatcaagttggcgatcaagcttaaccatcatggttttctgttggtgtcttgagagagactccactggtaaaccagagactggcttatttcaacaggccttagggcctgagatcttgggctggaggaagcctccatggcaggtttccagtggagtccaactttttggttttgaattttgattttcactattgctaatcttcctttaatttgaaaactggaagcccaatacctggttttttgtttttttttttttaattgttgttgtttgttttgtttttgtttcttttcgaggcaaaccaacactttgagagtcttggttagttctagaaagtaaacaagaacctagggacatcagacttgcacagggcaggatggtgggagacctacccttgttcccagagcaagaaagatgtcagctcacctaggccaacacctataccagtggtcgcagtggcccggcttggcttctgttctttttgttttctttgcccactcccagattttctccctggctatgtgggggcaaagaacttcaaaggctaggggatcctcagcatgttttctctgcccacaaattgtcccccagaggggcttgacgtcgttgtatgatggggcatggtccccagtgacatgctcatgtgtcatcctggaccactccaaggaacacttgcagtgagaaggtctgactgccatgcttcttatgactccccctcttccgttcccccagtctcaccaggtctccttcgtgacttgtgccacctgcccattcaaggtcacagcatctacttctaggtcccttgactggtggttgctatagcctagacttctggctagtatggctgggagtgaatgagaggagaggaggcaagctggcgtacgcctgggcatggaaatggctttagttcctgggcaggccccgttctgtagcagattagaagtagactatttttaacaggtggtcttccttaggtaaacctctgtgggaacttccttacagacatatgcagagttgtgtttccatggcgactcttcatcctctctggttctttccacacactgtgtcttcactctgaatgtggctgtcacagtacactttgcacacactttccggaccctccctccagccctcctgcctctcccctctacgtttctctcctagagcttgtcatcatctttcattatacatttgtctctttgtctattattagactcctttgaaaactcacatttgctttgtgtgtttgtgtgtgtgtgctatatgtggtgtgcatgctaggggtggggattgtggggcttgatgtctaccatggcatgtttgtggaggtcacactgctttgcaatctgtcttccttgagggcagagacttgttaggcctgtttgtcagcactaatacaggacctgtgtgaattcttgcccaggaaatatctggtggagaggagggaaggagggaaggattggggacgagttcttaagggcaggaagatggtggctgcaggcatcaggttttcagatgggatctgcactccaggaggtcaggggcagcccagagtcagcctgtaagtctcctcgtctgcagggtagttagttggtggccccgtagtctctgggagggttggcttgaagctggcatttgttatcattgcccaggtgacgctgtgactcagcactccttcccgttcctgcggcttcatgggagggagaagcacctgggaacacaggcccatgtggtcagctgtttcctggcactgtggctgtctctggcagctggcaaccgatggtgttgtctgggaggtctctttattgttttattgagtggactttcctccgccctgggagctatttccctgtgactggttgctctaatgtgactcctttttcttcagactcatcactgtggggtgtgtggaggatgggtagggggcatgtttctgtgctggtggcttattttgcattgctcatagaggtgctagaacctgtggttctttcatgcttgtctcctagagtctccctggatgctcttgacttagtcactgtttcttttgcagatggcccccctgtatcttgttcttaactcatctacccagtgtaagggtgtcttagtcagggtttctattcctgcacaaacatcatgaccaagaagcaaattggggaggaaagggtttattcggcttccatactgctgttcatcaccaaggaagtcaggactggaactcaagcaggtcaggaagcaggagctgatgcagaggccatggagggatgttccttactggcttgcttctcctgccttgctcagcctgctctcttatagaaccaagattaccagcccagagacggtcccacccacaaggggcccttcccccttgatcactaattgagaaaatgccttacagttgtatctcatggaggcatttcctcaactgaagctcctttctctgtgataactccagctgtgtcaagttgacacaaaactagccagtacaaaggactgctctcccattgcctcagtggttcaaaagaagggttctctgtccccacttggccaagaactcaccactttcgcagatatattatcttgttctcactgtatacaaatgactgccaattcagtgactttaggttcccctcatctgtcagcccaaagattgggctagaagtcagggaggatacagctgggttgtctgttagggcctctgtgagtgctggactcaggctggctgctgaccgacatagtgtgtggattccgagtgctctgctaacctcatgtccgttagccaagttcaatatagctgcaggcacggggcctgtttcttagctgtttgttatctagggcttctgttaccctcttaagtatgtcatcctcatctctcctcacacagctccgtccacattcctcctcacacagctctgtcttcaagccagccaggaaataagtcctttcttcttcctagtgtctctgattttgtttccaccataactagaggaatctcaggcccagccttggtcaggcatccgggctggggaatatactttgggtctgggctgatgacctattgtaatccctgattctggggagtcagggagaatatatttggggtgtcattctagttctgcctgcctcatctgacctgcgagttgaaattataatcccaaaacccaataggaagggttcccttgctgtttgaattctccgagaaaaggataaagagaaaggaaggcatgggttatccgtggtggacatcacagtctctatgatggccctcacagggcctcagctgtgaccctgtatgtggttctagaggacttgggttgaagaagttgcttatagtgccagccagcttgcagctccttcctgtccaaaccagacccatcacagagcttggtgagtgtgtgtgtgtgtgtgtgtgtgtgtgtgtgttgggggtgtggatatttagagcagactatgatatgaaatgaccacagtgctttctaggggggagaaacatttcctactgccaaggcccgctcagatgggcctcacaaggggctgtctctgttgctctagtctgtgaagagagactcgtggaccacagtaaataatctgtgtttagaaaaccagaggagggtagagtggagactgcatcctttgtaaaaagcatctctgaggattaggatggaagatggttatcaagtctctgctgttggttcagggcccttgaatggaagcgggagatggtatcgattagccgaatggctctttcaagcgccggcaatgtttgccctcatgcctcataagcaggcagctcttctctgtctccacacttattggatttcagacggcagtgcacacaaatactgcgtctgctgggtaaacattaggcttgtgattggatgggagacctctaggtctgttgagtagaaaggttggagagcaatctagactgcgaggcctaagcctgtctgtactagggacatcccctcccttgtccacagatttcaccgccactactcctgaagtgagcatccgcaatggtgtcaaacatggcggacagagagcaaaggcagcggtcactaaacagcctttctagtctactgggggaacagccatgcgtatggtcactcagatttgagcaaccttgattttgttataaccactttaagactctttcctttcccttccctgtgcctcccagtgccaagatagccccaggaatggcattggctttaatggtggtggggatggtgttgatgatcgcagctactaataatgaaaagtttgctaccgtgaaggcatcccgccagcctcttgtcacatgttttcttgattctcattgtggagacaagctcgtgtcccagcaggttggaagtagaatatggacacacggcaggcatcctggagcaggaatgtggggccagtgttgccagccatagatgctttatagataaaatcttgctccttgctcctccaaatggctatgttggggcctatgcaagtcccaagctttagttgtttaaactgaaggcaagtttggatgctgtgggcccagttagatgggtggagtttggtgagcagtcgacattgaaggagccatagaattggagttggggtgtctctttgagaggggtggtctccctgaagcccccctccctcttcccagccagaatgggatttgagaagcttagagtatttcttcacacctcagctcattcattcccatccaggaagtgcttctgtttgcctcacacccagcacttcctcgaagcacctttgatcaccaaggtcagcgacacagtgattgcgtggtttctttgtatgcttttcatctgaatgggaaaggagagaaaagacattcttggctggaagaggctggaaataaaggctttggattacctctgagaggatatgccattaactgtggggcggggagtgggccaacagcctaactgattttcatagaagggggagtgtgtgcactcgcgtgtgcatgcttatgaaggctagggacggatggtgaagaggagtgtgtgcactcgcgtgtacactcgtgtgtgcatgcttatgaaggctggggacggatggtgaagggggagtgtgtgcactcgtgtgtgcatgcttatgtaagccaggggacaggtgttgagtatgaacctcgatggatgtttttgtaagtaggtgatgtaggccgttaccaggagtctcatctaaaagatctgttttatttatgtgtgtgtctctgtgtattctgtgcttgtgtgtatgcctgcgaaggccacaagagggtgctatctagacctccaggagctggtgttctaggcgcttgtgagctgccagtgtcggcgctgggaactcgggttttctgccagaacaaatactcttaaccactgagcaatctctctagaatccccccacctgcaaccccagtctcagtctttgctcggctgttttaattctcatgtctgtcaccagacgtggccctcataagcctctaccttatgataagttatttctcccttgtcgaactgagccaatttgagccaggtgggctcacaggtcccaaggaaagagtccagggaagttgctatgaggagggagatagagaaggggggtggggaaaaagagagatagcatgcagagagagaagcagggagggaggtcaaattgtctgtattataaacggaggagcctctgggggaggggaagcccagcctctgggctggaaagttcagggcagagggctaggcatgccaggtagggacggagggatgctgggagaacccggaggccaggtccacttaagtatgttaattatacatctcagctgtttgtccttggtctgcatcccaataccgtgcacttgattttctttctcctggctcattctctgcacagagcagagaaagaggagcccaggataaaaagcatagaagaggagacatataggtctgggggcattgcagacaggatccaggcctctggcgtagggcatggtgttgcacaaggctgacactattgaaggccggccgtgtcatgggatggagtagcatcagatccctgagaccctgcctgctgcaggggcagggcaaggattgggccaggggagagcccagtgcaccgctctgccactcagagcccctgagtgagatgaacttccccggggggctccctctcacctcctgctgaggttgagaccctcgtgtgttctaggactccagtgtcccctcatccagacgctgtcttagctaatcccctgtcacctcttcagtggtcactagatgacaatctccaggccaaatacctgtggctgttttctccttgttagctctctctctctctctttttttgtgtgtttttttgttgttgttgttttggggttttttttgtttttgttttgttttgttttttcaagacagggtttctctgtatagccctgtctgtcctggaactcactctgtagaccaggctggcctcgaactcagaaatcctcctgcctctgcctcccaagtgctgggattaaaggcgtgcgccaccacgccgggcttctttgttagctctctcgctgctgctggattgtctgggcttggattcatgtgaacctgaggctggtgtcacacgtttcctcccatcaacagcaccttgtccctgcctcttgttccaccacggtctgctcagatccctccttgcttcatacctgaatggggtcaaggagctattgatgtaggcagaggcaacctgatgagattcacaggccctcctgctccagagcaagcagttagacccagaatatgtccatagtgggagatacagagatacattatcaagagagaaggggtggaagtgggccagggctggagacagatcagaggttcaatggtgcctgtgtggggaggggtgtggtagggcaatgggggacctgggggagtaggtggggacatttatgcacacttatacagtgtgcacttggctgcccatgctctgggctgccttgttgggccaggggttcttatcaatctacctagactccttttctgctgtgatggttagtgctggaatcgccagcgggatgggactcctaccatgtcaatgtgggatcatcttgattctattaattgatgtgggatgatccatcttaattgtgaatggggccactttctgggtagagcatcctggactgtctaaactgaaggaagtgggtgagcacctgcttgcaagcattcatgatcctgatgatggatgccacgtgaccagctgctccaggcccctgcactttcctaccaccttggaccatactctcaagctgtgagccggagcgcaccatttctcccttaggttgctttggtcagagtaatttcaccatgacaatggggaagggcgctaggtacacgctaattttgatgtccctctctctgccctcctctggcttctgagtgctgcagctcctagtggtggtggtggtggtggggttcctcctgtgcctgcttctaggtccaaataaggcagtattgcaaatgccaaagatgggtccggggtgtgtgtgtgtgggggggggcgggaatggcagtgagaaaagctgaaggctgtatgggaggagtctggcttctggtgcagagtgaaaactcaagtccttccgggggcaggtgtggccttatgtgtgtccctcacttctcccctggcttacttattatttgtcctcatttattctgggaatgctggcctttaactggcagaagattaaaggctaagtgtgggggcctcatagtcacttgaggggaagccgacttgtctgacccttgctggcagcccctggttcaagtgcatgggctggcaagtgggtgttgggctgtgctgggctttctcctgggtaccaaccccaaggggaagcgagctctgtatccctttcaggtggatctatagctctggggacagtattctaggggcctttgtaggtggcatgcatcctttgctgtcatgcccatgaaacccaggccctcagtcctacacaataaaacaaatcataaaatctacattctttttgatgagtaatttttcttagcattcagtccatctcccagtaaccaaggagacgagtgtgccttctcctgggttgttttctgggcatcttaaacatgtatatatgtctgaataaattgaaaacctagaggtgggggtggagaaaccagaggaggaggagatcaggaacaaggtgacatattgttcttcctcagtttcctggtgtccactgctagggtagcagaaagtaccaactctgtgtccaagagatatgcccaggatcaccctctttttaaaaaaaaaaaaaaagatttatttatttatttatttactttgtgtatgtgagtacacttttgccatcttaatacacaccagaagaagacatcaggtcccattacggatggctgtgagccaccatgtggttgctgggagttgaactcaggacctctgaaagagcagccggtgctcttaacctcggagccacctctccagcccccaccgtcatcttttaaagacatctttgcagcacacgttactcgtgtggaatgttgggttttgttgtggcttccttacacgggcataccctgtattttgatcttctttatctcatgctccctctgtcttctcgctggtcctttctcacacaggcccagatcctccttcagcggctcactgaaatggatcctgtctcttgttgccctctccaatccctgcatctagaaacttagaagtggatagacagatgtatatagtacaggtgaatgccccagtccaaatcccactgtttcacgactacaggttgaagtggcagggtcagtcagggacatcagcagcagaattccatctctgctcagagtggtcagttcctgaggtgtcaagacagaggccttgcctgtctgggtttcctccatcctagggtccttcttacttgttaagcctctcttcctcttcctccttttcttctcatcttcctcttcccctctccctcccctcctcttcctctcaaccacctcctcttcctcttctttctcctttcttcctcctcctctttctctcctcttcctcttcctccttgttttcctcctcctcttcttcttcttctttttcctcctcttcattctctttctccccctcctcctcctcctcctcctcttcttccttgaacttcctcccatcttggcatcaccccatccctgctgtcaccccaactcttacagatggttcacttcctctcacacgctatgctaaccccaccgctcactcgctcacgtgtcccaaacttcaatttcttttccactttaaaaaacaggacgattatctagttgatactgtcaacaataaagagatttctgcctgttttttaagcatctgagaaagattttattgcttcatttaaatcctctactccccagaggtcatcagttctcagctgtgaggtggctaatgggactggaggcccagtgaagctgtggatcttttgctaaatggctcttcgaggaaccacaaatagccctattagccccgcgcttataactcgaggctaatttgttcccatcaaactaatgaccaactttgtgcttgggaactaccccattgtcactccacatcatccccattgaggggacaccagaagttcagctgtgggaggacttggctcacttgttctgagaaggtttagatggtctcctgactcaccatagaccttgcatcacacacagacaatgtgtgtgtaccctgaaggggtatcataccctagtctgaccacctctggatttgtgtgggtcttggaagctcctgccttcctgaatttgcttattcctaaaagagtataaaccatatattttcctctgttggtatagcaacgattatgagtgtgcctagactcacatatctatttgttaatttttttattcatttattcattttctaggctgtccatattgttgcttgtctttctttgtttttggtaatttcaaataaaagttttaattggttttttttttttttttttttttttttttcgagacagggtttctctgtgtagccctggctgtcctggaactcactctgtagaccaggctggcctcgaactcagaaatctgcctgcctttgcctcccaagtgctgggattaaaggcgtgcgccaccacacccggctgttcttcctctttcttaaaaaaacaaaacaaaacaaaaatctgaaacttttgctaggtgtggtgatgcacacctttagtcccggcacttggtaggcagagacaggtggatctctattagtttaaggccagcatagtctacagagtgactttcattgcaaacaaggttagatagtgagatcctgtctcaaaacaaacaaacaaacacccttagtaaaccaaaccagataacaataaaaccctcaatccaaaggcatgcacccaggcatgcacccaggcatgcacgcacacacacacacctagagttcaatttgtattggccggctactcttgaacacagggcctgctctggagtgtgactgataccctcggttttgctccagtgaagaaaactgactctctctgtcccagcagctgtcagttgcacacagcttcttggtgagggtgggtgggactctgggtccattccccttctccgtgccggggctttgtctgctttgagcttgtgttggtcctgtgtgtgctgcctccgtctctgtgagttcatatgtgtatgggcactgttgtcttcttggagccacctgtcacctctagctctcacaatctttctccaccctcttctagataggttcctgagggatgtaacagagacctcccatttagggtggagagatcctgagtctttgactctctgcacaagcctctgtctcaaagctcatgaagcatcctggcttgcgagtatttactgctaagtacttgtctggtttgtgaggctggagttgtgtttgagagggacttggttgggtaccgtgctttcttataacgctgctttggatcgagcacacaaccaatgagacacataaccccagaaatctcagaggtggaaggcctcagggaagtgttttatgtgacaggcattgttctcacatggctagcagttgccaatttacttatgattcattcactctcacaagatgaccagactgtgtgtccgcctcacccttgagttaacacgacagacaaacccttagactagagacttgctcctttttgaaggctaagaaactataagggagacatacaagtctgtgctctctttgaacaagcaagcagccagctgtgacttgcccatggaggtggccacatgggcagaacccaagagtggtcaccaggggcttgcgagcagtggccacctggtagccagcaagaggacagggatttccatccgccttctgtaaggaactgaattcatccaatgggcagtatcttggaagaagactttgaacctctgatggggcccctgcctccaccccggcttgatttcaactcgggaggctgtgagcaggggtctagccagcccacgcctagacttcccagccatgaggatgagaaaggggcttctccaaagtgctgggtttctgtcagcttgccgctcagcagtcacaatcctgcattgtcaccattgggcgctgtgctttggaagttaggcatagaaaagaggagagagagagagagagagagagagagagaagatggcagtccccacatccccgcggcgggaaacagaacaacattgccttagaagcaagctgcgtcaatgccctgtcagctgccaagtcctcatcaagctcagagaagctgaataattaacttcgctccaagcagagagatgccacggatagagccccatcccgttaaaaagaaatcagataatgtttttcaaagccccagccttccctttgaagtagtctctgccattcacacagtttccatattgccaaactgcaaaggtttccatctccccgtacagcctgtcccttcctccctaccttgcgaatggtccatcttctccggatggctcggtttgagctgatttccccggtggatagcgcctcctatgaagctgtgtctcagcccggcgcactggatgagtgatgatattttgtttgcagcagaagacttgggttcaaatcttgcctgttcactgaggcagaagtataaacttgaggccagcctgggcttcatagttagttatagacctcatgttaaaattataaaaatccccaaacaaaagcaaacccttgaaggaaaggggagcaatgggagaggacggacaacagagggagaatatgatcaaagtacattataaacatgtggcaatgtcaaaataaaatgcattgtgtatcattaatatatgctaatgtaaaatttaaaaaaatcctgcttgttcttctgattaacagtgtgatgttcagtaagtcaatgaacagtaagtgacaaagtgactgttagggctgtcgtgatcaagtccccggactagacggcataaacccagacatttatgccctcacagctttgggtgccagacgtgagaagggaaggtgccagcagggcggggtgtgcagaggcccggaggaaggctctgtccacacccgtccccagctgtgaaggacagctgcggcttgtttgtcttcacactctcctcctgtacataccgctttccagatcttctctcaggaagatgttagtcactgggctcaggccctctactaacttcctttaaattattactttatataatttattctctctctcagtgtgtgtgtgtgtgcgtgtgaacactcttggcctactacagaacaacttaagagaaatggttctctccttctgccatgtgggtcttgataattgaactcaggttgtcagggggatgtcaaacgcctttacctgctcatccatctctcctaccatctaacccaatgtatgtgcctttgtaaataccctatgtccgatatggctactgagtgtatatctatatctatataaactatatgatcatatatatatatatcagtatacatatatatatatacatatatatatatataactctagtaagctttctccttagcaaggggaggaaaatgactccagatcttgatgccacaggtccagttccatcactattggtctcaggcaagataagagaaagcacgtgaggaagcaagcatttatacagtagagtttgtacaagcagctccctccctgtttgtaagggtccatgattcgccgaagaatgacaccccggactcaaatggtagataaacgcaaagagtattttattctgtagaggtccagcatgccggggtctaccatctacaaagatggagagaccccaaagtgagctcacacgtctgatttaaagcacattgggggagttccggggatcggtaggtgacctctattttaatcttggatttctagggacattccagaacctttgctggggcctttgtgtgtgtgtgtgtgtgggggggtagtgactgtgtgtctgtgtgtgtctgtgaactgctgctgacccattgtccttgcctcaggccaggtggcaaggcagcttctgaggcttcggcttacctggactcacgcagtttttggaaacagagatttgggcctagtctcctgagctgccagtttgaagcctgtcgtggagtcagcccagccttctcacactaactctacggatccgtgccatacccgtttcttcccagccatatccccctgttctctgccctagcacctctgggcacggctccccagctgagaagagggttctggtctcctgagcagtcatctgctgaggcctgtgacctggggctggcttttgggcagcctttgtttctggtgtcaaggggatgtcgtcagtgaatgtcagacctagagagattggtgggacactggctggactttgcccttctcctctgcagtgctatgacaaacagctgttctccagtattggtggtagacagcctggtttatctatttctgtctttattgttttaagtggggtctgatttttttttgttgttgttgagtagtttaccattcttggtttttctcgtcacctgctagtatagttagaagggttacacatacacgtgtgtctgacagattctaccgagttatcttcacacaaggtaaacacagacctctgcttgcaaagatttgagaccgaggttttcttgtcacctttgcccttcttaatgaagtaggaacaggtctggtgcttggagagcggttttgctgagtatttgtgagcactgagcctggaatgaatttgtccagaacacggttccctatggctttatgtgctgaataatgataggcttatacatgactaaatgttatctgattaaacagaacccttcttcgttgctgtgaggttttagggagttattgcctgctcatgcatagatttcttacatgtatttatagaatctcttctctcagaggagccaatgagacagggaaccccgaggactcctgtgtgaggagagaatgtgccactgggagtttttgtgcacacacacacacacagaggtgtgggttaattcccagaagcccagtgaatgagaatttaaacaggttattctagagcatagtaagcccgtgactggaccacggcagtgttcataccctctgtataaatatgttagttaaaggtaagaaaccctgtattttgagtgtcagcatatggggggggggaaggaaggaagaggcctttgttccaaggacagtgttttccctgtttgactaataggcttgtgcatcaagtaaaattaatacatcccaaggtcagtataagtgtgtgtgtgtaagtataaatatacataagtataaaactcataaagtatactcataaagtatgagttgggctcatgttttggctcttccactgtcttaaaatgaaacagaagggaaaacacaaaacaataaaattaaatcaagcattatgtttttttttttcctgctaatatcaaccactggcttcaaggtgttggtggcactggcttccacagtcaggtccctggagtcccaacagctctatcccatgaagctgctcaatggaatcagcttatccagccaagttctggagcctcggggagactcctgccctctctctgggctgtgtagagtgaactctggactcggacagcatctgtccatggaaatgacctttgtgctcattctgtcttccctctgcagtcacagagctgtgacccattcagccagacaggcacatgtaaatgagcccctccccccaagtgggtggcatttctcagaatagctttgtaatgaaacataaagtagaaaagaaaacctgaaacttgcagacctctgaggatgtagaagagactgggctttggagcatttttttttttttttttttttttttgtctaggcccatagggagccgtcaggtacttggggaccaggttctcatatcacatggcacattccccatatgccatggacggcgacggtgctgcagactcctccctgatggcacagtccctctgagcactgcaggtgctcccgataaggagcaccatggatctatcatcctgcagtcaggatgctactggcttggtttggctcatgggatggtagcaaattttattcaagcagatacttgacagctatttgatactggagaccagtttcaagtttaccacaagctaactcaggctccctgtgtggaggataagcggtcccacagacagcagttagtgcggagcatcagcctgcagacccatgtgccatcttgcctctgggtgagccaccagatggctagaaacacgaatgaggcccaatataccagtatcagagcccaatggactgcagagcagcagtaattgattgtggtttgaagctaacaattggggttgaggttggttgccttagcaacaggtacctgaaacacaggattttttttttttttttttttttttttggatagatttagggagctgaggtcttcttgttaaataggtcaggaaaagcttgcctacaaggggccagaaagggctcagactggcttacagaggtacaattaatggcatcaaggatgagggctggtattagatgggagccatcacatcatctgtgacataagggtagaacagaatgcagatttttgtacataggtcctcacattcctttacacctttgttgtcttcaggaaagccaagccacattttgaactaaaggaaagagcatactgatttggaaagcttccataccatgcctctcttgtcacccacaccagcaggacacccagctctttgggatcaaaggaaagagtcaccagcctagaatgcctctgggtgatggcgacagatcctctcagagctgtccctttgaagaacagtgttgtgttctggaatctgtctggtgtggttaaataggcttgattatgaatagtaattgattggcatctgaaacaggagaagtcctggtcccaccaaagatagcaatcgcacatttacacgacttcggtatagccagaagtcagtaatggatggcttccatgtgggactcgaagcccagctcatccacagctgggaagaaacagggagacaatgccctgagaaatcataggttttctggtgggaagagatcacctgagcagggaacgggtgggtcgggtttgccaggagagtggagtgggacctttggggtagagttccaggctgcatgtccttgtgaggttcaggccttatatcgatgactgctcacaactccccaggacagaaatggaggagtcctgctctttgtgatcgtccagagagctggaagtgcacgtgagccccctctttccgtctctgactaaccccactccttccttgtgtgcccgcatcctcctcctctgttggcttggagatctcattgcatagttaattccctggagttaactgtatgttggacagtgtgagtggttcccgaaagcttcactctgggatctacagtgcctgtttgaagagcctctcgttctgagagtgctggagaacatggaaagttttggccaacatatggccaaagcatatagaagtcaggggaggacagagggaacacgttggatccacagcaagctgggtgcatccaggaaggcttcccagaagaacagaagagctcagcgctttctcgctgactgctcattgggtgtagtcatcactgttgccataagaatgagggacaaggctgagttagagatgtaaccatgtgccctggaccaggcttgtactttacgtgtcactaggaacagtggattgccacacttatctctatggcccacagcccctgagtgtgaggtaagctgaggtaaggggcgcatcagtgagagaaatcacagggcctgaggtaggactgtaccccaagcccggcctcttccactctgtgtccccaatttgctttgaagatggccgttcctcatcccgagtcaatctggccctgggcagaaggccgtgctgggctcccttggagagaaagtcatttattatgtaagcgccattcatattctagctggcgatcaaaggcgacatttaattttttttccattatgtggaataatttaagattatgttatcagtgtcatttttatggcaatttctcagacataaaaacagcatcaattattcaacgtcaccttgtgtgtctgggttaagtggggatggcgggaggtagaggcggggcatggaggaagctaagctcaggtgaggctctaggcaggtggccctgtgggcccttcctcatccctgcctgggttcctgaggacagagttcctcttcagggctctgctcctgtctcccctggtataatgtccacagggagggggaagggaaccagttaattctctgacctttctcttgacttctcccagagcgttctgagcttctcatagaccccactaaagaatctttgctctagggggctggaaagcccacagagtccaatacccaggagaagttaaggagtccccactctgaacctcctgagcatgaaggctggtgtatgcgaacttgaaacgggcaagtcccatggacagctaacatcagagcctggccagcctgtttctccctagatctggttgttggtagctttgagataccccagcagggaagcaaagagtacaggtgacatggaacacagcaaagggcaccgttgggacccgaggcagatgtgcctgacgtcggtctacagtgagttaggaggacagcagggaacttgggggtctggtacgcactgccattcatgtcgctgtgctttgcagttagtttgccattttatcttctacccgtgggtaaaacaacacccgaaaggtgaaaaacgctgggagtgctgggaaagccagcagcaaagaatgctgggaatgccagcaggagccctgggatgctactgcctgagggtaatatggccctcccataatgctctctggtgtgcctggtacgtgtgggtgcccgtgcatgcatgcaccttccatgggagtctgaccttacccatctctcttgctttagacagcatcttaccattcagcactgtgtggacctggctagcggtcctaggagtgtggggagggtctggcctctgcatcccatcttcctgtaggagtgcagggatctcagatgtgcacactgctgcacccacacgtgggtgctgagatccgaacccaggtcatcaggcttatgtagcaagccctttatctatggagctggccctctagccatattgacttaatttgggtgtgagtttgtgggtggttctgcgctctttcttcctcacctggggacagcaagccacaatgaacagaaagtcagcgtttagttctccgtgtgtgcattctgcatcctgaggccttttgtgttcatgcgaggcacatgcagaatcactctcctgccccctgtctgcctctctgacccaccttcttttcatctcatctctccttcctcttctttctacttcctctttattccttctgaaaaaaaaagtgccattcctctcagcagctgcctctttgaggagtgggtggcttccgtcttgtgtattgtgggccagacactggcctcaaaccacgcatggtaaaagtaataataacaacggtaataattgtaattccactgcacaagcatggagatcctcaattctggagccttagaggggtgtggcctcccacccccagcagcccactcttggcttcctgtacagagctgggttaagggccgtgggtagaaaggggggaggaagggcagggcaggaggccgcaggtgggtgagaaggaagcagagcatttcttttcgcagtttgggaaggagctgtgtatatttcgcgttgccatttggaagctgttaggtgatgcagcaagactgagctgtccaaagcccttgtggcggcaggaaggaaggtgactcactcagctaggcacacgcaggactgaggcagaaagtcaggaacagctggcaccagtcacgtgtgtgtcccagagagatgtatgcccctttgcccatcttgtggggctgccgggtttcaaggagggagtgtgaatggaaaatcactggaggttagagttagtgagtcctggaagagaagcctgccacatcaaggtagttaccacagcacgagaaagacatgttacctgctgcacaggctgaggctgtgtttaccaagggcatctgtgtacagaaccctgtcaccatctcacctggacaccagatgtgcagcaagacagggcttccccagaacagcagtgttgtcatctcgtgtcaagagccaccttaagccagagagagcctgtggtgctcgccattctgtgtgtgtggctgatctcatctaaccctagccagtgtttcattcttcatgtatctgcatcacattcacaccccctctaacccacccctgttcttacagtgacaggcatatctgagctgtggtcagtgtgctgctctagtagatttaaggcctcaggcttctgaggggtcaacgtgtgaccgagcgtgtgggtggttgagggtggtgggtaggcatggacacagctaagataccctggcgctgttccatctatcctcttggtggtagagatggttctgtgcttaagaacacttgatgctcttgcagaggacctaggttcagttcccagcagcacatagtggctcacagttatccataactccggttccaggagagcgtgtgccctcttctgacctctgtgggagccagcattcaggtgtcacacaaacgtagatacatgcaggcacacatggaaaataagaaaaataacgtctgggggcggggctcagtttaattaaaaaaatgtttacttggttttgtgtgactgagagagatatattgagagagacagagagatagacatacagagagagagagagagacagagagagaaagagagagagagagcgtgagcgcacagggctgcacatgcaaagggaactgcatggaggaagattcaggagtctgttctctactgtgggatctaggggtcacactcaagtcttcaggcttgcacctcctaagccatctttctggccctcaaagggcagttcctgagtgcacttggggtgggatcttcccatcatccatccatccccctgctccctaacacttgggtaggaagccatacagccaccggcatctgagatggagcagctgaagggtctgagggttaaggggtcgtcacgatttgttttctttttttttaaaatatcaccctcagagaggccagtctccacagtaacccacgggaacacacacacacacacacacacacacacacacacacacacacctccctgtttaataatggcgaagcttatgcaaatctctgaacacacccagcacgaagccaggagcaagcgtggctgttaccatcggccgtggtgcagttgtttatgcatttaactcgctttttatgtggtacacgtgtgtatctatgtgtgggtggaaacgcatgtgcatgtgtgagcctggaggccagaggttgatgcctgatgcctttctccatcatcctctgcctcatcttctcaaaccgggactcctcactgaagctggaactccccacttcgctaagctgattgaccaatgggctccaggtatccatttgtctccacctccccagagctgggtcacaggcaccagcaacgtgcctggctctcatatggatgttcgggatccaaactctcgctccttatgcttccacaacaaacaccttacccgctgagccacgctgccagtccctttttccaaccatcgtcaccactggggtctgcagttgttcaatcggtcattgattggcctgttggtctctcaaaggagaaggggcaggtcgtgcagctgtggggattggctcttttcatatcccaaggagctgcattgctggtagacagctgatgcttaattaaaaatgtattgagtcgtgagggcaggcagccatcctagagaaagtgacagaattcttttcttggtagtaacaagagctcagagttcccagtgttaatttgtaatctcggggagagctgagggcacaggcagcctgagtttttcaaaagcagggcttctccacattagggatgttgtcatttattgttgtttgctcggaggctgtcccgtacatgatagggtattgaggagcatcagaagaactgcccacgctcactggaacggccaaagatgcttagttctcagtgttctgaggtctggggaggggagactaaaatcaccctgttaactcccactgtcctcaatcagccggactgactccaggctgtgccttgctgaggaggggcatcagctggctgagtaggttggtccacatgaaggcaggggcctctatcttcctcccagttcttcctcaagagaagcccgccgtccccctttccgggttgaggcacatctcttaccgcggcggtgatctgtcagataccagcgggagatggagaattaggaataattaaagcatataagcaaacaaagagctgagactctgtggcccacagcttatcacacacacaccagctgtcacccgagaggggccgagtggggccttctgcagaagtgtggaccggctcgctcagtctctcctccacccaggattctgcccatctgtggtgccagccttgaccatgatgccaagagccagctgccactcagtgtgacagaggggggattccagggttcagcatagactaggctgaggactgtgtggggctggctaggcaggaatgggggctttccccacttttcaaacagcataggcggggcattggtattcttatttaaaaagtactccatagaaggttcaatgaacgaagaataaaaacactatagccacatgagaaaacaaacaaaaataagatgtgggacaccctcaagtgtttatgcttaatatttaattggaaagatgaccaaataaaatatctgaatctttaggttttcttttctgttttctttttcccttgatcatcatggccataagaaaacaaaaaggtctttgtgtatatgtgtgtgtgtatgtgcatgcgtgtgtttgtgtgtgtgtgtctaaggtacagcctggtacactttttctgaaactctttcattaaaaaaaattccccaaagacagctttaatctgtttacctttcttggccgctgggacagccattctgtcaactgctgcccactgctgtgacctccccactgtggtggactgaaagcctcggacaccgggagacaaaaattcttcctccccctttggtcttctgccacgggtcttggtgatggcgacacagagtaacaaatgcagaaaattgataccaggactgggagattggtgtgactaaccctgattatacatctctcaagcctttgaaactggcgtgtgggaacaatttgaatgtattcagagatgtgggttgtggatgccctagaagctgtaggcagtgcttaatggatgattctgctggcagctcaggagaccagaattccacaaggaactcaggcagtaaagaatgggctcctcgttttcctgtgggggagaagcgctctgcggggagttgggttcttcatattataacccagcagagacacgtgtctgcatttcacctaggtctaaaactttgtgggtggctaaattcaaacgggggctggaaagatggctcagtgggtaagagtaaacgcattactcttgaagaggacctgagtttgagtctcagcacccactcacaaatacctgtatttccagctccctgggtatctgatgcctctggcctctgtggacgcaaaaatgttcaaacatacacacaaacacacacacacacatacacacacacacacaggggggggggagaggtggacagttattgtttgttgctcttagccaagtttatagtgaggatcatgagcagaaaagcagaggagaagtttgtgaaagtgtgaagtctaactagaacaggagtaagttgtggtcaagaggggcatagtttgcaaagggattggttaggttgaagagacgccaaacactttacactgagactactagatactggccagaccctgctcatagcacactccaaagtacaaatccacaaacccctatgaaggagtttccttgtaaatggtgagcaccagggtttcctgtgagcgcctgactcgccagcaagaacgacaccacaataggatccttctgcacacatttattgggagagcattgactgcataggcagaagaccctgagcccagaaatggtgctgcttatataggcctaggagtgacgtgtccatacctgattggttatgctaccagtacctcattaatatgcgtcgggccaggcagtgactcgcaaaaagaaaaaaaccccaaaaaactcttatgcacacgtgcacattggttgtttacccataatcatgggcggtggccagtggtagccagcaccatcttgtaatggtgtttacggcttcccacagtttcccacttgcacagggttatctagagaattattttctcagattctgccacccaggcacctgtagcttggccaggctcatacaggcacagaccacttttagctgtggtcaaagctagtctggttatttaacgtggtagcagacttggaaattatccatattattgttggttaagcaggcatataggatgcaagacccgcctatagataatggacttactgtgaggatctcccaagaagctggtatgtgtgtgaatctgtgagagtggagcccgaactgcagtgggaatatgggggccgtgctccatctgcagagggaaggcaaagaaggaagtgggactagccagatagaaagacacgtggtgtgtgtgtatgcgggatgcagatggcttgaccataggggtcaggagtccaagcctactgaagctcacactgggacactgtgtggcctgggcactagatgttgaactgtgaggtctactgttttccctgctggggttcagtctgccctaactattctcccattcctcccttttgaacttggaatccttactctgtgctgttgtatagtggaagcgcgtgccttacgttttgatttcccaagacttcatagctatgagatgtcaagaagccttaggtgtcagaagagtttgaacttttgggtgatgttgaaaccatgaccttgaggactctcagaggacagaacacatcttgttttgtgaggagtacacagatccctttgtgcgccaggagtcgagcactgtggcttagtgtgaggtacctgaatgtcctgttggcaagtggtgaccttgtggcggttggccttctctgttgattggattctagtaatctagtatattggtgaggcttatctgtcggagtgtctgtgagggcatttttgagagaaggtgaactggggtgggaagatccgtcctgtatgtgggcaggaccatcttttcagcttaggactgggtgggataagtggaggaaaaagaaaaaggtggatacgtatgggcttgtttcctttttttgcttcctgactgctgggcggcaaaccgcatcgccccgccatgccctctccaccctcatagactgaatcatccaaaaatattcagcaaaattagtcttccctccctcaggctgtttgtctggcattgtgtcacagtgaccagcggaggcagctacatgtgggatggttggatgagtggccccataggcttgcttacttaagtcagagtctgaggccgctctgccaggtatccaacagtgatggactgtgtgtggaggaggtcccagttggaagatcagtggcaacttcttagatctcgggttgtgaaacctgcgatgccatgtttccccaaagctggtcagtgtcctggcggtccaacccgtgagagctgggccttagcaggacatgggtcctttgcccaaacagacttctgtgggcgctgagggtggggaatcccaaggacatggaaggggtgtagtgacactttgcttcttgtttcagggtgctacagaagacccccagacagccctggcgctgaacttggaccctgcattgatgaagaagtctgatcccagggaccccacttcgctgctcttcccggagagtgaactttccatccggataggtagcactgggcttctttcaggcaagcttgctgctgctgctgctgctgggccagagggtcaggcccggggctggtggtaggagagaaggggatgccaggcactctgttcttccaggccgctcgccccaccactcacggtggcctccccccatgtccttttctctcatttgttcatgcgaactcttgcccattggacaagcaagtcctaacagctttgttgcctttccaacttggtgagtggacaggggccactctgaattggatggggctgagtcaggttagaaaggatgcgctttggtcccgcccccttcatctcccatccctgatgagccccgaggagtgccctcttggttggtgtgactattgactttctgattcatctggggaaacagtgcatgcatatgtctctcgtgttgtttgtgtggagccggaagactttaaagatgacagtggcatcttttctgctgattttgggcctctacaaaggagtcagctaacacttgttaaatctcagaggggtccagtctgtgcttgcagccagagctcagtagtcttccttcagattcttctctgaacacattaaccaggaaaagccttggcagtcttctctctggttgatcctctctgcctcccacaacttcccagctgaaatgtaagcaggaaatacaattcatctaataggaccttaagctagagagggtcagacatcacagctgccctctgccgcctgtaatgcatctcgttcgtactcagcctatgccagccaaggctttgcttctgttctctcacaggactgtaggcaagggctatcttccatcaaacttgtcatttttttcatgccaagtcgcgacagcacaggtatacgggtctctttggggattctcactagcaattctctttgctcaactcatgtgcggatgttacagccctaactcagagtgggtgtggggtgcaaaagttggcctggctctgctgccttgtcttttaagccaaaggagttgggggttcaggggtggtttgtagcggtggctgtcaatcaaacaaggtaaaaactggcaaacacacacacacacacacacacacacacacacacacaccccgggatatggatgtatgagctgtggaagccagaggacagcctttgctgtctgtctgtcattccttaggaacggtttacctctttacttacttgttttgagggtgatcctcttactgaaccggaacttgccaagtagactgggcaggctggccagagaaccctagaatctggcctctctctcagtctccccgaattgggattgcaagcacataccaccatgttcagctttttactagtaggttctggggcttgaactcatgacctcgaggttgcaaggcaaacactttataaattgggttatttctagcccctcagtgggcctttcccagggagctttgggagatttctggctcttctcaggctaccctgtgttcagtggtgggtttgtgtagagggagctgcagtcccctcccctgcagctgaacaccaggcacagccagctaccaggttgccaagcaatccctgcagttggtgctaactcttccgatccaggcccggatgcggcccttgaagatcgtttactctcagccatctcctctcacctgggtgcacctgtgggtgtcaggcatctggggactctcaaacgtgataatgctcatttgctgactggcttcctgcagaccaagcctgaagggacactgtttgtgccatctggatttgtcctttagcttgcgtgctttaactggagcaaggaggccagcttaatgggcatttagtgacaaacatcagcctttaaaaaaataatcacgacactgctatcatgtcctttaattggttcagcagggggaaaagccagagaagccatgccttgggagggaagttcagctgccctgggtggttgcagcagccaagctgggagaagcatttattagacactttgctacggatggctgtctgtgcctaacgcttataatatcagctattctcaaagctgggaatatttggggatgtagcaaggctaagacttcctttacaattgttatcattctgtttctctatctgtttctctctctctgcctctctcttccccctccctccttctgtcccccacctctcactcccgtatttctctctctctctctttccatcatccacctacccgtctacctacctgcccgccattttttctttattccaattcatatgtcatggcaagggttaaaaagaaagagtggttttacctacaaccccaactcacttgtagtttaatccccctaccagggacacaagcgccagttccggttctcgtgtgtcctttgtggcttgctatgctatgctgaagccatgcttgggacgttgctctgcatcttgtgacttcgagcttgatcagatttcgttatcgtacggggcactcttagatcataccattcttgttactgaccacgaccttgtataattaattctggtgtttgattttagattaggttagattacgctcattaatttagcttaattctagtgttctgcttagcttgtctgagagctgtttcaacagtctgctgctacacttttggtgaggagggagggacctagtgaacctggttggtttcagggacttcctggagttactttgagttgcttacttcctgacttaaggatcttccctgtaggatgaaggattttacttcccaggagaaaatccttctgtttcaccttcttgtaaacatcctatcagaaaataccctgttgtttcacgttttcttaagccctgtgtcttaagatatttccttcccagatggaccggtttagaggaaactgccactcaacacagcccttgttccttcttttgtgaggacttgggccctatgggattagggtccagtcttaatgacctcacttagactgtccccatatagagttgatctcagtataagtggattctgggcagaggggagggattcccaaattaacccatctgtgtgagtttcttttctcattgctacagaaacataacaacaacaacaacaaaagcaacaaaaaaaagcaactcgggcgagggcttattttgactcacagtttgagggtactgtctgtcatggcaagaaagtcatggctgaagaggcatgaagtaggtgctcacaccatgtccacaatcactcaagggacagagggagtgggagggagaggcctggggcttggattgcttttctccttgtatctcagtctgtgaccctagacctcagccttgtgccgcccacatttagggtgggcttcccccactcggttatcatcccagtgtagaaatgtcatcacaggaatgcctacaagtgtctttccatggcgattctaaatgccactaaggtgacaatcaagattaaccattgcaccagtttttaaagcatctccccacaagcgggcatcagccgcaaggagttccacaagactaggagacatggtctctcttggctcctttgagattcttttactgtagttctaggccatgatgtcagctaggtctgggtaggctggtgttggagagtgctgtttttccgagcaaaacagatgctaacttcatcagagcagcccacacctgcttcaagtggtcatctggggcaggcctgagcactgttgatagtcagacctgctcagaggagtagggagggtgggtgggcctcatctgaaacttaagctccacccacatggcccctccagctgtttctatataatcctgtcccaaatgtatatgacctcaggcctgaaggctttgtagattatagactttgggcaagattcactaaaggggggcacccagcctgcagctctgggggagccatatttacatggttggaggacattttccggtgagactaccttgggatcccccatgctcttgtcataacccctcacccatttgtactctgtagataagcacaataaactaaactcatcgcttgtccagagcgaacatcaaaggagtcataccttggtttcctcgtgactgtatctttgctggtgctcacccagccacgcacagacttcttgtttccgagtgaagccacgttctgaggttctggggagacctgtattctggctggagcaccattccatgggggcacgtatgtcaccccctctgctcaaccccatgatggggcttgtgagtgctgttcctgcaaaggtcttgttatgttaggtaggaggagggaagaggaggaggaagaggaggaggaggaagaggaggaagaagaggaggaggagagagacagagagaagacagagaattcgagagagggagagagaatgagagagagagaatgagaaagagagagaacaagaacaggagatggagtctggggagtctaatgctgacagtaatagaatgacattccttttaattcaccagagctttggagcctgctgcctgcagctctgcttgaggtattcatgaagtgcttgctacagaggagttagggtactggctccttatgcaaaatttaacatttgcttggttagcaggcttcttcatatttacaagagcctgacacgttcatttcagctcataagtctattaaacagggtaatgtgtttttaatgtgcgctcaggaagccactgagaagcggccagagtcccactagcctggtcaggatattcctgccaggcttttattactcagagatttagaggggctactcccagaaacagccaactctgtggtttcttgtattgttttgttttgttttgtagtctttgcttggctttttcttttcagctctttaaactcataaaatacagggtagcacttccgttgaagtatttaggatttttttttctttcactgctggggaaggggtggccaagctcaagacctaaggcagctaaaccagcactgcccccctgagctactccctagcctctgatcatgtggcatccttagggggtcctcccccactcccatgtgttcactcctagctcgggttttttttcctcttaccgttgttatcttgcctgggtataaaccagaagcttctcgtgagcccgtaagcctggaaggaggttgatgcttcttcctgcctgggagatggaaggggctgagggaaggcaccagagtgagttctgagctcaggtgaagcttgcagtggcgccatctgccttgggcacggtgcggtgcggccccgccttgaggaaaggagattggtagtggagtcggtgatgcatgcttctcactcctcctggctgctttgcattgcgttccattccgcttgcttctttgaaggcctcctctgttgggattagaggaggaaagcagcccttcacatccaaatctaaatccgtcgtttccaagggccatgctttggagggctggggcactctggagctgtatatggagggacttaccaagggttctgaaacagaagcaagtctcagcaccgctggtacctctgtcctaagtgaggagggaaggcaggcgtcatggaggacggggtgggggtggggtggacagaggacgtgtgtgtgtgtgtgtgtgtgtgtgtgtgtgtgtgtgtgtaagatgctcccttacaacagacatggctctgggaacctccgttctcctcctcaggaggcagggctcacctgctgggctcatagtacctcggcaggccttgtcaaagtttggtccagtcagccttagtaatgaggaagtgaggaagactctgtggccatttacatgggacctctgccctcaaggagactcagatctccctggaaaacaagtgggaccgttggcctatgtaagttttttgaagtgagtctgagtttcctcagagctcagcacacagtcagactccacatccacagtgcctcctgtctcctgcttccccatcccacccatccctgtcctccccgaggcatcaatgtccgttcacttagctttagccagaagccatacaccatgatctggatcatcgctgagaaggttcaggtgtaccttggtcataaaaaaataaaaacccttaagattataaatggtcagattccaagcttcatggacactttaagactatgcagttgtctgggagataagaggtatttataagattcataaaatgtgttttaaatctagctctggaggtgtttgcctttaatcccagcacttgggaggcagagaccaggggatctctgtgatttggaagtcagcctagtctacatagcaagttcaaggccagacaggaatatatagcatgactctgttttgaaacttattttaatttaaaatatataaacagctccattcttcttgcccatagttccctgagttatagaaaatgcatagttttctaactactccatagtgggtagaagacagtcccaacaccttcccaaattacctttggacacagagggagtcaaccccagccacttctttaaccctcgtttctggggttttgctcctcccagaacgccatgtggaatcttgcagccttcgcattaaaggtatgtttgtgttcctattgcagttcccagacctctttatcagcatcgtggctgaacccctttggcagatctgtggctttcattccttttttccccagtctctaggttacctttgtttgtttgtttgtttgtttgttttgttttgttttttcgagacagggtttctctgtgtagccctggctgtcctggaactcactctgtagaccaggctggcctcgaactcagaaatcctcctgcctctgcttcccatgtgctgggattaaaggcatgtgccaccattgcccggcttaggttacctttttattctctgaacaattctttgggctggggagagggaaagctgttaattctgatcacgtccaaattagcagtgtttccaaattattcatatagtgtcatatgtagcaatcctttgtttaactcagggccaccaagatttcctcctatgttttcctcttggtcagtgtttattgtacccagtctggaatcagctgggaagagtttcaatgagggactgactagattaggttggccttggggcatatctgtagggggttgtcttaattgcactaatggaggtgggaacagccgcccacagtggacacaatcccctaggcaggggatcctggactgtcttggtagaacgagtgagctgagcacctgaatgcaagcatccattactctgttctctggccaagcacccaatgtggccgtgtgccttaagatcttgatgcttcccttcccttctccccccctgatagattgaaacttgcgcctgtgacctgaaataaaccatcttttcccttaggtcacttctgtgagaggaatctgtcacagcaacagaaaagaaacgaacatagtttatgctccatcttgagcgacctctttggttaaagagttatattatttttaatgatctgtctatgtgtgactatgtatgtatgtatgtatgtatgtgcacctaagtgcaggtgtgctgcagaccagtagagggcatcaggttccttgcagctagagttacaggtgttgtgagctacttggcatgggtgctgggaactgaacttggccctctagaagggcaatgtgcactctttttcaccaagacatctctccagccaattcaaatgctttttaaaatagtgttgggtgcagcaatttctttctcatacagatactcagcttccccagcaccaggtgttccaactcttctttcactatggattgattgtgtgtgtgtgtgcactcgagcgtgcacatgtgcctccacacacgtgtgctcttgtgaaatgcaattggccatatttgtgtagctctgattttggattctttgttccgattaatttatgtgtccatatcctctccaaattccctcttcctttgatattggagctttatagtacttttgaaatcagatattgatgacctgtctcaaaattattatgtctataccatttgctttgtcatcatatacaaatttagatttagtttaccaatatctacaaaaaaaattcctggagagatttcggtttggattccattgacttcattaactaacctaaagaaaatggaatctttagaatattgagtctttcatttacgaatcctgtgtctttgaagtatatcgtttccttccattttctcatgcttcctctgagcgcttttgtggggtttgtttgttgtttttatttttgttttcggtttgtttgtttgtttttgtttttgttttctgcatctgcaagctacaagtttggttagctttatatctctatggccctagagacatagagataaataaaataaatagcaatatattttaaacttcagttgttcattgctagtgtgttgcaacctaactgacttttatgtatcctagaaacctgatatgctcatgtgttagttgtaagaaatgtattgttgtgttgttgggcattttctgtgtcatgtctatgtagtgtagtttcatttttttcttcttctgatgtttagaagcttttcttgctttattgcaatggctaaggcttctagtgggatattagatggtagagttaaaaggagtcaatcctcccaatagaaaggactcatccctgccctattgttacaaagttacaaaagtgctgttctctgtaggggtttagtacataattagatacatgtctgaagcaccccagagctcattcctgaaagttgtcaggatgcgcagatggtatcaagttggaaagggtcataggttcagacataatgggatagggttaggaattggtcctttagcagttgcttgaccttggagtttctgagaaaattggctaagttactacataggagacttgtaggataaaggctattttattgtaggccctcaataagtattgtttttgtttgtttgaacaataataaagattgggagcgatcccaggaagcttgggtgtgagattgctctggtctaggctgcttgaatgggaaaccatggagaactatgggtctgaaggtggattcttcagtcgctgagcatattggtgtcagcagtccttttgagctactctgagagctgagtcattcagggatagaatcttcacattcaaaaatcaacagactactactactactactactactacttcttcttcttcttcttcttcttcttcttcttcttctgcttcttcttcttctttatcatctatttattttatgtatatgagtatactgccttcagacacaccagaagagggcatcagataccattacagatggctgtgagccaccatatggttgctgggaattgagctcaggacctctgaaagagcagacagtgttcttaacctctgagccatctctccagcccaaggctggacttctctgcagagaaatcaatccctaaaatagatgcaaagaatcatgaacgactgggcggtagaacacatctgtgtgtgtgtgtgtgtgtgtgtgtgtgtgtgagagagagagagagagagagagagagagagagagagagagagagagaagagcaggaggaagagtgagggcttgtgattgtaacggaaatgcatggctcactagtgtacaggctaactttgttctagcttcccttttccacggcccaggagacaaggcaaggccttgaagtagaggatggccaggaccttacggggagtttcctccgagtggcatgagagtcagggttgagtaactttctgctccgagatgcctcagccacaagcctgccaaggacatctgtgggaatggcagtgtccaggagcctgtggccaccaaacctcctgtgtctctggagcacacaggagaaaggctcaggtaacattacagtttagggcaacagatgaacaaaggtggtttccggcgttgatcttggggtgtgggagtagaaagtcgactacagcattttgctaggcagtcttccaggtgagcatgtagatgcagaagcaggcgtagggactggggacattggctacttcccttgctcttgcctttcagcagggggttgccatagtaactgtaacctttactgtcttcttctaggtccaccggcactccttgacttgttggctaattttctcttactcctttcgagttttggcatatcttacctcttttttcttcacccctcttgggccccctcgcttcttggagccccttctttctatgctgaacccctcagtgatctgcctccctccccttcttcctgtggttggcatgaagtctcctagcctcttcctcacttctgagcacttcagctccctggaggacccttttggactctggcgggctgcagtggggacatttttctgccccagtggtgccacaacactagtgatactagtaactggaaaagccctctggaggcattttcttctccctccgaatagagatctacaggggtggatgccaccctagagtaccctcccctctttctggaaaattcaatctgggtaaagtctcctccaggcccttgctttgggctggctttccagagcagaagcccattagcctacagtgctaattaaacgtatcctagcggtgtgtctcaggcctgccattcactggataccagtgaggagcctgaatctccaagagatttgttacagaaggggagcctcgctttgaagccgcccttcccagtgccttggtgacaatatttcatctgcacggcatccagccctacttgattagagtcattaaccacctacatgccatactgcttgcttttctcccttgttggtctcgagtgggaatagagcaccccccctctcagtttcccccttctcacagtcttacattccaacatggtcaccaccactgtgtggcctttgcgctgtgtacctgtctgggactgggggagaggggtagggtcagggataataactgccctgcgttggagggttctcgttatctggccaagacgtcaggacccttctttccccgggattgcatcaagcagccctgaggcgaggctccagccggtggatgaaaggctttgggaggccagggcacaggaaacgcgacaacccaatgtaattgaaaacgactgtctgagaactagcaagctggatgggaataacaagctgtcccctggcttcccatccagcttgctgttaggaagcctaatggctggtttgtcacgctgaaggaagggggctacagaaaggccagcttcgactgtacatcttgaccaatagaataggacctttttttttttttaaaccaaagctccattctgaatgtctggttaggagactgtttcccatgtatctccttccttcctgcctttcatgcccttctttaatatcgttgccaagtcatatagctctctgcgcctcatttcagcagcacattgaggcagacaaatacttgcctttcccccgcaggggactcctcagtgccatgcgttagacccagacatgcattttattttctaagcaccatgtttttttaaaactgattagcagttcggtatttacagagtgtatctcagaaattaaccttacggtttctaaggactccaagacaggcccccaccacgggaaagggcggacgggcaggtccctctgtgcatgtccgagcccttccatctccgtttctctcccctttataggaacactgcttcaagcttaaaatgggaatttcagtatttgagacgttttgagttgaaagggatggtagagaagattcaggttgaatggatatgccagctgatcaaatagactttaaggtcttccaagaatgttctggtgtgtctagacactcaaaagtagctatttacttctttctcacttggactctgtatgggatgactccctcccctttcttcttagaaacccccacccccttctcattggcagcattgttgagtcaaggacctgtggctagtgacattaaagtttaaatagatggccaaggatctgcatatctaagcagtcctggtcacggtgtggtcctgcctaccactgacccatcagtatttgggcttctgtctcatcctgtaagttgtcagacaagtccttagaactgtgtgaactctctttctgggagacacattcccaccctggctggcatcctctctcattttcccagagtgaggttcctgggggaaattcccagttattggggtccactgttagaatagtctgatggcttgagagacccaggtgtctctttcagacatcttcctatctcccaggtaggccccaagaacagagaccaggtaagctctagacacagctgttgtccaaagtgtggctggttcaaaataaaactgtagttttgattttcccccgctgttattaacttcagttagatgactcacagatggcggaattcacccagcatctctagggcattcacatagagaaaatgtgctcatggccactttaccagggaggagggagggttgagaagtcccggggctcgtgtggggctccaggcttttgtgctcattgggttctgctctgccatgagctccagcattgactgcatctgtctgctgtcacaggcagtgtgagtcagctcctccttaagaacggaacaggcaaagctcagtcgtcggcatggtgaggagttatctcgctttcaaataagcagacggacaggttggctctagcctcccacctcaccccgctcctctttctgcccccttggtccagggctggtaaagcagctcttggtacgacatgctctgtgccatggtgagggacagattaaaagagctggtggaagtcttttaagaattctgcctggcagttggggggtggtgcacacctttaatcctggcacttaggaggcagaggcaggtggatctttgtgagtttgaggccagcctggtctacagagttccaggacagccaaggctacacagagaaaccctgtcttgaaaatcaaccataaaaccaaataacaacaacaacaaagagaattcggcatggcaagacttgggatctatcagttggtagaatgcttgcaagttcaagtctgacccaaactgcacgagcccttctctctctctctctctctctctctctctctctcaatcatgctgagctctggcatctttctgttcactctgttcccattgttcccattgttcagcggagtgaatggcagacactggcactgtgcagaggaaaacacttggctcatgaatcaggttgtaaagatctagagggaaggttcactactgtctctctgccacaggcactcatggttgtttctcagttttacgaggctgctggcctagaccaaactgctgtgcccaaacagcaggatcaaacacaaatggggaaaaagtcaaggagatgattccttgtgatattctgctgtgctcatagactggtgtcttagccctaagtcaccagagaggcttcatccagcagctgatggaaacagacgcagagacccacagccacacattaggcggagcttggggaatcctgcacatgagagggaggaggagttataggggtcaaggacaccacaagaagccccacagaatcaactaaactggaccctcggggactcaatcctttgagtctggcccctttctgaagagaaatggaagaggaatggataggggaggggctgacagggaagggactgggaggagatgaaggaacgttccttttacctttgaccttacacacacacacacacacacacacacacacacacacacacacacgcacacatgcgcatgctatcctggctagttagttcctgtcagcttgaagcaaactactgacttctgggaagaggaactccgaattgaggaaatgcctccatcagattggcttgtaggcaatcctttgggggtattttcttggttagtgattgctattgaagggcccagcccaccgtgagggtgacgcccttgggcaggtgatcctagggtgtatatgaaagagtctgagtgagacagtaagcagcattcttccttgggctgtgatttgaatgtagaaaacagacccttccctccccaagttggattttgtttttagtcttttttttttatagcaatagaaagcaaatagaatgcatgcatgtgagcatccactgtagcctgacctcgcctgatattagccaggtctttatttttctatctttctgccttcctgtcaagaagagtgacttggaaaatgcagtctttattaggacttccattgttctgataaaacgccatgacccgaagcagcttaggaaggaaagtcttgatttcatcttccagccagtgcatcactcaggagagtcagggcaggaattcagggcaggagctgatgcagaggccatggaggcgtgctccttaactgacttgatcaccgcagcttctccgcttgatttcttatagcccttaggaccaccagcgtagggttggaactgcccaaagtgggctaagtacttccacatctaccctcaagcaagaaaatgccccacagatttgcctacaggccagtctgttgtagcattttctcagttgaggctccctcctcccacgtgactctagcctgtctagatgacctagaacccagccagcatagaaccagtctgctttgggggttttgtttctgctttttataattctctcctatgcaaaaaactaacccctcagcttggctcatgggaacagttgttttctgttctggtatgagatattatctggttctaggattgaaaaagaggtcctggaagagctttaaattgctgtaattttgtcatttgattcatccaagaggaggttgagggatggcaaacagccacctgccgctgtaagtcttctttcaacaccgactagaagggaggggagagccagccatgcaggtgctcccagtaaagccttgcatgtatcaccgtattaatgggaactcaggcggactgcttaggaataatgggcttgtttggaaaacccagctttgtttcagcctggcttttctcaagtcagcatccccttactcccttacttccttaggatctcctcaaggtgggagcagcacccgagcttgtgaagacagccaatgggttggatgtgtttgtctctttcatgtccccttttcccctctgtggtgcacacatgtcccataaccagggcacatcccagcccaacccaccaaaacttcctttggttcttttgttggtgagatggccatatttcaggcccagtgaagaaccatacacctttgtttctacatccctctcttggctcagagcactgtctgtcccaggtcattaaattccacttaagcagttgtttattgcagtgtgagaaggctggctctacagttgttgtaaacgccgatgctccctagaatgaaaaatatgaattcgcttctgggcatctggaagcgtgtctgaattattgcccggtccttctgcagtgtttgatcgctggctttaattacttgtctatttccccccagtacaactgattgctagaatttgttgagttgtttgttctcttggtttttttgttgttgttgtttttgttttgtttttaaatgataatatctcaatttatcccagcctacccttgaatcccattgtgtaagggaggatgaatgaccttgaacttctgatcttccagcctctacctcttgagtgcttgggattgcaagtaggggctaccatgtctggttctgcacagtgctggagatcaaattccaggctctgagcatgcaagggaaggcactttatcaactgggctatactcttaagtctagatcattaaagattcttattctatacttggtgtggtggtttgaataggtatgacccccatagactcatgtatttaaatacttggcactattaggaggtgtggccttgttggaggaagtgtgttactgtgggggtgaactttgaggtcacctatactcaagctctgtccagtgtggaagccagtttcctcctgctgccgttggatcaagatgtagaacactcagcttcttctccagcaccacgtctgcctggaagttgccgttcttcccaccatgatgatagtggattaaacctctgaaactgtaagccatccccaatgaactgttttcctttataagagttgtcgtggccatggtatctcttcacagcaacgaaaccctcattaatactgggactggggtattggtggtagacctgaccatggttttattagaaggagtgtggattttgggactttggatcaataaaggagtggaaggctttaagtggggcttaatgagccattataagagaaacacggaagacggtggtactaagggtgatttgaactgtgggaacctgactcaagaggtttcaaaggagaagagctttagcacgttgcctagagattgttcttgtgatatttccgtgctgaacgtggctgccttttgcccttgtctgaagagtctgcctgaggttaaagtgaagagattaattgcactgagaaaggaaatatcaaaatagcctagaatagactgtgtcctgtggttcactcttatgaagagcgtttttgttcaaatgcagcaaactgaggaaggaaaatacaaaatgtatgatttaatagttaaaagtgcaccaaggagaaagagaaagcatcctggagagctgagaaagatagggagtcccttcgtcgtactaagaaggaaactgatgaagatggatggaccacagcacgacgttaagtcccaagatgatggagtcaaacttgtggcttacataggtttgatcacattcaaggattattatacttgtgcttcaaccagtctaaattgaattctttaatgttgtctcaccataacacaaaaagcatgaacttgtattaatcatatataatagattgatcatgcactgtattcacaggaggttggaaaaccatgccattttctggaacttaaggtgttgcattatttcatcaatcatttgttaaaaaaaataaaaataaaaatgtgaacccttcaggtataaacacctttaaaaaaaagtgcaccaagaggtgtaatgaagctaaatcctgtgttcaaggagataaacagattaaagatattaaatggaattatgggagtggtgacctcggggcaagatcccacccttctaacaatgtttgctttccatcttgtgaaaaggatgttgaaaaagggaccttgtcacctattctaaatttactattggcttgcagttgcccaaggggcaattatgtcatgttaggtgttattatgaccgggttattgtttttatttggacataaggagcttgattatgtatcaggttgacaaggggtggattgtgatggctatttttggttgccaacttgactatatctggaatgaactacaatccagaaatggagggtacacctgtgacctggatcttgagacaggaggacaacatgcttttgatccagactttgagactggaagacacaggcttttgagcccaatcaacacatgtcgttaattcagatcccgagacgtaatggccattcttgtgaagatctacaatgaatagaatttttttttaaaagctcgggttcaggtgtggtggtacacttctttaatcaggagacagaggcatgcagatctctgaggtgtaggccagcctggtctacggagcaagtttcagaacagccaagcttagggagtaaaagaaatcatagaagacggagagcttgcgaagatgtaattgaacagggagccttgttccagccccaacaagcagcagaccttggcagcttcagctgcatggctctggttttagaatcaaggatggaattgccctctgtgaataaggaggccaggggtatgtcatgggtgtccctgcacagcgcgctgagaggccattgtatgaagttgtgaaggtgaagcctggattgccttgagtaccccaagaggttagagatgccagagctgtgggattgctgccgaggaaagctgctaaccaggagcagaaccagccagagagaaagaaatgtgccacagtcaacaaagctgaaaggagtcggcgatctgaagaccgttctgacatcagacaaggagatgcggagtttggagtttgcccagctgtctctgggctccctccgctgtgttttggaacagtcatgtatatcctgtgccgtgatatgttggaagtatgtgatctgttttgtttttgcttttattattattttgattttataagggattgccgttaagaagagattgcatgaatcttagagcagactttgaacttcggacctttgagcattgtcgagactgtgctatacgatggggatttttgaagttgaactaaatgcattttgcattatgttatggctacaagcctatgggggccagggagtgggatgcggtggtttaaccccaatagactcatgtgtttgaatgcttggcttgtagggagtggcactcttaggaggtgtggtcttgttgaatgaagtacatcactgtgggggtggcctttgaggtcctatgcttaagctccactcaatgtggaagccagtatccttttgctgcccttggatcaagatgtagaactcccaattccttctccagcaccacatctgcctggatgctctcatgctttccaccatgatgataatggactgaacctctgcacctgtaagccagccccaaagaaatgttttcttttatcagacacgccttagctatggtatctcttcacagcaatgaaaccctaactaagacaactgggccttttggtctatagcccaggaaatgagtctaggctgggaggtgctgaggggcgggcattcacgtgggtggggattgttagagctctttacttctggctgtgttcttaattaaacacttgcatgcctattcatcatcttgaaccaagtgactattaaagagacaaatggtgtttagatgtggggtttgcgatgtggggagagagggaacaatcagagccacgaccttatcagtctcctcaggtcacggtgagattttgattttgtactgagagttccattaggccaccaaggatttgagcctggtctgtctgaaattttttaaaggatgacctgggctccatcactggagatagatcaaagcagggcgagcatcgacctgttcccctcacgcactttctcagaagtctaaagtgcttctatggttctggcaacatccagcaagcagagacaacccaagtttgtaaaacgcttcgtgagaagtccctttgaacatgtccgcagcatccaattttactgaagccgctctcactcccaaaatagaatccaatccaagccccggcttgcaacccacttctgcttcgccgaaatgtcattcagagcagcgaaactcaacagcaactaaagtctggggagagttccttgagatcccccgcagctggacttggccctgaccgctgggtgttctcgaaatcattttcagctccgtcctgcattcccaacagggcacggaggtgtcacaggcaccaggtctccctgaaactctgacttgtcacagtcagagggctccgggctgctctctatgtaagttgcaaggttttgacctttttttttttccttctagaaagcagaaccgtttctatctcccactgccccgtggttggggtgtcttgccagaagtgtgtccaattgtcacgcctgtggccatggtccacgtccctctcctttctttctcttttttctctcttcactttaatgaccactggaagagaggtgttctgaggtaacccaccccatttcctccagataacccacccatttccctgcctcctcctcttccctaccctacctctctccctcctctttttccccctccattgttttaaaaaatattttaaaactaatttatttgtgtgtgtgtgtgtgtgtgtgctcgctcacgtgtgtgtgtatacactcatgtgtatgtgcccatgaagagggtgatgggtccccagagctagagctacgggtggttgggagtgggttgtaaggcatgatcctcaggtttgtgtttgtacaaactgaaggcagagtctaggagagctgaggttgtagaaaggcgcattccttctttgtccttaaggccagctgtcacccaatcaccagctctgtccccatacacagcttctgggctgagggccacacctttaggggacgcttaagatccaaactctagcaacagatttgtgggatccagtcattgatgtgaggagaaagctggcaaaggcgccctgggtatgactcttgagcgcaccagtagtggatctgtttagccctctaccctcatccctccactttctataaggatagggttttgtgaggatggcaagtcaaggggaaatgtatgcagatgcaggtcattttttaaggaagtaaaaacacatctgggctacttctatggtgtagggcttgagtgtcccccagaggttcgtgtgctatgcctaaggtgccagtggggtatggtcagaccttcaggatgtggagcccagaggaacaaagtgaagtcattggggtgtgacccctttcacctcttcatgaggtgaaaatgtctctctcctacatggttggttccattgtcatgtgcagtgtgccacagacctgaggtgaccatagagcaaaacctctgaaaaccgtaagccaggatatgagtacactgtagctgtatagatggttgtgagccttcatgtggttgttgggaattgaattttttaggacctctgctcgctccggtcaactctgctcgctccagcccaaaagatttatttattagtatacataagtacactgtagatgtctttagatgcaccagaagacggcgtcagatcttattacgggtagttgtgagccaccgtgtggttgctgggatttgaactcaggacctttggaagagcagtcagtgcttttacctgctgagccatctctccagccccatttttccttcttttagccttgattttctcaggcaacttgtcatagccacagaaagctgaccagcataggtttcagatcaagggtattcacgttggatgtaggccttggacacttatcacctggtttaataccctttgttacgatcgaaggcgtaagttccccagtggaggaggatggcctggtcacagatggtctggttccccagtagaggagtggcaggtccaagatgccctggtgcacctgacttcagccctgttgctcgctccctttccttttgctctgcacctgcagctaacactcctagtgagtctgggtctgcaggcctcattggccatagcccattccttggccacctgctacaccttcttggtaaaggtaggtggtgataattgtggagaggaaaggccagccagatcagagggactgactggctcaagagtatctagcggagcggctggagagatggtttgctctgtccaagtgtgaggacctgagttcaggtcccaggagctacctagcaaaccaggtatagtgccatgcacatctgtgaccccaacactgtggggcgttggagacgagaggatttcttggggttgcctgttgtctacctagctgaaaaccacgttagctccaggtttagggagagacctggcctcagaaggaattaggaggagagagaaggggactccgactgttcccctctcatttccatacacacatgtacacataacgcatacgccatatgcacctagactgcattcccacactcacacccacgggttgttttttttttaagtatatataaaaatacatactggagaagatcccttaggctgtcacgtggcatgcctgtggagaactcatttggactgtgggcacgttgcaattctttcacatcatggcggttcaagcccatttcctccctttcggtctcggccttgtgaaaagcttcctcgtggatggccaccagctctttcaccagctctttcagttgtaaggccagtgaagttttattttgaagtcttcgttctcctctttctccttcactaggctgtggggtttctctccacagtggggtgctccactcggctgtggggttgctcgccacggtggggtgctctccaccgtggggtgctccactgggctgtggggttgcctgccattccttacttgcccttggtgctcccatggcctgactcctccccccacgcccccccccccaaatctggctcttccaattcacagcttctcccagatgcgtttcagttgaaaatatttctccatgagataaagcctggctttcctggtctctggagccggagcctgccctgatggtatccttccagcagctgctgcagagagaatgatttgaaaacttctagcaggaagtgggctggggagcctatattgcacatccttgaacatttggattgtggggagcagaccaaagaagcctttggtcctctctagcagccctgttttctgtgcactggccaaagcatcattgggaatatggacctgttttctcctttgaagtcctttactgagaactgagtgacatttttttcctgggagacacagacaaacatctaatgaccctagataggaaacgagtgatagatccaagcaatgatactccgaaaggcaagttcaaggaacctgtgagtttatcgggtctccttgcaagggtgagtgagaggttagttacaggggcaggatgactcaaaggcatccctgagcccactcccagccccaagcatgggaggtacctcttaaaagctggagctctggtgtttactgtaggactttaggtggctcaatacatcacagagtctcttccaggcagctcaactggtctgtgcttctccagcagctctgctggtatgtgtcctgtccagcgatccttactgcctgtaaaaccttgaggagggaggggctttgtgtatctcatcagtttcagggactttctgagacttgtgagtcatttgtttcccaagtcttaaggagtgtctttccaggatggaatattttaactcagaggaagttgccatacaacaccaagcaggtactgaggtcagaggtctcaggtcactgagggcagagtaggcagcctttgacaatacagaaatgaccttaactacacagatgatcttttccctaattccattaccctctccaagttctcatgcccctctttaatttgcagatgttctgaaaaacgttgatcccatctcagtgttaagaaatatcctgcatgtgtatgtctgtctctgtctgtctctctgtctctgtctctctttgtctctctctctctctctctctctctctctgtgtgtgtgtgtgtgtatgtgtgtgtgtgtgtgtgtgtgtgtatgtgtgtgtaacgaagagttttccctttcttgactgacaaactgtctgctagtggtatgtaactctgcctgggcatgtttggtgaatccctcttatggcctcaccatgagttgaggtgtggaagctgtggggtccctcctggtagaagtcatacctggtaaacagaaactaagataatatctgcattcaggaagacagcttcagtggccacaggaaggccttagcctacccttgaacttggcctttggcccatgtctaatctttagattccagccaagacactttagaaaggaagtggatgaggattcctgtaaaggagagaagcaggacatatatctggtggccttgggatagtgatgtcctggtgaagtggcagccaggtccacatgtggccatttctagtttagaaagcctagaaaataggattagaaaaggaatggaagtttccttgcacagtggaactctgtgggaccagccttcaggactcccagaaatgcaggatggattttgttagagggcagagacctgcctgtgagaaaagtggtggatgtatatgtttatgtatgtgttaattgtaacggagtccatttctcccttgctgtcataaggttttgagatttttcttgtttgcctgtgtatggccatgcatgtttctgtgcacacacgtacaaagggcacgcttgtctgcatgcatccacgttccacctctgtgaatgtggctgacaatatgccgtgtctcagagattacaaaaactgtggagattaatggggcactcagaggcagttaactccagagctggctcactgactgagcagaaattcccattgttctgaagacaagctgctcccacttgatcccctctcaagaaacaaaagcctcctttgtgtgcgcctgtgttcctaggcaagggcagacgtgcggacgtgtgtcgcagtagacagcactagacgcggacagatggtggtgtgggtgtgagtggctggctcctgtctacacaaagggaaaagggcgggtttttgaaaaatgtctacttagcagagtttttattttcgtggattcagggacattttagttaaaggtgtgaatccaggagctgtggggtgtgagctgatgccggctgacgggcgcgtgggaccatctgggctgcatggcgtgtggttactgtcagcctggctcaactctgcccactgccaggattaacaaggggccggcacatgagtgtagcacacagggaaggttgtgagtgtaacacacgtggaaggtggtggggtgggtagagggaggtcggtaggagtgagctgagccagagggtctcatatgtacccaggggacttttaacttacagggaagaccgagtgggcacagggagagaggggcctgtgctgtgaaaaggagaatttgtgacttagatgtcacacaccatggtaggtagggccagaggaaatcggcaggaggcagaagtcaagactgccaggaaagtcagagtgtgggctcccctggagaaggaggttccagtggggctggagagatgctctgcagacaagctcctaagctcttccaagcactccggtcggatggctcacaaccgcctataaccccatttgcagggcacttgtctccctcttctggttttgcaggcgccctcacacatgtgcccataatccacacatacatatacatgattaaagattaaaagctgtgcttacaaacaggagcataacatggctgtcctctgagaggccctaccagcagctgactgagagagatgcagagacttagagccaaccattagcctggagttggggacccttatggaagtacgaggggaaggattggaggagctgaagggggtgggtggcaaccccaaccccataggaatgccaacaatctcaactaacccagccccctgggagctcccagagaccaaccaaagagcatacatggtctggtcagaggcccctggcacatagatagcagatgactgcctgatctggcctcggtgggagaagatgtgcctaactctccagagacttgaggccccagagaaaggggatgtctggggtcgggggcacagaggggagcaccctctcagaggcaaaggggagggggaatgggatgaagaactataggagggggatcaagagaggggccaatgtctggaatgtagataaataaaataattacattttttaaaaaagaagcaaaatgggtgtgtgtgcgcgcgcacgcagtggacagcataggacaggccattgttactggttctgctcgctgtgagctgtagctctggccctacctgcctggggtcagcactgcattactgaggacatggctggacatggctgaggcgcacacgagagacacacccttaagactctctgtcctcttaactctcttcaggaggtttagctcgccatggaaaggggcagtacctacaccctaaatctataagagctcacatatgttaaaatgcgttaagactggatataaaaatagtaatattaactagtgcccatgattggggatgacagtaagttcttgaggttgtgcaacaaagaaaaaatggacgctcaggttcaggcagcaaaacatccacagatggaatgaaaattcattttttttctccttcaagagaattaaattccaaaatctagggagcaactggcctgctttaaaacccaaacagacctaccatgagcaagagagaggctcaggcgctcacactggtgtgtggggttcgaatccttctccaaaccccacttctcagcggcttcctatttacacttcccagtgctgctgtgcagacccttggacatttgaagtcttccctcatggaagggacccgggggacatctgaggaatacatactcgaggattcctctgattgtcctagttgctggagaaatggcacaccagactgtcatgcagtggtggtctccatgtcacgttcattgcccccaacctcatggatccatcgtgaaaggtctcaaacctgggccacgcacagtctccgtgtgcttccagagatgactagtccacatattttcctatgcttgcccgtaacctcatacccatgcttggactcctcctcctctatgtatgaagccatctcctacttctctggaccaatcgagcctcccgggactccacccacttccttgaatttgccttcctgttgctttctgcctggtcacctcagaggaggcgagttcagtcaggtccccgcccttctgcaggattcatgtgcctggccccatgattgctctccatctccttttctgcaggttcttgcccgcaagctctcctttattaccttcacagcatctgccctgagggctctgtttatttctctcgagaatgctcaaaaattctcattaaaaatggtatttttttttttttgcccccaacacacccccaactacaactctgtttcctccctatgggtttactttttcatgcagctgtactatggcccaaggatattttgccctttcattatagatcagtacttttcagaatagctggaagttagcagaatagttttatcctgtttcttgctcaagaggggagtggggggtggggaagcagctatgttatgtctcttgattcatccaggaaacacgtctggggatgcccctggtggtctgggtatgtgagaggctgtcttagttagggctttactgctgtgaacagacaccacaaccaaggcaactcttacaaaggacaacctttaattggggctggcttacaggttcagaggttcagtccattatcatcaaggtgggagcatggcagcatccagacagacatggtacaggcagagctgagagttctacatcttcatctgaaggttgctagcagaacactgacttccaggcagctaggatgagggtcttaaagcccacacccacagtgaaacacctacttcaacagggccatactttttaatagtgccactccctgggccaagcataaacacacctacaagctagttgccaacggaaggaggaggaattggagaaggtgggcagagcttacagctggagccctgatgtagatgatagactggggttcaatgagggatcccgtgtagcactgatgttacggtcacagctgtgttgcctccatgtcttcggtacacaggcccaagctgaacactctgctctggttggtagctgatgcttctcatccggcatccctttgtagtcatcgctgtgataaacaaactttgttttgtctgtgagatttaaaggaagttgctggttgggagctgggaaaaagagttaagattgaactaaaaaaaataaaatcatttatgcttggacctcaagcatggctcactactgtttgaacatttttatttgagttatctttataaaatggtcattcttgtctctttgtaggcaatgttcacagtaacttggctgccagttggtgagagacttcagtcagactccaatgttctcatgcccgccgggtttctcttcccatactgacccaacttccctgctaagactttgaccccttcattttacttttgcttgcttattttgtgtgagacaggtcctcatgcatacctgggctgaggtcaggagttttgcgctgtagttacaatgatcttgaactcctgattcccctgtctacatctcccaggtgttggaattacaggcttgtgccgtcacatctggttttctgtggggctggagcccaggccttcacacatgattgacaggcgttgctaggcaattactctaacaatggagctatatggagctatattctggggccctctatctcttcctgaggatatccggaaacatcctcattgtttcagagcaatgaccctttctatttgaagatcaaaagtgttaatccgtctgaacaagggggagtcaggaaaaggcctgggtttagagactggaagaccctcccctaagccctttctcccacaaatgcctctggcatcttgttatggtgagaagaaagggagatgccaaggctcacaaccctgtggggctcgttcatagcccagatagctaagagcagctgtcccagaaaccagttccaaaatccctcactttcagtacagacacaggttggaagagtctcagatgccggaggacagtcccacctgtggcagggccaagagaagggaacactaaggacgggaaagaatgcacgggcaggaagctcttcacaccagcattgttagaggccaagcatggtcaaggatacatggaacatctattgcactggtagggagatgaagtcaggctgtctacaagctgttgtctcctctcctctctgccatatctatgcacagattctccaaccgtagcacacacaccgtttgccgtgactaaggaccagccactcactctcctctcacatctccacattgtcccttcttcccgtgtttgccctatgttggtgatccacggaatgttatatgggacacgggcgtgggtattcttgacggcaccaagggttactcctgtctcgtgcacatcatttctttctggagttggaagatgtgcctggatctgcatagagggctggaactggagtgcctgggtggagtggagaagagggggaaggggctagctgcaccctatgatgtttttgaggaggagggcagtgtgaaaggacatttatttcaggatgtgggataggaagccctttgtatgtccccacgtgagacgtgagtcctgccacatgaacgtgggcaggaggtctcacaccatccccctgagtcatcttcttctgactacactttccttgcacactctctcaggacctggagaggaagcccaagaactgtcactgcttcctaaatgtcatccctccctccccactcctctcctctggtgactgacgtcactggctgcctatggtctctggtctctcctgctttggacagatttggctctcagagcacttccggcaggagcaggagtcctgagtagccagcaggggctcttagggtgtagcccaggctgtgtcgcctgaaggatgtcctccatttccctgttacaggagcttccaaggcagggttccagccaaacacaagcaggcctaggagtagagctgtgatagagacatgccaaggttgccgctgggaggaacgattagcggagacctacgtgggttttggttttagacctctaatgagatctacttaagaatgctgtgcctgtggatgctgttttgagctataggtaccagcctggttccattaaacagatctatagcagatgagttgtattgtatcattagcgagagcccggagggtacagagtatctcaggcaaaggctccttgacttgaacatcttcgcaaacagcatcctattaggagggaggtgtcaggtgttccgtctcccaggcctcactgcaactgttgctccttttacctcctatgtgctcagagcctcctgagtcctgagcctggttgcagctgtggaaaggaaggatctcaccaccccagtcttcatcctgcttcttcatactctgcagttggcttcctgaatgcttgcagctcacagttgactgacttcgttttctatgaaaccctggcctggggtggggattcccgtccgtatccagtttcctctctgctttcgtttgcctccttggacctgatctctaacacatgtgactcactgggctttttagatatctcttgtccacactccacaccctggccagtctgggcttctcggtccagttgtgagctgagagccagagttaggtattggaacatggccagcgctcacactgaaggcatgagctacatggttagggatgatagtatgcagtggcgacttgttcaccaagtgacaccaatcaggtacaaaggtgacttgggaagtgtagccaagtgatctgaaaaggcacaaggtgccttaggaagtgacatttaagagcagaccagtctggagtcttttggctagaagttcatgcagtcggaggatggagatgagttggtgttggaggttggtccaggatgacttgctgcagagctcagcatgcatcctcggacctttgactggggatgcgggatgcgttcctgaagacatggttactctaagcctgtgttcttgttcccacactgggaaagatacctggagtatttgctgtggctttcattcagagccttagatgattcttctgaaggtaaagtccgtgtactgttttatttaacaagcacaaatcacctttaggtacaggcacctgagaccaggaaagtgaccaggactgtgtgtgcagaactgggactagagcctggtgctctacagaggtctgaaggcccttgtgcactgccgccatcttttccactgccctcggctgactttgtttcttctgagcaatccacaagatgtcctacaatgattaacggaggtgtgacaggaagtaggggagggaacaggcctacactccgcatctgaggcttggttcatgagcatcccagtgtgatacctgtctggagcagttctcacgtgtggcagctgctccccagggatgggagaaagaatactgggaacaccattttatgctttctggagttcatggtacaagaagcctacactcgacacatttattctctttaaagttttgaggtcacaaaatgcaaaaccagttgcatggggatcaaggtgaaggccgctgtggtcagttcctctcccagcccaagcttgtgacattccatgacatttgtctatgtcactccaaccatgacttctggcttctatcattacacggtcggctctgactatcctcctggttcccactcttaggggccattatgattatataacccttacccctcagctacaacccagggcagtcctcatggacttagaaccttagctcagtcacatttgcaagcgtcttggccataaaaggcacagtcatagttttttagggtttaagatataaacggccagagtgggtattattcatcctgacacaagattctactgagtcatcgcactccctaaagcatggttcccataagcccctaacgcccttttcttctaagggcccccaacgtgatcaaaagatagatggaaggcccacacagccattgatacccacactccttcacttacatgagtaatgtgttcaccagaagtgggttaggctcagctacacagctacactcactcttctttcccactgtctggtccatgtattgtcagaaaactccttaaaccttaggaatggataatgtccttcaaagatgccaagcccattagatcaacgggcccacaggaaggaaacacagcatgccaagtcccgtcttggttaacgttctgctgctgtaataaacaccatgaccaaaagcaggttggtggggtaggcagtttatctcagcttgcacttccacatcacagttcatcattgaaggaaatcagagcaggaactcaagcaggaccccggaagcaggaactgaagtagaagccatgcaggaacagtgctttcctggcttgctctgcctgcctccttatatagcccaggcccacctgcctaggggcagtaccgcccacagtgggcttggctctcccacatcaatcattaatcaaccatttatcgaaagtgccctctacagtcatggctacaggccagcctgatggaggctgttcctcagctgagggtccctccttccagctgctttgtgttaagctgacaaaactgaaccagctcagctcctcactctgacatctggttcatgcatccatctccatcacttctcccgtcatccccttcgtccctagatacaactgctacaaaggattaatggtttgtgaaacccatcccccagtgagacccgccctatgtcttgcccatctcagggtatgatgtccagggcagtccagttggcttttactctgtggaaggccagactctgaacacatggcatcaaaagttggcagaacagtttctggtaccgccattatgtatgcatcaggagctgaggggagaggacacatagcttcagggccagagacactgtgggcttgtttgaaacttgtgatttttttttctcctcttttatcttctaggcagacagatctttctagacaattgaaaagacccgtcaggcccaattactttgaaaaattctcattgtttctgtccattaccatctctcacccgccctttcccttgtgaaatttaatgggggtgtgggtaaaggggtgggggcttgaagataaacagagcagagcacccaggctctgggagatctcctgtctgttgtttctgagactccactgcccttttgtgttgtggcgctggctcaggcttctggaggccacagctgccttcactgaactattgcagatgggaatctggttcaaagaggcggggcattgggaggggccttcttggacatccatccagaaagaggccgggagacagggcatagggaggggccttcttggacatccatccagaaagaggccgagacgcgggggggggggggnnnnnnnnnnnnnnnnnnnnaggcggggcatagggaggggccttcttttgacatccatccagaaagaggctgggaggcggggcatcaggcggggccttcttggacatccgtccagaaagccaggcttgattttctgctcaagcttctcctccggtcttttcctgtgcacatgtaaaatttttacctacttgtcttatttatttatttttgagttctgggatgttgtctcactgtgtaacacaggttagccctgagcgcttgggttccgtcagcttttctcttcttggcttcccaagtagctgggatgtcggacacatgccactgtcaacaggcacatgcggccgccgccaggttttcctgatcactttgctgtagtgaatgtctcaatgtctaaatgacattttcgctttccggaccacagttgatgattattgaccatgacagagaaaaaccccaaataagttctaggttccactgtgtatttacagggcagggcccactctgtaatgtcctaggagattgggggtgattagcaggaagagatctggcagaaggtagtggcttttagactaatccgggcccttctgccagctgccctcactcgcttcacttcctggttctcagagttctctggtttgaacatctgttctcattctccactcgtgggtatggactgcttgccccgtgtacaaatcactctcttattggtctctcccagccctgatgatctcccagccctgatgctttcttatcgttgcgttgttgtaacaaaccactatacatttggatgactttaaaccacatccatctaccttctcagcagagatatccagtgtgagtggggatgtgttccttctgatgcctcctcctagattctagtctctcccatctctctaacctgtagctcccacacttctgtttttttttttctctgtgttgtctccatatttgctttgaggctcaccctaacatgatctcatcttaatgacgtcagtgaggattctagttccccaaaaggtcatgttctatagttccaggtcatatcagtttggagaggacactgttcagtctgccccagccccagcctacatggtgtcaggttttgacccttctgcatgtaatatatccatgggcaaagatccaccagccttgaatctgcaggcccctggggaagatggtagctgcatcatcaccagatatctacgtatgagccagggccacctccctgtgccagcttttctgatccctcatctgtgtccctggtctagacttctacctaaagacacagtcagcacatacctggtcctgttgtctggcagcctctgcttctccctgcagtccctgcctctggtaggatttcacactgggccatgcatgcatctgctgcccaccaggatgcagtagacctttgctttagcaggggcagcggggcagtgggtaaagcctacaccccgtacagagaactacagttccctaagaggtgtctggctcttgtcacacgcagctctgtccccagcattggcatcctacccgcaacgccacctctttgggctttcagcctctgttcctctgaatctccacagggaaattgttatgacttagctttgcacccaagttttccattttatcagctctgagggtaggcacctagatctcttcaatttgatggcccccttggccacacaatcctagaaggtgatgttgctttttcaaatggatgcagacatgtgggtgatagctggaagcctgaagtctgcgtagaacgaagaagacaaaaatgagccccacccgggctgccgcactattgctggtgagagaccagattctaatgcagctgttcccttattagtgtctacttcccccgcacactgactggacatgcctgttagcatggatggtagagtgtccgtgttgctgaagatgaacccagcaccctgagggaacattttctctgctaccaacttagaccccagtgtcttgtggctccaccagtgacttcagatgccactgaggctgtcactaagccatcattccctactctgaaccacaccatctttgtcctgggagctgctgcctgctcctcacgaactcccttatccttgtgatggtttgtgttgactgtgacctagacaggatctggagtcagctaggatgcaagcctcctggtacgtctatgtgttagcccccgagagatcaagggattgctctgtctgtgttaactgatgtgggaagatgcatcttaattgtgagcgggacccgggcctaggcagggcatcggggctggtataaagtgcaggagctgcttctcggttcctggctgtgataccatgtgacctcttctttcagcttctcccatcttgactgttccaccgtggtggacagggctcttggactatgggcagatataaattcttccccacttaagtttttgtcagggagacttatcacagcaatggaaaagaagccaagataggctccattctgtcctcataccaggctcctgcccagcagccacagcagccaagtcaaggtgcagatctggcgactcctaggctttggagggtcagggtcatggggacccctcttcctcaccattctgttgtaggttcttggacaccgccacccccttcattctcacagccattggcctgctcttctctctaggcttttgcacggtctgttggtcttgataggtggccatgcttcagcgacaaccttccagaaatcatgatggcgtcttccgtttcctcaccctgatggctcgctccgcctgtgctcacatcaggccccgttctgctcaccttcttctttcccagtctgtgtgtcttgcccacagggatcctgtgcgatagcatcacatttcacatgtgagtgtcattcagcaagaatggcgctgggactggagagagcaaagctaccgggcatggcttcccacagaattctgttgttccctccctccaaattagaaggcacacaaagaaaatgggatttaaggtttaaaccatggaacaaaatggaagtggtggtaatcgttggtttgaggatgaaagcaccaagtaggattcatccttagttcaggattgagtgattgtttccagagagattacagcaccatctgtgtgtgtgtgtgtgtgtgtgtgtgtgtgtgtgtgtgtgtgtggtgtttggtgtgagcatgtgcacttgtgtaaatgcatgaatgtatctctttnnnnnnnnnnnnnnnnnnnntccctccctccctccctccctctctctgtctctcactgtctttcactatctctctctctctccctccctctctctgtctctcactgtctttcactatctctctctctctctccctccctctctgtctctcactgtctttcactatctctctctctctccctccctctctctgtctctcactgtctttcactatctctctctctctctctttctctctctctctgtgtgtgtgaatacttaggcacaaggacaacctcagctgttattcctcaattgtcatcaccttggttctatttatttttatttcttcgttatatgtggctgtgtgtgtctgcatgtgggcgtgtgcacgtgcgggcaggttcctgcagacattagaggcaatggatccccgggagccagagttatggacagttgcgagccactgtgtaggtgctgggagctgaatttgggtcctctgtaaaagcagcaggaactcttaaccacggagccatctctccagtctctccctccattcttgagtcaagatctcacactggtctggaatttgctcagtaggcaaagctgtcttctcagccaaccccagggatccacttgtccctgcctctccagagatgaggtcacaagtaatgtccagcttgttttccttacacgagtcttaggtgactggactcagtccctgctgtccaggctatcaccctagccccgccaagacgtgaagtaagccagccttatccttagtgcaaactctccctggctctcaccgccttcagtaggctgtgctgaatctctttcctctacgtctgcactttcttcagttattacagtgagctagcgtgtcagaaagattaccaaaatagaccactctgggacatcggaggaaggacaggcttggtcatcacttgtcttctggtgtcctgcttagtaccaatgtgtactgaccacacggaaggtgtaacctggatcatcctttagtgtccccattggctggggactgcttggtagctcatagccacatcaaactcccgtctgaaaaactcacaggatctgaaagctgtttttccagcactggtaaataagctggcttctgaagactttggggcttgaaggcattgaatcatatcaaatgcacactaagaaaaaaagattaaaaaaaaaaactttaatagggccctggggactacaggcacttcattaaacactaattccttcaaaattggcaatttgtgcatgatatatattagcaattttcactttactgcagtgtttggttaagtaataccctttcccaaccatccttcacagaaggagtttattgaacattctcggttgggttttgctaatggtaatgttcagatgggattttctttccttaaaccctaagcgctgagaggcagaatttaagtgaaagttttacatcttggttcttggtgtgcgtgagcctgtgcacgcgcgcgcatgtataccttgtttcctgatacttggttcctcattggctgggatccatccagtagactaggatagctggctgttgcaccccacccccacccccacccccaggcttccacctgtctctgcttcagcagtgctggtctcacacgtgctcttcatcacacttggcttttatgtgggtgctgggcatcaatcctgagcacaccaagccctttacaaatgaagctaactcccagggctctttatgacataaatggttatgctcacagtggtattggatctttttgggtagttttaaaaccaggtcagagatgtattcaccctgtgctctagtatctttggactgtattgcagtctggctcctccctgtccccttggtcactgttcctggcctgtcccagtcttccgtgctacccatatgccttcagactgtatctcagtccagtcaatactgccagtgcaatttactatatgatcaatcacccaggagaaaacctgattttagttaatcggtcaagcaaaggtatgagtcggtatttgcttagctatagctccaggttctggggatgcatcagagagtaggatgagcctccctgtaatgggctgcatcctcccagctctgccacactcaccgtggcagctcctgtgaggcagctctctgtgtctgagctgttccctcctcctggcaatttccaggttgtttatcaagccggtctaagtactcatcctctatgggagcccctctccacagagcccgctgtgccagccccacccagatctcccctgcacttttcccgccttctgattattggcactgctgttttgctttggacgtcattagtttcacgcatcgctttctcttgctgcttgcgtctcagacactgctgttttacccgtctctgtattcttgcatgtggctctaaaagtgcctgggatgtgacacctcttctaagtctttagagacttattctattgtcttaaaattacttctatatgcgtgcctttgtctgtttatgtgtgtgtgagtgccagtgcctgcagaggcagaggcagaggcagaggcagaggcagaggcagcaaattcccctggagcctaagttccagctgtgagtcacgtgactgggtgctctagctagaactccagtcttcttcaaaaatagtacgtgcacttaacagctgggccatttctgcccctgtagccagtaatttaatcagggggtgcatttgtggcttgttttttttttttttaatgtgttttctccctttctatgtattctgtgtatcctgtccatagcccctcatcccgacacactcctgcctctattccttacaggtctctttcccgcatccttaaccttgctggttttttgttttgttttgttttttgttttttatgacttttatgtctttaaacagagtcacctgtgtgaccatagatttggaagtatctgctagagtcttttttatcttttttttttttttccagagctgaggactgaacccagggccttgtgcttgctaggcaagtgctctaccaccgagctaaatccccaacccctctactagagtcttatgggctcgttgttaggcataaaactaaggactgtccctccaccagaatccacccgtagccagtatttcagcagggagggagagggcatgattgtcagttgacatacttagtctcatgcaggcccagtgcccgctgcacagcagctgtggtgacatgtccccaaggggagtgacatggagagaccaagctggaaccgtgctggaagcttcctccctgctcactagattttatgatcctgaaaggggcggggtgtctgctgctagggagggaaagttatcagtggtcttactcaactgtgaactctccagactacgataagatacacaactgatacaactgtggcccagcagctctggggggggggggaggggcaccaactgctctcagagagaatgcatacattgttatttttctcgtggctgagaagtgatggatgttacagtccatcatcccagagaatcaagccatggggcaggagattgaggccgctggtcacattgtgtccaaagtcaggaagagagagaggagttctggtgcccagttcacggtctcctttttattcagccagagatcacagtctgcgatggtgctccccatattcaggttgggtcttccctcttcagttaaacctttctggaaacaccctcacagacacaggtagaggcaggtatccatggtaattgtacacccactgaagttgacaatgaaggttgctacatgctttggtgtaacccaggggactttctaacttctgtccaacagtggcactcttagctcatccataccactgagcctcctcttcctagtgctatagaatagacaagatcatggtctagaccaggtctttcttgtctgattgtcttctcagtgtggaaggtgctgtaccacagagccacactccccgttccccctcaaggctgtagtttaatccccaccccaccccaccatggcctattaattaccactcctatcacagcgtcagggcacctaacagaaatgatgcgagaaagatttgtttaggtttgcagttgagggcatatggtccacgtgacatctggtcacatcctagtgccattcagtaagcatgacttgccacaggaagtaggcctgggactagtgccctcaagcccaccacagtgatccgctccctccagggaggccccagattctaaaggtcctagtgcctatagaattgcaccaccatctaaggaactaactgtgctaacccacaggtgaggggtgggacacgcttcatgtttaaaccataacacctttgttatgcattttggattttaataacaattaaaaccctgccccccctgcatatttttcccattaatcttccaacattagattctcaggttatgtagcaggaaccacatttaaagaagttgtgttatataggtctccagagaattaattctgctttgagcttccgtggtcccacgatttcatgcaatacagaggaggcttctgtcttcctcctcctcctttcggtgggagatggacagggggtattgttttctcgaaacctcatataatcgattgttttgacagtaaaacaatagtccccattctgactggcaccacacttgaaatcaaagtcacagctaccgttatgaagaccgctctcatttcccagtgatcaatttaacatgattgtctctcggagaaaccgccgtgtaaaacatgtcagtgctatcagcgaggggcaagccgcgtccattggcttctctctgtcttctgctttggccgtttgatgtaactcatccactgtcatagcaaggggtttggtggccagtctgtggtctgcgatggcaccccgcggagcagtttgtagctgcagaagctgtgtgatccagctaaatggatgggttgtaaaccaattgtttctgtgtcatgccatcttgcccagactctgcagaaattgatagcatcttttagccttggagtctagagattcaatttattccatagctcacttagaaaagacaggaggggaaaaaaacccgaaaaacaaaaaaataccaaatcagtgggaaatagactctccctccaatctggaacgaactatacaggattatttaatctattccttctcttccttttttctacccaggaaagagattgtctcgttttactcctccctgagactctttcgaggttagctgttttctgtcacgtctgtccccagatattcagaccactaagtcaggaaatatcctatggctctctcttttgtgcacattcctattggctatattggagtcacatggctcccctcactgcagggaatcctggggagtgcccaggaggaagaggaagccaactatgaggaacatagagtgtacccacacacacgtgtgtgcgtgcatgagtgcgtgtgtgcgtgtgtgcgagtgtgcgtgcatgtatgtgtgtgtggacagctccctggggcagttcctgcctgtggttactcttgaacaaggtgctcaggtctgatgtgaactttaccatcagatcctctgaccccagtgctcagcattcctctgtctcttgttacttcccgtttttttttttttgtttttttgtttttttgtttttttttggacattttcttacagtggacacatttcctttcactggcttctttgctctctttttctgggtcattctcttccagaatcttcccttccctcacactttgtccgttgacctcagcattggctcatccctacccccgcttcctctttctgctggagctcccgaagcgagctgtgagagatggcgcccgcgaggggtcggttccggtgcaggttctgggctgcgtgctgtgccgggctctcaggacttggtggctccttctcttcttttctaggaaattcttcagaaatttgtcagactttccaagctcccttctcagccttcatcctcctgtcatttcctcctcttccccctttgaagcgtccatcaggagctgagtctccctgctcttccccagctccacggaggactctcgcactctcccccagctccacggaggactctcccactctcccccagctccacggaggactctccctgctcttccccagctccacggaggactctcccactctcccccagctccacggaggactctcccgctcttccccagctccacggaggactctcccgctcttccccagctctacggaggactctcccactcccccagctccacagaggactctcccactctcctccagctccacactaagattcagagggcatctgcagcaattagccaatcgttttcttgccatctgccagcatctttcctggctccttagttgaccgttcacttagcagccacccttccgcacatcccccgtcatctcttcagctcttccggtgtgtatacgccccttctctcacacacacactcatggttctccttaacccccgggctgaggcttccaagtcaagagtccagctaagctctctcacgaatgtcaggatcagacgtacttactctttctgaatccccttactcctttgtcccagagccatttatattcagtgcttctaaagtggagtaccctgatagatctccttttctccaacctccacatcctctctctctctctctctctctctctctctctctctctctctctctctctctctcattgctcatatcaggaagaacttaatggaaccaaatttactcggcctctccagcctgaagcctcgcctcatttatctctctctctctctcacttttctctaatcctcaaatccacttagtttaccaggctgatctcattctgcttcacaaacacttctcaaatctctgcttactgtgactgccgaattctgcattgtgactcgcccagacctctccccccttccctgcctctggctcctgtcacctttcacccacctagctccgagtgttcatttgtttcctctcttcactgggttagagtcccctgtccctaacatggcacccaagccacgctgatcaatacggcacatggctgcctcgtgcaaatcaaatctgctcctaccagataaatgagaacgaaatgaaaacccggcccagtgccgtgaaaatgaatctttgtggctcgggacacaattacgagtgacagtatcattggtgggttatgaaggagacggatcttaaataactcaggagggagcagaaattatgtgctgttgaaatgttgttcgataacagaaagttctcctgtgagggggccaatggcagcatccacgatgcagagattggcgaacattgctccgtgccaggtataaaggagcaaagggacgtttctgattggtgcatctcatacgccatcccacgcgtgcatacggaatggaattagctcatcgttaccagtccacatttgggtgctgcacccagacctgtgtcttcaaaaatgcatgcactgtggtggagagtgcgctctgcttcagcgggaagatcagacatttgcttcatatccagagtccgtgcgtatttggattaggactttgtctggccactagggctcctcctgatcgctgcgtttgatccccctagcctcaaggctctgcagtgaatgctgactttgagtgagacaatcttagggctggtgagtagacaacggtgccgctgcgtgaattctggaagatcataaatgcttagaaatatccttacttagagcaaaggaggttctagaaggtgtggtcattcaatccaagcagccacccgtaagtgtccattaacccccaaccttgggtaatgggtagattcaaggtcctggggcccaattatgtgacttgtttacattcactaaggttcagggttgaaagcacaacagatggctctcagtgctgtggtcacgcacccaagcacacaggtaggcctgtgtatgtgttctttagagtttaatagcatttaaaatgtaggaaagcgtaagtttagactcagggtccaacttaagattagggcagaaatgagacatctgcatctcactctttagttatctgttaaaacagtggaccccagaaatgggaatttccccaggagtctcttgatgggagacacaaggggctgatgcctggtgccagccagaggagaagcttgtcttctggctgacaatccgtcagaccacctcgcaggagagaccaggaccaagacattgatgggtgatggacaggaccctgtccaggccaatctgcttatttggcttccgtttaaacttaaacctcatgctagtgcccctaaggtggacctgggatgagggaggtggtcgccgggcctctttgttatcctttccaatgtggccgcatttaataaatcccctccccctctcagactttagcttctccttggcagtttcattgccatgttgagggtgagaagctgaatctggcttgccgaggggcttccagggctcaaactctgaccttaggcactccagagacactgagatgacgaacaaggaccccgcttgacacaccgtggcttcattcctgggcccttgaaatactctgtcccagttagtaggatttttgggaagaattttccagctcctgaaacatttctgaaaatcaaaatacaagaaaaaaaaaaagagccttttcttttttagaaaccgtgatttgagtgtgaggcaaatggtatttccaaggcaggcagggagcaaccggggaaagtttcctctcttaaacacccactcgaaaatcaagatacagggaaacatcacgggtaccagagcaagcttgcgtttagtgtttagctttgtattcagtgaacacagggaggacaaatggaagcagggctctgctcagcagagctggtattttaatgaccatttttcccccctattctatatttgccgtaatctgggcaagcgggtacacaaataaccacaatttgtaaattgcgcctgacatattttctgctctttgaattccgtgagtgcctgcagtataattagaaataagcaatcttttacatcagtaataggaaaagggacgtggtttctgcatgcaaataagacgttacctaaacagaaaattacagttgcaaagcggactgtcgtcaccaaggaagaaaggggactgttgaaggcggtggggacggctgccagctttgcaagctgacatcgtcctctgatgtctactcacctgctgagttgcacaggtggacagaagaggctcagatgatgcaagaccctaaggagaaatgcattgggcttccctggtgggcctagaatgtgggctgaacagacccaccagtataggtcctcagcctaatatacagttctgtgtgtgtgtgtgtgtgtgtgtgtgtgtgtgtgtgtgtgtgtgtgtgtgtatgcgtgtgtgtgtgtgcatgtggaagccagaggtcaacctcaggtatcattcctcaggagctgtccatcttggtcaatcttttatttgtgtatatatgcatatgtgatatggtgtgtgtgtgtgtatgcgcaagcgtgtgtgttcataaaggtgcttgtgtatgtatatttgcatgcatgtggaggctagaggctgatgtctggtatcttccacttttctctctgtcctgtcttttgaggctgaatctctcactgaacccagagctcactgactgagtggacctgactggccagcaagttcttggggatctacctgtctccatcccctgtgttacagggttatgggcatatgtgactcacctagctcttatgtgggtgccaggaatctgaatccataggattatatggtagtcactttactcaatggagccatctccctacccattaatttaaaattttaatatatatacatacatatatgtgtgtgtatatatattatgtatgtatgcatatatatatacatatacatatgtgcgtgtgttatataatgtgcatgagtattttgcccatatgtataccacgtatgatcagtgcccatagaggccagcagagggcatcagatctcttggacctagagttacacgtgtctgtaggcttccatgcagatgctgagagctgcacccaggtcctctatgagagcaacagatgctctgaagcactgggccatctttcagtccctacctttaccttgtttcgggtgagagggcctcttactggcctagaactcactaagaaggcagtgccagccaatcagtgaacatcagggacctgcctgacttggtctcttctgtgatggggattgcatgttgccatacctagcttttgaatattgatcatactcagattcccatgctgggacagcaagccctttaaccactgagccgtcctcccagctctgctcagcccctccccacatgggtccatattggaaaaggaaggaagagttttcaatggtctgacccttttttaatttcaattaagtttgtttgtgtcattcattctttcattcattcattcattcctgcaatgagtgattcttttctgtgacctaaactactgagctgctgttcagataagacattcagttctatgggggggagcttttgagcagagacctgaatgatataagggaggttgtcaggagaatgtcttcagagagagtgtgggggtcagagggagcaccccacagagaaggacctcagactcaaaacgcatcagtgagacagccagacctgagagatggttgatgtatctaagggataatcaacacgccagtgtctgccacctgggggctatgagtagacagaaaagaaagtaggagaagattccagaagagcagacagcagcatggccagggaggatgttgggatgtcaggagaggctggtctcctgggagccacaggggaggtgtgttcagagtctgtggcagaggacttaatagacagctgccgtgcagagagagtgtgtgcgcagtgagatctggggagggaccaatgggttaggctggctggagactgctgttgaccctggctagagtatccacggtgggatggtgatggggaaaagctagttagagtgggtcagagagagaatgagagatttgaaagtgaagacaagggaagtaggaggctctaccagggagtgtctgttggaaggacactgggaggacagagcaatggcggctgtgacactcatgggaggacagagcaatggtctctgtgacactcatgggaggacagagcaagaggatgacaacagaactatgatctcatagaactgagccacaggaatgagaggagctgagaaatcggtgacgggagaactgcgcgggcagcatagttgggaggcaaaagatgtggacagaataggaacatcccttgtgtattcgatgggaggcggagtacatagggagtggatgatgttttctttccatttttcaattacataagaaatataagccatcaactatgaggaaggtgaccttggggactaggcacctttggcaattggaggctgcccttctcggggggtcttacagaagcactctgcagcccagcaagacttcaagctggggctgacatcctggtgcagtgttttcctcaagaccatccacttgcttagaggccggtgcagcttaggtggagagctgacattagccaggcacatggggaaggatgtgtggtttttaacaagggaccactgctgcgtacgatggggaacgagaaggaagaggtggtgagagcccaaaagtggtcgactggtccccatgggaacaaagagtcataagtctggagagtcattgggaaggaattgggaatgcgaaaggccaggctgatatgagagatgattcgagtttagatgtgggggttggttttgttgtaacaatgtcagtggggtgtagtgtacaatgtagtgctcccttaatcctagcactgtggaggcagaggtaggtggatctctctgaattggagtccagcctggtctacaaagcaaggtgcaggccacccagggatgccagagcttgtgtagtcagaccctgtcttcaatatatcaatcaataatccataaatcaataatgactttggggctaaccggcttaatgagaaggacaatgccgttggaagtgagacaggaacagaacacaagcattagatagcttagccccgtggagactgacagcgcactaagtgtgcttcacttatcaaagatgtgaccctttagccagaagtggtagacagatgttaacaacaacaacaacacagccatgattgaactatttctggccttgggatggactcacagcgtcatagacccagcacttcattagaacaaacaggaatccaagttaagttgacatcacaggaacagcagcaggctgtgtagtctgaaggcagagaggaagctgtctgaaagtgcagggaaactctagaagctggttttagaattcagatatagcccatagggaatctcttccattccagcaaccccaagccctaagatgctgagtcagaattgctgtgttctcctggcattctggaaccacccctcccacctgtcagtcaagtgcaaagcccctttgtccacaggcttcccaaggcaatgagagaactcaagaaagtcaaggatgcttccacagcaagaaaaacctgctataactgctatgtctatacatttagtgatgaacctgtcacaatgtgcatttctttcccaaatgaactgtaggcctctttggtccaaaaaaacatacaaacaagcaagcaaacaaacaaacaaacaaacaccctactgtttgggcacctgttaaagttattaattcaaaaggagttggtgactctctgggtttagccattctccacagagaccatcatcatgggctcctcgtggtatattttaattcatctcgtgccttccctgtttgttgagttctgtgtccacaagagacaccaggcctttgctgcttgcatggttcatgactgctagcgtctgtttgtgtctgcttggcgttgaaggctgcctgacttcagtagagagccagtcaccaggtggcaaggctgctcctctgctcagaccctcaaagctcaggactgactttgttgaatgaagaagtcttgcccacagcggctgccttactttacagccctgttgctgtgataaacaccacaaccaaatccaacttatgggaggaaaggatttatctggcttccacttccacatcacagtccatcatcaacagaagtctggacaggagcctggaggcaggagctgaagcagaagccatgaatggatgcttgctggcttgctcctcctggcttgctcctcctggcttgcttcgcctgctttctaatacaacccaggaccacctggccagaggtgggtcagctcaggggcgtggacctgccctcgtttatcgttaattagtaaccaagaaaatgccacacaaacatggccacaggcccatctgatggctgcagttcctcagttggggtcctctcctcccaggtgtctttagtgtgtaccaacttggtagaaactaagcctaaggattctatgccacagctttgtgcaacggcccctctatagtcgtaggctctatacttattacggagtcaaataaccatgaatagaaagcgtttgaaagcgttgtatgagcgccagacctgtgcaaaccttttgtgtctttgctgcctaagccctccagtacaactatttatatggcatgtgtattgtgttatgtagcattgcaaatcactcaggcttgaagtatacaagaggacaattctgtgtgaatattatgtgatttgagacacctgagcacccacagatattcctagtgttcctagtggggagggagattggctcaggaacaagttcccttagggttcagaaagatagccctgtagtcagtgaaacagggtgggtagaacacagccctctgaggagtccttgttgggactgcaatggagaatatgctggaacagctccacagtgcgcaggctaacatggtggggattggaagtggcctgggaaaagacctcacctgtgtgaaagagtctacatagttaatgaactattggaacacttgtgactgtggtgagctgaaatgttgcaaggctcagagccaaattattctggggagtttttcacccccttagatattgttggtcatccctacgtactaatatcctgtgactgtcaggcaaaaatcagaaggcacatatcaagccctttaactcccacaaatcccatggctgagtgtgtcgtcagctaccatcctaggcctgcagcagagacttctgtttgtcgtaccgtacctccctgatgctccaccaacggatttaaaacaaaactgggacttagagtagtggagctgactcagttggtaaagcgtttgccttgtaagcatgaagatctgaggtccccagaaccaaatctaaatggggtagtatgtgtctgagatagaaggcagagactggcagctccctgggaccagctagcctggactgcatggcaaagttccagcgcccccccccccccaaatcctatgttttagtttgtttgtttgtttgtttgtttgttttcaagtcaggatttctctgtgtagcctccactgtcctagaactctgtatgcagaacaagctagccttgaacccagagatccaattcaaccgcttctgcctcctgagtgctgggattaaaggtgtgcctaccaccaccctatttgagaaatcctattccaaacaaaaggcagaaggcatccaaagaccaatagctgaagttgtccactaatgtctatatacatactcacacggaccccccccacacacacacaatgttccctctacaattgtgcacgtgtacatttaaaaaaaacaaaaattgtatatttatgactttctttgtcctctttctctaaaaccttcatgagcctgttgtcacagtagttttggggggttaacccaaatccatgtttctgagcctcgataacctcaacatctggaccaaagattacctcttattctgttttacatgagtctgtctgtgactcctggcttttaacagtagcatgttgctcatttgggccaagttgtagggtagaccagaaggcccacccaaggccactatggttggttctaacagattctccttttcatggccaggctcactctctgagaactacttgagcccaatgggaggttatacttccaactcttccaactcttcttacttaaagatggcaatcttttccctcccccgtaagaagtgacaagggacgaacaatagctgtcctcataactctgcactggctacctctttttgatgaagccagcacacattttaaaacatttattttatttcaaattatgtgtgtattaagggttggggggcagtatggaaatatgtgagtgcagtacccacagaagccagaagggggcagtagattcccctggggcaggatagacagttgtgaagcctctgatgtaggtgccagggccccaaactcaggttttctctgcaagagcagcaggcactcctaaccccgagccatctctccagccatagagcacatttaaatcggctctttctcccttacagcctgatggtttattgaccatctctcagtcaaatgagcttctcaacccgttcacctgctcactagcaccacgctgtcagccagaagaacacagtgcagaattcagaatgtatccctagatgccctctgattacccagccagctcccgccccctcgtgagactttgagaagctttggctgtgaatgaggccccactctcgtcatttgcaaaccctacaggctccccaggtagcccactcaccatgatgtgacatgaagggtcatctctgagattttcagccagactttatcagcagccctgctgaggaactgggaaagggttgggagagaggtgggctcgagtacatcctagaaagcgctcatgccgtcttattttccgggtctcgggattccactgagcctgtccatctacaagaggtggcggctgcacagtgagctgtcttccctgttccccagagtcactccgtgcttcaaggacgctgcgagctctttcagcatcccgcctaagctagaccttacttctggggctcttagggtttcagatgacactcaggctgccagattaaaccgttgtaccaagcaacttgcatggataaaacagccgcgctggctggcttactaacaagcttagaagacttctgtgtaaagctgcagcttgggatggggcggggctatccctagagtattcaaggcagacaccctatgctgcggcattgtgagagtttgggaaaatggtcttaatcatcaaaatgtatgagtgcaataaatatatcaaggtataattgacatttaaatacctacaaagtgtaaatatttttaaaaatttagcactttaaaaagtatggctgtgtgttttctgtgtgagtgtgtgttttctgtgtgagtgtgtgttttctgtgtgggtgtgtgttttctgtgtgggtgtgcatgtagaaggccagcggtcagtcttcctggaactggagttacaggtgattgtgaacccctgatgtgggggctgagaactgaactcaggacctctgcaagagcagagcctgctcttgcccgctgagccatctctccagtacatcccgtttaaatatctttagcactaaattaaagtaacatttaaattattattacgacaaccaagttaaaggtctaatagtatacatttgaagggtactgatccaaaaattcgacctatacatataccatcagcacggtgacaatagctcctttccattgctgactgcattccatggtgcggagatgccaaactgttttcccagtcacctgttgactgacactgagcctgagtgcagtcgcgggctatcgccctcaaagctacagcaacgtgtgcctaccagccgttctgtggacacacaccttcatttctgcctggggcataggatgatagactatgggatggatgggtgtgcattttaatttgcatttttctttcaattcattctctgagaattccctacgtgtagctaacatataatggccgccatgtttttctcactccccccccccccccactaaaacatatgaaacacatttcccactcagtctcacaacctccagttctttcacatacgtaccaacagttagtgtgggcagtcatatcattttagcttagtaggtgtgttatggtatctcccacgtttatttattttatttcacatttcttcagagtctgataagattgaacatcttgtttatgtctatgctgtccacatatattccttgccaattggaaaaacatattggttttctttggtttgggacaggggcttactggcacagattgcccttgaactcctgagcctgatttgacccccaccccaccccctcgaggataaggtctaagcatgtatacctccgcacctggcaaatggttgtctcatgattagattttggaagtaccttatatatactgttaagtctgttggtttgtttcgggtgttgtgccggtcagttttgtgaacatgagagacacccacacacacacttggaaaggaggaatcttaattcaggagctgcctccgttagattggcctgccagcaggtttgtgggggctgctaatccatctaaaaaggcaggcacactgtgggcagggccagctctaggcagggggccctgggctgtatagggaatgctaaccaagcaagccgcggtgttcctctgcttcagttccttcctccaagttcctgccttgatggactgccacctgcaagttgaagtcaactcctttgtctccccagtgcgtttgctcaggaaacaaagcaggataggttctagaaattaaagctggggcctccggatgctcagcaaggttctaccactgagcaacatcccagcacttcttacctcaagggtttcatttgggcaacggggtcacacacacacaaaaaaaactacaatttttttttcaagtcagaaatatgattagcgaatattttgtctcgatggctgtcttttcagtatgtcttgaggaacaaatcgtcttaacttcgaagccattattaattatttctttaatggatcttgctttttttttttttttgtaagagcagaaatccttgctttattatatgtatataggtgacagagttttgtcttagaggtctaacagtttagggatttaggctaggttggtgatccatcgtgagttaatttttacgtatgcagtgaggtgcggatctgagagcctctgtgttgtgtgtggcattaaaccgttcaagccccacttgtagaaaaggctagggtgcctttccgtggatctttgaattgaatcagttaactgcccatgtctgtctcccttcatcttctgtatggacccggcattatgctgatatggaaatatcccagtccctgaagctgttatgttatgttatgtggatatgttatgttatatggaggtgtgtacatagatgacgtgtgtgagtgctggtgcatgtatacagcactgcacaagtagaggtcagagggcaactgtggctgtcgttgccatctgccttatttgagacggggtctttttgttgttgaccactgtgtatgtcagacttgctagttcacaagcgtctgacatttctcctgtctttacctccccgacagagaaatgttgggattatagacggcagtgagccccggggacctgccagctttgctttcccggtgcagagataacaagtatgacccaccacacccaagttgttgaaattagtattaatttttacgaatgtggttgttttgcctacaagtatgcctgtgcaccatgcacctgcagtaccaatagcggtcagaagagggcatcagatgccgtgcaactggtgttgtaagatagttgtgaattgttacttgggtatggagacccgaaccctggtcctctagaagagcagccagtgctcttaactcctgagctctatcacttgagcccccacacccaactttttatatggacgttgggacagaacccatatgctcatgcctccttggcaggttctctaccagccgagccgtcttcctagcccctctcccatgtgtgttctaggcgttgtaggacctgacatttggagtaaccaccatatgagacagccatggttcaaggctatgctttacaactctgactacgaaaccactgttccagacaactgttttgatctcccatgacttttattataccctcttgtcctcagacttcagtagctgcacatacttgttaaagctgcagattgcctaaacgtaggttaatctctcattggatttaaatgtcaagtttgaggaaaatttgcagaaaagtatgaagagaaatctcctttgttcgaaatttggtgaagatttcccagcgatttcagtgctgaacactagctccctccatgtgaggctggggctggaaagatggctcagtggttaagagcactcagtgttcttgggacgggcccaggcttagttcccagcactcaactggcgccatacgactgtcggtacctccagttccaagggatccagcactccggcctccctaggcacgacacatgcacacaatgcacatacatgcaggccaaacactcgtagcacataaaccaacctttaaaagatgatctgaggtggggtggaagggctccctggcgcagggcccctccaaagagcatcttgttgcttctcctccaggaacccctttggttgggatttaataactcagggtggctaataaccagggaattgtgtgagactgtttggcgggtgtgcgagtgcattttcctaagaagtgtaccagcacatgccatccaattctcccaaatgtctgtacccatagaaagacattacgaaccgcatggtagggctaacctgctggagccgttggggaaagcaaagcaaccattcagcatcttgacaatgtgaggtcaggcacatggcatgtcatgatattgtatatcatccactgctggcatggggtcgggcacatggccgtgtgatcatactctgtatcatctgcttctgtcttcgagactgatttgtagaatctcagtgtcaaggtgaaggcacacgagcacagcttgtgctatagacacagaagcagggttggccgggtcggatggcgttatgaaggttcctgtttctcagtcgctgccttgcaatctcaagggtctttttctcttgtcacaagaagaaaatcatttctgcaagtgtcagtgttgaagctggggtcagctccacggtcttatagaggcagatccacagatccggaaccaaagcgggtgcttgtgtgtgggtgtgcatgtgtgtgtgtgtgagaatgtatatgtttgagagtgtgcatgagcatgcatgtttgcacatgtgtatttgtgagtgtacgtgtgtgtgagtgtttgcatgtgagtgtccatgtgtgtgcatgcgtgtgtcagtgcacaagtgtgtatctgtgtgtgcctgtgcatgtatgtgcatgtgtgtatgtgtgtatgtgcatgactgcatgtgcttgtgtgagtgcatgtctatgtgtgtgtatatgtgcatgcaagtgtatgcatgtgtgcttgtgcgtgtatgtagtatgtatgtagtagtatgtagtctggagttcaactttgggtggctttctgatggctgctcaccttgttattgagacaaggtctctctgtagacctggagatcacccactagacaaggctggctggcctgcgccctctccctagagctccacctgccctgtgtatgcctgctacacacactgggatttctagtgtgtgccaccttacctagctttctcagtggttcttggcaagctggacctaggtcctcctgctcatgtccaagtcactgtaccaactgagccacctccctaccccccactgctcatgtccaagtcactgtaccaactgagccacctccctaccccccaggtgctttttattttttagtaccataaattaattgtgcaagaaaataggcttcattatgttttgacaaatatatatgtaatgtactttgtacgtttccccctgttactcttccttgccccatccctctttccactggtctttttctcttcccaagtactccctctcctagctaataatgtcctgttgggaaatctaggctttgtgtaggtgagaaaacacacggtctttgtctttctgcatctggcttatcgtagctataacaatgatttccagttctgttctctttccttcaagcagcatgattttattcttctttagggctcagtaaacagccattccatatctacatcccggtctccgtatccatccatctattgacgaatggctgcttgcgtgatttacatcgcttttgtgaatacttcaaaaacaaatcctaggcggaggcatctccattgtgtgctggtctgaattccttcatatacatatatatatatatataccttctgatatatcctcaggaatgatacagctgagtcttatggtggttctgattttaggttttggggtaccttcatattgattttaatgaagaccagactaatttagattcctatcagagaggcataagcactcaattcctggcatcctcgtggcctttgtcttttctctcttattttgctgtctgactggggagggagggagggtgtctctgacatgattgttcctcattattttcttattgaaacagtctcactgtgtgtttcggccggcttggatctccctgtgtggctctgcgctgtcttgacctgcctgccccttctcctgcctccgcctctgcagtggtgggatgcaaggcctgcagcatcacactggaccatggcatagctttgatttgcagcttcgtgatggcagaagatgttaatgtgtttttgtacttactggccgtttgtacttcttctgagaactatctcgttagctttttggcgtgattgcttattcctctggtctttcgttcttctagatcgtcgtatattctggactctcatcttctctgtgagatgaagagctggcaaccaggttttcctgctccgggcgctgcatcttcaccctggtgactgtttcttttgcttgcagagggcttcgtttcctgcagcctcactttgccagttcttgttgtttcctgagctgctcagaaagccgttgaaagcgtgtttcctcctagtaggttcaaatattcaggtctcacactaagccatttttttaactgattttcccaaagggtgtggtggtttgaaatgagaactgttcccccacagactcgggcgtttgaatgcttccttcccagagggtggcgctgtttggggaggtttaggtggtgtggtcttgctggaggaagttcttcactgggagtgtacagcctcactgaattcccagtgtattctccctccctctccccttctccctctcccccttccccnnnnnnnnnnnnnnnnnnnnnnnnnnnnnnnnnnnnnnnnnnnnnnnnnnnnnnnnnnnnnnnnnnnnnnnnnnnnnnnnnnnnnnnnnnnnnnnnnnnnnnnnnnnnnnnnnnnnnnnnnnnnnnnnnnnnnnnnnnnnnnnnnnnnnnnnnnnnnnnnnnnnnnnnnnnnnnnnnnnnnnnnnnnnnnnnnnnnnnnnnnnnnnnnnnnnnnnnnnnnnnnnnnnnnnnnnnnntccctcccctccccctccccctctcattctctctgcagcctgccctctccttttcctttgctgttgaaggatgatgctctgtgagctctaggcccttgccatcacacctgccacatagcactatggctccccactaagatggacccctctcccttcggaaccgttatcccaaatcaacttcctttcagaagtcacttttgttcatggtgtttctctcacagcaacagaaaaataactaatgcacagggcaagaaagaaagaaaaaacctgcatcaattttcagctccttcgaaggctaagaggctgtcttttgccaacacttgcttttggcattgtggttcagtagctgcacgggtgtctctctgggtccgccattctatcccactgccatatgcacactggtgcggctgacctgccgccgccttccgccttctggtattgtgactctgttgcttagtttgaaagcaggcactgtggttccccagcatcacccactctgctcagcatggcgacgattctttggtggtttttgtgcctttccatgaattctaggattcacaccccccccccccccagtgtctgaagaacgtcactggaattctgatgggaattacatcaaacctgtaggttgcattgtgataccccactgcaagaatactaactcttctaaggcctgagcttagaagcttttccaccttttagagctttttttgtttttttttgttttcctttaatatttttttagttctcctcatagaagtctttcaacttaaagatttcttcttaggtagttgactttttaaactgtatctatgttttgaggttgttgtgttctccttatttttttccctcagaatggtcagcattggtctagagaaagctaccagtcttgtgtgttggctttgtaccgtgagccttcgcttgtaacgtgattatcagcgttaagagttttctggagaagaccgtagggtcatgttgtctgcacgcaatgataatgcaaagcggggactctgggtaaataggatgggagatgtcttaaccataagatcactgtgctctgacaagagacgagagaacgcacttagagcgtgacattagcaggcttaatttgtcttccaaaagacatttaaggagcctcggtacaaaccacttaggatgctaagaacaccgaggtcaaattgattattaaagatggctggaagcgaaggcagccgtgtttgcaggggaggaactcagcagtaactgctgcagagaggtttagaagggagaagagtctcctatacccgaactaccctgaaatacagcggagggtctggggctgccaggctagcatgtccttcagcctttgggcttggaaaagatactcttggggtcaagcgtggagccggcgtggcagccccacgcggtggatgagcctcagcagtgatctggggcccatgagtcattatcgaatctacataaactgttggaagaaatggctcccggcactgacatggccccatccggcatctgcaagcctttgttcagtgactgctccgtgactctaatgttctctgggtgaacctgtacaaatggagcccttggggctcccgaaagcttgcattctgaaaccggatacgttgtcgttttaggtatatatgaaaaggaatcagggaaggaaaaccttggtggctctttgatttctagggaatctatgagcagagagactggcatatgaatctctataacatctccacggtggagctctggtctgcactgtcccaccctgcagcctggggtggacattatgttgactgcatgaactacataaatgtctagaacttgggactgtcactagagacattaatgaggtgctaggttatgactcaaggagacctactttattttttatattttaaatagttcatttacttatgtttgagccggagactcctgtagcccaggatggcctcagacttattgtggattgagtgtagggatcataggcatgttctaccactcctggtttatccagggctggggccctaacacattccaggcgagccctcaatcagttgatccatagcttcagactcttgtattgccttttgaaaattgcagcttgattatgttgacaaacatgatgcttgggtttcataaacagttaactaatatagaggctccacagaggaaaggaaaaacaacaacaaccccctaccaccaacaacccccaaaacttaccacacctctgtcccagaaataacaaatataaccattctttttaaaaagcacttttaaccacctcttttaaagcacttaaatttaaatgaaatttaaaagtaagtataaagtctgattttattttaagtgaaggtcagttaaatgatttactgacataatcactcattcagacgacagagatacatagatgatagatagatagatagatagatagatagatagatgatagatagatgacagatagatagatagatgatagatggatagataggtgatagatagataatagatgattgttaatagaataaaagcatgcaaggctttctgtacctcttttggcaagttgttaaataaacagagaaatgagaaatggttatagacacattccagatgtgtagcaggagaggcagcagctgaagccgtcagccttggtgatgtcatacactaaatgatactgtgtgttaattccagctaatgacaccagggctcacagaggtgagcctgaaagaattcactccgtgtgactttcatgtcccctctgtctctgcatgcattaggatgattaatagggtccctgctctatgcagggctttgagaagcatgaagagaccactgagatcccgccctctagttggtgtccacataactgaggtgagccttggatggacacaccttaagggcacagcttgtctggggagctcttgctgacaccgccattttccctgttgagcccccgggaacagcaccaccaaggccagatctcgctcagcagcaaggcgtctgcttccgttgtgctctcggaggtcacagcctctccttcccgaggcactggttgaatgtcgcccactcttcagctgtggtctccactcaggtactaggagaaagtccctgtgtcttgtgtcagtaatttccaagctagtataggttgaggctccttttctctgaagcccagaaatgctcttaaattaacaagaacagcagcaataattaatccctacagttgaatgccaacgtgttatcacaagtggaaaatcccacgcgtgactgggtcttccccaaagtggttacacctgtgaccccagcactcagcagccagagctaggaagatgacagacacctgaagccctgcatctgttacttaagctaactgcacactgtacacgtagggcgtacaagaagcaaatgcattttctgtttagtctttgttctcagtcccatgatatctcattatgcacaagcaattatttttttaaaaatcccaaaagttgtaaaacccagattgtttctggtctcagtaattctggaaaaagtatatctaatctgtaggaagaggaaaaaaaaatcctaatttagcatttgtgtagagagaagaaaatttcattgtataagcaaatgctctttctgagaggggaaaaaaatcatttaatttcctttcttaattatagacttccagctctgggtgggatattaaaatgtaatccaacaggtgccagcgagaaagggcccccaccggaacagtctaagcaggcaaattaataatgtattattggattataacctaaaatataagcccatgtgcccagaacaacctaagtatctgactgaataaataataagtacaggagaaggagcgacatgtgttcagtgtgtagacactcgctccctagggaggaagctggtctctctgtcccagagcacagctttgcctagcagcttcaaggacctgagcacaggaaggtggggccaactgctgaccttgcctaggtgatcatggttaacatattagaggtcagtcatatgacatcgtgtgcactcctgcggtaacaaggacacttgatagctctgtagtcttctgtcctcaagtccccaagttccatctaatcacacacacaaaataacaaaaaaacaaaacaacaacaacaaaaaaacccaaaacaaatccaaaggctccctatagaatacttactgtcagagtttgggctggagagactggtccagtggttaagagcacctgctgctcttgccgaggaaccaggttcagttcccagcacccacaacttggctcacaatggtctataactccagttctagggcactgaatgagctcttctgacctctgcaggtactgcatgcacatgctacacagacatatatctaggaaaaactcaattcacataaaattttttttaaataaaaaaagaagctttaaaaattgtcaaagttgagtctggagatatggctcagtggctaagagcacacagcgctggagtttggtaatcatgttccgctgcttgccatgttcagtggtttgcagtgacctgtaactccagttctaggggatccagcaccctcttgtggcctctctgagtacctgcactcacatacacatacccacacgcaagcacatacatgcagaagggttttaaaatgcttcaaaatcatcacaaaggaagcaagtctaagagcttgtcccagcccagaggagctcggggccatgtgatgacctggtgcagtgtggagtcctggatgggatcctgggccagaagtcagtgtaaaccaagcaaatgaagtcaagtgaagggtggtattggtcagctgtgacttgccacggtcggtcggttctgtagctgtgacacaaataccatagcaaactaaactggcaaccaaagagaaaggactctgggtgatggggttgtgaggacgctgtactgttttttttttgtttgtttgttttttgtttttggttttggtttttttttttttttttttttttcatttctttggtacatctgaaactgttccagggcgagcaaagtagcttaagaggttaaggcactcgctggcaagcttgacaatatgagttcaaccccccggtcccacctggtggaaggtgagaactgagccctgcaagctgtcctctgacctccccaggcacactcatgtgcctgcacgagtgtgtccacacatagatgaatgaagaaaagtgctctcagcagtttaccgaaagctacatgcaagcgacggattattctctaaatactcaagaacgtcactgagatggcacggcagcaaaaggtttgcttccttgaaagatttacttatttttattttatgtgtgttcgagcgtttggacgtgcaccgcgtgcatgccgttgtcctcggaggccagaagaggatgtcaggtcccttagagccggggttacagttgtaacttgctgtcttgtccgtgagtcgtcaaggcaggctattgatttgggacttcaactctttttaatactggaagaaagctgattgagaaaacggaaatacctcacagctgcagcatcgtctctggcccctcctttccgtttgtttcctctaaggcttccggtcattctggctttttaaaaacatgtatgcgcatgtgcaagaaaaacacttgttatctgctgtaacccatgtgtgaagctttgtgacttaattgctccatttataccacgacctccagctccccacctccctttgcctgctatgtagcagcgtctgccttgttgccccgcccacgcactagtgggcggggtctcagctctggaacattctctgcaccttcctcacagcacattatttacttgtaagtgccactcccctcctggcccgcggcccacagactaaaataaagatcaagctcgcagccccacgtgtgcttgcttgcaaatgttctaccaccaagccacgcccccaggtctttgtctgtagctctgtgagcctcctgcctcagcctcccaagcagatattgctacaggcctgcgtccccaggagaacctgttactggctaggaagataaagtgagactctactaaaactcacccacagactccctagacacgaaactgcttccaggcagaccgggtcagaactgcatcgaatcaggcgatacctagctggtgactcccggttgcttgatggagagatgcctctacattgtggtaggtgggggtcatagaagcatcccgcactgactgctgtgtgagaatggggaaatacttcgtatccaccacaccccagtacagcaggagagtatatgccaggcactggcattttcagtgagataatacaggcgctcgctgagaggatatggtaataagggccaagtttggagcatgggagagtcttaggaacggcttagtccaaagaaagagactgttagaccaggacagaagagcaggtagcagggcccagaggtcagggagagttcctctgggctgggaaccttgttatcctgaaattaacgaagaatagatcttactggataaactgtctttaaaaaattatttttccacctgaaattcccaagaaaagcaaagcactaggctaccctttctgaggaagcagaaggtgacagggcagttgtgactgtcagaacttgccagaacagccttcatactgacaacctcagaaaccattaaaaaaaaatgtgtttctgtgcaggtgcacatgggtggaggtcagaggtcaacctcagtttcattccttgggcaccgtccaccttgtgttttgagtcagggtctctcgctgacctagaacttgcagggttctagggtacctggcttgtgatccccctcccccccccggggggggggtgtctgcctttctccgtcccactagagctgggattacacgtgcgccatcataccagctttgaaaagaattgcactctggggttggaactcaactgcttgtgtgtgccagacaagcacttgaacaactgagccttcctcctctgccctctggtgccatttggaaaatgaaggctaatcccgtccctccccaccccttgccccaaatgtaaagataaggcaaccatggtttggaataaagcccactcatctggttgtcatgggactatgggtgccattcaaacagctcacaataggagcctcagagacaggtggcttgaacagctctctcccagggtaaattacctgttatctctcttatccagcatccgatttttctcccacttagattacctttcatgagtaattgggggaaaataattggtgggtttcatttgaacattccaagctgatggtggaggaaacgcctggtcctcctggtctctctctctcttgcctattttaagtgacaccaaccatggcggtggtaattgtatctgatggtctaattgcccgcccttcaaaggagtcaggaaaatgggccacattacacagccaccaataatttcgccttgtgaattaccgttcaaagacctggtgtgatgggtgttcatgaagctgggcaagagaggggaaactagactggagggacatgacaattgatcacaaagccttctcctgcacttcctctccagagcacacccctaacgcacaccacagcttctcatttaaacttagccttaccatgatctaaggaaaatagtatgcattaatgataacacatagttattccatctaatcttctggtcaggccatacctaatttggttttagctaccccaggtgggacaccatgactttcctcttggcctcatctaactaaggacctggggcttgcgttctgcctgtggcacacaggaaagttgaaaaggcccccaggggatccaggtttctgtgatacaacggcttctagcaccatgtcggaacgagcagaatcaaatgtttaaaacttagtaatatgcccctgtagtgctgtagttcagatccaaaatatccccatataggcttatactgtgaaactcctggtccctggcttatggagctattttttaaaataatttattattttatgcatattagtgtgtgcctgcatgtgtgtatgtgcaccacttgggtgcagtgccttaaggggccagaagagggcgacagaggccctggaactgtgagctgctatgtgggtattgagactcaaacttggatcctctggaagagcagccagtgctcttcttaaccagtgaaccatctctctagctccttgagttagacatttgtgaagtctttaggaagtggggcctggctggtagaagtggggtcactgggaggcaggcctctgaacctacccctggttccaacttatattctgcttctgacctcctaccctccactgtgaagtgtatggcctctgtgccacattctggccacctggactttactacaccatccgtgatgcttctaaaaccaggtgtcaaaacagatgtttcctcctgcagtcacatctgtcaggtgacacggttatcacaagggaccaagacacttggctctttggttcctgcctaaggctttggggtgatgagagcctggcccttcctgtggagctcttggtcgtggccttctccctatagcaattctgtagtaaattctgtgcgttttgtagttgactatctcagtctaacttgtatttccagcaagccagaggctctggggcgtggtagaacaggatgaggagaaagggaacttcgactttgaccctcacagaagtggacgagttaggaagtaagccatacttcagggtcgaccattgctattaattaaacacatgcacaggagctgggtagccgggagacacatgatgtggcatggcagtcacatgtatgactgtgaacagccaggctcatggcttctccggacatgaggaactgaagagtgggtaggtttggaggtttctttccaacagtttagaacagcctttccctcaaaccgcctcaccttgcaagcttgctggtgcttgttggacaacctccgggaacccagggttctgctagtgtcctgggacgtcccctggacagtgactgctgtgtttggaatggtacctgacccccggctgccacaaaagctgcccccaacccctagcctcgtcctgtgggccgctctcagggacaggaaatctggtccaccctatttgtaattaaactttaagttgaagtcttgcccctgggcactgctggcaaattcaataatgattaattaagtggggggtatttacagcattaatgcgaacaggatttaaaataatgcgtgcagttcacttaattacattcccctagagcccacgccccgctctcaaaatgtcatctcagcacctagtctaattgcaacagctctgccatttcttgtttcttcctctgcttttcctttctgtccttctctgtgtctaactctcgatctattcacccctttgaggttgtcacttgtggggacccttccttagcctcgtttattcgagctgtggccattgtaattgttcttagtttcctttgtggaatggatttcttttgtccctatttttagggaaaagaatcaggaatgactggttctccaatgtcccatgctttgtccttcttgcttggtccaaaggtgggttgaggcccaaggttgaggttggctatgcgatctcccccatgctcggctggtgtgactaagccagtgtcccacatcaccaccatgcccccttcccctcagcccacttcaggactcactctgtgttgttgctcccggtcctttccttagaagcagggtttggaaggcgaggttttctgcctgtcctggttattccaggccttgtgctaagcaagagtttgtaggagctggatcagcagcagcaggctcatccccttcctttgcctagagtccccaggacagccttgcaagcggacgccactggtccttgtcctcaggagagccatcctgactcgggatgtggctccgccagccttctgtcacgcattgtgagagggaactgctagtcagggatgttacaggaggaggagggcaagccttgcatctagcagggagcagggcaggctccgggttctccgttttctttggagccatgggcagagtgagggatggctgcctccaggtgtttcacttccctgcgcaaacatggaagcagttactgccagcctcctatcgcctcgccacagcatcaaacatcgaggctcgagagggctgggtaccctgatcaggaatggaagactgggcttaagaaggagagagaccttcttgagactacccgggggaaggcagagtggattagaaggagtcagctccccagggcagtgcgaccactcagcctcgtgggacactggcggtagctatgtgaccaggatgctttgtgtttgtggtgtttccaccaaggtcatcagttctgctctccatccactgccattgctctgcagacttctagcttctctgggccacagcagttaaggcactgaggttgctcctcctgggcaggaacggtcaagctgagaatctggcctttgggtgtagacctgcctaagtcagccccaccccttcctccccagggagcagagtggagcccaactgtagcccaggcttccccatccatccagaggtatgtctcagagcatacaggtggcatgtgggtggagaacccccccccccaaaggcctacatacccagagatatgggtatcagatggcaatccccctcgccgccaggattctgtgggcgggctgtgttgggaatcacccgcctttgtcaggaaaggggaagaacaccaccatgttccctcactcaggaaagccgtctgatctccatgttctcaccgtaggaccctccccaggggcaggtgtgcgagcgctcctccacagcctcgtaagttccgcagtcctctgcagggcctgttacctttcctacggttcaactcagcaactacccggtgttaacgccgtgtcccacagatgcagggttcagtcccacaagcgcacctcaacctagggcactgactccaagtccaggtcatcggccgtctgggcttctgatcaactgaacaagaaggcgaagagtcccacaagcccctcctcacgtgtgctcaccggctagaatggctcaggggactatgggaaggaaacgcagtgggcctgtcagctctttacagaagaacacagaggagccggagtcaaggtacagggaaagagcctcacagagtgcacccgcgtttacactcccccagcaccccaggctccctaaacccagtcctcccaggtgttggctttcttacatgagcatgcttattaaatcactggctagagggcatgagtccaagctgcaccctcttcccccgctttggaagtcaagccagtgtgcggagatgaaggctccagccgtttcatcatatgtccagctccctggctacgggggttctttgcaagagtcctcactttgtcattaactgtgttctaaagggacatctcatgactctgcagtctctcttaacacccaggaaattctcaagggcccacagagatctaggaccagagcttaggaccaaactgtgttttccctactacatcactacaccgctcctcgatcctctccatttggagatctcagggtgatggatgacatcacccctgggaggaagccactggtgaggatgttcagagataattagatgaaggccaacaacgaaggctcattagcaggcaaactttttccaattacgagataagtgagcccatgaaacgacgcctctggcaaatcagtaaccgcgttaacgttggttggaggctcttgcgaggcggccaaaaatctgcaggagagtgtggccaagagaggtgagacagagggctatcaacatccagggagtgtcagggctgcgagggaccaacctctgggccgcttctttagctttggccttgagccaggggagggaagggatgggcagccaagcacacttcacaaatgaatagatggctttcgtatatgccattttcagaggcaaagctgggcacactccctgcctacgctacctgccagctgccagctgtccggagaccatgcaggtgttaaagaaagtctgcataggagctgtcgcccatttggatgagacccgcagtaccgagaggcagggtgctcccagtcaggtcctcagcaagtccgctgacctcatcatccattggacaacttgcccaaagcactgattgaaactgagaggccattcttttcctgccatgagccacttggctgagccggacgtttttataggatgtatgtgtgtgtgcatccatgcttatccgtctaacaagctaacacactgaatacagtttatttggggctgaaagataatgacaaaggtataggtcctcgtctgattatctttttttttttttttttccaagaggggcacatgagaagctgtcatttggtaggtaactgtgagaagaaatatttagactggggggggggggcagagacagagacagatagagagacagagatagaaacagaaggagagagagagagagggagagagagagagagagagagagagagagagactcttgtttttccttccttctctttcattccatttgcatttctaagtacccatggtcttctcccactatataacatcagcagggagaatctgagcagtcgagttacaaatcattttctttcctttttcatctctttgtctgaagaaaattattttttaaagatgcaccagcctctgttcctggcctcaggttctctggggaatgaagccagcattccgtgtttaacatgggcagccatacttcagatcctaactcctcatgccaggcatttatagaaacaactggatgtggtatgttctggttcactcttgctcctatccactacctccagcccaggatcctatacgaaagcctggaggtatttgctgcagggggatgccctccagagcatgcgtgtgtccgtctgtggctataggtacagaaatcagaggacatcttctttcttgtctgtgtgtgtgtgtgtgtgtgtgtgtgtgtgttttgcgtagtctttggggtggttggtaggggttgggacattagtctcttgtaatttcacagtcaatgttaaaagtaaaatgtaggcacattaatcctggaaagggttgagctcgcagggattcgggagtcatggtcttctgggtgccgaaggctggggcggggggtggggggtggctttcttgggctgttctccaaagaagagaaaggaaatacttaagtggttagagtagaaagcgcttacttgaggttgcctggcaatttctaattggttgggcttatattgagctgcatatggcttttgtgcctggaaaccccagttggggtcttcttgttctaatgagctctctctctctctctctctctctctctctctctctctctctgcatctctgtgtgtgtctctctgtgttcgcctttataacatgcacagttgacttgaagatgcacacgattagctgcaccctttcctcactcctcatccctagcagtcagagggaggaccacagatgctgtggactctaggtaccccacctcccatcctggtgtttccccattggtctcttcgacttctggttagtctctgggattgctcttctctacccatggccagctcttgtgcctgctcctccaaggctccacaacccctcccatcccagtggcttttcctctctgtccttctcacgctctcctgtcgggaaacctccctctgccgcggcatcgctcaggtgctgggggagggtggcatgcacgctggaaatgtctccatttttgctgactcttggaagatgggtgtgtgtgagtcacactcacacatggaggctaagggaggtgttcgcttgcacgtctgactcggtttaggctgctcccgtcacctggagaactgcattgcctgtgtattctgtgtcggtcttatacaagcctgtgtgctggcctccttttccccattgtctttcatggaatttttagtatgatttcagttgactttcgggagggggtctctgttttagtatgtgtatataagtgtgtgtgtgtgtatgcgcacaagtgtgtaccttttatgaaataattattcttggatacaatttagcacccatctctgtaatctttagacccgcctcttcctggtgttcattttcttcctatagctcttgctgggcacatagtgtgtcctgatttgtcttcctgtgccttaccctcctgttaatagtgtgcattccagaggccctgcctggctgatgcttgctctaccatacccactaggcctcaggctgccaagctggccagctagttctttgtgctacctaagtgttgtggatttgggcttatgtttctggcgggttctcattaatgcgcctgctttcaatttctggtactcagcctcccttagagtttccatttctcctctcagattcgtaatcaggtaagacagattgtatattaccttttaaatggcaagtccatcacagaaaggtcgtgtctctctctgcccgcctcctcgctgcacctatccatagagcatcatctgccccaggctgtggaccgtttccgagctggctgtcctctgaataggtctcccttcagctccccagggccctcgttatgggaacaagctctcagagaagggtccgtaggtctgtgatatctgttgagagtcaggttaatctcagctaacctttgcaacaatgtccagtccacaaagtggaacctcagactgcagaacgttagagattctgaaatgttagaaagggttttcctttctggtacaaaacctttttgtttctttctcttgtgtgtgagtgcacagaccggaggtcagcgttgagtgtctccctctatcctttctgtcttctttttgtgaaatgacttttttttttcctaactgaagctggagctcccctgttcagctggctcaccagcaagccccaggggtcaccccagcattttaacaggggttaaaggtttttgccacactctcggccttttaatgtgattgccggggatcaaactcagatcctcacatgtgtgcagcaaataatttacgactgagctgtgtcctcggccatcagtggtcctgtctgccgagatttgcctgggcacacaattttacctgaatgcagcctgccttgcaaaggatgtgtctatgggaaagctgcccgttctgcccagtgtgagtcccgtgccatccacaccacttgtccgagtgctacagtaaagcacagatgtcgctgcccatctgagccttgcaggggcctggggaatctgcattttaacctctccaggtgattctcaggcacaataaagcaaaagatggtttgctgtggatggccaagtgtccccagggagacatggaggtagtatcagggaagttaacacattcctaagggcttcaacagacagaatcccgtcagaaggctaaagacggctcatcggtacagtgtgtgcttagcatgtgcaaggctctgggttgactccctagcacattaaaaaaaacaaatctcttttgacgccaggttactattaccaaaggactaggggtgggtgggctgggggagcactaggttatgttgtaccagtacgctgttgaggagggggcaccgtttctgatttatttggaggtctttggaggtattttgagaagcaaaggggagagatctgtatgtttaaagtttaaatatgagagggaagggagagagaaaacctaatcgggcaccaacttccttggggtttgcattccaacatcgcccggatttcaattaagcaaagcacctcttccccgtccccagctgatcacaggttgccatggcagcaagcgcactgcacggtaagtccaccccaccccctctacctgcctctggtaaggcatagtctctgagatcctggtttctcagtagacacagggccctgatagctctgtgggacagagagcagtgggaggtcaagggcagctatttctggaggtaccttggctctgtgacttcaggaaatgtacaaggcagccctgttggacacagcatggctttcctattcacctgcattggaatgatccctgaacctcctgaagagacacagcaggtcatcgtgcgggcagcacgggtttgagctgcgcacacccccccccatacccccacccccgtcactctcacacacatgtccaggatgtgagtccatgggcttcccttgggtcctctgggacaaagattctcaaagggggttcccgaggcttaccttctgtatgaaggaaccttgattccatccaggttctgggttgtaactgggggagactgtagattccatcatcctgtgtgtgtagacagagactgggttcatgtctgtataggtagatgtgtgtgtgtgcagactgctgtgagcctcagtgactctcagggattgtctactggggctcactgagaaaagtaatcctcctgcctctgcccactgttgccgcagtcagaaggatgcaccaccacgcccagcatttcggattgggtcctttgtgcttatgaggcacacagttttctgactggtctacctccctaccccaacctgagtctcttagggatacaagaaaagaaaactgtggtttgtgtgtggggagtgggaagggaggctgtggtccatttaggggagggaggcagctgaggtcatgatctcctgagggagattcccagggaggagctggcaggagtccctgggctttcagcagcacagctcgggagaccgctattgtcatgacggaagtcctatagccaagctggctgcaacttgtgagcttcctgcctcagcctccaagatgaattacagtcagttgttgaccaccatgtcgggctgggagaacacattcataggaggtccccacagtgtttcagtagagtgcactcctaggctgtgatagctatggtgcctgcaacataggagggtcctgaacaaggattcccaaggttgtgccctggactcctacacagttgtgtgtgtatgtgtgtgtgatggaggtcatacatgtagttgagggggggtggtggagttctgtataactgtccccagtttcctggcccttcagccagtgatcattcaaacaacactaggaccttacccttgttttcagccagatgttttgggatttcctgaacccaagagaagacagaactctctctggccatggggggctcccttctctcaatctttgctgggtggtttctgcttcctgttcccggtgtgttcctgtctaagaaggaccagcgtgggggcactgttcccgctccacctcatttaggctaatgctctcaccaggcacgtccactctggagcatcagggcagccgtttctgtcctcactccaatttccctcagtcccacttggctggattcctaatttcttttatttctgctctttcagaaccaattttttctttgctccattagctcaaaaaatatcaggtcagcccaagatacctctccgccttccagctcccttccgaaccagggtttgtgttcagagggcagagggctccagactccagctggtggccttggcaggtcatctgacatctcagcactgtacccagtggtgggaatagagactgcataattgggactggagcagtagctaaggtagtaagggtagttgctgcttgaggacctgagttcaagtcccaagaactgatgtaaagagctgggtgtactcacatacccataaccttgggactacagagatgagtgtaagacaggaggattgctgggacttgctggttgtcatcctagcccctgtctcaaagaaataaggtggagagtgacagagtgggacacccaaggtccttctcagcctccaagtgtgcacagcttcaggaaccctcatgtatatgtgtgcacacaacatttatgcaacacacacacacacaccataaaggacagaaaagagcaaaaagatagcatcctttgaaaatgaagcagcctcaactccacacacacacacacacacacacacacacacacacacacacacacaaataacaataagatgtgtccccttgccaagagctaccgtctaaatggactggtaagttctgctacccgccaccccccacaccggaaaacaggttctcttggctcttccccttcttgccccagttatggacaaatccatggaccacaggatggcgccttttcttcccacaattccagtcccagttcagggggaagttttttaagaccatgaacagtgagttttagaaatttgccaaggaaatgggaattgaatggcttaatgaaataatattgaagctatattatatatatgcagatggtattcatatttgaggatgaatccatttatccatttatctgttcactcatccatccatacacccatatacccacccattcatcctttgtctatttgtctacccatctactcatcccctccatacatatgtccatatacccaccctccatacatactgtcttatctatccatccatgttgattctatctatctatctatctatctatctatctatctatctatctatctatactatatcttactagccaaccaaagtaggaccataggcagccagccagtgagcttcagggatacaactgaactactttatccccatctttatggctagaatatgtttttaggaagtgcaaacatgtatcagtgttaccctaggtaaacttaattagaagaacaaatctactatttcaagtaacaaaggaaagaaaagataaaggaaggttactttgtattccagagtaataccgagcacctgagaggacgcctgctcctccttatattgatgggaagtctctattatctttagctgcgggtaatcctttctgaaagttgaaaatgtcaacacaactgcagaattttaaggcatgctcgagttacgggcaaactgtggttctcctctaacatgggggtttgggatttaatgctgcttgacaattctgtaccaaattcaatcctgattcagtttttttctccttcaccacaggcaaatttcagttgtgaatagattaggtgtactggggggaacggttagtctttcttattgtatttttacacattcatttcgggttcatcgtggggctttgtgcccagcctgttaggcaagcggccctcctctcctctgcttccacggctggcctatagcatgagtcactttaatccccaaataacaagtggggagactcagacgcaggagtctcaaagatctttgacttgaaaacagtggggctccagtatgaatgtgggggcgcaagcagagtgagtgctgcttgaaagtggaggcacattggaccctattaatcggtatagttactgtttgcaaaataaaactttcaaaacaaactggtgaagagggaccccagttttccagccctggaggccctcttccctgcttctttcaacacttaaggggtggggggagaagctaaagtgagcacagaagacagacgtgagcagcctcccatggcttcactggactctgtgattggtgcccactgggaggactggatgccctggccagcactggtgcaatgtcagctggctctgtttgtaccactgcctgactgaccctctgttccttgctttgatgacagtctccaggagaggtattagaagaattgccacactagagaatggtacatgatctgcacgtggacatacatatgtgcctgtctgtctgtctgtctgtctgtctgtctgtctgtctcctctctctgcatgtgtgtgagacaaaagaggaaatatgtgcaattttatgtttgcagatatacattactttattttatagtatcattgtgtgtgtatgtatgtggtgtatatttgagtgagtgagagaaacagagacagagagaaggaggttcttcataaagctgtgagatgacttcccagaactttctagaagctcttctgcttcaggcaagggagcaggacctcgccaccccatcccccttttgaaaagaattaaatcaggacagaattataaaccagggagcaacctacaagagaagccaggacttcctcccttgtgcctctcagctcctctggtgagcttttcctgctgagtccctcctcagctcggtgcttggcagagtctgacagtacggtttccctccctgctctgagcatggagaacatgcaggtgtgcgatccttatgagacggaagatggacctgtcattcttaagtatcttgggacgatgtttacctctgcatagtgggagatagtctctgattacattaatagcatgaaaatactagctcattaagaaaacaaacttttctagatgcaaacattcagcttcgtgatgtgtaaatggagtgcatctggatgatatgctaattgccccctctgaggcctggctgattagctctgagctcacccatccctgggatgttcctgagcatcttggtagggctcacctctagcctggcaactcctgccaatcttccaactgctgctttccccgaagaacacttgctatacattctctgtgatgcccctttctctcctcaaacctcattcggtgctgatccacttggtgggcctaggcagttaacttgcttagggatctgaaaggcttgggagtcattcaactagtgaccagaacataaggaatattagtgggttgcttttttttttttaagtcttgcttttaaacatctgcatcaagagtcagcaataggtccaatctgtgctgccacctcattttgcaaataaagttttactgaaacatagatttgccaacccacacattatctctcgaagtctttatgttacagcaggcaggcaaatcgttatggcaaagccagaatgaccctcaaagtgtaacattttgcaatcttgaccttaaaaaaaaagttggccgacctttgaatatgtcaatgaagtagatctttgtgtatatgaatgttgttctagcaataaaataggacattatacagctacatccataaccttaaagaaagccacaacgtcctgaaagcaggtgcagagtgttccatgtgggtgtgtagatgctcttccaggaaataccctcctgttggcttttgtgctccctgctacaaatattcaaatattcagtgtgccagtcaccatgcaagctctgcagacaaaatcctgtgcgaaacctcccttgcccttctctcttggtatgtgtgtgagtgtgaaaggcaatagaccgtaagacacggctgcacctgagaactggttaactgacaaaccaggctgcagaaagaagtctggtcctgcactggtgcatgtactctctctctctctctctctctctctctctctcactcacacacacacacacacacaaaaacacttatactcacacacacatacacatgcccattcatactcatgtacactcacatacactcacacacacactcatacacactcacacacacttacacatgcccactcacactcatgtacacacacacactcacacttatacatactcacacacacatacatacactcacacactcactcttatacacactcacacacatacatgcactcacatactcatgcacacatactcacactcacacagtcacattcactcatacacacacacatgcccactcacactcatgtacactcacacacactcacacttatacatactcacacacacatacatacactcacacactcactcttatacacactcacacacatacatgcactcacatactcatgcacacatactcacactcacacagtcacattcactcatacacacacacatgcccactcacactcatgtacactcacacacactcacacgtatacatattcacacacacatgcacacacgtatgcacacactcacatacacttattcatactcacacacacatgcatacactcacatacattcatacacacatacacagtcacattcactcattcacactgacacacacacacacacacacacacacacacacacagacacgcacgtgtactctctttttaataggcccttcaagctgtgcctggagaaggaaaggctcccagaacacttttataagggtgacattcgtgccatggatgtctcagaacatgatgtattggccctttttaagttcaaacaacatttggccagtttttaagtggccatttataattcccgtctagctagtttttattgttctaagcagcatggctctgcagagggctggaaggtagctgtttgtgcctgactttgaaatcatttggacaatgagcacacatctcctctcagaggaaagggaaatgaacatctagtttcagtttggggttcggctccttgaaattcttcatagtgctccccgactgctagatgctaaagagaattctgttgggagctactgatgcaggagaatatctatagatcatgtttcagctgcatagaaaaccacaccgcaaagcccagcagagtaaatcgtgtgtgagttcctatgaacatgcacagatctgatctaagtcaaaggtcaaaggtcagaggtcagcctctggtgctgttcttcaggctctgtctcctttctctcttgaggtaaggtctttgccttggcccagaagtcaccatgtagatttcgctggcagatctgcaagcctgggggataatcctttcatctccaacccccccccccccccgggggcatcacacagcatatcacgggcccagcttttattgtgcatgcttgagcctgagctcagctcttcctgcttgcaaggcaggcgtattactgactggtccttaactctagtattcaaatgttaaaaacctgtttcagtgtttacaaaggaagccaccaccgggtgggaaatgactttgtagtttctcatggttttctaaacttgctctagagtatagaaatgtttgtattatctggtgacattttagccaggtgcactgtcatatgcttgggtgacactacttggacaacagaggcaaggtgaccctttgagcccaggagctcgggggcaccctgaacaccacagcaaaacctcctcaacttaaaaaagaaacaaatcattttagtgaactttaaaggaaagtaatgtgtatttgctttagggcacaaagagacatcctgccgtccaccctgccacccaccctgccatccaccctgccgcccaccctgccgcccaccctgctgcccaccctgccgtccaaccaatgtatttgcttctcactgactgggcccggcttctccactagcagctaaaagtggggttcatctagctgggcggtggtggtgcacgcctttaatcccagcacttgggaggcagaggcaggaggatttttgagtttgaggccagcctggtctacagagtgagttccaggacagccagggctacacagagaaaccctgtctcaaaaaacaaaacaaaacaaaaacaaataaaacaaacaaacaaagaaacaaacaagtggggctcatctaaagctctcagagagtctcataggctggagagccgttagtgctggcacgcagggaccatggtgcttttcatcatggtaccgagtgaccgttttttttgacagcaggttcagaggcttatagaggcagcaacaggcatgtccctgctctgccaaaaggcatcctggagcccacccatgtaggctcccttatagccagaagcaactgagacctttaggggtcccacccttcctaggatgtctgcataaacctggggagagagtccactggagaaacccaagccccaggatgctttcattttgtggtgtcttcgtaaaggggaggaaagtcaggagtgtcatgggcatgagtgccgtgagtgtctaaggatctaattaggcgtccctgtcatctagttttatgtcaactgtatataagctagagttaactgaagcaggggaacctcgattgagaaaatccctcgttaacatctggctgtggcacattttcttaattagcgattgacaggggaaggcccagcccattgtgggcggtgccatccctgagctggtggtcctgggttgtctaagaaagctagctgagcaagccccagtgaacaagccgatggtaactcttctgtgcaggttatcagcacagtctcttttagtctcttcctctgcccaaaccccttggcaagtctgggaatcctccagtttccactttgagtctctgtggaaggcagaaaccatcttcaggtcagaagatggactttaggagggtcactttcttggatttttttttttttctggttgtgtcaggtgacctgggcgtgacctcccagcaagatggggccaacagctccagtcgtgaaggggacgcctttcagtgctggtgacctcagtagagccatatgatctccagcactgtggagacaggtgccaacctagggccttgcagtggctcctgtcttacagaaggttaccctgctccacatcagcttcccaggtggttctccagcctcccaggacagcgctctctcagctgagctaggcactggctggaagctctctctgtgtgaagctgggtgctggctgatttctcacaacctctcagcctccaaaaacaaagacaggaagcagagcctcctatgaactttcttcccttctccatctcactgtgtgtggcacctaccatttacaacataagtcacaaggaaacccacaaacccattgctgcctcagggttttaggtccctggggtcttttattgtccctttttattttcttctgagattgatgtggctttagataggatggttttcagtgttacagaagcacacggatggagataaactgccagggaagccgggggaactgctagggtaaatttctgatgggagaacttccagttttcatggctgtggtcctgagacgactgaatgaccgggcaggagaggatgcgggggataagaggagggatttagatgccagggatggtgaaggaatgcctccttcaggtaggcaatttttttttctctcattctgtcgaccatggtttattttcttttacatcccctgccccatgctgtgagagcaaaaatccccactctccagcctcccttctaagtttcccttccgctccgtatctcctgggtatcggaaaagaatctcgtgtgtatcttcatagttgccagatacagggaggggtcaggcataagcctgctaggtacattatacgctgaaataacgggatgatgtgagccaatgtctcctcactccagacagggcaccaatgacagatgcagtcccaatgacagaccagaggaatgatggcattcaagtccagagctgatgagtagggcacaggaaggggtggctggagtctcaagtgagggtctgctgaccctccccactcctcctcctatgagggactggtctctgatctcccagagggcctcttaccatcctgagcatctctttgtgggtagtcacagcagctttgataaggatgtgtggtggtttgaatgaggcgtcccccataagactcagacgtttgatgacttggcccccggttggtggcactgtttgaggaggattaggaggtgtgaccttgctgaaggatgtatgtcactgagggcccgcattgacatttcaaaagacttgtgctactttgaccatgacctcccagtttcctcctgctgcccccgcctttatagactctgtatctctaagtcccaaataagccctttcttctagacgtggccttgattgaggtggttttttatcccaaccacagaaaagtgattaatacaagatgctaatagctttttactgcccagaggagcattcctgtgtggactggagcctcatagggagagaggaagagtcctagaggtaattttcaagtctagccaccctctcaattcaggttctcccttcccagatgagtagagcctgtgtcaagctgaccaaacacaaaaccagaactacagcaacatgcttgcaccaccatgcccataagtgctggggatttgaacttaggtcctcttggccatgtaacaggcactttaccaactgagcatctccccagctttgcaaggaccttttgcatgcagatatcttgctgccgggtcctctggaatctgtgatgaccacacttgcatgtaggggctcttgtactgggcagctggttcagggtgggctatggaccaatggaaaggcctcctccaaagccaggatgtagttttgagatcacaattaagtcaccgggtccatgagtccaggtctgtgaagtggctgcttgtccttttaacacagagcagccggtcggacggataggcttttaatattactgggtgttttggttctattgcctgagcataaaatttattttacctggatccttggaatgaggaacattttagtggatggtttgcttaatggatgagaaatctttcgctaatagtgagcctgccgcttccgcagctgcacatttaatttctgccaattatgccgacccatttgcttattcataagtgttcaaggtacagctgcaatggcttttggggcctgtcaaaacatgcactacctgagaagaccaggaaatgaagtgagccgccttccacgggcagcttctggcccctctgatctgagcagctggtgcctgttggggccataaatggaaacaccctttatagctacgagctaaaaaggttgcaggtacatctctgactgtgcttcttgagttccgaggtggggcccaggtgtctctctgcctcaaggtcagtactagagcatgggaactacttcagttctcttcccacaaagtttccttgggctccggtggactctcttcccggcacaggcatgggaagagcttcctttataggctccggccggacagaggcgagtacacgcctgctctccatccgcagtgtgtcctcgtccttgttccttagaagacctgagttcttgactggacacagttggagcgtgagatagagtgcagctcgctgtcttgaggtgcagctgcccaagcctgaggacccacaaaacagccagatgctgcggcattcagtagaacctcggaactcaaggctgaggggacagagatgggaaaaatcccaggacctcatggccagccagtcaagacaaaacagtgagcttagggtccctgagagtctgggggaaaaaaaaaaaagggttggaggttggaattaattagggaagaaaactgacatccacttttgccctccacaggcatctgcttaagtgagtacacacacacacacacacacgcacacacacacactaaaaaaaaaaaaatagagcatgcctaaatttgaatttcaaaaatgaatgtatattttggtataactattttctcatgcaatgcttaggttatatttacaagaacaaatttttaatctacaattcatatatacccagccacctgctttttatttcctgtgtcaggcatcgttagcaggggccctgttcacaatagctttttctttctgtattgtttgcaaaagtgctataactcctctaaggatcctagggctgctttcggggtgggggtgggggtccaggaaaatgacggcagtaaggaggcgtgcccatgttcctcctctgctcccagaaagagtggtatctcaacatggagagagagaaagagacagacagacagactgaccagagtgtctcattgccatgggtaaaacagatacagcattttagaaaagatactatgtgatctccaaaaactccaaaggagcccagcacacactgagacactttgctggaagactccctcggccaggtggatgcatctgtctgttttacactgccccccccccccctgcagctaacagccaggtctcatcagtcattgacagacataaaaggatcacaggaattagccaatctcgtggtaattacttaaagaggcctcatttgggccaagggcatatcacgaaagagggatcggatgtggcaaatgtcaggctactctccttgcagtcaaggagatgcagattaagggagctatgacatgctcttttccatagatgaatgggtctttgagacgtgctcagtactgactgaagtttggccagtgagagcgacaaaatgctgttcatcgtggtgctcatggcaacatcttcctgcaccctcccaatttctgaccgtttgcacaggttagtgttcgagatgatattcaataaggaaacactttagaagcagcctcagggcccagaggcacgagaaagccaggactaatctgtattgctcgacagtgcctgaaagaacattgagtcacaggagaaatcgtttgtcgcattcggtgggagcagagagcagcctgatatcgcttaagtgatatctcagcctagtgcaaccctgcgtagggatgcacagaagggagggcaccctcctcccttattatttatttatttattttgtcaatgaggtcgtggtggcttgcaacatctgtgtacttgttcagtttcccacagttcctttagcatgcgtttataattttgaaagaaaatcatagctgggatgttttgggtgagttatgtttccccacagtaaggaggatgcataggatgtggcgatctcttcaacccaaagttcacattcaatccccccaggacacttgggtgaatgtcctgacattgctttttaagctgggacccttacatttgtatctcccagaagtcagttcgaagggctccctaagactcgtgtatagtctggtaagattcggtgacagaagatgactgagtgggcagagatgcccgtaatgttcttcctgcccttactgtctcctgacaaatggcaggccggttttattgccactgtgcatctgacccacctgcccggttcctgacagttggggtcacaattcaaatgcccaacacgttctaaagataaccacgcagcgaaattactcacaaggcaaaacacccctgtggaaaccccttctctcctttaagccatctggactgagaccccccagaataccaaaagccaagaattcactttgtttttctcaccctcttcttgaagccttctccttgactaccagcatgaggccaagatcagtttgtagagggagtggagcagagaaagcatgacgtggtgtggacaaaggggatgtgctttcatttgcttatctctattcttgaattcatgtgtgtgtgcctaggtgtgtgtgtgtgtgtgtgtatgtgtgtgtgcgtgcacatgtgagcacagttgcccatagaagccagaagagggtgtgtgtcccctggaatgtaagtcacaggtggtcatgagctccctgacacaaacgctaggaaagagaagcaagtgccgccatcgctctgttacgggttccgctgatgaacacggtccacgaagccaaagtacaaaggtggggtgcgtcacgtcacacagggtggggctttgcccattctggatgggaagaaatgggaacatgggacgccctgtggcaagaggtggtcactacagttttttagcaaaagtaatagcttgaattttcccccattcattaatttatttattctgtttacattctagtcggagcccccctcctctcaaccccccctcacacagtccttccctccattccccatttcaaaggagaagggggaagcccctttgagtactaacccacccactatggtacatcatgtcactgtaggactaggtacatcctctcccactgaggccagacaaggcagccttagggcaaagggatccacaggcaggcagcagagtcagggacagcccatgttccaattgttgggggacccgcatgaagaccaagttgcacatctgttgttacatatgtgtgtgtgtgggggcgtctagcccatgtatgctccttggcaggtggttcagtctttagttaaatttgagaagtaatctggcaaataatgggctcagaactaagccaaaagccctaggaccattaaacagaatgccagagactgagaactggagaaaaagctcccacattcttaagtgcgaatataaaactgggccatgggctgtgtgttttgtgagccaggcactgcaccacattcagttgttgggacaatctcatgaggtagatataattaggcacatacattttacagcacggaaatcagtggcagcatttgtgagtgaaactagtaactgaatctggtggcctgaatgaaaatggccccacaggctcatttaaacattaaaagtatgtctaaatactttgccattagctggtggaactgtctgggaaggattagagggtgtggccccgttgaaaggaggagtatcattgggggcagactttgaggtttcagacgatttgtgccttcccagtgtgcttcctgcctcctgcttgtggtttgaggtgtaaactctcagctattcctgctgccatgccttcacctcccaccccccatcatggactaaccctctggaactgtcagcccaatgaaaacactttctgccatatatggcctcatggtagacaagcaagtagcacgctgatagagctgtggttccacagtaggcactgtagcccttccatcctgtctccgtgcagtgacagccctgagtccagacatgcaggaagacagaatctacatgcacaggctggacaagggactgggtgggtagggagagaaactgtgttgtggtgtgggaatgtcttttctgacacccattctttactgtaattatatatgatatgtgcagtgtgcatattcgtatgtgcctgtgtgtccatgtgtagggtttctcactaaccctggagctcattggctcagctgggctacagttgagctgggagatcgccgcccacactgtggctacagacacacgctgcccagccacctttaatttatttttgcttgcatctacacatggagacagcatggaagaaaaggagccactagtatgtccccttccttactgttttcagagtcagcttagtttggggcttggttgtaagcatgcgctataacaatgctctctaagaactgagttccagggctggagagatggatccccagttaagagcacttgctgctcttgcagaggacccgggctccattcccagtacccacgatggctcagaaccacctgtaactccagtttcaaaggaaccaatgcctcttcctggcttcagtgaacactgtctataaatggtacacatatatacacatgcaggcaaaccataacacccatgattgtgcatgcttgtgcgtgtacaggcatgcaggcgcacatgggttttagtcattcctcaggtttctcccaccgttttgagacaggctttctctttggcctggccctccagtgagttaggccaggccggcgggccagcaaatgtctaggaatctgtttcatctccgtgtcccattgtgctcccactggcgttacaggtatctgctgggcttaaagttttcttaattacatttatttatataatttagtgtgtgcattcggaggccagagaacagcttaggaaaatggcttctctccttctaccatgtgggttccaggaatcacatttggcagccaccttgccggcctctttcatgccagattcttacaaggcttcagggggtccgaactcagaagcctcacacgtgcagactgttagctataccgagtgagccgttccccgtcagcccccttcccctatacctccgttttgctcaccgatgctgttcattagcacacagtacacagtcactctgcatccctggccgctcattattgtgtttcataaacagggccttagaaataagacctttctcagggatttggagctgtgtgtgctcagtaggtaagcacttgcctgttgtgttatcataatgaactctcctccggtgagatctgggggtttttagtcatgctctttcgtggctggtgatctgtcaattagcattgctgtattcgtgggaggtctgagattccatcactgggcccactggatccaaccagccctctcagggaccacagaccatctgtggcctcctgtggcagggcccatggtctacaaaagaggaggctagctccacattcacctccctagatgggtctcgaatccttgaggacgcagccatgctcccacgccatctgtgcatgtttggctgcggcgtggatggtgacttacattgtggttgctgatcaagatggctccgcgccaccacggggaggatgtcagagcttgtcatgttaccggggcagctgtgtccctggcagcagacaaccatttgctcagcccatggctccaggtctgtgctcacccagtgtcatctaccggagtgcagggaagagagaactccagccttggtgtcagggaagaggaagcagggaagcaggtactgcacacatggacagcactcaagctgtccccttgtgcctctgtcgctcctgattctgaccagcagaaaggagggacgacactacgttcttctcaaagcagtttattcaggaacctttcaacatgcatgcatgaatctctctctaggaatagtctcttgtgtgtgtgtatgtatatctcccttgtgtgtatatctccgcccccaatcacaattccttatataacctctcaaccatgccccatcagcccagtccattggccagaatcatcactcgtcatatggtccgatcttgcatcatggcgcaccttcgcagttctcacaatgactgtggcttattttcaggtgtatgaggaagttgggtgcaagtcataagacttaggtgcagtcccaggcaccatcttgggactgctgtcacacccactccccacatgcctctagacggggagcttggaattctgagaactcttgaccagcctctgcagcctgggtcatctagatgttattaacataggtgtataaaactacttccggtcttgtacacacagaaacacctatgcatacattcagggagcctacctaatatgtctggcattgaagatgggaccaatgggataggaacattgctctgtgcacacacacacacacacacacacacacacacacacacacacatgctcactctttcatacagtgtggataccacatagcctgaattgaactccaagggttgcccaggaagagctgctgtcccactgagatgcgttctctagaggccagctatgcgttaagcactgtgaaggatcagtataaggccctccttcccttccccgcttcattcccctcccctcctctcccctgcccagccctcctttctttcattctctccactcctcttcccttcccttgtctctccactgctttctttctcttttaaaaaagattaatatatctatatctaatctatatctatatctatatctatatctatatctatgcatgtgtctctatgagtgtggttgcctgcagagtccagaagagggcactggatcgcctggagctggggttacaggaagttacccacatgattggggtactggcaaccacacttgaatcctttgaagggcagaattatctctccagccccatgggactctgttcttcagggccagcatcccagaagttgagacaaaccctagtagccaggtgtgacaaaggaggtattaaatcaaatatgtacacacagcaagaggtcaggagaccccaacaggtgttctgtgtttctattttaaattgtatctcatttattattagcttgtggcagctgtgaggtcgggctcagaggccacagcctggaggttagagaacagctctaaggagttggttgtcctcttccaccatgggttctagacatcaaatccaggttgccaggcttagttggcaagtgcttctacccactgaaccatctcatcagcacccttacccctgaaactggatttgaggaaggtcttgccctgctttcatctccatagcaggaatttcccacttttggaaagaagttccccgagtggtgacgggaaggatgaatgttgacggtccctgtcaccctcagtcaagggcatgggccatggtgttgtccccagagtcccagagtgtaagccttctaccatctcccacagttagggatcccccaaacctggacacatgtgagggtaaggtgggttcacaatccgctataggtgggcacggtgctgctcgctatcagatccttatcaacgagggcaaagcctctgcactccaccttcagaaccacgaaatagcaacagcagcatctgctttgattgccaacacaacatcatctagaatcactcaggaagagagtctcaaagaaggactgtcaactctgggctggcagtaggcatgtctgtgaggaattgccttaattacttgttgtgggaagacacactccactgtgggcggcaccatgccctaggcaggcatctagaactgtattagggtggtaaattagagctgagcccaagcaagggagcacatgtacactccttgctctctgcccttgactggatattcagtaacgagctctttaaattcctgccgtggtgtaataaggactatcacctggaattgtgagctaaaataacccctttctctcataagatgtccttttgtcagagtattttatcacagctacagaaatgaactagaataatcaatgtcattgcaattctccagagagggtgagcccaaagtgcagtgtgtggctgccaaactcttagctctcaggctctgcccaagaggctctaggctcttattaggtctgtgtctaccaagcccacaattcttgttcttgctatcacatttacctacaaatatccatttggaataaacagacaacctggggacaatggacctttaagccacgcatttaagaaacactgttaagatgacagtctgtctaagaaacatcagcactctagtccaaaccaggagaactttttttttttgaaacacttttatgtatcccagcctatcctcctgcctcagcctcccaagggctgaaattgggaacaagaatcaacatgcctgctaatcaaatcaaagtgggaattttcagatggtcagtctatgaccttagaccctaagcagtcctcaggacatgggctgccatgtatttctgtctgtctgtctgtctggacaagaaagcaggttgagctaaccaagtaggagtctgtaggggggcagtcttcaggccattatcttggggagtgggataggaggagctttggtgaacatttccttcacacactgtccacattcacactcagactccaggaacgccttgcctttcctctgggactcacccagggaaggctttgccactcacgtggggctccagtgttgatgcttaacatggcctgtgcctatgagtcaacagcgtctgttcacccaagacgtctctcccttctggataaccccccaccagggggatctcttgagttcaaggnnnnnnnnnnnnnnnnnnnncagggagcaatagtacagcgcagtgaaatagttagttagggagcatcactcagctgttgtgtggccaggtcatgaaatagaaatgatcatgtgattctacaatctctgctccttaccagtcctctaggtccctctttttatatggaatctgaatcttcacccttcttagaaccaagactccaggcatagactgtctggctcctgagtgcttgctgaatggctgtgtgaaggagtggcagagccattaagagattcttggtccacggctgtctagatgtagggtggtccctggcttggaagcttcctcttgctgctgcttgtccagaagtatgcatacacatttttacggcccctctctctccatccttctttctgcacagacaagcgtgagaatggcgaggtataccagaggaagaaggtggcagctactgacctcgcagagggcgtggccccctcaggatcaatgcacgggagctcagggcagcctggggggagcagctggaggaggattgctttgctcatcctggccatcaccatacacaacattccaggtaagcactggtcctggggctgtttgccacctgcctgaggactgaggcatccggtgtccacacagctgtgcagctgacaagagtccgccgtgacctgagtcctatttggagggcagcggaggccactctatgctatgggtgattcattccacagcgatctttgcaagtcccgctgctccattccagttcctttacacggcctctgctgttttgatccaggggtccctttctttctatttggtcccagattgtgtggagcattgttccgtaacctccgtgattgctaggatagagaactggaggtctccagtgctaactgatggtttttaagagacgttgaattcggggacttgggggatagttcagtctgtgaagggttgggtatgcaagtgtgagtttcacccacagaacccaagtgagagagatggacgtggtggcatatgactgtcaactcagcactggggaggcagggacaggaagaccttcagggctcatcagctcatcaaattatcttatttggtgcagtggttcacaaccttcctagtactgtgaccctttagtgcagttcctcatgttgtgatgaccccaaccataaacttattttcatcgctatgtcgtaactaattttgctattgtattgaattgcaatgtaaatatctgtgtttcccaatggtcttaggcgtctcctgtgaaagggtcatcccccccaccccccgcaaaggggtggtgagccgtgcacaggttgagatacactgacttggtgagttataggacagcgagagatgacgttgttaccaaaaattaaatagacagagctgagaaacaacacctaaggctgatctctagcttttatacaaacttacacatatgcagacccacacacaaacatgtacacccacaaacatgcacgccactgtgcatatacctagaaaacaatataaagttctgccttgattaacaaacgtttcacacatatgccctctttgtagagacctcttccttatattacagagtaacttattaaatgtctttggatgtaacttagtggcaggagacttactggtgctttatttaaaagatactatcttttaaacaaatactattaaatgaaagaaatactgtttcttctagagcaactggaagacatggataagcttaaaataacaaaaaacaaggctaccacaaaaataaacatgaagggtcccaagctgctggggacacagtgtgggattctagctcggctacccactgacgaggttatctctaaatactgttcggttttctcatcactgacataggactaatatgccaacggtttcttttgagacttaaatgaagcatgcacatcgccgtaccatgcttgggccttctgagcatttgacagatgggggccattgtgtgggccaggcttctcaggtctttcaaccatgactttgtcagtcttgggttgttaatcattcctacccatcttttgctgaaatttgagcatgcgcagttgccttccccgggagctgtcctaggcgatttgttttccaaatccacagagttcgttgatcccgtctggtgtctgtgacaggaccgtcggtgcagctggccaaggctctctagagtgacggtgttttctcttaaggcccatgcggctgttactccactgtctcccggcttcagttttgccgaggcagagaacacaagcagaatggggttatccctcgtgggaacttggtaacttttatttgtgcaaagaagccttgtctgcgttattatagtctggtacatatggaatctaccaaaaagactgcaccagatcacttttaagccgggcttttttctccgggaggagagagacgtgtttctctggtaatttccattgtagttaaagcaatttgattcatgtaatcttgcataggttgcttttcttagagttttcctcattgcccatctctctgccatctccctcttggcccttcagccctttctgggtcagatgcagacatttgtggctaattttcctacagctcccaatttagcctgtcttcaggtggagtcttagatacgggaccccagcacacagttcaaaaagacctaaccgggtttgcagggttgggggccccagtcatgatagccacagactctaaattgcccattggaagtctgaggactcctgaatctcttccagcctgtaaaatacccatcattgcaggagcagggttacctatgtcttcctgtcgcccacggtataactgctcattcaagacctttagttaaccaataagaatgaaggtccacctagtggactcagagtcaggtccagtgaggatactggcttatggtatgtcatagtagtgcttgtttcttcaagggacttgaaaatgtctacaaagcaggctttccaacaatgcactgggtaccaggctgcctccagaggagcctctaccacacatagcacaaccacgctatcttcctgactgttaaggttggggcagatggactgacgaagatgtatgagaggagatgggccagggggaaccccaaggctgtgaggtaaccagttgcaggcgttgggttgtggttaaggtcttctaggaagaaagtgggagctgagctaagaggatgggggctgaactgtggatagtgaggcttagcttccatcagtcagggaagatcctgagcagagggctgggtacgcaggttcgagtctgactacagggggaaactgcgacttatcggcactttccatgttagcaaatgggatcacggagaagacaaacccatgaggggttatttagcctctggacgcttgaaagggattatgtttattagcttcattgaggtggggagacccaccctgaaagccaacaagcgcaccattgtctggctggctcctggactatatgataagtagctaaatagaatccacaatcttctcggcttccttgtaagggggtggagctggggtgggggtgggggtctatgtgaccagatactccaagctcctgctctttgagttccctgccacctcgatagatgtgctcttaaactacgaacccagataagcccttctcagaggccgctcttgtgggggcattttatacaacaacagaaaagcaaccgagacagcagctgactgccctctaaatccttagcactgtaggacatcaccaaaggcctaagtacacagagtataacactcccggggctgggggctgttccggaggtggggtgtagtttaatatgcatgaagccctcaggctgatgctcagaactgcataaaccgggcccagtggcacacccacccgcgtactctctgcacgctggaaggcagaggcagggggatcaagaggtcaaggccatgctcagcgacacagcaagtccgaagccagcctgagttatatgaaaccctgtctggaaaacaaaattacctaactctgaagtccccggcaaggttcatttctcatgtctcttggtttctgctgtcgcctgaagtggataactcacccacggttcctgtcagttgtggaatgtgctctctgacaagagtcatttttaagagcctgtccagtgccagccgcctttgaaaaggtctcttcttttaacaccatcctttatggtttattaaaaatttaggtgcatcttttgacattctccaagtctctgggttttcagatagactttccacagtgacttaatggataattgatttttttttgaagtttttgtctttgctgcttcagttttgtacatcctgagaatgacactctgttttaaaaaaaaaaatgcactgtaatgtggaaagaagcaagagagcttattaatgggtggcctggctctggagtgttctgtagtgtgaccacacacctgagggcattggtacttacccaaggcacttgagttaatgtgtaaaacctacatgtgtggacagatgaatccctgagactccaagcttctccatcttccaggacttcacttaaattgtggacctttgttagctaccgtcaccgctgtgacaaaacaccagagagaaatcaagttaaaggggaaaaaaggttaccttggctcatgagtttagtcatccggttccaatgctttgggaggaggcaaggcagagcgtcctgacagcaggggtgtgtggggtctccctttgatgtggcagtgcaccattgtatactcagctgctgaaatctgtgtgctttcctgttaaatggggcatctttccgaaaggtcaccaccgtgttcttttatcagcccagtatcacagcatatactggagccccaacccagtccatggcgactccatactctagcaccaggaaaggcaggtacattcgctcccacctccattccaggagagcaggggctagtcaagagctgagagttcagttgtctttctgtgttggctgccaggtgggctaagggcagatatttttggtgcgtacatgagtgggtgtgggtgtggtgttgcacacatgagcatgaattggaggctggaggatgatgtccagtgtcttcctctatcacccttcactttactctttgaggccggctctctcactaggccttgaggctcagtgatgaggctaaactggctgacctgtacaagccgcagggatccactcatgtcctcctgcccggatcgggcactgcagtgtgtgctgccacactcaactcgtcatatggattctgggagtgaatggcaggccctctgccttcacccgggaggctgattatggagacccatagcggagcctgcacaactaattttctcatcccctctccttacagtcaagagccgagttcatttgacagttgttgctgtgatctagagacccgggggctgctgtttgtgtcttcaggacagcacagcagttgattttaattatttagcttgtcatcattgctggtttctaataatggcattgaaaggaatgctcgggatttgagtcagaagtgattttagtttcagggaactcaagaacaaatttagaaaacaaaatattaatgccggctggctgttcctgagggctataactaatttttattttcttcatggttttatcagatttagacccaaacttccctatgaaaaactacccttacttgtgatgagataaaagtgggtttagggaaggggatgtccccatgtgagttagccacttcaggatccctgagtctcaacatgcccaccattacgtagagaaagaaattacacagcagggctagcctggtgtcatcatgtggtggaagtaaaggggaaattaggcatttatgacagagaaggatcttatttgggctagcctggtgttcttgcattgtggagcaaggataagaactctctggggtcgtgtgtgtgtgtgtgtgtgtgtgtgtgtgtgtgtataacctcactcccaagggctctatcctgatgacgtaatgacctcctcaaagctgtctactaacaccaacatttgtgttaaaaatacgataaagggctgtattagttaactacagctgctttaacaactttttactaacatgatgacgttaaaaacaaacaaacaaacaaacaaagccagaagatcagacttattctcctacagtcgtggaagtcaaagctcttaaatccgttcttaagttgttgacaaggttctgatttgcaggagactccagggcggatctgggacatccatgtcctgttccttgcagcttcttcaggtttctgcatggctgtcactctatgtcctgttgctgtgtgtgttcaatctcccccctgccgagttcttgtttgaacctttgccgactgcacgcagagcctccgcgggtagctcaggacaccgggaatctgatcggtctctcctgcctagagggccgttttcgtgggcttaagcgttagaactcagatggttctgtagtccgcatttgctgagccacagaaacctaagcagtcggtgcaatgctggccagagccaatgagctccagtcttccagggttttcctcttccctggcattcccttgagctctagccctgtcttcttcctttcccatccccaggctgcttctgtttggccaccgccactgccaccctcgctgggtgcacactgccacttattcactgtgccttatccagtgagagggtgggtgagattcaaaaggtattgactgggcttgctcacactctctctatctctgtctctctctctctctctcctactccctccctccctctctctgtctttctgcctctgtctgactgtctgtctttctctcttctgtatatgtgcacacacgtgtgcaagtgtgtgcatgtgtgtgcatagtgagggtaccgtgggggtgttactgtattggtcacgtgtatgccactgttacttcagtacctcacagactccacttaagtaaggattttgggctcagggggaagaacattttgttttggcccactatggatttagtccgtcacagtggcagaaggcatagcaaacggcaccttggtctttgacagaggtgacaggaccccgagatgaggtacaggcaactcctcccctccacacacacacatgtgcacatatatgccctacttctaagcctcaccttcccaaacagtggtaccagcagagaccaagcatccaaaacatgagcccatttcaggcttcaaccatagcagctcccatctcaatcctgtggacgcccctcacccccccgcttctctattcaaatcaccactctcagtgaccaaaaagatgctcatggcaaatggactcttggctctcttttacctaatactgaaggtaacaagataatcaactgtttcctatccttcccggggacctcatcatacaacattctcccacatgaaattatcaccacgtccaatacccacatcctccccgtcctgtagagaaaccacatgcctagcagcagtggtttcccacctctgcgctcccttccacctcgatctcctctgtactctgtcctcccacagactgcaccctgcactgcgcatgcggcctgctgcagctactttctttcacttggcttgtttgtcatttttcttgtaccacatttatgttggtctctgcttctcctttaagcccagaacattcttcattctgggatgtgaggtgggtggttgccacccatggctctgcatctggagacccacctctggattacagggtggttccaccaagtgcagaacgcccacttggatatggaccccagccagagggctggacactgaatccaaaagagaaggggctgagccccagcgtttctctctccctgcttcctaattgagggtgcagtgaggtcagctgcctcccatgcccatctccatggcttccctgccctggaggactgtatcccctccaaccttgagctgaaatagactctgaagtggctttgtcataggaacaagagaagcggcatccatgtggacaagtgtcgctgggcctgtattcctcagctcctgggcgctcagctttcttctgccattttcagtttgagtaggaatatggtggacatggtctgatgctatcataccttggggcggaactgctgggtcccagggaaaccttttcattcttttaagtccatgaattcttgttttactttttatttggggggatgatattttttcccagtcacctccgagaaggggaaggttcccccctgggtaccaacccaccctggcccctcaagtcacagcaccactggctacatcctctcccactgaggccagacagacgaggccgttagacagttaagaggaacaggatccacaggcaggcaaacaagagtcagggtaagattctcgctccagctgttgggggacccgcatgaagaccaagctgcacatctgctacagatgtgcgggatgcctctgtccagcccatgatgctctttggttggtggttcagtctctgggtgcctccaagggtatacaggttagttgactctgatggtcttcctatggagaacctgtcccatccatgtccttgtttccttttttaaactcctcccactttgttctctaccaccagccatatatgttcttagtgtattgtaattgaggactgatcacagctccactcaaggaagtattagtggggtgttcatgaatcctgctctttaaagagtactgatcagttttgggttgagatttttattggaccacccgaaagtcaggattctattgatcatagcataaggcacaggcttctgtgtgcttcagatatggtcttcatgcgtagcaagggtggctttggagggccagcactcagaacaagatggggggggtgtaccgcttgcaagaggccggtagttacagagaaaagcatggtgtgtctcattttcctggggcaaaggctgggcagaacactctattattaggtacggattttcccaggaaaaacatggtgtaatcactgctaagtgacattctgtttctggacattgggtgtcgttctcagcaatcagtgatacaggctcagccagcaggtcatcgccacacataaccttgaattatcaaggacagttgtcttagttcaggtttcattgctgtgaagagacaccatgaccaaggcaactcacataaaattacaccatttaattggggctggcttacagcatcagaggttcagtccattatcatcatggtgtatagtagtgtgcaggcagacatggtgatggaggagctcagagttctacatcttgttccaaaggcagccagaaggagattgaatccacattgggcactaggacagctcaaagcccacccctacagtgacacacttcctccgacaaggccacacagtcccgtgggccaagcattcaaacacaagaatctatgggggccatacctattcaaaccaccacaataataaaaggtatttactcaggtcttggaaatatccatgaccatgtttagatatctgtcctctaaaatggcacagagatgcagaagttcagagatggagcctagggccacacagcaaccactaaggtggagctggctatcgctcagcttgttttcctcctgcccgctcttggcctcttttctactgataagtggtgaaacatctcagctatttccaaaaagttcagggaacacgttttgcttttttattttattatttttttttaacggcacgaaatgtcagcgtctgtgacaccagccgggtatgttggcagacgtctcgctgcagatgtcctgggctctgctcagcagcaggcttaggctgggcaacctggatgggagacctcttccatagccagggctgtccccaagggagctctgcagaaggttgcagaaggagtgccccagaagtatacccaccaccagcaggcaaggcttagactttagaatcggtaaggcctggacttagctctagaagccaccagctgtcttattagccatgtgactttgggtaagggcatgagcatctcagagttggcagatgtaaattggtgataacagcagttcactatgaagccagttaacagctattgcaacaggcgggccacctgctgtgtagcccaatgtaaggtagagcacagcagagcctgctgaacatgagttcctttgctcccctcctcctccttcctcttttctcctccctcctcgtgtcctcctcctccccctcccccctcctcctctgagataccttagttcagtccttaaggatcttctagttccagtcaggtgacctccaagggggacagctcagagcactttaattctcatctccagcaggtgacttcaaggttcctctcatttactccaggagtttgaaaacactgtaatattctcctttaattatctgcacctcagtggggaaaatgacattataattagcacgggctcctgtatgggatgacattttgctcaacagatcgtgttcctgggtgcgtgcagtagcagaagctgagagcacactttcaaattgcgctgttgggtgtgagcacaagccctggcgtgaactcccacagtgggaagttgccgctccagggtccctgcgtgatcccatgtgcacgtgccaggcaagccggggtgcccaccacccttgccaagggctgtggacacacaggacctcagagccctgcttcctggctgtcttaggtagggtttcattgccatgaacagacactacaaccaaggtcactcttataaggacaacatttcactggggttggcttacaggttcagaggttcagtccattatcatcatggcaggaatcatggcagcgtccaggcagacttggtgctgggcgagccagagttctacattttgatccgaaggcagtcaggaggggactctcttcctcactgagcagagcttgtgcactaggagaccttaaagcccacctacatagtgacatacttcctccaacaaggccacacctcctaacagtgtcacttcccatggggcaagcacattcaaaccaccacactggccaaagccacagtctaaggctgcacttgcatttgggttaaaataaagactagtttccacattgacacggtcattctcctacgtcttatgtaaggtgaagagaagagtcaaagcaatacagttggaaggcagtttctgtattgctttgccaagtttctggttaacatcatgctgtcttgctgccatgaccagaatacagcttaaataggaacttcttagtttggctattgatttgtttatttattgaaaaacaatttttttttgagacaaggtctcactctataccctgagatagcctggcaaccactctgtaacccaggctggcctgaaactatggcaatcctcctgcctcagggtctcaggtactagcatgtgagccactatgcccagcttaagcaagaggatccctggagtttggtggccagccagtgtagctaaatccaggagcttcaggttcagtaagtgaccctgtctcaaaaaataggacgaagagcaattgagcatgtcccgacttctggtttctatgctcatacatgcacatgtacatgtgcacttgtacaaatgtgtgcatatatacacacatgagcacacacatacctaggcacataaaactcatcctgaagccaagctcaaccttgagcctgggtccccctgagtgctagagttgcaggtgtgtgcgaccacacttagtttatgtgacgctggagatcgaccccagggtcttctgcttgtacgacaggcactctaccagtcgtgctgaacctctggcccggttctgttttactcttgaacggagaccagacatgggttccgacagcttgtccaggaaaattggtacatgctgagtcatgctgtccaatgctgggctaaggcagctccaagactgagaaagctctcctcctgcttctcttcctgatctgcctcctcctcttcctacttttgccactcttcttcctcctgctcctcctcctacaattcctactccttctcctcctcccactcctcctcccaattcttatcttgctcctgcccccgccccctgctccttctgctcctcctctcccctttctttctcctgctcttcctgctgctcctcctcttgctcctcctcttcccattcctcttcctggtcttcttcctactttcaaatagacatttgcccattctccaggccaacacattacaatgggtccacgtcatcttatgcccgcctgagaatctaagccctttgagtcaggttttgaggatgggaatcctgtcttatggaaatcactgtgacatttactctcaggcctttgctaggatcgtcgctccgcttgtcacccactgctacgatgtaagacatttatggaacaatatattttctaggaatgctttgcctctcctgcgaaagcaatttatgtattgtgtctctcttctggtcgttggctgccagggaggctaaggcctgtatttccttgataacagtgacatatgttcttaggatctgaactattattctctcgtcttgcaaccaatcatcatatcacactttaatcagtttcaaaggagcagggttttttttttcattagttgccacaattttattcccatattgccatttcgtttcccaagcaccgattatgcttctgatccagatgtgtgccctgaagatgcttattctggtgatgcacgagaagagagggagcaacctttgcagtgctctctgaatacctgcagagtgaggccggcacacacatgtgtctcggggatgcagcgcaggaggccggagagattggctcaaggcttaagagcacgtattcttgcagaggacctgggttcaaccctccagcagctcacaatcattcacaactccagtctgatgggatctgacaccctcttcagacctccaagggaacctgatattcatatggcacacatccatagatgagcaaaacacgcatgcaatgcaataaaatgaagaaatctttaaaaaacatatagaagagtacaatgtgaattgttaaactctctgatagccatatataggaaagatgtggatatgcatatatatatatatacacacacacatatgtatgtgatttattataaaatactccctagggtataaactttaaaaataaaagaggccaaaggcaaatggaatttatttacaaaatacacttcatctaatgtagccacactattaccatttcaacttggaccccatataaaacttggaacgaacgagctttccgtctctcagaagaaacaaagcttactcacatatccatttcaacattgcagaaaatggcggcagtgacacaaacccttcatcccagctcacaggaggtggaggcaggtggatctctggtagttcaatgctagcctggtctgcatagctggttctaggacatccatagctacataatgagagtccctgtcttaaaagaaacaaatcaacattgtatagagtggatggatcatcataggaagtcatcacggtcaaggcaaaagccttgagagcaagaatgtgttgttgttatttgttttctgttgtctttgaagacgaggcagttaaaaagtcattttgactgctggaagtactgctttttggaatagagctataacttggtgctagagctcttgcctggcatgcacaaagatttggttccatccccactgtgggagaaacaaaacagagcaaatgggaacaggaaagagtcatcccttatcactggtggcattagctatgtgggagcatgcctgtcactgtagaggggaggttagtcatgtctgtccccatagaggggaggctagttatttttctccttgcttgtcagaagcaagttaaaggaggaaggttgatttgggctgagaacttaaagaatacagcccatcatggtgaggaaggcagggtggtgggtggggtcacatgcactccacagtcaggaagcagagggaggtgacgattggtgcctatccatctttctcctttttattcagttcaggaccccagcgcatggaatagtgccattgatattcagggcaagtcttctgtacctatttacatgttttgtgacatatgtcacagatacgcccagaggtttgtttccatggtgactctaaatctcatcaagttgacaagatcaaccattacaaggggcttagaggggacaccatgagcaccctacacaaaagggaagatcaagggcactgtctgggtcccagatggctccctctcgtctcacggcgctgatctgcctctgggaggtgggggagtctgtgtcagggtgtccttttctgacagatccttccccatcacctctctgctggtgatcctcccctggggaaggctgtggtgggtggggtcatgagatacatatcagacctgatggtccctagagaagccacacagaagaccaaccttacaggccactcccatcactttgttacaacactataatagtgtcagtgagcagacatttcagagtcccccatgggtggttccccctagttcagagatgaccttggcaagagtgtggctcgctttaccctaaatggagctgtggtttttcttgaagaatggctcgtgaaaacactcagcacctttgctggctttaggttccccaagcagccacccccttcaccaccccaggcttccagtccccttccctgtcccgccctaggaggcttgctaatttgttcccaagccacagcagataacaagtttaatcaattgataacgttcagggttcatgctctgtagcgtcccagctgattgctattcatgtgtgctaatcttaatgcacattaattatgcatttaataagtccttgtttcttctgtttgcctgcattccctggatggcttttatggtgtgggcttgagaacaatgagactgctacttgtgttctacaaataacaattaaccgagggcggatcctcaaatggaaattccattttctcttcccatctcagatgaaaaacaattgagtaaaaatgacaaatggacctgatgcttctaggtctgtcccctgctctgtcatgtgttccctcttcaggggccgtgacctgcctgcccatggagtccccttgtcagcacagatgtgtcttaacccggcttgagtagctcccgttgcttcgtgctcctcccttttcttgtagacatggcctctaggtctgagatgtgaactcagtattgcagcttgagagagaagtctccctccatagacagacccagggtatagagaatctctagatgagccttgagtggagccttccaaaccccctcagagagagtcatgatgaacctaagctcccagaaacacctggatcaccatgccattttgaaccagctgcccaatggtggctctcttgttgagcaaatagagaaccctctggcctgtgtgttttagatgttgacctgaccaattgtgaatgctatacttcattcagtcttctcccagtctgtgattctgggagctgggagcctttgggactacctacccatctgattccctttgtcccgggcctatgctgaagcctgttatgtctggttgtcttcaaatgactagggctctgtgacctgactccctccctctctgtcttagtccctttctcaccacctgggtgaaatatcaagataaaagcaaaagggaggaagattacgttggctcgaagtttgcaggtgcagtccgtcatggtggatgtcggcaggaagttgagatagtgacatcacatctgtgtccaggaagtagagagcactgagaatcagttctcttccgactttctccttttcctgcagtctgggatccaagcctgtgtaataagggcacccatgtttagggtgggtcttccatcaccagttaacgcaatccagaaactcagtcacagagatttaccttctggataattctagaacttgtcaagctgacaatcaatactaaccatcactcccaccctctccactgatgactgtattaatgtttacagatgactctaggtggtgggatctttgcagcccattgcaatgactcaggctatcccccacccccactccctgccatgccgccccttcttattcatgtcagccacacatgcacatgttgtaagtgaatcagagagatgactctgtaagttactctactcaggaattcccagacaaggtgagacatttcagttccttgttgtgacaaagtacttgatgaaaccgacttcaagaaggaaggattgattattttgctcacagtttgaggttacagcccatgacggtggtgaaggtacagctgtagggatgtgggacaggtggtcacgttgcatccacagtaaggaagcatgaagtgatgaacactggtcttcagcggtgctgacttcttcacaggcatgcctaaaagacaagatggtctaaggagtccctcactggtgtggaagcctgttgtcttactcagggtttctattcctgcacaaacatcatgaccaagaagcaagttggggaggaaagggtttattcagctgacacttccacgttgctgttcatcaccaaaggaagtcaggactggaactcaagcaggtcaggaagcaggagctgatgcagaggccatggagggatgttacttactggcttgcttcccctgccttgctcagcctgttctcttatagaacccaagaccaccagccatgggatggcaccacccacaaggggccctcctcccttgatcactaattgagaaaatgccttacagctggatctcatggaggcatttcctcaagggaggctcctttctctgtgataactccaactgtgtcaagttgacacacaaacccaaccagtacagctgtctcctggtctagatgacgtaaagctaacaatcgctactcactgtcatagggaggggtcctgaatagatccatacagttgcaggatgactgaaaactgtaattgcctgtactccctgagatttggggattttatttgaatgataacaaaccagaccatcagaattcttcaatcccaatgatgggacagagtttggactcagactctgtagtgtgtgtcttcttgagaaatagccttgtgtggtgtgaatggcgtgcaagaacagccctcaagtagagatggccacggctgtgaaggaaggggcataattccaagctccagcctggccccagctttgcagatgctgtaagggcagctatggtcatgggtgtgaggtggtttgaaatcctcaataaaggattgagatggatggtggctttctgggttatgagatgcaacacctgaacctatcccatgtcggctccttctgtttcccagttccttcagccgctcagctcactcctctggtctccatgaagactcagagctgccacctctcaagagtttgctcactcatacctcttctttatactcttagacattcttcgtggcccagggacggagcccacagtaaaaaaacaaacactcagaatcctgttttctgaggcaaatgaggtcttcttaaatatcaacaccgcaatagaggtgtcttctctcttcctttaatcaaactcctttctccaggtttagcaatctgctaagtcatggtgacagtaacatcttggctttccttctgtgccctgctctctagggtccgcctccacttcttcccccccccccccccccccgcttgaggccatgtagggcttttgcattaggaatggttgagtcactgtgtcctccagggaataagccaaagcatgcacataaggaacttgaggggatagagtctgggtgcatgtggtctggggaaatacttggggagacacaccttccctagcctccctgggctctgcattgtgaggtgtgggtcagtggctcttccccatcctgctttgtcctggaggactggggcaagtgctggtttttcaccttctggtaattctgaagagtgccctgttgcttggagacagggatggtgcctgaagtgaagataaggttgtcaaggaaaccaagccacaaattcccttgtttgtcttcgggttgccggactgaagagtaaagaatctttactctgacaactggaagatgcctcccgttctgtgtgtgtctagcggattgatgggttgttcaacacacagcccagctggtccccaagttgacaaacacggcatcgagttctgactcactatttctgttggagcgcactttccagtgtagacagagtcaggcggccgtttccatctggacttttctcagccacaccatcgtacaaatgaacctccttgaatcctgactctgtgtgtaatccctcgtctttttccgctgttgagatttccctcttggtgcagccctgttgggatccccctcttttctgttttccacctccagatggatttacatgcctgggatagcactcttcacacacctagacgcctgcctctcagccctggcattacagggttcagagaaagtgtgccccttcagctttaaggagatcctttgtgaagcttcaaaaagaaaagaaaacaacgaacaaacaaacaaacaaacaagcaaacgccaaatcctctcatctgccctagcctactgtcctagtataccaaacacagtgggggtgacatccaggagaataaaccccaagtgtgtgtgcatgtgtttgtgtgtgtgtctgtcttgcctccgtggctttatattctttgctctctgtggttcacctcttctttccctcccacccaagggtccctcagcagttagcatcatgggttttctgagcccccctgtccctgcccctcacttctctcctacctcgcagaacatccatccatgagtgaccacacagaacacagtcaacttctgcccctctgacatgtccagggctgctttggagaagtagcaggattgctcagccaagtcgggggtaacttgaaacacagcatgggaagcacacggctgctggccgatgtggggatgagggtgtcggaggagcagggaggagagaactcgggtaggggtgtgagtagtatgggtcctgagggggtaggacactgaggtacatcagatgcccccaatgcaaaggtttctaattaaaagggagaaaacaaaggggtctcctctccagggacccaagacacagactctaaatacctggctaagtgtctctgccaagttgtccttcagacatgccttttctgtccccatcatctgtgtcccattgtccttcagacatgccttttctgtccccaccatctgtgtcccattgcagataatgtcctgatcttcactcaggtgttctgggctagaacaccttactgttgtcatggtgcctccaccatctgtcactaccctccatttttatcaaataccaagcatactggtcctacttcaccacatccactctccagtctcttctggcccgctgccttgtctcaatagccccgcccaaacaccctgcactctgtccccagactaaattcttttacatttttttttgatatttcattttaatcctatgtgtataggtggttttgccctcttgtatgtatgtacactgtgtgcatgcagtgcccataaaggccagaagagggcatcggatcatctgaaactggagatgcagatggttgtgaggcaccatgtaggtactagtcacagaacccaggtccaatgggtgagcaccggtgatcttagccactgggcaatctctccagtccccaacctcatttcttaaaagagaaatctttttttttttcctgctgatcaccacctctcagaggaaagaagaaacagtatttcaaattctgacacctcacctcttagctcccgtgcccttgatctcttctggtccgcttgcctggagacatattatttgagatttccccatcggcgtaggaaagtcctgatgtctctgtacattcaacaacacctggcattgtctgtgttttcctagtgtgcgcgatatgcattcaggtagttttgacttgatttccgtgataataatagagaatagttcctatgttaggtaccacagaccctcatggatctctgcctgaacacatgcaacctctcccacaattcctgggtgcacgttacaatagcatataacatgtagtcacagatccgcagactcttgatgtgattcctcttccagagactcaccccgccccaggggaggaggagagtgacctctggcttgtttagaagcaggatctgaatccttccctagagggagtgtggactgtatagacctggagaacttggattcccttgtgcttttgttttacatggagagctcccagagcatcaaataatccttcctgcacccaacggcttggcactctctcctcctccctccttccttacccagaatcccatgcatgcacttctaagttcagagattgccacgttcttcagcctttcattcatcttctgggggatgcggggggcggggggggggcacccttgctttttcatgcgtgttatgaagtcctctgtgacaacttcaggaagtcagactctggccaatgtggatgaagtggcacttgtgtgacattagccaacctggaggcccagaatggacaaagtggcacttgtgtgacattagcaatcctggaagtttctgggctctctgattagacatgaccacttgcctctgagctgcagcctcagtgctccccactggcatgtcttagtcggggaatctgctgtctaagaatgactttaagaatgcacggaggcggaagtgatttaaggactgaaatggagttcaggaagctaccccgtgacttggaggtggtgggaaggaggcaggtgaaaaggacgtacaggcccatgtgcagctcagggacacctctctgaccgtgttcttcactttaaagacagcagggtttgtgtttgactgctgtggacgaaggatggtggagagacagatgctcaatgtttgtcacacggaaagtagggaggaagcacaaccatttgcttcagagctcactctttgctgtttacctccaagttctctggtctgagaaaagggagcaggaagcaaggggacccatgccccaaagctgagcaacttagaaacacttccctggaactctgattgtgttaatgtggttttcttccatggacaggatttttttcaaggtcttggaggctgtacatctgaagtgaaggattagacagatgttcccttcaggtggtaggtactgagttaaccattcctttcaggtctgcattagttactattcatgttgtaacaaaatacctgaagaaagggcttaaggaaggaagtttattctggattgcagttcaaaggcacccagtcccagcttgcagttcaaaaggaatcatttctggcttgcagttcaaagggacccaatcctgtcttgaacttcataggtacccagtcctggcttgcagttcaaagtgacccagtcctggcttgcagttcaaagggacctagtcctgtcttgaagtttaaagggacccagtcctggcttgaatttcaaagggacccagtcctggcttacagttcagagggactcagtccattattggcaggggagatgtggtggctagagctggagacagctggtcacattgcatctaaagtcaagaagcagagtaaataggaagtggggataatctataaaacccgagggtccagccacaagaccccacctcatccatgaaggctccacaatcttcccaagcgcaatcatctggggaaacatccattgaaaacacagcacggtctttctccgcggcttgtaagtggatatattttccccatgattcttgacattgtttttcttctatatctatctgggacgttttttcattgctctgtatttaagatttattttttaatatttgattatgagtatgtgtgtctgtgtgtgggggcagttgcctatcagagccagaagagggcatcggatcaccctggagctggaatcacaggttgtgctgggacctgaacctgggtcctcagcaggagcagttttcagtcttaaccattggcacatctctgacagccccaacatttccctttttatgaggacattgagcatagactaagaacccacttgcaagttaggctaagctgagccttgggattcctcctgcctctgcttccccatcactaggatgacaagtgcatgccaccatgcctggctacttacatgggttctggggagccacttcagttcttcatgcttctatggcaactactttgccaaccgaaccctctcctcagcccccaaaatgtatttaatacaccaagaattagttcatcttgaatgaagtgacattaaatgtgaccagagcacttatgacagtgtatggttaggcaaaaataatgtcacaggagtttctgactttttaataaagacatcagagttcatgtaatttattcagtatgaataaacacacactaatgtgcacgcacgcacacgcactgcgctctgttctacttcacccttgtgatcacccaactcacttctgcttcctgggtgcggggaagagagaagagagagagtgagagtgagtgatggtggctcacagaccatgtacttccagctcagagaaataatcacaaaagcttgtcatggaagtatgccggatgcatatggcttttgctccatggcaaagtcaagaagattcaagtaaaagaagaaaccacaaattaagtcactttcagaaggaagtattttttggctcgggactgtgtaaaactgttcaggttggccttggctgtatgggctatgggcacagccaccatctattgataagctgtgtgtgtgtgtgtgtgtgtgtgtgtgtgtgagagagagagagagagagagagagagagagagagagaccgaccccaggatctgccagggccaactgcacattcaatgtcaggaaccttccaggtcagaaaatggtcttgagcaagctgttttcttcccccctgggcactgagcctggaaaaacgtatttgcatgcttattagtggattagaagtaaatcttgcttttgaataaagacccgttcttcatatctctccacttaagctggtcctgggctgtggtgtatgaaatctaatctgcagtacccggaaatggttatttatcgaatgctctcctacagccattaggttctctggagcggtggttgggaaatgatagatttctgcgactctggctcccgtagagctctggtttatatattctacctctgcctgcatggccagctctgagggaggggattagaagcccctaactgcaattggcagaagccctctacattagcctgcaccattcaacagccccagtacctgacttaatatgctggctttgtgcttggaggtaatttgcgaatactcttcaagcaactgtgcctcttgtgtatctgcttttacaaatattcccttctaattaagaaagggaattgggtgtactcttgctggggcagcttttcccttttcctggcaggagaatgggtgctgggaggaggaacaacaaaaaagtcatgtgcatacacacacatacagagacatatacacacagacacgcagatgttcacacacagagacatacacacagacacgggagcacatgcacacacacagacatacatgcacacacacacacagannnnnnnnnnnnnnnnnnnnnnnnnnnnnnnnnnnnnnnnnnnnnnnnnnnnnnnnnnnnnnnnnnnnnnnnnnnnnnnnnnnnnnnnnnnnnnnnnnnnnnnnnnnnnnnnnnnnnnnnnnnnnnnnnnnnnntacatgcacacacacacacagacatgcacacacagacacacagatgtgcacacacagagacatacacacagacacaggagcacaggcacacacacacacacacacacacacagacatacatgcacatatacacatacacaggcatatgcacatagacatacagatgctcacacacagagacatacacacagacacagaagcacatgacacacagacatacacacacacacagagacaaatagaaacacagatgtgcacacacagagagatatacacacagagacatacacagacacaggagcacacacatacacacacatacacacaggcatacacacacacatacacagacacacatacacacagatgtgcacattcacagatgttcacacacagatattcacagaagcacatgtgtgcgcacacacacccccctccctgatcccaccaatgattatcaaagctgacccttgaagctcattcttctagaatacactgcaagtggtgtttcccatcccccctttccaactactgggattgccgagtttaaatccactctgaagacagtggaaatgcaatactctatacaactgggcaactaactaccttcaaggatcgtttgggcaaatggtgctgaatgaaccacgggggactttacctaatccccgtcatgacttcccagctttgttagacgctggccacaaacacagaaactctgacacatgagactctcttctcagtgaaagacaccagagataggccgtcccttgctatcgtgtagtgctgataagtacactacacgatgttttgggggcacacaaacacctttatgttttaaaggggcatgtgcctttaaggttacctcatggttcaagcaggaaggcttgtcctcgattgccttgccttctggaggttaagaaaaggctgggatggattttggaaggcaccatcatccttcgtcccacaaagcagtctctcggaactcatcctcctacctgagctctgggaaggggccctcactccatgtcacacctccagaggagccacagagtggaggttaggagggttctggctcagccaatctcaagggcactttggagagttaagctatggaatatggctcagtatatggtagagcaaggtctagtctccagcaccataatgaaggaattaacctgttcgaagttacacgtctctctttaaaatgaaacaaacgtatttctgtcttactctggccagtgacctggggtgtgtgtgtgttgttgttgttgttgttgttgtttattctgaaacagcaggcttcctctgtcctgttaataccatatggaagccattacctccctgtgagtctttgcatccggctctgtacctggggtgcacttttctcatgtatttcttctggaaccttctgaattccaaaggtttcttcttgcccattctcctaggtctccctctgtggtcctgatgatttcattcacagatacaaatacgtccctaggctgactgcagggccacctcatttcaaggccaggatctatttcatcaagcagtgtgtggtctgatttactttgggagcctggggtaagcaagaggtgggccatttgtacgcccctttgatttcctacctcatgtcctaagtcctcagggttggggaaggagaggagagaacttgggggagaactttaagagatgttttggctttgagagcctttgccttcgggagtggacatatgctgacatcatgggtctgagctagttaggagcaggatgggttcctgacaaaagagatggccttgcctctccagccatccctgtcagaatctgctcttaggctccttgcctcccactctgggagaatacaagatgtccttcatcaggagtcggtcctctggccatgggcttctcagcctctgaaactgcaagaagcaaattgttttgctttctaaaatgacccagtttctggcgtccctgctatagcagcacaacatagtcaaaaaacaagtatcaaacaccttccccgaatggtacagttgtgacttcatgtcctcaaggtagcaaattgtcaagtggtccccctcccccacgcccgcccataggacctaggtttaagggcacttcaaaacatccatgtgagagcatcctcagggtaagtaggattcccttcaataggggtgctaaggctcagttcttcccccagtcatcctttccgtatggatcgtattagagtcaggttgtcctcagagaaggacctctcagggtaagactagatttatgaggtgtatgtctaagtgaccttccaaaaagtcattgaccttttgcccaactagggctgcctgctatctccaaatggccagccctcaccacctcttacctctcactctgcctgggaggcatttccatagcaacctgagcatctatcctgaaggggctgcaagtcggcaagttcctcaggctcacccaagtgctgcctcgggtgcctcactgtgcttgctctctctgtcagctggggagtggtagcatccgggagggacagggagcagacacctcccacccaagcagctctgctccagggaagagtctgtgatgacagaaatgttcagatccgcactgtcacacagggtggtcccacagggtggtcccacagggtggatgcggaccaccctctgctgtggggcacttgaaatgtggtggtgtcgctggcgatgtaatccagcttcatttcacatcatttaaatttaaatagccacttgtggccaccgcattagccgtgtagtgaggctcgagagtaaagaacggggagaggtcatggcagcaggtttcctcaccgacagctctgagaccagaaaaccccagcgaacgtcttgctctgtttgcctggacgccatcttcatggcttcctaagctgtaaagaggtggcattgtggatggctggtctaactggcaggtcacaaagccaggttagggagatagatgctaacttttatcttattttagtgtagtgtgtgtgtgtgtgtgtgtgtgtgtgtgtgtttgcattctgcagctgggtacatgtgtgtacaggtacatgtgtgtgtgcaggtacatgtgtgtgcagatacatatgtgtacaagtgcatgtgtatgtgcagtggagtgtgtatgtgtgcaggcgcatgtatgtgtaggagcatgtgcttgtgtgtgcttagatcacagttgcacttcagaatctcagtcactctgtagaggcaactggtatcttagagcatgaaattcttgtcatgatattcaagccaccttagattttgtcactttaaagtatatagccctacagtgtggggtattagccaggatttgttggttagagtcagttctggaggctgcactaatatgcagtttctgtaaataaaggcgtaatcgagacaattaaaggcagagtgtcaggcccctaggacccctgagaggatggctccaaatccacactaacacagtaacagaggtgaacagtgtgtgtgtatgtatgtgtgtatgtgtgtgtgggggtgtagtttatgtcacggtgacaaaacaccctgatagaatagatttcatctagctcgcagtttgaaagacatagcctgtcatagcaaggaaggtatggtagagttccttgctgtggcatcctgtagctaggcctcctttccgtcctggtggactgggatgctgagagagccagccggtagccctgaagctctgctagggtctggctactgcgtcacgtgtctacaagcctccaaccttctaacaactgcaccccaagctgaggacagagcactcaagcgggagcacgtgagccattgcattttcaaaccataacccagcttcttcaaagggctgacatcagagtgactcagaaacaaagccattctgccactgtgtcattatactgaacgtccagttctggaagaaaacattggcttggcccagtccagggaaattgtagaggctgatggaagggcagagaatctcaactaatgatcccattagtactgcataagacagagatagggcgttgccaagagaaaacaggacaaaagaggggtactggacacaggaagacagccccctaaaacacacacacacaccctctataaatagagccaaggggtttgaacacacacaggacggagttacctgaataaacctggcattcatctgtcactgtgattttcatcaatgaatcaccaaataagaaagttcatcataggaagggggctgacggggtgagtttgtttctccaagtagcccactttacagatcgaggaactcggcgcttgtccaaggctaagcacagcagcaatggagcagagacgggtatctcgactgcagaaccgcgtttcgcatcctgcctgtctacagatgcttgtacgtttctcaaaagcacggcacagccctgtactatccgctctagggaggccgaggcagaaagattgctatgggtttgaagtcagcctgcgctacacagtgaaaccctatctccaaaggcaggaggacaatgacaaagcccattagccatctgcacagttgaccgttgctgtggtaatctctcagatgcatttctggtcggcggcatctaacccgaagccctaggtgacaagtcatcccgactcaaagtcattttcctctctgctctgacctcataccacggccagaatatccaagagctgacggcaaagactcttaagccagaccgtgggaaagggtttcaaggacggagccctaatggtgcccagctgcttgccttctgtcagaaatgatctccaaactcagaatgaacctggagagcagctttcatataataatagctttagcctgtcaatggaggcacatgcctttaatctcagtactcaggaggcagaggcaggcagatctccgagttcaaggccagcctggtctacaaaatgagctcccagggcagctagggatacacattgaaatcctatctaaacaaatcaaccaaccaaccaaccaaccaacagtcttagttagggttttactgctgtgaatagacaccatgaccaaggcaactcttataaaggacaacatttaaccatcagacaaacaaaccaataatagttttggaatttcttacctcagatgaaacggcaaattcggagggaggaaagccaaggcggtttcttcaatggccactgtgttgcgggcacagctgctctcccacccccatcactagacagctttgtcagtagccttttatcacgggtgcagttttatagcctcttgatataagcctttccttcagaaacaatatgtttgcagcaaaattaggcttttgcatctcacagcatctgctgcactcactcatcacgtggagccggctgagtccaaggcttgagcagtgtgttctcctgccccagagggctagccatgagctctgggtgggaaaatgagggcgggggaagcccgagtctcatagacgaggaggaaggagatgggatgtcatcttcactgaaaggcaatccctgcctaccttaaccagcctccctccgaatgggcctatgaagagtcgaccaggctggcacaggtttgagttagatacatgatacctctgcatttccatttcttcctctggatgtccggacagtaatagttacacctgccttgtgggtcagtagtgcacattaggcaaggccatgcgcatctcgcacctgatgcttaggaaaggcttggtaagtggagctgctggcattgtgatgtgcgcacctacacccaaccctccctttacccagccttcctttattccctgtggtgagcagcacctcccttggaagtgtctcatcttttaaagcccatctcatgctgccctcttttggaccagttccacttccatgggagacggaggattgagagctactccacccacgagtgcttccggaggggcgggttcccccttgtgctcagaaaagcctcattctgcacatgtggacaccgagccttgaagttccctgttcctccacctgctctgcactttctaggcacatccttagtcgtctcctcctcctcctcctgtcctccccctcctcctcctcctcctcctcctcctcctcctcctcttcttcttcttcttcttcnnnnnnnnnnnnnnnnnnnnnnnnnnnnnnnnnnnnnnnnnnnnnnnnnnnnnnnnnnnnnnnnnnnnnnnnnnnnnnnnnnnnnnnnnnnnnnnnnnnncttcttcctctctcacaaagctttctgagctgtcctgggtacaggtattcttgtccaacagggattctctatggggagatccgtatctatatttactgtatcatccatcccctattgtctatttttctctttccttaaatttcagttacccgtggttgtttggcagaagtcaccatataggatggaaaattagacagatgaaaaatgggtttcgtgttggggagatggctcggtcagcgaagtgcctgctgggcacgcgtgaggacctgagctcagccttacagatcctccatgaaggcagccacaggagcagcgtgctgtggggactccagccctggtgaggctgagacaggagtcactggccctccagcccagctggatcagtgaaccccaggttcagtgatagaccctgcctcaaaacaaggtagagagggtcttgttgccggcaggctctcctcggcctgccagcccacttccgttcccacgggtgcttctgctttttaacaacccatctgtttctgttctgtgtctccttgaaaccccacggcttcctctagctcctcctggcagcagctaagattttcacctaagctgatacatgttttctcttaaccgcggctaaaattatccttgggctttaaaagggtgggggctgtttgaagacacctgatgccaacttctagtgtccacatacatattcacagtgtgcccacatgcacatgtgcatacacacacacacacacacacacacacacacacatacacacacacacacacgagatttcgaactccgtgctcttctgagtagcacacactgtcctgttctctctggcatgagacatgaatcatctctttgcccagtgtatccacactgtatacactacctgctcattagtaactctggagttagggcagttatcagtttgactgttgcggcaaagcaatactgttagtgtatttttcttcattcattcattcattcattcattcattcattcatatatgcctgtaacctcagcactaagaaggctgaggcaggaggactgctgctagttcaaagtcagtactaggtccaccagagctatatagcaaggttgtctcccaaaacccaacaacaactaataattaagtaagcacataatttaataagataaaaaaagtgaagacagagtaaagttacatggtctactcaaacatctccaggtttgccacagcagatggagaaggtgaaagtctgggatatacaaattacccctttcagcccagtgggaagcaggccttgctcctgtcttgcctgctgttcaggctggacatgcagaccttcagagagctccctggggaatggggttccaaagctccctgagggacaagcggttcttatttagaagcctcacagaaagctctgcctttcatcagatggaggtttgatgtctgggctatccagtcctgcctgcacggtgggggactgatcggagcttgctgaagtgaactgaagggtggaagtctggttctgtctattatcttccctgaaataggcctgctccttgggggtcctcaccttggtgacaattcatttcctctcatctctgatcacaagaccaggctgccctcatctgcctcccgtcccaagttctgctgaaagttgagctggaggaagtcagtcctccatggctcctcctagtggtgcccagggctgcgaatgcagggctgggacaaatgcagagtgaattgtgcagcctggggacagagtaaagcagcattctgcccctcatccccacccctacccccccccctttcctccgatgaggggcagaaaagtgagaagctgacatctgagactcaggggctcagtcgcaggagagtaataataacagcaagcatgggggcgggggaaggaagtagctggtgccacacctgctgccagtggccaggtttcaggggcacactgggtactgtttgcctgtcttccactccagtcatgctgggtatcctcctgtggtccagccccaatagacaacatcctcttccagcatttggaatgaaggcttgtgtctactcagggtgagatctactcccttgctacctatgatgcactgaggcaagcactgggtttttctgtttgtttatttgcttgcttgtttgttctggtggtgctaaggcttggccattgtggcgaagggtcctcctcctgctcaaggatatatgtgtttgtcatactgaacacggttgaagaaaaggtagcatttgctcacaccaataacccgagcacttgggaagctgaagcaggaggattgctatgagttccaacctgagctacagagtgagacactgtttcaaaaacatgtcaaaaaaagcaagaaggaggaaaggaggaggaaaaggggaggcaggctgaggagacgctacatcaccaagtgcttgccacacaagcaggggagccatattcagatcctcggcacccgagtttagtcgctgaaatctctgctggggaaacagcggcacacagatctcactggccagccaggccagccaaatcagtggacttcaggttaaatgagagacagtcacaagcaaacaaaaatggtggcaagcaactgggaaggtacccagtgttgacaccgggtgtttcaacacacatcaccaatgcaacttaggagagtaaagagtttattttaccttctacttccagatagcagtctatcatccagggagtcagggcaagaactcaaagtgggagcctgaactcaagcctgcttgctagtctacacagcagtacctttagtcagggaactcacacacagcagaaaccatggcggaactctgctttctggccagctcgcagacctatgctttgctagctttcttacatagtccaggaccacctatgcagggaatggtgccgcccatagtgggctgggccctcctccaccaatgaacattcatgacagtttctctgagacatgccgccatccagtctgatctagggaatgcctctcagttggcttcctgttcaggtggtttctagactgtgttaaattggcagctaaagctaatgagaacaggcagcatggcgacttgggagttagcgctgctctttgggatggagcagacatgcagctgcaaagaataacttgtcaggacacgattggattttatatatacttgattttttgctacctcagaaagcacttatacctaccgctgccccccctcccccaggatactgaacattttgtatttgaacatataattgtctaaattactaggatagtctgtggaaaggaatacaggctgtagaatcccaggatttcagcttacagaaagagaattcccttaaaaccttcaaggtatgccagcaagagtgacgaggggccagggatggcagccgacacctatcatctcattagcggccaggaggattgccccaagtttgaggtcagcctcagatacaaagtgagttctagaccagcctaggcccatgtgagaccccgttggggcgatggctgagtaggtaaaggacttgctatacaatcgcgtggacctgagtgtggatcctcagtgtccatgtaaaagccaggcatgcatgccagtgtgccactgtaagccaagggccagggaggcagagacaggaggatgccagaagctccctggccggccggtgaattagtgtgttctaagtttaattccagacccttcttcaaaacgcaagagggagagtaagttgagaagatagttggtagcaacctctgacctccatgtgcgtgtgcacatactcacacatatatgtgtatgtgtgtgtgtatgtgtgtatgtatgtgcacannnnnnnnnnnnnnnnnnnngagtagatctcaccctgagtagacacaagctttcattccaaatggtggaagaggatgttgtctattggggctggaccacaggaggatacccagcatgactggagtggaagacaggcaaacagtacccagtgtgcccctgaaacctggccactggcagcaggtgtggcaccagctacttccttcccccgcccccatgcttgctgttattattactctcctgcgactgagcccctgagtctcagatgtcagcttctcacttttctgcccctcatcggaggaaaggggggggggtaggggtggggatgaggggcagaatgctgctttactctgtccccaggctgcacaattcactctcacacatacaaactcaaacaagtacatatatttacaacatttaggtacaccaaaatggagagaagggaggagggagggaggagggaagggagggaaagagggagggagggcaaatcataaatgataatagcaaaacccttcagaacctcttgaggtatgtttgtcccagtaagttgatgcaggcagactcgctgaacctctctgcttagaagctaccccggggacccctgtcatacacccgcaggtcactttccctagcatcttcacctcccatctggatacgtatctcatctcctccctttgtgggaagaaggggtccgtgacagatgtagaaatcactgtgtaaactcctggccatcgaggaatgtcctgggtgccttctagtcatgcaaagcacctcagatcccatcctgaattttctaccgcttggaagcagttgaacgttggggggcatgttgaggggcctcatcctggtatctagagcagcttctctatcttgatggaaagacaggatgtgaggtctaaaataagacatgtgtaggagggcatatagcacatttgccttggaaatcggattatatttacagtaagataagaagataaatgtaaaattccattggcatgggctgtggggcgattgcatggaagtgccaggatcgaaggcatctgcagttacagtgttagctaagaatagaacgttccatgggctcttctgatgcattcccagtctttgttgaggctctccatatgcttatgcatagggtagggtgacgcttccatcagattctggctcccagcccctgcctcctatttttccatctacaagattataccccatggtccctgctcatgtccatgtgcttataggggtggtatatatgcataagtgtgtgtgtgagggtggaggtacatgttggccgtggggaccttggctgtcactcttcggctgctggtggtccatcttgtttggagcagactctcgggagcctggagcttgctgattggctagctctagggatcttctgggcatctcctcccaaatactggggttatagatatgttctactgcatctagacttttaaagcgtgggttccgagggattggatccatgtgctttgttgtctgagccatttctctaactcaggaacttgtgtttcttggggtgcatgttaaatggtcctgtgacacatagtggcttttgtaagacagaagagtgtttgtggcccgtgagtctaagggcttcattctagctgcaagggaggcagggtgggagcttttctttaacagtccttgtcccgctaaaactccattcccgggaaagggaggcagaacggctgaagcgggacccagtctcccatatgccgatgttactaggatgcacacagccaagtacctgacaagcagcgacttgaaagtttaaccagctctcagctttaaagggcagggcagggaagggggcgagggcgagcacggggctgcttgctcacatctggacagatcaggaagcagagacaagacagacaagacaggaagtgaggctggactataaaccccaaagtcccgtccccaccctccaccagtgacccacttcctccagtgaaattctacctcctaaagatttcaaagcctcccaaatcagctccctgagctggggatggggggtggggtgggggtgggcgtgttcatatgtgagagcacaggagcctgagagaggcatttggcattggatccataacatgagttatctgatagggcagaggcaacagagagtaggcagaacttggctgttgattggcaggaggagcaggagagaagggtaataaatcactcctcccctcttccagcttaggaaaccaacgctggtctcaggggaagcaggaagtacttaataaaggaagtaaaggagtggagaagaggtctgtggttgggacgcgttgctaagagcccccgaatgcttccctgggggaagtagtcagctcttgaacttggcacaccgcaggaaggacctggccagtgacatggggagaggcagcctgggctggcttagtagaaggccttcccacacagccctgactgtgctccctccttggctgtcttcatccacttagcatattatagcaaacaccattacattccacgcctcaggaaaaacagacacgactcctcgcggctccggaggcccaggtgaccaagacacgggaggcagcagattcaatgtctggttcatgcctgacatttttgctgtgtcttcacaggacgggagggactgttgggttcccttaggccacttttaggaaggtgctaaactcattcctgagagccccatgctccaatcaaatcaccccttagacccacctcttgatagcttcacggtggggcttagaattccagggtgtgaatgtggagaggagaccacccattcagcccgctgcaccgtcctcctgacactctgttccagccccaggctgtgtgtggtccaactgagcttctccccttcaatcgagaagccataccttctgatgatgctcatctctgagtggcagctctttgaagagcccttctcctcccctagtcagctcctacacatccctttccatccaactcgagagccacatcccatcaggagaaccttcatgacaaggaccacgtctcacccgattttagttcccaacacagcggaacagaaggacacagggccctcccgagtctgagggacctccttggaagcacagggttttctctgggaagaagaaatgaatgccgggtttaacaaaacaaaagctggctgcagtatccacaggcagagaggcagcaggtggcaggttcttgtgaaagggtctagttaccctggtgctatagagtgacacactggagctcagcatgctgcggggcgggttacactcatcccactgtgaggtgacctgctgtcagtaggtgaacaaggcaagttgagaggcacctgcggacagaagacagtcctgcctcacatgttagtggggaggatcaagaggcacattagcgtggaagattaaacgccaggtttgaatcagtcggattgtgtaatattagacaaaacaatgattttgtccctgcagggccagtgtaggagagcgatgactctcagaaaggcagaaaagacacaggttcattttgagacagttttatgaggcagggcatgtgttgggggtgcacaagataggtcagaattcatgtaaagcttttcctttcttgtcatgtggaccatggtgccacatagacacccagctagagcttgtgaccgtgaccctcactagtccatagagggctggggacgtgtgcaacttctttctgtagaagcttcactgacagttgagacactggatcggggaggatgcctacagttactaacggcggcatggccgctccttctgtggtacccaagagggaagccagtgccacgattctgagccagaactgcagcaagctttaaaatacaatacgggtcaggatggactttggtcacgaccactccctggaatccccagctgagtgatgacaagatatgtgttataggggcaaaagcataaagccactgtattttcccatgtggctttgttattttccaagaactacaactcccagcattccaggaacttacacggtcggtgggcatgtggggcttataggtaaactttggctcagacagtaggtatgggctcttacagaaggtttatcctacatatgagagagaaaccagccaaaggcatctttccagcctgaacatggccgtgagaggaaggggtgagggagaacgagaaaggaaaagagagaggaagcaaagagagtccctgggaacccagaccaagaggacaccggacaccaaaccaaagtggctggcttatgcaggaatcagattagctcaggggttggagagattcagggtagggggcagggtgagaagtgctgagaggaaccagggctccaacaggtattggccaatgccgagaatctggcagccagtgtctgccttgatttgttaaatagacacctcagacataggttaatggaggaacaatgatatcttttttgtatttatatttatatcttttgccaaagattaggacagtgcttgctgttaacaaatgacaaccatcttctttaagtctctgagagagtgtcgactcttgtctaaatgccagactttgggaaaaggcatgatgtcttgagacctaacgcagtaggtggtacacactggtctcagatggtaaagagcttgctgtgtaagcctgagaattggagtctgattctccaaaacccgggtcaaaaacctgggcatgattgaatgcacttaaccatcccagccctgcggaagtggaggcaggctggtccctggagctcaccagcccgccagccaacccagcataactggacagctccaggctccactttaaaagaacacaatgtgcccagtgtctgggtggcctccacccatgtgtgtagtatgtgtatctacacacgcacacatgcatgaacacacacacgcacacatgcatgaacacacacatgcacacatgcatgaacacacacacacgcacacaacgatacttggtggagtggagggtggttcttttgccacctttttctgcttccctttacagagaggtcgcttcaaactgccccaaaaatgggtgtggcagagttaggcagagaggatcctgtagctgccgtaacaagtactataaacacggcagatgggggtgaaacaccaaattcaaggtatcagtagggctgatctcttctggaggttctaagggggaactgagcacacctgttcccccaactcaggggactcctggcggtccttagagttttgggcttgcagacacacatccctcccggctctgagcctgacttctctgtatatcagtgtctgtttccctagctttcctttgagagagttactggatttaaagtccaccctaaggtgggcgatctcatcccaaggtccttgcctgtattacatctgccaagagccgagtttcagttcagctcatggtcacagagacagggttaggcttagtggaggagagcagaggggagtgaaagagcctttttatcagtagaatccttgtgatttttttttcccccactaatggtgccagatggaatgtgaagtggatcccgcggtctgaagcacccattttctaagacactagcacgttgtgtctaatgctgctaacggcatccctccagctcccgtgtaggctcaggctaaaagtagagatggctcaaggttaaagcccttgccgtgcacacttgaggcccagagttcagatccagaatctaagtaagtgctgagtgggtgtgtgtgtccctcctgtcatgaaagtgctgagtgggtgtgtgtgtccctcctgtcatgtaagtgctgagtgggtgtgtgtgtccctcctgtaaactccagcctcagaaaatgaaggcaggcctcctaaagcctaactgtaggaaacaggtgtttaaaacatgagtctgcgggagacatttcagagtcaaaccataactaacacatacacacacacacacacacacacacacacacacacacacacgaacagttgtgtttgcatatgtgtatgtgtccccgtgtgaaggccagaggtcaaccttgcatgtcattcctccagagccatctaccttgctttgtaagacaagggttccttactgtgacctagaatttcacaattcttcccagttggctggccacagacctcccccgaggcatcctcctgtctctacctcttcatccttggagttacaggtatgcactgctaactaggggtttccttgactcgggtcctggagaatccacactcaggtccccaagcttgtgtggcaggcaggcaggcaggcaggcactgtactgactgggccatctccccagcacataaattctgccttcattctgggggcccaagctggtccatcctctgccccagaacgtaagttatttattcagctcatctaggtgaacctaagggtgggttcaccctttgaactcagcctgggaacagagaggcagtgggtaagaggtctgtggcctccaggggagacatcagagaagctggtgccctacggtactcaagacttgacccatacaagagctctttggctctcaattctatttactctcagctgctgtcgagttaccaggaattcagtcatctccttcctcatacttcattaggttagggaagccgtgacgaggaaagggtctccgggacatgagcctcttgataacacggagagaggaaaacagatgcccagatgctaatgaggcgcgtgggaaatcaacccgcagacgccacctctgcttgcagaccagctggggatggcgctaacaaggacctgacatcctctcctgctcctcgatgacctaggccaccaccctttttgtgtagtcacccactaatgaatgtttccaagacaattctgagtcatcggtacagaaattaaataggattatggatgcaggaaaatgaatatataacccttgggaatgacttctatcagtatagggggatactgccatggagtgacaaggcctgtggctgtaggaaaaaacagactaattggactgcccagctcctctgtggctatgagtcaacccagcaaggctgttcacactgtcagggtatagaggtcaggccccaggtccacaggaaagcagggaatgggggtgggatgggggtggcagtgggggtggctgatgactgcttctccagcagagcttagcctctatggtgtccccctgctgtggagcaactgttctaacactgtgtccctgtaggatgaacagctacacaaagcatggtgtctcagaatcctccaaggccactgtgtttgctccccgggactcccacagcaaagggccacctgctgggtgactcaaaacaacagggacaccttgctagattctagaagcctgagatgaaggtgtccacagggccaggccccctctgaaacctctctgagttcttggctgtcatcagtccctggtgtacacatgaccaactcagggcaccccccaccttcccacccacatcttcctctaacctccctgtgttcctctgggttgccaccacctcttgtaaggactccggcactgtatttaagtaagacccaccttactccagctaagcctcgccttagtgaatttcgtctacgtagattatttccaggggctggaaagagggttgcaagcccacagatctgagtttaatcccctgaacccacattttaaaagctgggcatgtgacgaggatgtggagaaagaggaacactcctccactgctggtgggattgcaggcttgtacaaccactctggaagtcagtctggaggttcctcagaaaattggacataatactactggaagatccagcaatacctctcctgggcatatacccagaagaagttccaactggtaataagaacacatgctccactatgttcatagcagccttatttgtaatagccagaagctggaaagaagctagatgtccctcaacagaagaatggatacagaaaatgtggtacatttacacaatggagtactactcagctattaaaaacaatggatttatgaaatttttggacaaatggatgtatctggaggatatcatccttagtgaggtaacccaatcacaaaagaagtcattagatatgcactcactaataagtggatattagcccagaaatatagaacacccaagatacaatttgcaaaacataagaaaatcaagaagagggaagaccaatgggttgatatttcattcctccttagaatagggaacaaaatacccatgaaaggagttacagagacaaagtttggagctaagacgaaaggatggactatccagaaactaccccacctggggatccctcccataatcagccaccaaacccaggcactattgcatatgccagcaagattttgctgaagggaccctgttatagctgtctcgtatgcggctatgccagtgcctggcaaatacagaagtggatgctcatagtcatctataggatcaaacaccgggcccccaatggagaagctagagaaagcacccaaggatctgaaggggtcttcaaccccatatgtgtggaacaacaatatgaactaactagtaccccccagagctcctgtctctagctgcatatgtagcagaagatggcctagtcggccattactggaaagagaggccccttggtattgcaaactttatatgccccagtacaggggaatgccagggccaagaagcgggagtgggtgggtaggggagcagggcggggggaggttatagggaactttcgggatagcatttgaaatgtatataaaggaaatatctaataaaaaaaaatacaaacataggggggaaaaaagctgggcatggtggcccatacttgtaatcctgactaaagagatagagacagagggattaccggtttggacacaaattgggggtggggggggctgtattcaatccagggcattactccctgatgtgatgtacaattttttgagatggaaccttgcaaagtaggccacgcccaccccagctcccaagaccagtataccctataggccagacaaagcctgaagtgcctttttttttttttaaaaaagcttttattcttgtgctctaaagcaacagatcgcacactctgcctgtgtgcacttcagacaatagatcccccaggaccttgctcattctcacagtacccaggtcagcctagaggagagagggaagtctgaggctggagagaggctggaagtttccagtctgagagagcctgttgtgcagcaggaggatctgagtttattcccatgtttacagaagaaagagcttagtgtggtagtgaatgttggctcacagctctggggaagggggggacaggccgtggtctgggactggttggctggcagccttgtcaacacctcaagtttcagaatggtgagagaccctattataaacaaacaggcaaaagaacaaacaggaaaaaaaatagtgatatattattttaaaatatcatacagttaatatatttggagttctttggaatttatattgagaaaaacatatgtattttcagtattgctgtagacaaacatctacataagactgttcaattgattgttgttttatatccaataacttttataatactcatttttattattacaatattttataaattttaaagaatatgataaaaaaaagaaaggtattgcaggttttgaaggggggctctccgggaggagttggggtacaaaagggaaagaagaatgtgatgtaagtctatttactcaaaatatgtttttaaatgttaacaaattcagataaattgaaattatgtgccttttctcatcataatgcagtaaaacttaaagagaaaaaaaaaaaaaaggtggacgactcctgaacactgacatctgtgtttggcctccagtctgtcccgctccccctccatctctccgttccccccacctctcgcacacaccacaaacttgaagtcgagagaagctgtgtgtccatcagctgctcaggaaagcctccacgccctcaccctgagtccgtgcatcgaggctgatggtcatcagacagataccgctctttagcacagacctggtgttgctaggaaccacagcttcagcagtctccgaacactctgtttccattgtgagacagaatgaggccatgggtacccgtgttggggactgactaggaaacttcctgtcctgtgtgtagccacagctcgtctccctgtcttgctcagtagatttccagtgtgactccgaagagcttacacttgggaactgtaaagcagaggagaaggaggagggaataggaatgaacgcagcaacccgagggtccctccgcggaatcagagcatctgccggggtgggctcgcgtggaccccctgaggtagtgcctcctctctaccatctggtatttgcccgctcctgtcccggccagctgcctgtcatcccatctccctccagcagggggtctggcaaatctgcaggtcccagttctcaccagatgaggctaagctagggacagggcacatgtggccggcccatgagatctgcctagaaaaagacaggttcataaatatcatggaggcatgtaggaaacccttgggcagacccaggagaggagttgtaagcggcccacagtgactcggaaatatctgtaagatggaaaaatctgactgtcaccaagtcctgcacagcagaagagaaagagctcggggtcccactcagatccaccgtggctctgcgatgggttttatctagtttttttttttatgtttttttttaaatgagcttagaagagaaatgcatctcacattctatctcttctccctggccagtatgatgtgagatgtttgccaccctgccatgataggctgacacttctgaaggcattggccggagcaaaccttccctcctccctcatcacggtgatgcacaggtctgactcacgtgagaaccaagcagccttggcctccgtgctctctctgccagttctctgcgtttgctaacccctttaaaagctctttagtgttggaaccacatgctctggcttccagaaagcagaaacaccccctgttccagatgcccactgtggtcccaacagctcccgtcacccatcagctcctcggggaaagtcaatatttgagtctccagcccatgcctacctcttctcttcttcacatgcacccctgctcaaagtcaagctcaggcctttttctttttctcctttcttttcttttcttttcttttcttttcttttcttttcttttctttttcttctcttctcttctcttttctttctttctttctttctttctttctttctttcttcttcttttttttttttagccttgcacatcggtgagagtcaaattattcaaatgctgttagtggttggggtagtcattcagactgacctgtgcttttgagtgtgctgcagaagaaaaatgcactgtgatatccatgtgtgcatgtgtgtgtgcgtgtgtgagtggtgtgtgtgtgtgtgtgtgtatgtgtgtgttagagaacataagctggtctctgtgtatgaaagatacattcaaagtggtgcacagttcaggcgtgcctctctcaaggttaattttaggacagttctattactaagaagctgctttcgcccaacccttggagatccacactcgccgctaatatttctttctgtttcacgggctgtgggcagcccgtctgctgtgatgccaccaactcacagtaggcagcccgtgcctcatccacgtttgccttctcctaccatccctccctcagccctgccccgaagagtggggaatgacctgcttcatcctccccttgcttcactaggatcacagacggcattctctcaaggagggtcagccattctccaatggggcttttgaacatccattgtatggctttccgagccctggaaacacagaaacttccaaaggtagggtcatggtcactagcatcaagcaatttagaaacaacacgtttgtttaactttttttattattattttggagttttcgtatacatatataatgtgtgttgagcaccttctcccacttcacccctacctcagatcattagtcccctttgtccccctagaaggcgaggtttctcctttcataccatatacatacgtgattttacacatccataaaatccaggaactatccatgagaggtaatatacagtatttgtctttctgagatgaagacagtgtttcacacctctaagtataaatgtttctgttaatcctgcctcaaaaagcaaagcctggtgaaaaagaaatgtataattaggagttagtgatgtctgctactgaggtaggtctggaggttctggggccccaagaatcccaggaagcctgagggtgctggggatgtacagcctgtgggatagccgtgggactgttctgtcctaagggaaaatgcatgtaacacagaggatgggagctacagtcttcccccgggtggagaaccaggagggggtcgaggtcatttttacaatggccaaagctagttctgccgccgagtccccttcagaaagtggcgcacacctctcgggtgtgtcaatcatactagtcagcaggaaaagagacctgctttctttgttctagccacagaagggcatggtggggtgaatggcagagagccccttctgctgcctgcaggaaggagtgtgtgcaatagagagatcgccctcctgggaggtcacgtggactggctctgggtgtcatgtcccttttcacatcgtctccatccctgtctcagatgactagttgattgcactttttaaatgaaccctgtgtccagggttactccttttgactgtttgacatctgaaagataaaaatcataaaattgctgtctgtaaagaacacagtgattcccaccctcacccccgcttcctttctgtattgccgttggcctcagccatgagtggtacttggcacagtagtcttgttttattaggatccttggccagtgtgcgctttattgccccttggcatgtcttctccttgatggcacctgacatgcaaacagataaggtctcctcctgcagaccatggagcctgagctcagggctcttgcctacaaggtgggcctggagaaccggcatggctctagctcccatttcctcttctggctcaatcttacagcaccttgaatggactctctctgtgcacctgggcttctggctcctcatagctccctaaaaggtgcggtggggtacgtttttaaagtacagagcagacgctgctgtgtgctaaggactgaatgatatcgcctgttatttccaacgccattaagatcaattatagcctaattacctacgtctaataaccccttatggttcactcgtgcagaacgtaggcaagtagcaaccagccttcctctaacgtgcaggcggcctgcaggtgttctccccaacacgcacgtggtaaatgaatagcccaagctgaaaacaaaggtctaaaagaacttaaggcctttatttgctcgttcaagtggatgctttgccccacagagcagttattgggtgtgttgtttggccagcatgatggtttcatctcagctaagggaaataggtgctaaggagggcttagacactgaggcatttactgggggacacggggagggagcagggattggtgaaccacaatgcacgtctgcgccccttgagaggagaaagaaggaggaggtctgaagcagaagggcctggaccacaggacagctcccagcatgttttcatcagacccatgcgagatggatgggcctttttcagggtgctttataagatggcggtgtaatgcggtggaaagagcacctcagcagggccagccaagatgttcccctaaggaaccaccgccatgcgacaggcctagtttattgggggaatgttgcaagaaagatttttaaaacaaacaaacaaaacaggctggcatggtggctgcactggtgcctctgccctggcgggctggctgacctgtttttatctcatggaggctctaactcagaaccccacaatctctccacccagctcgctaggttcccactggcaggtcattaccacgccagccccatgcttccaatccccacagcctttgtggtgctcatcaggcaaacccgctttgctgccgcacctttctctcttgaaccctctgagtgaaggaaaacagaacacaaacttagctcataaacaacggtaactcaatctctgggcgcaacagctaaaacctgatcttgtaagccttattaaaatccagttcctcgggccgggcgtggtggtgcacgcctttaatcccagcacctggaggcagaggcaggtggatttctgagtttgaggccagcctggtctacagagtgatttccaggacagccagggctacacagagaaatcccatctcaaaaaaaaaaaaaaaaaaaatatatatatatatatatatatatatatatatatatatatatatatatatatatatatatatatatatccaattcctctggtggcgaagccttgcagatccgccaagatactggggaaactctagcagcgacatcttacccctctgctgtccccatcccaaaaggacctaactctctcctgcttcctctcttcctctgtccaacccagaagtccttcctactcgcccagtgattggctcctatatccattaggggattggttcacaagaagccacctgagcatgtgactcattcctcattccagacatcctttcctgggagagcaggattaacattaaataaaagcagtacagagccatccacaacagggggacctggaaaatggtgacagagaaggacaaaaggaaaggggaaggaagagaggaacatgtgggaaagacagagacagagacagagggaaggaaagggggagagggagattaagggagggagagagagagaaagggagggagggcaagaggaagggggggagttggggtggctgagcagtcctcatatgccaggttggcttgcacctggcaggtggtgtgcaagctgttgctaggtagctgttgggcgaagcctaatggaattgtctgtaaaccaacagagaagaagcctatcttgtatttgagtgaacctgtgcaggtcctgccatgcttggccactaggttgtgaggtgtggtgctgagggaccacatctaaaggctggagtacctgtgacaggcaggaaatggactctgtcctagcacaggctgtgctgtggtttgaatgtggtgcggggtcacaagcaaggtgaaggtttatcacatagcagacacaggacactgtccccacagcctgagtgctggcttcttatttcatgctggggtgggatctatggaagaagctaaggcaggagaatcaccagaaagacaacttgtcaggtgcaaaattagccgtctccctgtaagaatggcctcctggagcagccggaatacatcagttgttccccgtgggcaaacaaggagaccggtgctgggagactgggtgatgtctaacccacaccagcagcattgctgccattttgcccatgctctgtcctttcttgtcacctcagattgtcatctcttggtctcctttctaaaattttaaacttcacccatacctgttttcggtggtttgtatatgctcagaccagggagtggcactcttagaaggtgtgtggccctgttggagtaggtgtgtcactgtgcgtgtgggctatgagaccctcatcctagctgcctggaagtcagtgttctgctagcagccttcagatgaagatgtagaactctcagctcctcctgcaccatgcctgcctggatactgccatgctcccaccttgatgataatggactgaacctctgaacctgtaagccagccccaattaaatgttgtccttataaaagttgccttggtcacggtgtctgttcacagcagcaaaaccctaactaagacacttttcatctacactttttgagacagtctctccccgaactcggaactcaccgattcagcctttcaccaactggaggaagctttgtatctttcatctctcttggtcacctacctgcctcccttctctggagtagaggccaccagagacctttgatacatgaggccagagagccgaagtcacaagggaccagtttccttacttgcatctcaccttctgtacaaaagctcgtggtccagttgagtgatagatagttcctagcagcttggtgatctctacccctattctgaccgtgtttgcaaattctcaccaccgtgctggcccctggaggagctgcgacaggctggccatctgagtgctgcgtgggcttttaaagcttgtaaaaaaaaaacaagctccccattatctcgctctccctgcatcgtgttagttatgagtcaaatggcctttgttggataccggggaaaataaatctgtctttggggtgccttaagatgcagagataaaaatgacgaacatgttcttgttgccttaaactgccttgtggttgacctgatttcacttctggggctgcaaggactagcgttggtgacttcctctggattccagaaggaaagaaaacagcccagctctggtgggtagagctctctgcaccttctggctgtggttctcagcatgccattgataggaacccctgccagtctgagctgagctcacaatccctgggtgcattgccctttctggcttgcttatagagacactgggtaaagcttccatccccagcagagatcctgagtgccccacctgttgtgttttctaaaaaaaataaggagagaaggaatttgtttggtggaggtgcggtaaggtgttggggaagtggtgcctctgccggcccatgctgagaggagaggagttcagagaaaggggagggggaggagagaagagaagagaggagagagagggggaagaggaatggggggagagagggagcaagagcaagaaggaattagagagaggaggggccaagcagcctcttttatagtgagtcaggcatacctggctgttgctaggtaactgtggggtggagcctagactaatgccaacatcacttttacccccacctctcccttcctctctctctctctctctctctctctctctctctctctctctctcattggtgcaccgcacattataggtgtgtttcannnnnnnnnnnnnnnnnnnntgctgcgtgggcttttaaagcttgtaaaaaaaaaccaagctcccccattatctcgctctccctgcatcgtgttagttatgagtccaaatggcctttgttggataccggggaaaataaatctgtctttggggtgccttaagatgcagagataaaaatgacgaacatgttcttgttgccttaaactgccttgtggttgacctgatttcacttctggggctgcaaggactagcgttggtgacttcctctggattccagaaggaaagaaaacagcccagctctggtgggtagagctctctgcaccttctggctgtggttctcagcatgccattgataggaacccctgccagtctgagctgagctcacaatccctgggtgcattgccctttctggcttgcttatagagacactgggtaaagcttccatccccagcagagatcctgagtgccccacttgttgtgttttctaaaaaaaataaggagagaaggaatttgtttggtggaggtgcggtaaggtgttggggaagtggtgcctctgccggcccatgctgagaggagaggagttcagagaaaggggagggggaggagaggagagagagggggaagaggaatggggagagagagggagcaagagcaagaaggaattagagagaggaggggccaagcagcctcttttatagtgagtcaggcatacctggctgttgctaggtaactgtggggtggagcctagactaatgccaacatcacttttacccccacctctcccttcctccctctctttcttttctctctctctctctctctctctctctctctctctctctctctctctctctctcattggtgcaccgcacattataggtgtgtttcacttctgtcaggtgtaggataagaggtcagctccagagcatggtacacaggacccccatccagtatctgcagcatttatacctgccccacccatcactctgtccagccatgagttgtctcaccgtggtttgtggaagctcttcttgtagcacaagacagaggccaccagggcctccttgggataaaggggtttattgaaggggtacaaggtggctgagaacataggagggaatgccaggtagagtcctgcttatctgtggtcctgaaagactctgatgagccttagcttaccatgaaccccacttcccaccagtgaacaatgcagagctggggatcgatgcaaaagcaagaggaatttattgttccagcaagttggggtcatcctgcacccgaaggagaggcagagacctctggcagcccattctgccaggttttttgtttgttttgttattttacagctttcaggggtagaatagagcaacagccactaagcacaatgtgattggcagaacagtgggacttttaaactgattggtccttagggaatgaggtagcaagagctttccttatctgtgggtcccatcagccctgaggggtcctcccctgtggtgtgaggaatgtaattagcctctcccttctggaggggaggggtgcctatgtgcctttttcttcgtagggaaggggtctggtggaattttccaaagttcctgagctgacctcttcaatcccagctgctctggaggcaaagagaaggagcagatctgggccatagtgaggtaatccaggagctgtccatgctgtgtgaagcctcagtgtggtaatctcctaggaggagagagaccatgaggttgcctaggcagaggtggacttgcccaagtcagataactgtgggggcgggggaagcctgccatcccccaagccacccagaacccctacctggcctatagttccccaccagcaggatccttttctgtaacagctgtggatgaaccaagcgaatctaagcacaggaggtgtcattcctgacatgcgatggagcctggcaagcactgaaggtctctgcctctgcctctactccccgcgttaccagcggggagctggggatgaaaactgcagacgatggcgccgtcacccctctctcccatgaggccatccttaaaggcagcccctcccttggctgcttgcaacttctgagccacatctgcggggttcggagagggagagaaaagaccagggaaaagtcgtgtgtctgaggctggttagtgaccccactgcacccagtctttgaattctaacattgaatcttgtgacaccatagtaccaacttgaaagaaaacaggccctggacccacatggtgaataaactaagtgctgctttatcaaggtagaagaggatgagacaggcagcagatggtaatcacattggcctggggtcagcaagagcttcctgggatgaatataggcagaggatctgtatttgccttagtgagtacatgatggagcactgatctttaacctctgcctggggaatcttcttgtttgttttgttgtgtgtttttggttttggtttttggagacagggtttctctgtatagccctggctggcctggaactcactttgtagaccaggctggcctcgaactcagaaatcagcctgcctctgcctcccgctggggaatcttctttaagccctggttcaaaacagagatcttacagaacgcccatggctgctccttcacacccgaattggcctctgcattctgtctctttcttcagaacccccatgcttcagcgagtcctcagttctgagccagagtctagcaccaaggaggctcttaataataatttgtgagttgaatgcctgagtacaaccccgggatgagtagattttattttatgtggtttatgcagatatagccacgaggtgaggaaggatggctctgaacagctcagaaaacacttaattatctgagttctcccaggcagtgtctcccgaaacaagtccccacaaagagcttcttcaccaggcgttaactggtgctatttactacaagaatcctcttgtcaaacaagaggaacagagctcggcaggtttcttcagtgctgtggatctgaggctgtggaatgttctggtgggtttctgacccttcgagagaacagtcaacaccattgcatggtgctacgtgagatttttatcttatgacttttaaataatggtttgtagcctagggatgtaactcagagaggaaacatttgcccagcatgcctgaaggtctgtgtttaatcccccacccttccaaaagggttgtaggatagaggcataactcagcggtagagcatatttttaggaaatgtgagccccgttcacgccacagcatcagtggtcaattaggtataacttcatgtgttgagccccaacatttgacacagaactcttcttaatgcttctagtgcccacagcagtgtctccagtgacctattagctgcttcctcatcactgtgaaaaacaccctacaagagcaaagtgagaacacagggctcccttggctctcagtcggaaggactacagtcggtcttgatgaggaaggcacagagcctgaagcagctggccaggttgggaagcagagaaagatgaatgaatgctggtaggaaggggggggggtggggagagacagagagaaattcacagagacagagacagaagcacagagagagactgtgagacagagaaagacatacacacagatggaggtaactgagggagagagacagagagagaagtggtgttggggtcacttagggtggatattccctcctcagcataatctagaaacctccttaaaggcatgcccggaagtttgcttccacaacgattctaaatcctggcaagttgaaatcaagattttcacactcaaacatggaatttcatctggagatgctggagaagaacgaggaaggaaaaggtttcctgagtgtgattcaccaccacaccagggctgtattggccggttttgtgtcaacctgaccccgctggagttatcacagagaaaggagcctcccttgaggaaattcctccatgagatccagctgtaaggcattttctcaattagtgaccaaggggggagggccccttgagggtgatgccatccctgggctgatagtcctgggttctataagagaacagacttgagcaagccagggggagcaagccagtaaggaacatccctccatggcctctgcatcagctcctgcttcctgccgtgtgtgagttcctgacctgacttcctttggtgatgaacaacaatttggaagtgtaagctgaataaaccctttcctccccttcttgcttcttggtcatgaggttttgtgcaggaatagaaaccccaagacagggaggctcaccctattctaggagaatctggactgaggttttgattcataaattactcgggaaaataaagtgttcacccactggaggactttaatttcttcttctcaaatgaactgtagtccagatgagcctcagaggtctgaatacctagtggaattaggagtgaatccgaatggcatgagccactcagatgaagttggggctgcctccagatcatggctggccattctcctgtgcggggaagaagcatcgtattgaacagttgtacagcagggtcaagagccaagtgtcacttagcttctacagtggggaactcagcatccagggacccctctgtcctcacaggaggagtgtggagtcctgatccctgatgatggaagccccagcctgcccttctttctcttgcctgcttcctcctgttcttcagttgcatttgcataatgcaaatgcaaattacatttgactgcaacttgcagggtgatggttgacctggaccctggtcaaaaccctcctggagcaaactcatcagtaactgatcttcaatcttaggcaaagagagaagagtagaaaattggggctcggcagacatggctgccagacattgtatgccccccccaaaagccatgaaatttttatggggttctagcttcttattttaaagtaaagattgatcatattttcattccatggtggttagaaggttaatatttgaaaaacatgaaatacagtacctggaaactagcaagttactccacagccatacctgcaccccgggccgttccctccatttcctttaaaatcttactctgaaattcctaatagggattgaaaattggaaccgtgcaaaagattggattaacaagatttattttccaatattgaatagtcttaactggggcgtgtgccctaaagtttgtattggtgggaaagagctgataaagggggaagaagctccaaaccagggaccgtgctgcagtgtcatggtaggtggtgtatggaatgcagcctctctagggagggtgttgatttgaggaccctgcctgggatagcagtcaaagtgggtgccctatggctgacttccttccttgatccactctcactttctgaagagatgcagaggggcatcctgtgctgatggagtcagccctgcagacaccccaggcttcctttaagtgactgcacagtgggggagacgtctttagcacttgaaggaagaatcgctgctgggatgggtaggccactaaagttggacactggctgtgattagctgccctgggactgctccaggtccccacagagacccaaattgcctttgtcttcatgccccaggcccacttttgaaacaagagggaactgcaggcttgggcacatcagatgggctctctgcacactgcagatggttccccctgatgtctttcctaatcggcacaagctcaggtgtcaagtgccatgaaaactccatagattgtgagatttgtcaagatcgaatctcagcagaacgccttagccaaagaaactggaggttatgtcctcatgtacctttgacagattcacccaatgccaactatagatgtctatcttatatacatgtgcatacacataaatatgtgctatgtacacatgtggatacatatgtatttgcctatctatgtaaacacacattaacactatagaaataggcacatgcaaatatagatacacatatatatgtatgtatatacatatatgcatgtcaatagatatataaacatgaatatgaatatagaactgcattttgtaacatatatacatttgacagaaccttctcatcaaatacttagcatgtagcctacatacccagcagaattcatgttggcaatgaaatcatcttctccctgttttgatgggggtttttgtttgtttgttttgagatcctgttcctgcctacactaactatccctagagtgggaagtcctaccacaaggtttgtgcaggtggccaatgatgagcaagggcttctcagaagctcctcctgattggttttaaatctacaatgttacatttcctttccttttatttattttataatttttttgtttattactttgctgccaagggaggggtgcgcatgtggaagtcagagggcagcttttaggagctacttctttccttctaccatgccagtccttcatcaggctcagtgacaggctctaagccacctcaccagcctgcacagcacctttgcttaaatgccacacgtaggtttgatgtagcttctccatccccggcagttgtagtgtgttagctctgccggcctcctttgtgttcttggctttgtgctcctgttgatgttaatgatgaatggacaacagcagccttgctggcttcattccgcccatctactcccgggacacataaactcattgttatacacctactgagaacagtcagttgggcagttacaaattcatttcactgtgccccgatgtcaccactttaaaaaaacgagtatcctcgtgccactgtgagaattcggagcccgaaaagcagcccagacacgtgggacttaatttttctcctttcctgttctcctcccacataaaatccaatcagaagtatgttgttcatttgaaatgtcgccgaggatgaagccgtgctggcttttcttcatctgcatttccagtggttggcttgggaaaatcttgagccagacttaattcttgatgtatttttttttttttctgttttgcatatggtggccactaacacttcgttgtgtaaagaggtgcacagcttgttgcgtggaagtccacgtgcatgtctaggctagagatcaacctcaggttctgtttatcctggggtttttttttgggggggggtaaggaggggagggttcagtgtctctctcttggatctggggctcacccattattagcctgcctagccagacagacccaggcatcggcctgtctctgcctccccagaactggaattacataatgcgtgtcacggtacctggccttttatgtggatttcaggaatcaaactcacagttgagctgtaaacacttactgaccgagccatctccctaacccgagagctttttttgaagtctgtgtaccctgtataacaccttcacctttaacatctagacattcgcttttcttctgggttctccagtgtttactgtaatctccccaaggttattttcttgctggtggcatccacgatctacctcaggcctttgtaagctatctcagtcagtgtgtacaaagtagaggcgaacagcagtcaatcaggaaaacagcaccttgtaagtataaggggagtaatgtctcccacacagtggaatggccaggcagttgtcaggctgggaattcccggcagatcacatgactggttaatggtgccagagatgggtcccatctcttagtgcaggccttaattccattcttaaagtggctgccataacattaatgccaccattgtaccaatagacatatcctgtcaggctagtcacttcgtagttcacagggctcacgtcggagtctgactgacgatgacctgtctccccggtagcgtcatgcgtcgtagcgccttctgaaagccagccagtaagggtggagcctcagggccagtgcagcttgatttctccatgttctgtggttcaagtacacgatagcttcaggaaatacagaggtgctggggggaatgagaatggatataatcaaaatatctgcattgtataaaattctcaaaggattaataaaataccatctttaaaaagggaagatatcctgggctctgtcttctccttctgcgtacaatcagattcatctctttcaaaacatataaaactatcttacctttaaaaaaaaaaagtaccttgtgtaactattgtgtgactctgttagtttcaagcgagaatgtaaaatgaagcttttatttttttaatgtgcccttgagtctcagaagtaatcccgaaaaatggggttcagatatatggagctggtagcagtggatacagcaagaatgctaatgagggtctgcgctgaagaaacaacctgagactggcgctgggcatcgccgagagaacaacccagcatcctcagactccccgtgcctccaaggctcacctgagtgcccgggtctctagagttggctgtgtagattgctctccatgggaccaggactcccacgcacttctaacactagaaaagctaggcagcaaggatgacgcttccagccagtagaggtttgatctcttcacggtctatgacatccatagctgtctgagttctgcccttcctccagttcctctgggcattgggatcctgctggacagctccccattaaatgccctgtccctcgcaactcagggttccagaaactatcctcaccttttggtggcccatcggttccccttaagccttgagttgctgccattatgcaagtgtctcagacttcaccttggtatgaccaacaagaccatgtctacatggggccaccttgaggagaaaggtgcacgccagcaccaacaaactgcggcaaggagctgtgggaagcagggggtttctttgcccccactgtgaatctctcggtgaaatactgatacttgtaagaaaagatgcccttacccgcaaacatgtttgggtcgctgcctgaccttaggatagcaatgcagagtagtgatggaagcttcatattgttttccagcctggattcttagcatgccggggtgcaagtcaaatccaggacatgataaatgaacctggatcttaggttattcatcatcttgaaggaactgccagggtctaattttattcaagagtcctccagggaggttaaaaacaaatcctttcttttcatcttcttcaggccaggactatagaaattacaaaaccataaataagtccccctgttctaacacatctaacagtcatttaatgacccttcactgtgccacccagaggggctgtctgtgtagtcacaaggctctggccttaggctgctctctgtgtgtgtgtgtgcgcatgcgcgcgcgtgagagtgcatacatgtgtattgtgtggaacaggccagaagacaaccttggctgtcattcttcaacataattctttcttctcgtcccagatttcctagctacagcgtaaccaagttctctgtcacacccccacagtagacttgagtatgagtcagcctgtccattccaagttacccctctccacccctggggcttgttgtcattgctagtggtggcagcgtttgatggtggtggccatgtttaatatttatgaagcctccccaggaaatgttagctgttgccttaatcttaattgaggaggccgagccacagcggctccccctcatttcccgcgtggcctttgtgctgacattttctggccataagttctagatctaacacattgcactacatctaactgtgagccccacatagagtctagagggggctatgacagctctctagtcctcgtccctggtctcaccacactgggatgagaacgttctgtttcagaaaccttgggggaggctccatttaggagtcaggaagcatctctccgtggatgtgaaatctgctggcgccatgaccctggtccttccacccttcagaagtgggagatggaaactcctttcctttccttttttttttttttgttttttgttttttgtttgtttgtttgttttgttttgttttttggaaacagggttcctggctgtcctggaactcactctgtagaccaggctggcctcgaactcagaaatcggcctgcctctgcctcccgagtgctgggattaaaggcgtgcgccactgcaccactcagtctgtggtgatttgttagagcagcccactgtgactaagacatctgtcaaagctgaaggaagatggccaagaaagacctgcaaactctatccatgcccttaaagccaagggccagtggcgcctacagcataaagaaaggacacttttcctttgtccttgactttgataccatttacttagcttttcctttccccatgtacttagctgtctagaatgttctggaatactctgaacctttgttggatgtgctggtcactgggaggaagagaggtggaattcctacaatgtctcaagcaccgcttaggagccgtcgtgcattttagtcaattctaagcgcccccaggtccgtttccattaacaagaccactctatcaggaaagccacatcacctgcgtttcaattctgcgagaaccttaagttccattacttaaggagtaggagccaaggttgggtctgtctcagccaaaggccttacattattctctccccccccctctttctctcactttttaaaagttctttgagaatgttgtacagtcattttgatggtattgacctcatcgcccaactcaccccagatcaaccctgccttccctacccacccaacgttttgtgtcccttctccccattaaaaaaaaacaacccatcagagacagtttgtgttgcccacatactcttggacgtgtggtcttcattggagggtgctctacccaccagggaccacacccctaaagaaagactccgcttctcccatcagctatcgaatgccaatagctctttagctagggtgagacttcatgcctcccctcccccctcacttatgcccccctccccctacactgagactttgtagctcttttgcatgtctcgattactgtgaactgatttatgcagcttctctgaattttccttccagccacccaccacctgtagctcttataacccagctttctgacccctctctcgccatgatccctgagcctcggtaaggataccatagtggcaagaggcaggcagccagcctcatccctgtcccagaggaaggctgtggtgcctacagcagcttcagtctcagcttgtcttccaaggggcctcccctgcggccagccaaccttactggtccaggcaattcatctcctctctttgtgtggggctaatggcagccacttgctaatgctattccaggcacatgggcatcttgtcttaattaccttcctcatttgcatctctggtggaacacctgggggaagagattgaattttaactccctcccttccccaccagaggttccctccttccatctgcgattctctaatttatgttctttctgcgtgtgatctatcttagcttttcgtcccaccaactcctgcgggtcacttgccatctttgagcatagcagcaaaaaccttctctccctaattactcacctctctcccttgctcgatcctatgggaacccaagctagcattgtgtctcccttccttgggtctgcaagagaacaggaaggaaggacgtgccactttggaaaccatcacagaaagttgtctctctagtgggtgccccaccccccaccctcgctggtggtctgccttaggtgcctagcatgctgggagatgaagcattcattttgtagggaatggagctgtagaagctggtgtttgctgcccacagagccacgccacatccactggaaaacaaagacaaaaacaaacaaacaaacaaacatgagctcaggcagcaaactgggtatcaaatgcattctgggaatggtaacagatggtgacatggcttcaaggccagtccccaccccgccacagctgggtcattttgctcagcctttgtcctatcccaaagcatcagtgagggtgcatatgtctaagtgctggggctatgtgctgaccccctctctgggggctgggggcggtggtggtaatattgcttattaactaatgtgccattgctttaggctgctctgtgatttacattaaaatgactaattagaaaagaaaagcattaacagaggaaccaaacagctgttgtttatggctttaaagaacaatattcctcccaaaagggaaataggcaagaccggggtcaataaaaggcttagtcccttcctggtttttgacacttgtcccagctggctagaggtccctgggaagatccttgtccccaaaacccagtgtcactgatgtgaatgggttgggcatctcagctgtgttagtgtaacccctggcagaggacagcagtttagtaagctctgggtggcattaagttgaaggctggctgggggcagcaacttgttttctcatgagtgtagtgtgggcagctctgcagaaagaggctaccagaaccttggtcatcctcactgcagcctgcctgggcagcagctgacactcaggtagtaagtccatccctgcccctcccccccaggaagcttcagacacatcaggaagattttcacatcccatctgtctcgcctctaggcctgggactgtggcaggcgctcccggtgggaacatctggaagagaagaggtagaagagatagctgtgggggcccaaactctggctctcggaaccagaaggtagctgagacagcaccctgtcacttttgcctggagatgacagtccctgactataattcatgtatgaacctggcatactgagggtcatcagcgccccccaccaccccctttactaaggaaaagaaccccagaggatgagggttttgaaacaaggccctagtgggaaaccattaacgtcatggaggaaacacttgacaagtgggggaactggaattttatagactgtggtgagcctccatgagggtattgggaatcaaacccgggtcctttgcaagagcaacaagtgctctaaccgctgagccatccatctctctagccccgtgagtgaagtctgaataaactaggtgttcagttcacaggtagagggcttgcctagcctcagcaggactctggattccctcctcaatggtataaataaataaataaataaataaataaataaataagaaatgatctggtggccctggccttgacttagctgccttccttccaccatacagcttgtggaaagaagtggcttgtcaatttctgtggcctgctgttatatatagggtgtgttctggggatgcaaggctgagaagcccccatgcagctgtgtggccttaggcagaaaccctaccctgcaaacttcttcagaagctgggaatgacccaggcatcgcgccggcttggggactccatatttcctctactctgaaaagtcctagaactctgtactctagggttaagatattaggtgagaaagcagaattccaaattctcaaccaggtggcttgcaacgacacagggaccacgtaagagactcacacaggagagtgggtacaaagggagaggtgaggccccaaggagccattgatgtcttagcagggttgttaggcgccaaaccccaaggatagcatcttgctgaaccatactgggtctcaagtgaactctgtctccgtgtctttgacacccccccgccccgacccaaccgaacagagtgcaaagaaagaaagaagtcattcacaggaacagtggatcctgaagaaacaccagcacctcttgctcagtacacagtgtcttcctcattcaaataaatacaatgttccagtgtagccccaaaagcccttggtcttgacccagacaagtactgggagttcttcctgcccggatctcaggagcttcacctcctccactgggggcatggtacagaggcagttaccatgggtaccagttcttgctctggtccaggagatacaggtgcaataacatcagggcagcttatctcctcaaggtgtgacagacaatggttaaaggaaaggttccagctttctcctggctccttgcatggatgcagttcagaggctggcatggtggcaggagcctcaggcatctgagagactttgtccttaaaaaaaaaaaacagagaagagaagaagaggaggaaggagaaaagaagaagaagaagaagagaagaggaggaagaggaagaggaggaggaaaagaagaagaagaagaagaagaagaagaagaagaagaagaagaagaagaagaagaagaagaagaagaagaagaagaagaagagaagagaaggaggaggaagaggaagaggaggaggaggaggaggaggaggaggagaaataatgcctcacagatacattcagagatttatttccatgggaattctaaatcatatcatgttggccatttatattctctctctctctctctctctctcatacatcaaacaggaggcagacagttgttgaggctagattacaaataccaccattacattgattttctgttacttgcagcctaaagcagccctaccagatacaaggatggcgatctatgttcctcattggacatgattcctaatctctgtgtcttgtgtctatttcagagggccttgctgttggcgtaggatttggagcagtagaaaagactgcatctgccaccttcgagagtgccaggtaagccatcgcatagggcttggaacgtgggcctcacacccctcaggtctctgcacttggcacctgggccagctgctggcatagggttgctaagcaccctcggcccgtctcggctagagtaacgaggccagaggaagttcatgtgtgagtgaagtactcagtcagacaagcaggcttgtgccgactttctcacgggaggctcacaggtaaccactctgtaaatgaaaccaagatacagttgcatgctgtacctaagggcgtgaactggataaagactgagaagggttagcatgggtggcgatcaatccatgctctgaatggctccttccttctggaagtccttttctcccaccagtggagtttcctggtctctccatttttagactgccttcccagaaggctcctttgcctgtttctcacacattggcccagtcttcaacatcagcatccagaagcctgtccctggagcatcctcttttcatgccacgcacactccctgggcatcctccatccccgtgaccggttttccatccacttgctagtgagctccagctccagctccagcttcagcctgagcctgagctccttcctacagggccgcctgcctccaggtatctctgcacatgcgtcacttaggctctccgtgctcagcatgcaaagctgagctttaccgtcatatccgtcttgggctttgnnnnnnnnnnnnnnnnnnnnnnnnnnnnnnnnnnnnnnnnnnnnnnnnnnnnnnnnnnnnnnnnnnnnnnnnnnnnnnnnnnnnnnnnnnnnnnnnnnnnnnnnnnnnnnnnnnnnnnnnnnnnnnnnnnnnnnnnnnnnnnnnnnnnnnnnnnnnnnnnnnnnnnnnnnnnnnnnnnnnnnnnnnnnnnnnnnnnnnnnnnnnnnnnnnnnnnnnnnnnnnnnnnnnnnnnnnnnnnnnnnnnnnnnnnnnnnnnnnnnnnnnnnnnnnnnnnnnnnnnnnnnnnnnnnnnnnnnnnnnnnnnnnnnnnnnnnnnnnnnnnnnnnnnnnnnnnnnnnnnnnnnnnnnnnnnnnnnnnnnnnnnnnnnnnnnnnnnnnnnnnnnnnnnnnnnnnnnnnnnnnnnnnnnnnnnnnnnnnnnnnnnnnnnnnnnnnnnnnnnnnnnnnnnnnnnnnnnnnnnnnnnnnnnnnnnnnnnnnnnnnnnnnnnnnnnnnnnnnnnnnnnnnnnnnnnnnnnnnnnnnnnnnnnnnnnnnnnnnnnnnnnnnnnnnnnnnnnnnnnnnnnnnnnnnnnnnnnnnnnnnnnnnnnnnnnnnnnnnnnnnnnnnnnnnnnnnnnnnnnnnnnnnnnnnnnnnnnnnnnnnnnnnnnnnnnnnnnnnnnnnnnnnnnnnnnnnnnnnnnnnnnnnnnnnnnnnnnnnnnnnnnnnnnnnnnnnnnnnnnnnnnnnnnnnnnnnnnnnnnnnnnnnnnnnnnnnnnnnnnnnnnnnnnnnnnnnnnnnnnnnnnnnnnnnnnnnnnnnnnnnnnnnnnnnnnnnnnnnnnnnnnnnnnnnnnnnnnnnnnnnnnnnnnnnnnnnnnnnnnnnnnnnnnnnnnnnnnnnnnnnnnnnnnnnnnnnnnnnnnnnnnnnnnnnnnnnnnnnnnnnnnnnnnnnnnnnnnnnnnnnnnnnnnnnnnnnnnnnnnnnnnnnnnnnnnnnnnnnnnnnnnnnnnnnnnnnnnnnnnnnnnnnnnnnnnnnnnnnnnnnnnnnnnnnnnnnnnnnnnnnnnnnnnnnnnnnnnnnnnnnnnnnnnnnnnnnnnnnnnnnnnnnnnnnnnnnnnnnnnnnnnnnnnnnnnnnnnnnnnnnnnnnnnnnnnnnnnnnnnnnnnnnnnnnnnnnnnnnnnnnnnnnnnnnnnnnnnnnnnnnnnnnnnnnnnnnnnnnnnnnnnnnnnnnnnnnnnnnnnnnnnnnnnnnnnnnnnnnnnnnnnnnnnnnnnnnnnnnnnnnnnnnnnnnnnnnnnnnnnnnnnnnnnnnnnnnnnnnnnnnnnnnnnnnnnnnnnnnnnnnnnnnnnnnnnnnnnnnnnnnnnnnnnnnnnnnnnnnnnnnnnnnnnnnnnnnnnnnnnnnnnnnnnnnnnnnnnnnnnnnnnnnnnnnnnnnnnnnnnnnnnnnnnnnnnnnnnnnnnnnnnnnnnnnnnnnnnnnnnnnnnnnnnnnnnnnnnnnnnnnnnnnnnnnnnnnnnnnnnnnnnnnnnnnnnnnnnnnnnnnnnnnnnnnnnnnnnnnnnnnnnnnnnnnnnnnnnnnnnnnnnnnnnnnnnnnnnnnnnnnnnnnnnnnnnnnnnnnnnnnnnnnnnnnnnnnnnnnnnnnnnnnnnnnnnnnnnnnnnnnnnnnnnnnnnnnnnnnnnnnnnnnnnnnnnnnnnnnnnnnnnnnnnnnnnnnnnnnnnnnnnnnnnnnnnnnnnnnnnnnnnnnnnnnnnnnnnnnnnnnnnnnnnnnnnnnnnnnnnnnnnnnnnnnnnnnnnnnnnnnnnnnnnnnnnnnnnnnnnnnnnnnnnnnnnnnnnnnnnnnnnnnnnnnnnnnnnnnnnnnnnnnnnnnnnnnnnnnnnnnnnnnnnnnnnnnnnnnnnnnnnnnnnnnnnnnnnnnnnnnnnnnnnnnnnnnnnnnnnnnnnnnnnnnnnnnnnnnnnnnnnnnnnnnnnnnnnnnnnnnnnnnnnnnnnnnnnnnnnnnnnnnnnnnnnnnnnnnnnnnnnnnnnnnnnnnnnnnnnnnnnnnnnnnnnnnnnnnnnnnnnnnnnnnnnnnnnnnnnnnnnnnnnnnnnnnnnnnnnnnnnnnnnnnnnnnnnnnnnnnnnnnnnnnnnnnnnnnnnnnnnnnnnnnnnnnnnnnnnnnnnnnnnnnnnnnnnnnnnnnnnnnnnnnnnnnnnnnnnnnnnnnnnnnnnnnnnnnnnnnnnnnnnnnnnnnnnnnnnnnnnnnnnnnnnnnnnnnnnnnnnnnnnnnnnnnnnnnnnnnnnnnnnnnnnnnnnnnnnnnnnnnnnnnnnnnnnnnnnnnnnnnnnnnnnnnnnnnnnnnnnnnnnnnnnnnnnnnnnnnnnnnnnnnnnnnnnnnnnnnnnnnnnnnnnnnnnnnnnnnnnnnnnnnnnnnnnnnnnnnnnnnnnnnnnnnnnnnnnnnnnnnnnnnnnnnnnnnnnnnnnnnnnnnnnnnnnnnnnnnnnnnnnnnnnnnnnnnnnnnnnnnnnnnnnnnnnnnnnnnnnnnnnnnnnnnnnnnnnnnnnnnnnnnnnnnnnnnnnnnnnnnnnnnnnnnnnnnnnnnnnnnnnnnnnnnnnnnnnnnnnnnnnnnnnnnnnnnnnnnnnnnnnnnnnnnnnnnnnnnnnnnnnnnnnnnnnnnnnnnnnnnnnnnnnnnnnnnnnnnnnnnnnnnnnnnnnnnnnnnnnnnnnnnnnnnnnnnnnnnnnnnnnnnnnnnnnnnnnnnnnnnnnnnnnnnnnnnnnnnnnnnnnnnnnnnnnnnnnnnnnnnnnnnnnnnnnnnnnnnnnnnnnnnnnnnnnnnnnnnnnnnnnnnnnnnnnnnnnnnnnnnnnnnnnnnnnnnnnnnnnnnnnnnnnnnnnnnnnnnnnnnnnnnnnnnnnnnnnnnnnnnnnnnnnnnnnnnnnnnnnnnnnnnnnnnnnnnnnnnnnnnnnnnnnnnnnnnnnnnnnnnnnnnnnnnnnnnnnnnnnnnnnnnnnnnnnnnnnnnnnnnnnnnnnnnnnnnnnnnnnnnnnnnnnnnnnnnnnnnnnnnnnnnnnnnnnnnnnnnnnnnnnnnnnnnnnnnnnnnnnnnnnnnnnnnnnnnnnnnnnnnnnnnnnnnnnnnnnnnnnnnnnnnnnnnnnnnnnnnnnnnnnnnnnnnnnnnnnnnnnnnnnnnnnnnnnnnnnnnnnnnnnnnnnnnnnnnnnnnnnnnnnnnnnnnnnnnnnnnnnnnnnnnnnnnnnnnnnnnnnnnnnnnnnnnnnnnnnnnnnnnnnnnnnnnnnnnnnnnnnnnnnnnnnnnnnnnnnnnnnnnnnnnnnnnnnnnnnnnnnnnnnnnnnnnnnnnnnnnnnnnnnnnnnnnnnnnnnnnnnnnnnnnnnnnnnnnnnnnnnnnnnnnnnnnnnnnnnnnnnnnnnnnnnnnnnnnnnnnnnnnnnnnnnnnnnnnnnnnnnnnnnnnnnnnnnnnnnnnnnnnnnnnnnnnnnnnnnnnnnnnnnnnnnnnnnnnnnnnnnnnnnnnnnnnnnnnnnnnnnnnnnnnnnnnnnnnnnnnnnnnnnnnnnnnnnnnnnnnnnnnnnnnnnnnnnnnnnnnnnnnnnnnnnnnnnnnnnnnnnnnnnnnnnnnnnnnnnnnnnnnnnnnnnnnnnnnnnnnnnnnnnnnnnnnnnnnnnnnnnnnnnnnnnnnnnnnnnnnnnnnnnnnnnnnnnnnnnnnnnnnnnnnnnnnnnnnnnnnnnnnnnnnnnnnnnnnnnnnnnnnnnnnnnnnnnnnnnnnnnnnnnnnnnnnnnnnnnnnnnnnnnnnnnnnnnnnnnnnnnnnnnnnnnnnnnnnnnnnnnnnnnnnnnnnnnnnnnnnnnnnnnnnnnnnnnnnnnnnnnnnnnnnnnnnnnnnnnnnnnnnnnnnnnnnnnnnnnnnnnnnnnnnnnnnnnnnnnnnnnnnnnnnnnnnnnnnnnnnnnnnnnnnnnnnnnnnnnnnnnnnnnnnnnnnnnnnnnnnnnnnnnnnnnnnnnnnnnnnnnnnnnnnnnnnnnnnnnnnnnnnnnnnnnnnnnnnnnnnnnnnnnnnnnnnnnnnnnnnnnnnnnnnnnnnnnnnnnnnnnnnnnnnnnnnnnnnnnnnnnnnnnnnnnnnnnnnnnnnnnnnnnnnnnnnnnnnnnnnnnnnnnnnnnnnnnnnnnnnnnnnnnnnnnnnnnnnnnnnnnnnnnnnnnnnnnnnnnnnnnnnnnnnnnnnnnnnnnnnnnnnnnnnnnnnnctctacagaactcagggagctcttctggcctctataggtagtcatccacccacctacacacacacacacacacacacacacacacacacatacacacatacacacacacagtgagaactataggttcagtgagagactctgtcttaaaaaagaaaaaaaaaaagagtaaggtggagagcaattgagggtagcacctgaagcccacctcggtacctccatgcctgccgacacacagaagacctggcagctggacagggagcttgcggcgtggatctgtccgctcttggaacttctccacatagctaaagataatctaaagtaaatggtctgcggtggcaaagatgagggtgctctttaacatttagtgaaaaccaggaatacaagaagccaggagatttgcagccaaacaagaaggtctgaagaaacccaaacagagaagtctgaaaagacccagtgcacaggctaataaaaaacaaagcagacaccacagcttcagcagccctgaggtgggagagccgcagaagggacagaggtgcagcttaggaagaggggagcggactccaggatagtgtgataggcgcgcatgcgtttgtatgctccttcggcatgagcttctctgtgagagaagctgcccctcagtcctgcggggagcgccgagtctccttctgaggcttgtcaagaacacggcggagaagtgaaccgaacaaagagcagacactgtagacttttatatcctgggtaagcccttaaaaacaaacaaacaaacaacaacaacaacaaaagaaccctgactgtatttttgtgtgtgttagtgaaggcatgtgcatgacagagcatgtccccggaggttggataagacatgcctattcaccccagggagggagcccacaacagaccccaaagtacaaatactaccaaagtccaacttggtgaatcagtgagttttattgagggtcacttagaggaacgtgggtaaggggttacttacaggagcagagatgacttaatgacagctgcatcaccaggttccaccccagcatgggtgacagctcacagaagctgggaaacctggagctcactgcacagcctggagctgcaggcagcgcaacaggttggagagtgacttttccaagtgactctggcctaaacctcttccaggcagcttggccggtttctgttgcttcccggcagctggtctggtctatcagtctttttacagatcttctcccctcagcttccatctttgcagctcccagagaagaggaagctgagcttttcttacttatgctgtcagggaggggcctagtgaatctggtcagtttcagggacttcctgcagctattttgagttgtgtaccttcctgtttcaggtgcttccttgccaggtaggaatatttcagtctccaaggaaaccgttaaacagccccacctttccattttgagacagtcttgtttgtctttgtcactgcatacactgggctagcctgcccacacacttccaggattgtgccatctccatctcccatcccgccaaagtcatgctgggattaggagtgtgctactatgtctggctgtatgtgtgctctgaggcctcaaacctccatcttcaatgattgtcccacccgagtgcccctcccccgccccagccctctttccagccccggagctatgtccttttgaagcacacatgcttgattgatgccgtgccacagactcattatcgtccaggccattannnnnnnnnnnnnnnnnnnncatgggtactatttgcaatgcatctcaaagggagggagtctcacctctctccagcaatgttaaccaccaccaccaacagagaagagagaggtaaatattatcaaaaaggcactctcattcctctcagcagttcagttaagacaagagacataggcagaaagcagccagcctagaactggtgtgtcactactgccaccaggtgtctacaggctgctactgcacctcagtgtcctactggatcagtggcagggatcaaaaatcagcgcccagggggcatgtggtggcatagacctataatcccatcctttgggaaactgaggtaggaggatttatataagttcaagatcaggtgggtcacatcacatgtaaattatcagatgagctaggtacctcgccaaattaggtctcaaaaggggggagggaagattggccaaggatacagctcagttgatagactgtgtgtctagcatgcacagggtcccgggattaatcaccagcatggagtaaagcaggcatggtgggccgcatctgtaaatcccagcacttaagaagagagaaggtgaatttagtgctgtcctcagctgtatagtgagtttgaagctagcctaagacacatgagagagacactgtcttaaaaaaaaaaaaaaaaccaaacccaaaacctgtcctctgagtaaggaagagtcagccaggcatgagcagtctgtgggccaagggaaacacgtcttagcttagtgttgctttctgatctggtccctccgtggtttcttttggctccaaccacaaagaaatgccgaagcccgtatgtccttggggagtcggatgattaaagtggttttccttttcagaagtatcattaagaggagaccacacctctcagccctcacttcaaggtacacataactcgaaccagaagggagagcgagtgaagcaatcttatgcttagacgttgtgctttgcaccccgtttccagctttggcgagggggtgtttatagcctggaccgatggctccgaccggtgtccggctgcagggctgtgcagaacgggcagtgctggctgcagatcggacaacccacaaacgggcctcccctggtttcctgcacttcgtgctgcatgccccggccggctgctggtgcccagtgtccaaacacttaatcaaggatgtctgctgggttaaccaccactttcagaccaagtctgtgcctgttccaagtctgcatctgatagcagatcaaagagtagagaccataaacgacatacatcttttgagctataaaacacaggcgttgctatatgaccaatcatgggatgtgggggtcagaagacactcgtggagtagcgatggctttgttttcctggctcaccgagcttcttctgaggagcagcctgtgatagctgctcccagcaagaatccacagagtgcgtgcttgnnnnnnnnnnnnnnnnnnnnnnnnnnnnnnnnnnnnnnnnnnnnnnnnnnnnnnnnnnnnnnnnnnnnnnnnnnnnnnnnnnnnnnnnnnnnnnnnnnnnnnnnnnnnnnnnnnnnnnnnnnnnnnnnnnnnnnnnnnnnnnnnnnnnnnnnnnnnnnnnnnnnnnnnnnnnnnnnnnnnnnnnnnnnnnnnnnnnnnnnnnnnnnnnnnnnnnnnnnnnnnnnnnnnnnnnnnnnnnnnnnnnnnnnnnnnnnnnnnnnnnnnnnnnnnnnnnnnnnnnnnnnnnnnnnnnnnnnnnnnnnnnnnnnnnnnnnnnnnnnnnnnnnnnnnnnnnnnnnnnnnnnnnnnnnnnnnnnnnnnnnnnnnnnnnnnnnnnnnnnnnnnnnnnnnnnnnnnnnnnnnnnnnnnnnnnnnnnnnnnnnnnnnnnnnnnnnnnnnnnnnnnnnnnnnnnnnnnnnnnnnnnnnnnnnnnnnnnnnnnnnnnnnnnnnnnnnnnnnnnnnnnnnnnnnnnnnnnnnnnnnnnnnnnnnnnnnnnnnnnnnnnnnnnnnnnnnnnnnnnnnnnnnnnnnnnnnnnnnnnnnnnnnnnnnnnnnnnnnnnnnnnnnnnnnnnnnnnnnnnnnnnnnnnnnnnnnnnnnnnnnnnnnnnnnnnnnnnnnnnnnnnnnnnnnnnnnnnnnnnnnnnnnnnnnnnnnnnnnnnnnnnnnnnnnnnnnnnnnnnnnnnnnnnnnnnnnnnnnnnnnnnnnnnnnnnnnnnnnnnnnnnnnnnnnnnnnnnnnnnnnnnnnnnnnnnnnnnnnnnnnnnnnnnnnnnnnnnnnnnnnnnnnnnnnnnnnnnnnnnnnnnnnnnnnnnnnnnnnnnnnnnnnnnnnnnnnnnnnnnnnnnnnnnnnnnnnnnnnnnnnnnnnnnnnnnnnnnnnnnnnnnnnnnnnnnnnnnnnnnnnnnnnnnnnnnnnnnnnnnnnnnnnnnnnnnnnnnnnnnnnnnnnnnnnnnnnnnnnnnnnnnnnnnnnnnnnnnnnnnnnnnnnnnnnnnnnnnnnnnnnnnnnnnnnnnnnnnnnnnnnnnnnnnnnnnnnnnnnnnnnnnnnnnnnnnnnnnnnnnnnnnnnnnnnnnnnnnnnnnnnnnnnnnnnnnnnnnnnnnnnnnnnnnnnnnnnnnnnnnnnnnnnnnnnnnnnnnnnnnnnnnnnnnnnnnnnnnnnnnnnnnnnnnnnnnnnnnnnnnnnnnnnnnnnnnnnnnnnnnnnnnnnnnnnnnnnnnnnnnnnnnnnnnnnnnnnnnnnnnnnnnnnnnnnnnnnnnnnnnnnnnnnnnnnnnnnnnnnnnnnnnnnnnnnnnnnnnnnnnnnnnnnnnnnnnnnnnnnnnnnnnnnnnnnnnnnnnnnnnnnnnnnnnnnnnnnnnnnnnnnnnnnnnnnnnnnnnnnnnnnnnnnnnnnnnnnnnnnnnnnnnnnnnnnnnnnnnnnnnnnnnnnnnnnnnnnnnnnnnnnnnnnnnnnnnnnnnnnnnnnnnnnnnnnnnnnnnnnnnnnnnnnnnnnnnnnnnnnnnnnnnnnnnnnnnnnnnnnnnnnnnnnnnnnnnnnnnnnnnnnnnnnnnnnnnnnnnnnnnnnnnnnnnnnnnnnnnnnnnnnnnnnnnnnnnnnnnnnnnnnnnnnnnnnnnnnnnnnnnnnnnnnnnnnnnnnnnnnnnnnnnnnnnnnnnnnnnnnnnnnnnnnnnnnnnnnnnnnnnnnnnnnnnnnnnnnnnnnnnnnnnnnnnnnnnnnnnnnnnnnnnnnnnnnnnnnnnnnnnnnnnnnnnnnnnnnnnnnnnnnnnnnnnnnnnnnnnnnnnnnnnnnnnnnnnnnnnnnnnnnnnnnnnnnnnnnnnnnnnnnnnnnnnnnnnnnnnnnnnnnnnnnnnnnnnnnnnnnnnnnnnnnnnnnnnnnnnnnnnnnnnnnnnnnnnnnnnnnnnnnnnnnnnnnnnnnnnnnnnnnnnnnnnnnnnnnnnnnnnnnnnnnnnnnnnnnnnnnnnnnnnnnnnnnnnnnnnnnnnnnnnnnnnnnnnnnnnnnnnnnnnnnnnnnnnnnnnnnnnnnnnnnnnnnnnnnnnnnnnnnnnnnnnnnnnnnnnnnnnnnnnnnnnnnnnnnnnnnnnnnnnnnnnnnnnnnnnnnnnnnnnnnnnnnnnnnnnnnnnnnnnnnnnnnnnnnnnnnnnnnnnnnnnnnnnnnnnnnnnnnnnnnnnnnnnnnnnnnnnnnnnnnnnnnnnnnnnnnnnnnnnnnnnnnnnnnnnnnnnnnnnnnnnnnnnnnnnnnnnnnnnnnnnnnnnnnnnnnnnnnnnnnnnnnnnnnnnnnnnnnnnnnnnnnnnnnnnnnnnnnnnnnnnnnnnnnnnnnnnnnnnnnnnnnnnnnnnnnnnnnnnnnnnnnnnnnnnnnnnnnnnnnnnnnnnnnnnnnnnnnnnnnnnnnnnnnnnnnnnnnnnnnnnnnnnnnnnnnnnnnnnnnnnnnnnnnnnnnnnnnnnnnnnnnnnnnnnnnnnnnnnnnnnnnnnnnnnnnnnnnnnnnnnnnnnnnnnnnnnnnnnnnnnnnnnnnnnnnnnnnnnnnnnnnnnnnnnnnnnnnnnnnnnnnnnnnnnnnnnnnnnnnnnnnnnnnnnnnnnnnnnnnnnnnnnnnnnnnnnnnnnnnnnnnnnnnnnnnnnnnnnnnnnnnnnnnnnnnnnnnnnnnnnnnnnnnnnnnnnnnnnnnnnnnnnnnnnnnnnnnnnnnnnnnnnnnnnnnnnnnnnnnnnnnnnnnnnnnnnnnnnnnnnnnnnnnnnnnnnnnnnnnnnnnnnnnnnnnnnnnnnnnnnnnnnnnnnnnnnnnnnnnnnnnnnnnnnnnnnnnnnnnnnnnnnnnnnnnnnnnnnnnnnnnnnnnnnnnnnnnnnnnnnnnnnnnnnnnnnnnnnnnnnnnnnnnnnnnnnnnnnnnnnnnnnnnnnnnnnnnnnnnnnnnnnnnnnnnnnnnnnnnnnnnnnnnnnnnnnnnnnnnnnnnnnnnnnnnnnnnnnnnnnnnnnnnnnnnnnnnnnnnnnnnnnnnnnnnnnnnnnnnnnnnnnnnnnnnnnnnnnnnnnnnnnnnnnnnnnnnnnnnnnnnnnnnnnnnnnnnnnnnnnnnnnnnnnnnnnnnnnnnnnnnnnnnnnnnnnnnnnnnnnnnnnnnnnnnnnnnnnnnnnnnnnnnnnnnnnnnnnnnnnnnnnnnnnnnnnnnnnnnnnnnnnnnnnnnnnnnnnnnnnnnnnnnnnnnnnnnnnnnnnnnnnnnnnnnnnnnnnnnnnnnnnnnnnnnnnnnnnnnnnnnnnnnnnnnnnnnnnnnnnnnnnnnnnnnnnnnnnnnnnnnnnnnnnnnnnnnnnnnnnnnnnnnnnnnnnnnnnnnnnnnnnnnnnnnnnnnnnnnnnnnnnnnnnnnnnnnnnnnnnnnnnnnnnnnnnnnnnnnnnnnnnnnnnnnnnnnnnnnnnnnnnnnnnnnnnnnnnnnnnnnnnnnnnnnnnnnnnnnnnnnnnnnnnnnnnnnnnnnnnnnnnnnnnnnnnnnnnnnnnnnnnnnnnnnnnnnnnnnnnnnnnnnnnnnnnnnnnnnnnnnnnnnnnnnnnnnnnnnnnnnnnnnnnnnnnnnnnnnnnnnnnnnnnnnnnnnnnnnnnnnnnnnnnnnnnnnnnnnnnnnnnnnnnnnnnnnnnnnnnnnnnnnnnnnnnnnnnnnnnnnnnnnnnnnnnnnnnnnnnnnnnnnnnnnnnnnnnnnnnnnnnnnnnnnnnnnnnnnnnnnnnnnnnnnnnnnnnnnnnnnnnnnnnnnnnnnnnnnnnnnnnnnnnnnnnnnnnnnnnnnnnnnnnnnnnnnnnnnnnnnnnnnnnnnnnnnnnnnnnnnnnnnnnnnnnnnnnnnnnnnnnnnnnnnnnnnnnnnnnnnnnnnnnnnnnnnnnnnnnnnnnnnnnnnnnnnnnnnnnnnnnnnnnnnnnnnnnnnnnnnnnnnnnnnnnnnnnnnnnnnnnnnnnnnnnnnnnnnnnnnnnnnnnnnnnnnnnnnnnnnnnnnnnnnnnnnnnnnnnnnnnnnnnnnnnnnnnnnnnnnnnnnnnnnnnnnnnnnnnnnnnnnnnnnnnnnnnnnnnnnnnnnnnnnnnnnnnnnnnnnnnnnnnnnnnnnnnnnnnnnnnnnnnnnnnnnnnnnnnnnnnnnnnnnnnnnnnnnnnnnnnnnnnnnnnnnnnnnnnnnnnnnnnnnnnnnnnnnnnnnnnnnnnnnnnnnnnnnnnnnnnnnnnnnnnnnnnnnnnnnnnnnnnnnnnnnnnnnnnnnnnnnnnnnnnnnnnnnnnnnnnnnnnnnnnnnnnnnnnnnnnnnnnnnnnnnnnnnnnnnnnnnnnnnnnnnnnnnnnnnnnnnnnnnnnnnnnnnnnnnnnnnnnnnnnnnnnnnnnnnnnnnnnnnnnnnnnnnnnnnnnnnnnnnnnnnnnnnnnnnnnnnnnnnnnnnnnnnnnnnnnnnnnnnnnnnnnnnnnnnnnnnnnnnnnnnnnnnnnnnnnnnnnnnnnnnnnnnnnnnnnnnnnnnnnnnnnnnnnnnnnnnnnnnnnnnnnnnnnnnnnnnnnnnnnnnnnnnnnnnnnnnnnnnnnnnnnnnnnnnnnnnnnnnnnnnnnnnnnnnnnnnnnnnnnnnnnnnnnnnnnnnnnnnnnnnnnnnnnnnnnnnnnnnnnnnnnnnnnnnnnnnnnnnnnnnnnnnnnnnnnnnnnnnnnnnnnnnnnnnnnnnnnnnnnnnnnnnnnnnnnnnnnnnnnnnnnnnnnnnnnnnnnnnnnnnnnnnnnnnnnnnnnnnnnnnnnnnnnnnnnnnnnnnnnnnnnnnnnnnnnnnnnnnnnnnnnnnnnnnnnnnnnnnnnnnnnnnnnnnnnnnnnnnnnnnnnnnnnnnnnnnnnnnnnnnnnnnnnnnnnnnnnnnnnnnnnnnnnnnnnnnnnnnnnnnnnnnnnnnnnnnnnnnnnnnnnnnnnnnnnnnnnnnnnnnnnnnnnnnnnnnnnnnnnnnnnnnnnnnnnnnnnnnnnnnnnnnnnnnnnnnnnnnnnnnnnnnnnnnnnnnnnnnnnnnnnnnnnnnnnnnnnnnnnnnnnnnnnnnnnnnnnnnnnnnnnnnnnnnnnnnnnnnnnnnnnnnnnnnnnnnnnnnnnnnnnnnnnnnnnnnnnnnnnnnnnnnnnnnnnnnnnnnnnnnnnnnnnnnnnnnnnnnnnnnnnnnnnnnnnnnnnnnnnnnnnnnnnnnnnnnnnnnnnnnnnnnnnnnnnnnnnnnnnnnnnnnnnnnnnnnnnnnnnnnnnnnnnnnnnnnnnnnnnnnnnnnnnnnnnnnnnnnnnnnnnnnnnnnnnnnnnnnnnnnnnnnnnnnnnnnnnnnnnnnnnnnnnnnnnnnnnnnnnnnnnnnnnnnnnnnnnnnnnnnnnnnnnnnnnnnnnnnnnnnnnnnnnnnnnnnnnnnnnnnnnnnnnnnnnnnnnnnnnnnnnnnnnnnnnnnnnnnnnnnnnnnnnnnnnnnnnnnnnnnnnnnnnnnnnnnnnnnnnnnnnnnnnnnnnnnnnnnnnnnnnnnnnnnnnnnnnnnnnnnnnnnnnnnnnnnnnnnnnnnnnnnnnnnnnnnnnnnnnnnnnnnnnnnnnnnnnnnnnnnnnnnnnnnnnnnnnnnnnnnnnnnnnnnnnnnnnnnnnnnnnnnnnnnnnnnnnnnnnnnnnnnnnnnnnnnnnnnnnnnnnnnnnnnnnnnnnnnnnnnnnnnnnnnnnnnnnnnnnnnnnnnnnnnnnnnnnnnnnnnnnnnnnnnnnnnnnnnnnnnnnnnnnnnnnnnnnnnnnnnnnnnnnnnnnnnnnnnnnnnnnnnnnnnnnnnnnnnnnnnnnnnnnnnnnnnnnnnnnnnnnnnnnnnnnnnnnnnnnnnnnnnnnnnnnnnnnnnnnnnnnnnnnnnnnnnnnnnnnnnnnnnnnnnnnnnnnnnnnnnnnnnnnnnnnnnnnnnnnnnnnnnnnnnnnnnnnnnnnnnnnnnnnnnnnnnnnnnnnnnnnnnnnnnnnnnnnnnnnnnnnnnnnnnnnnnnnnnnnnnnnnnnnnnnnnnnnnnnnnnnnnnnnnnnnnnnnnnnnnnnnnnnnnnnnnnnnnnnnnnnnnnnnnnnnnnnnnnnnnnnnnnnnnnnnnnnnnnnnnnnnnnnnnnnnnnnnnnnnnnnnnnnnnnnnnnnnnnnnnnnnnnnnnnnnnnnnnnnnnnnnnnnnnnnnnnnnnnnnnnnnnnnnnnnnnnnnnnnnnnnnnnnnnnnnnnnnnnnnnnnnnnnnnnnnnnnnnnnnnnnnnnnnnnnnnnnnnnnnnnnnnnnnnnnnnnnnnnnnnnnnnnnnnnnnnnnnnnnnnnnnnnnnnnnnnnnnnnnnnnnnnnnnnnnnnnnnnnnnnnnnnnnnnnnnnnnnnnnnnnnnnnnnnnnnnnnnnnnnnnnnnnnnnnnnnnnnnnnnnnnnnnnnnnnnnnnnnnnnnnnnnnnnnnnnnnnnnnnnnnnnnnnnnnnnnnnnnnnnnnnnnnnnnnnnnnnnnnnnnnnnnnnnnnnnnnnnnnnnnnnnnnnnnnnnnnnnnnnnnnnnnnnnnnnnnnnnnnnnnnnnnnnnnnnnnnnnnnnnnnnnnnnnnnnnnnnnnnnnnnnnnnnnnnnnnnnnnnnnnnnnnnnnnnnnnnnnnnnnnnnnnnnnnnnnnnnnnnnnnnnnnnnnnnnnnnnnnnnnnnnnnnnnnnnnnnnnnnnnnnnnnnnnnnnnnnnnnnnnnnnnnnnnnnnnnnnnnnnnnnnnnnnnnnnnnnnnnnnnnnnnnnnnnnnnnnnnnnnnnnnnnnnnnnnnnnnnnnnnnnnnnnnnnnnnnnnnnnnnnnnnnnnnnnnnnnnnnnnnnnnnnnnnnnnnnnnnnnnnnnnnnnnnnnnnnnnnnnnnnnnnnnnnnnnnnnnnnnnnnnnnnnnnnnnnnnnnnnnnnnnnnnnnnnnnnnnnnnnnnnnnnnnnnnnnnnnnnnnnnnnnnnnnnnnnnnnnnnnnnnnnnnnnnnnnnnnnnnnnnnnnnnnnnnnnnnnnnnnnnnnnnnnnnnnnnnnnnnnnnnnnnnnnnnnnnnnnnnnnnnnnnnnnnnnnnnnnnnnnnnnnnnnnnnnnnnnnnnnnnnnnnnnnnnnnnnnnnnnnnnnnnnnnnnnnnnnnnnnnnnnnnnnnnnnnnnnnnnnnnnnnnnnnnnnnnnnnnnnnnnnnnnnnnnnnnnnnnnnnnnnnnnnnnnnnnnnnnnnnnnnnnnnnnnnnnnnnnnnnnnnnnnnnnnnnnnnnnnnnnnnnnnnnnnnnnnnnnnnnnnnnnnnnnnnnnnnnnnnnnnnnnnnnnnnnnnnnnnnnnnnnnnnnnnnnnnnnnnnnnnnnnnnnnnnnnnnnnnnnnnnnnnnnnnnnnnnnnnnnnnnnnnnnnnnnnnnnnnnnnnnnnnnnnnnnnnnnnnnnnnnnnnnnnnnnnnnnnnnnnnnnnnnnnnnnnnnnnnnnnnnnnnnnnnnnnnnnnnnnnnnnnnnnnnnnnnnnnnnnnnnnnnnnnnnnnnnnnnnnnnnnnnnnnnnnnnnnnnnnnnnnnnnnnnnnnnnnnnnnnnnnnnnnnnnnnnnnnnnnnnnnnnnnnnnnnnnnnnnnnnnnnnnnnnnnnnnnnnnnnnnnnnnnnnnnnnnnnnnnnnnnnnnnnnnnnnnnnnnnnnnnnnnnnnnnnnnnnnnnnttccctttggtaccctgtggctgagtgtaatctaccccccgcctataatggtggtcgctggtcctgcaccccaagttcccagactcccattgtctaaggactaggttggttttggaaaaatcaccttctctgtctcaggttttcagtcagtatagagacaccaaccgctccccaggccacagcgttggagacagaaggcgagtgcatatgaattccaagcttggttccagaatgaaaacagtgtcgagtcagatgatggcgtgatagtggtggtgcggtgctggggggagggggagtgctgcctctggtcatgtcctaaggtaagcaaatagagcttagggcacagctagataaggacgaaggactggatggtagcagttgctttcctggcctcgatggtctccatcctgctgggcttaggggatgtgtgtgaaagggtttgctgttcaggtgtaaggaccagagtttcagtccgcagaacccacaaaactccagcggtggctcagtgcttctacagggcgataggaggcagagacagggtaaacatttctggaagctcaaaagtacacagtgcgtacccattcacacacataggtacacagtgtacacactcagatgcacacatacacacacagacacacagtgcactcatattcacacacataggcacacagtacacatactcacgtgcatactgcataggcacacagcatgcacacattctcacacacaggcacatggcacatacacatttacacagtacatacatatgcatacacacaggcatgcacacatacacacacgggcacacagtgcacacacacaggcacacagtgcatacatattcacatatacacggatacccagtatacacacatgcacacacacaggcacacagtgcatacactcagatgcacacatacacacacagacacacagtgcaaacatattcacatacataggcacacagtacacacactcacatgcacactgcataggcacatagcatgcacatattctctctctctctcacacacacacaggcacatggcatacacacattcacacagtacatatatatgcacatacacaggcacacaatacacacatattccatacacacagacagccagtacacacacatgcacacacaggggcacatagtgtacacactcacatgcacacacacaggcacacctgttgctcaccgtgtgtcccgaactggcttcagacccaagcagtcctcctggcttagccccttgagtgctgaagttatatgtgtgagctactacacctagctctgttttatattattattacatttttaagagggtttgtcaagtaatttatgttagcctagagtctgcaatcctcctgcctccacctgcagatgctgctatggctggcatatcccaccatgctcagctccagggtctatctcactcctccacccaggatcctcaccttccttcctgacagactggcctctcatcctcacgtggtgtgtcaccgagtctgtcatccatcactgcaccccttcctgctgcagctcgtgtctcaatgtgaccacggtattaactttcgcgttcaacgtgtatttctatttttctctctgcggtttagtaaaatacacaaaaatcttatcccttgaccttggacttttcagaaacaaggaagtgttttagggagggtcacctctaaggactctggaaagttcctctccttacctggtagtacagcggtggaaagaacagccagaaccaactctcagagctcacagggctgctatgtaccagggcgggaactactgtacccgggcaggtatgactagggaaggatccaaggccatctgcaggtggtcctaccacgttgcctgttagtttaccttctattaaaaaatctgatttttttaaaaacagaaactcattagaaactttaaactatatatactttttttattttgagataaagaattaatgtagttcaggctggccttgaatttaccacttagccaaggatagccttgagcctctgatcctcctgcctttatatccaaggagctgatatcccaggcatgagccgccagactattttatccaaggctcaaggacagagcccaggcctcacagatactaacaagcattctgtgaactgagttcatccccagctctgacttctgatcgtgttttgattttttagcattcaagagttagtgagatctacctttgagtgaagagctgacgtgacccaggatggctgactccattctcctgcagcacgtcagctcaaatatgtgctaggagaatgggagcagagatagaaatacagaggccggaagtccttggatctctctcccggcctctctctctctcttagtctctgtctctgtctctgcctctctctctgtctctctgtctctgtctctctctctctctctctctctctgtgtgtgtgtgtgtgtgtgtgtgtgtgtgtgtgtgtgtgtgtatgtgtataaaatacaacctgcccagtctacaggatgtttacttgtctgtatgttttcagaccgaccgttcggtattggataaccagttggtatgctcttccctggggaagactgtttctcccactctccaccttccttagtggcctgtacttctctgtgcagggttagggctctgtgggctttctctggaccacattagcatgtctattggtgtggtccttcttcagctctgtttcagtacagtctacatgtaacttagtcatggggaaacttcataaattaagcttctgacaacctcacagcaaactccccaaccttctggctcttagtctttctgccccctcttcctgaactgtaggtacaaggatttgtgtactaggtgtatcagttagaactgggtccacaactctgcatttgattgcgtgtgttttcctattgtggttggcaggcctgatgcatcttctcaaatgaacagccagtttaattagaaccagagcaaaaattatcgaaattataataggaaaaaaaaaagtcagatcatgtggagtgggtatctattagggcccccatcaaacaagagagcagtcatttcctagtgaggcaaatgaattttaaatactaagatggagttgggtgtctagaaagcagagcctggggcaacagagacaagcaagaaaatgccagagaagctgtaggagggaaacacaataacaggagaggcaagaaagtaaatccaaggccatctttggccatgatttatcaagaaatcgagtctaactgtcgaatcctgcatcattcagatgtaagagcatctgtgggaagatggaaacgtacagcagaaaagacaagctagtaactactcattcttcacgtcccacactccacctctcccaggcccacttccctcacacttttggggtacacttcccattattccaggaagctgtgtgtgccacggaactgtcctagctccagcacccactcccaggaagtcagagaccatggctgacattaggagatgatccggtaggctgcagaccagactgagagatgacctgatgctacccctgtccgtaggactccactagagaaacactagggaaatgtgggtgtggagacagcagaaggcatcagaaggctctcacgattacagaggccaggaagtccaaattcagagtgtggggaggaactcaaaacccagagaactgatggttcccttccattccaaagggtgttcaccctgggggagtccgttctcactttgggggggtgtctttttgttctattcagacttcctgatgttgggataagcctcccgcccccagatcagaataggcaatctgctttgtatcaccaattaaaatgtttgttgtgggactagcgatgtagacacttacctagaatgcagaacccctgacaccggataaacccagtgtgcacactgctgtgatctcagcacccaggagctggagcagaaggatcagaggcaagttcaaggccatcagtgagaccctgccagaaaatgcaaagcaaaggaaagcaaaaatgataaaatttttgttgcctcttaaaaaaaaaaaaaaaaaaaaaaaacggccttgttagaaacatctagaatacttgaccaaatctccgggagttctgtggcccagtcaggttgacacagaaaaatgagccatcacaggtgagacctggtgggggccactcagctgaaggacagagaatagccagggttcagggtgcaggcgggttctgtccgactaagcagccagttcccaggcagtgggctcagccagcagccagctgcacggaggcagaaggcgtttctgtgtagtttctgttcctgcggaaactatgcctggttgtctgtccgtctgtctgtctgtctgtctgtctgtctgtctcctgctgactcgcctctccctgttgcgttcttgcttcttctagctgtgcgtagttagaggatcgtttttgcttttgccattcttgagaagactagacagaaaggggcttggcattttgcttggcaccaattatcccgcgctgtggattttgcctccctggccgttccgcgatcactgagagtgacttcatgggcctgtaacagaacaagtgtgtgtcccggtgggcgtgggcgtgggcgtgtcaaggggctcactggggctttgttctccttataaatggaaatgatgatgtcttaaaatggctggaagacacacacgcttgcttgctctttcccggtctttcttccccttgagtgattctttccacttctgacccacccctcggcaccgcccacgtgtccctgcccatacatgtgtaccagtctcgctgaggacagatcaacattgttccagctgagatccacacggcaccctcactcataacaaggcttagattctctttttcacagtccctgaaaccctaccccttttctcccctggttcaggaggtaaaggtgcttgtcgctaaccctgacctgagtccaaacaccaaacccacatagtgagagaagcgaacctgctctctcaagnnnnnnnnnnnnnnnnnnnnctgtgcatctcagtctggatttacatatttccagggttcaccagccatccatagctgccatactaggggagacatagattcgaacccctcggctgcacactgcagtcagctggagagctttcaaaggctgaggccagggccggagagatcgctcagcagttaggagctctcgcttcccttctagaggcattgggtttgatccccagcacttacatggtgggccacaaccctctgtaattccagttctgtgggacctgatatgcccttctggcttctgtaggcactcggcatacacaaggtacacagatattcagtatttatatgcaggcatgcaggcaaaacacccatacacataattattttctaaattctgatgtctaggccatagctcagggccattccaagcttttattattacatcttatttgggggtgggagcatgtgctcacaggcacgtgcatcagggtttgaatggagctcagaggacagcttgagagagcaggttcgcttctctcactatgtgggttctggtgtttggactcaggtcagggttagcgacaagcacctttacctcctgagccatctcagcttccctgtttctattttgttatttgttttggttggttggtagtttgggtcgtttatttatttatttaaacagtcttaagtagcccaagctgacctccaattctcccaatgatagagaattatcatgggcctaatcctgtctccattgggattagaggcatacaacactgtacctagtttctaggttgctaaaggttgggcccagggctccctggatagtaggaaagcactttaccgactgagctacaccccgatctcctcctggttttaatttaaaacctggctgagctggggtctaggctcctgtaaagtagacagtgtcacaaaccacactggtataaggttctgtcctggagaggcaactccctcctctgttatgaccagtcccgtctttccctctgagacccacactgtaagcagaaattaagcaagcttgggtcacaggagggagaaaagccggaacagggggtattaaattctgtctgacaggcaagaggggacaagccaagctcccttggcttctccgggtttgtttaccaacaggctcagtaagtgttggctttgctgctgccctgccctttgggctggcaagacatttcccaccccctctgccagagcgttctctgagaatcgagaagccattaggagcacttcgtgtttagcagggtttgccccggttcctctccgggaacttctgaagggctcagaggcatttccacgaggagtcagtctccatccctggagagaatgaagggatcaaggtggcaggcggccaggaacactgccacttttacacaatccatccctctttgccctagacaagtgaactctccctctcctcaaaacgaagccagcccagatgaaccgcagggttttaaatgcatccaggagtgattgtttgtggggggaactgactaaacaaggcgtgagtgatccaaccagtcggaatgcaaacacaatcacatctgggtgccctggggtccagttatggcagctctcacacacacatacacctgaggtgccatacttcaggggtggcagagggctggcatccatgcatctggagggaccagaaacttgctaagggtttcctggagattggaaaccagaggaaaaaaatatacagaggagtaggggatgcttgccctgtctttcctctttttatttttttttaaactatgcatatgtgtgtagggcaaggtatgtgcccatgactgcaggtgccctagatactacacgtgtcagatgccccccaccctgggactggactatctggagtggatgctgggaacagattttgggctgtaaattctgcaagagtagtgagtggtcttaactactgagccacctctccagtccttcctttatgtttggagggtgtcagtttcaagttaataaaattgacaactgacccaagaagatagttcttgcaccatacacacttaggagacgcaccgagctcggtctctgctgctgggtcaggtggctgtctgtcagttgtcacttaaggcgccagcctttgtttgtcaaaacctcccagtagagaagacgaatcgacccctgtatccttgtctgtctagtctgtcacccttagttgcaaatagcaagctaggtcagaggcgcagtgtatccacagagaggtcgtgccgttccagcaaatcctttgggatccctggctaggagatggctcagtgggtgaaaaacacttgctacatacacagtatgaggacccaagctcagctagcacccatgtgaaaaagccaagtttggtcatgcgtagtcctgcaacttgagcactatggggaacagagatgggaggataacatctgctggccactaggttcagctcaaggttcagtgagagaccctctcttaagggaataagaaagaggacgatagaagagacacccagcatcttcctctggcatgtgtgtgtgtgtgtgtgtatctctgtgtatgtatgtgtgtgtgtgtgtcccatacaatacacatgcctaataataaattagcttaggaaatggtgagctgctgtgcctccgtgttttgtaaacaatataaataaaaacgggaaagaggcaaagcttggtaaaggatgctgggcttgctgggaacagactgaggagaccaaggctcaaagtccccgtgtgtgcagacacacagatgatccacgaagctcgtgctaacatcccaccacctcctgcttgtaagccaatggatggtgtgtctgcacacaccgggactttgaggcacagcagctcaccatttcccaaactaaaaaatgagaagttgttgattcacaaaaagagtccaaggatcctggcttcgggcgcagtttgctccaggggcttaacgtacatctttgagcttctgcctatttttctttctcagttctgccttcatcagtttaggcttttattaccaggttctgtgtcctggagcagtggcctcccaggaacaatcccaggttcatgaccaacaaaaataggccctatgcttctgacattccagtgtgattcattgtgaccagagatggaacgccatcactctacagggcaggctccctgcagcctggggcttagagtgggacctaagctggatgcatggacgaagctccttaactgctcttacgctcttaggggagagacaaagtcttcatggctgagactgtgcattccttttgggtagaatgcaagaatgtgcaggagtggtgttgtgttgtgtgtgtgtgtaaaacacttgccacatgcctgcctgcctgcctccctagagcctcctatctagttcaagtcctcataggacccaatgagaagctgccagcgaacagagttgactgtccagcactgggtgagcggaagtctttgctctgcctgttactcctcaggcccttcagcctcagcttcccctcccctctctcgtctgcatgacccaaggactggcaagtgactgtctagtatgatgttctgaacgatggtccctgaagtctgacttcctgggttcaactcctggctctgctgtggacagctgtgtgttcttgaacaagttcctggaattctgcaatgcatttcacagaatggcagctgcatatgtatcttatgaacatgatatgaatatgtgagttaatctatacagagtgcttggcactatatctgccaactgatatttggttatcctaagaggccatgacacagggtctgctgtttagtgatcgtcaggcagactgatgaacttccaaggctcctctgaagacacgccaaggaggagctagctaagctgtccctgcagttactcagggactctgaaaaccttggcttgaacttgcttagcaaaaatatctattagctctccacagttacttatggactgaatctgtctgaactttggccttaaaagaatcacctaagttcatcaggaaaattgggggcaacggctggggcaaaggttcaggaagagaggtgttggtcagacacgcaagatgaccagagttccagcttttagaactcacagagtggcatcttcttgtcatcctggaggaggagggggagggggggggaagatagtcagattcccggggctcactagtcaaccaatctagctgaactggtacattccaggtatcagtgagatgtctcagaatacaagatggaaggctccctgaagaaaaatgcccgaggttaacctttggcatctacacatacatgtgtacacacacacacacacacacacacacacacgtgtacacacacacacacacacacacacacacaatcaaacaaggtggggagcctttgtttatgttttatgagccctggaggacaccattcccctgaggcagggaggccgacactcagacgtgcgtctttgcttgccttctgcttttgctgtcatggcccctccccatctgcccctcctcaggactactgtaaataaagtcccatcagctttgtagggccacttggccaccaggctttctagtcagaactagagtcttgagggatttcacaatgttacgtggctctcttgatgcctctgtcccttttgacccaggttctcagtaagaacaacagactttgtgggggtctcttccctccctcatggtttggaaaggagccactcgagatggaaagcacctagtgtttcaggaaaggcctcttatggaaatctccgtgggaggaaggagtggtcagaaccgtccacagcttctctcggctctgctgtctggagacagggcagtaatggggtttaagggcttcggtggccatgaagtcttcctcgctcattccagacccccacatgcacaagcagatagaacccattcttcaccctccttggaaaagagggggccttggggaaatgtgaacaaatgtctacccacccaaagacagggcaccaccagcagaccaaaggaacatttctaccaagtccagtttggccaccccgtgaagtactgggtttacttactagaatgtgggtgacctgcccccagacagctgcgtccctagaaagtcttgccccaacatggatggcaagttccttacacctatatagatggcacccctcctttcggtcacctttccaggtgctctatgacatcccccaagaccatgtgctactaagtgggattatatcagccaggggggaggcctgaagggcagtgacttaatctcaagtaagggtctgatgacctccccgccccttccttctgtgagggccgaggcttatggtggaccttctgtggccagtcccctctgtcctgattgggacagcaatgacactcttgctctgaggaccacactccccaacagcccatcccactctctcgcaggagcactgactccacctagagatgcttcgtcttcaggaagaataatcccgtcacggagggtgtcttgtgtagtgtaggacactcggcaacgtcctcagcacctgccctcactacgtgccacaagttttgaaggccttcgacgtatcaggagcaaaaaggggaaaaacaaaacaaaacaaggcccagttggtttaaacgcagtggaacagagctgaggcagcacactaagtttcgtgagcgcgaaggccgtcgatttactcgggagcataagcttgggtggaaatcagtgtgtttttaacccgtgtcgctcgccctcttctggaagagctccgactggcccagggcttcctactcagcacccgtacctctccagccccgccaagctattccttgtgtctctccacagtgcacggggaacccgcttctgaagtccagcaagctgccacttggacttccttctctttaagagaaattccagctctttaagtctcctggaaggcattgtgggtaatgccccacatctgcacgaactgaatcccttccagggatttccaaactctgcctctaggatggactgtggaagtggccccccagggtgtcagagccttgaccttggctgagctgtgggttctgtaggaggccatatgtcctggtcccacctccctgcctgctgctcaccaaggctcctttgtatcccccttccattcccccagggcctgagggccccaggggcagggctgtgacatctattcttgctttccctcctagcagctcccatctctgtgtgacagagatgtacagaaacaaccaaataattggagatgcttgtcattgtgtatgggtgaatgttccaatgtccccgcggccagttttgttggtcttatggatttttcttgtcgtttggcggtgtattgatgaatgctctagcatatggcaggggccaaggcaaacctgtccccattttggcagctaccccagaactctagagagtggctgacgggataaatccaggctaggctagggtaggtcttccctacaaacacgggcagagtctagcatgatttcagtcccttccagataaaccatactctcccagatgccttctccacagaggaagccccatccagctccccacaccctgtcagctatgctggccctacccgagggccaggagaacatggggcacaagtgcatagtggctcagtgggacagtgagaagaaggttccaaacccatgccttttatttctttggggtttgatgcttttgtttgtttgtttgtttgattgattgattttttatatccagatgcttctgacgttccaagtgttggaactgcaggcatggaccaccaggtctggcagaccccatggtcccctagctaaaaccatatggtgttaccagatccagtataacccattgtctcttaactaaaaccatattgaattcatcatcctcttcctccttgagcagaacaattaaaaatatatatatatagagagagagagaggagtctataatgtcagatctcatattgtcatcacacgatgccagcaactgttcagccaagccgcatctttccccgttttcttattacagagatttgtaagcacacaccaaaccccaagaccctgtaatgaactcagcgtgtggcgtgcaacacccagctaccagaggcatccaacttagccacaggaaaagcccggtcagggcttcgagtcaccattttggaaattgcgagattgtttcctttctgcatcgtttagggaaacaaacccaacatgttacagttctatcccacttcctttcccagaaaacgcttgggttttttcggcctccctttcttctgaaaaagctgcccccaaatttcagcctttgcctgtgtaaacacagacttagaggcgtggaggggagcccccgcctccaggagggggttttatctgtgattatcttatcaggataacactaaaccagcccctggtagtacaaggctgctactctttgctcttgcttctgttcccaaccaccagttcagtttataaatccgccgtccaaggcggaaaacaatttgaaaggcaacattgtttctggacaaggctgtgattgtgacaaagagattgtgtggctttcttctactaataaatccccctgctgggtttctggctcgctggaagggttggcagaaggatgacagggcatgttaaactttctggatgcctcggaggagcctacatagagaaggcattcagcactggaggacatttccagagacccttcggtcatggggttggtaggctgtgttttgaaggaaatgtacaagagcatatgtccctatgatagcatttctgggtggggaatgggggcacctgcccctcccccggttctgcttcctccccagctcttctttgacgtctcttgggaaggtttggtggcagtgaactcagatgccacttcacaggtgtgggtattccagatccgatgccctcctgcatcagtcagccactcctggccctgtcttgatcccaagcaagttgaaaagagacacctcaccgggaaagaactaggagacgaaatgtacaaaagtccttagcaaaaccataaatgaggcataaaagttgggtgtcaagagttattaacagaaataaaacaagaacacttcaggcaaggtgccaggagaggctttggactcacatcaatgccccaggccttgggcagggcccccagttttgcttataaaatggagacaccgaatgtaactcctaggccaccgtgatagtaagtggggttatgtgtgtcaagtgtctactgcggcttagcacacatgtcagggcgcaccaaaggcaggcagtaacagcacagcgataatatcactaatgacagaactattaaaagaggaagaaggcaagcaagatctcggggagcaggccagtgtggataaactaggaggctcctgactgggatgcagccatgaattataggagaattcatggggaaatcaaagagttggattcagggtccctcactaaggggatgggttttattggttgggcatttgacaacagctgggtggggtggggttggggaccacagtggtgacagggatccagcatgagcacagagtttgagttgaggtctcaaggccactgtgtaaaagccactccaccaccccaaacatctgtgctttcatccatccatggagattaacggcagccacttgcatcttgcagctgtcctatgggtcccatgcagtcgtgaccactcctttgtacttaggattcttcccccagtggcaaggatgcagacgctaaggatatggacttaacctctcactgccccttccagtccatggaactcccagctgaatgccaacatttctgaatggtttcgctctcctcttcctcctcctcttcctcttcctcctcttcttcctcttcttcttcctcctcttcctcctcaggagaccctctcttgcctccagccatctttccaagttctgccaaggctgtaattataaacctttttttctttctttctgaattaccgcctgtgtcttctctcaggcattgtctcatcacagaggctgtcagccccacacctggcatctaggtgttgtccatggtctttatgcatctcccgtggctgttataacaaacttcctcagagttcgggacttggaaccatgaaagcttaaatctcaggaggccagggtctgaagggaggagagtcacagagccctgttctcttgggaggctaagggaggagccttgtgtctgcagttcctgggagcttcaggcatccctctgcttgcagctgtgtaccttccctcagccgccatctttgcagggcttcctcatcctctctgtggctggctcctgtctgtgtcctgtggagacagctgtgataggatttaggattcccccgataatccaggatgtccccagactgagaccctgtactacattatagctcgaagcttcctttccaatgtttacagtctttgggactcaggggcataatttggagcctggggtttatctccagaagcctgcctttatcagatgtcttactgggaactaatgagttttcatgtaaagctctccaagtccttgcaggcttcggggttccagctagactcagaagttaagaacactggtgcttttccagaggtcccaggttcgagtccctgggcccacatggtggttctcgactgtatgtaactctagtcccaggagatccaatgttcacttcaggcttttgtaggcaccaggcatgtgcatgatgcacagacaagcatgcaggcagaatgcccatgtacataaaaataaataattcaaaattaaaaacaaggtgagctttcaacttcttcttcctgccaccatggcttccccactaccaccaccaccaccaccgtgatggagagagcttttctctctctctggaaccatagccccaagtaaactccttctcatataagttgccttggtcgtggtgttttgccacagcagcagaaaagtaactaagacactcactgtcctcttctgtaagaacaagagcagccgggcagggctggagagatggctcagctgttaacagcactggctgcccttccagaggacctgggttcaatttccagcaaccacacggtggctcacactgtctgtaacccaagttccaggggatctgactcccttccgtagaagcaaagacattcaaaacatcaatgcacataagataaaaaatcaagcattacagaaaagaagcagagtatctgcgaggtggctcagtcagtttgctggtgctgtctcagagcatgagaatcgagttcaaacaaacaaacaaacaaacaaacaaacaaacgtgagtttaaaccccagaacccaaggcttttcttccttccttaaaagtatgtataataaccttctctcgtgtcccagtactagtgacgaggaggaggcaggcagatcctagggccttcctggccaccagcctagtctatgtgttgaacacaagccaggaaaagaccctatctcaaaaaggtagatggtgtctaaaataaaatgacatccaaggtggtcctaaagcctccgcaagcacacaggtgacccattcccccagcagaacatgtgcacacccacagaacacgatagtcagcctttcgggatttgacagccagccaatgtcggttcagttgcccagttctcccctggaagctcagaagagccgtaaataatacataaatagatgggtgtggctgagcgtcaataaaacaccctttatgaaacaggacaggtgagctccaggccgcgggccagtttgtcagtcctttctgtagatagtagggaactgtgcattgttcctgagcagaggaacatcaggccacagtgtagaggattcgatggcagctgcaggtagaggaggaaggtggctcttgcttttacattgcttctccgaggcctttgcacgctgaggccaagggtggttctccccattttctactgggaagcaagattcttgcctttctgggaccacccaagaattggatggcttaccgatctcatttttaaggaaaatgtttaatagtgaggctttctcaacactaagtcccagctggtatcgaggcatctgtctgggtaaagagcgggccgtgcttccagctttaacatctgctctgattaaagatagggaagttttccaggcagtgagctggctggctggtgagtggtctgaaaagccttggcaaaacagagcccaggtgggatttatttagaatcagagtactcacacgccttcttggggtgaaaggacaacaggagaatggggtgtatcagagaggggtggcctaatcgcacacacagaggctcagcttttcaatctataagagagggtgactgaatttcactattgatgccatgcgaacttttccttgggggcaatgaacaaacatcactcctggataggacaccaagatgaggccagagaaacatgcatcccccagagcacggtgggccattggatgtaactgagattatgtaggggaacataggcaatttatatatagctaaaccactgcagaaaagtccccccccccaactctacacacatatgcagtggaggggcagggcctcatgaatcctaacttccagcaaccattaagtgctatgtgtcctcagggagtccagatttcatgcaaatctccggcaggtaaccatggatgctaagagttcggtgagccaacatcattgtcatacatggaggaccaaagcaattggtattccccctttcaaccttccgttttcatcttgaggtgctcgttttgaattgctccagatgtttgattcctaaggaagatgcctggcacgccacacaacccacagaactgccaccaccatgtgacggtagcatgttttaacaaacgggtctcgcctgggtcctaggctggagccccatccagaggcaggcaagttcctgatcaagctactgagtgacatggccagcctggcccaagagcattccctccatgcccccctctctcttcctgccagccaccagccagccggcgtggacagggacctcatgggcattgatgtgagcacaagtcaatctttgttttttctctctgctctcaccccaccccatctcttcactctagggctgagcagagtaataagaggccactcaggagccttctcaggtggatgttggggtgggcaaagggctggaccgtaatattctggttgattttggactcctaggctcattaggagtcacccgttccttcttctgactccttaaggaggaaagttacacctcctgtctaacacagttgacttacctacttttgtcattgtcctggctgggtaaatgtgtgtgtgtgtgtttccctgggtctatgtatccctatgtgtgtgtccctgtgtatatatgtattcctgtgtatgtccctgtgtgttttttatatgtgttccctgtgtgtatcccagcccctgtacccatgtatccctgtgtgtgtgttcctttgtgtgtgtccctgtgcatgtatgtatccctgtatgtgtgtctgtgtattcctgtacgtatcgctatgggtctgtctctgtatccccgtatgtgtctgagtccctctgtgtgtcccagtgtgtatttgtgtccaatggagcagccctactgtctgcctaggaaatattagcaccttccttcttgtgcagtcacgcctgccaggagggcctctccaagcctggcatccactcctgtctccaacaatacttcgtacttcccctgggcccttcgttcagcctctctcggcttctcctcattctgccaggctcctgcaaagcacagcttcctcattcagaggggtggaaacaggcccaagcaggcccagggcagatctgtggcataaaagcacacttgtcttccttcaagttcacagttaatcaacccagacacttgacagtcacctcaagtagcctccaaagtccaatggcttcttttctatttatgctccgcttggattgttctactggagttaaccgtcctgggtatcatctgtgggaagccgggcacactagggttcgagtcctggctctctgggaggtgtatgatcttggaggcattacttagtctcccagagcttccatttctgctggcttaaatgggagtaattacactcacttagctgagatgctgcaggtaccacagggtgtgcagctcagacttggcgtgcttctgagagacaattgccactgtttaattagcctcaccatcgttaacatggtgcacctcccattcatccctcctcctcacgggactgttggccccccaggctccgaacctctggattcccatgatgccttgcagcccggcactgacagggctctccacttctgaggtggggtgaggggacctgagttttgctcccatcgattttcagtaatgtgtttctttccaagactcctgctgaggaaaggggtttccatgcctcactcgtctggcaaacagacattctataaacccccagagagccagtttcagcctctggtgggcttgtcagtctgaccagcagcaacagggatagattcttttgtttttgtttgtttgttttgtcttattttataaagttaacatttatttgtatttctgtacatttggttccatgggtcttttgactgtatgcatgtctgtgtactacatgtgtgcttggtttcaaaggagggccaaagccagcatcagctcctctagaatggagttagagatggctctgagctgctaggtgggtgctgggaactgaagacgagtccttgggaagaacagccagtgctcttaaccgtaagtcaccagtccagtcccttgtcatgtcatcttttcatgccagactttgattcggtgtttattttttcatcttctgaagatgaaaggtttcttccctacctgacctccgtgtggtacttaacagagcacccgcgtgccggctgtcctcttggttctcagcgctgtctgtctatacagttcccctctggcaacctgccttctcttcatctgtgccatgtttatcttgaccgccatctgtttacacgtggtcccctgcgtgttctgtgtagacagcactgtgaaggacttcagacatgtttaagatctttcccccttgagtaagtcatctaggagtctgaataggtgtgcgggataggttcttgaccaagaaagataagcacacttttcttctaatggcaggggcagatggaccactgtgggcctcagtgtgttcttgatacatggacactctaacgtaaatctctctgctgcgagttcagcccacttcctagaggaacttacacttagaaatatatccataagtaggggttacatacaaatctggatgctttgtgctcgttgggttatcctgtgctctgaaatcatttcctaatccaagccagtcacttccctttgcgtgtttctaagaataatcctctcaggactcaggacccaagggatgaagttcaaagtcacctccatccctagattctggccttgcccacgtgtgtcagcctttgttgcttgcccctctgagtggaaagttaattttccctaacggtcagtctaaaccaccgtcacccttccaagtcttcagatcttaggtccagtgtcatctcttctaaaagtctgcctacttccttcttctctagatatttccttgaatttgacaaacccacatttagcatcctatgtgttagtaccatttggttacggcttagcgtgtggaggggaatatcactcagcccttgttttcacttgcatgacatctgtgtggctctagctccatgcaaatctgggtcccatctttaatccccctagagtcacttgaagccagcttggttcccagaacatgggaagcactagataagtcgtcaaagactaaacgggaagattatagctttctcagcatcatttgtatcccacacttggcccatcctgagttggttgaggtgggactgtaggcagctaacaagccacacaggccatggctccgtgtagccttagaacccctgaggcaaggtcgtgtacacagatagcaatccaagtcattggggacccagcctgagcatccacaatctgcagaagcaaaatgctttctctcccgtctgcctgaggaagctggcccctactgtcccaaactctgatgacaccagagtccctttctgccaaaagtacagaagaatgccagtcaaggtcacatttgtcacctggagcaagagggctactcaccagagtcactcagaggtggatgatggtaccagtgatttaaaaagaaagaaaagaaaaagaaaagagaaaaagaaaaaaaaatctgcctagctggcctttctgtttaagtaaagagttaggggacaaagtttcaaatctcttgacctaggaagtctctttccattgttgacagcagccttctagagttcagagttatccaagatcaatgtcagcactggttgggcagacttgcctgccattgggagagtggctttgtcagcttcccatcttgaagacaaaggtcttctgccctggcttgttggcccattagcatttgcttctcacttttatgaagtgttagttagctcgtaaattgtctgcctgtcccactgggcactgcctacaggccatgagctaggccccatgcctctgactcctccatggccctactggacacccgcctgacctcaggctaacatcaggcatatggagccctgatgcttgttgtacctggactgggttggagaacccagctctgactcatgagttaatcgagccagcccagcaaactcacattgggagacagggtaggtcaccgcaagctgttagcagacttagagaaatagcctcagcattctctggggacccaggaagaacaggaagcctgtgctgtgagtgagtcatggtacttgcgtatcctccagagcaaacctcatactcagaaggtttctcctgacgctcatatgaagacaagttagcaggttctcaagggtgagggctccctatatctgcactgataggatgggaccggcttgcggcttctactttgtcttgcccggtggattctattaggattctattactctctttgttcatgaattttatgggttttgttttagagaagagagtgttctcagaccggagctattctgattaaactctgatgatttaaacttcgacccaagactgtctcttactaagagaaacagttatgtaaataataaggctaacaatagtgaacaggcttccccagaggatatcgactcctggttggacggaagatcaggatgggtagtgaccacagtcccaggcagtgtttagatacaaaggcttctcagatatggtagagaggtttggccaagagagcctggaagaactctaaagattcatgagcttcgtgcggtgcggttcttctgagagtgagttcagcttcccctggactagctggctgatcggcaggaaggtgcttccttacctctggtgcgcgcatgcctgtcactgtcaccttcccctagtcactctcagctggactcgcccccccaccactgcctccttccaaccttgatccacaccaagcatttcagacgcctacaagcacattcctaacctcttgatccccttaattaaatggcactcctcgggtcctgagacaaacacgcaatctcttaaaatgctactctgccatttccctcctcggaatagactgggcatgattggaaacaggggaccaaacggagatgcattcacgactgcttgtgtagcactttgatagcagccagaaggcaaaaacaacacagatgtcccatcgatggagggatggataacactgcttacacaggcagtggcatattgcttataaaaaggcaggaagtggtgaagcagcatccgggtgggtgaagctattatggtccacggaagatgcttaggaccgcgtatggtttctattcagagtgggcgaataggcagaacaaaaagcagtggtgggttttaggggctacgaggaacagaatatggagggtaaccagcgagcacctaaatggggtagagatgagaatgctctagaactattactaggcatttccggaactgctggtgatggcttcacaacactgtgagtgtatttaagtgctactgaagtgtgttttttggtagccaaacgaggtggcttacacatgcagtcatagcactctggtggctgaggcaggatgtatgtcatgacttcaaagcctgcttgggctacacaataaattccaagtcagtctggtccacaaatatatgagtccttatttcaagaaatcaattccaagccaggcggtggtggcgaacgcctttaatcccagcacttgggaggcagaggcagggggatttctgagttcaaggccagcctgatctacagagtgagttcctggacagccagagctatacagagaagccctgtctcaaacaaacaaaaaaaaaaacaaataaaaaaaatccccccaaaaaccaaaaacaacaacaaaaaaagaaatcaatttcaaagttaattttaaaaactatttatattgctggtaagatgcttgcccacaagcatggggacctgagttcagaacccacccctaaaagctaggtgtggtggaataggtttgtaactccagtgctggcaagcaagacagaaggatcctgggagtccagtccaaagaaaactccaattccgcaaactccaagcggcagttcatatttccaggaatgagtttaacgtggaccataggaggatgtcgggtggttagaaacgagccagcatccctcaggaacttgtgagactgattctcctctacccaaaggagccctttgcctcaagtctggcagaaaggacagatggcttcctgtgatgcctcctagcacatcaaagtgcaggctggtatcacaagctccgttccacagttccaagtgtgcgctagcatcctagccctctcaacgcctcccttccccaaagcccctccccacagctgctcactgctcttctaaccctgctcttccatctgctctctcttcctgctcagctcctgcatctcctgtgatttctctgttctctatcccctgctaatctcctctctctgttcctgtctctctgtgtctgtctgtctgtctgtctgtctgtctgtctggagatattcctggctgtgttttgtctacttccttctctcttctgatgcctctggctgttctctctctctctctctctctccctctctctctctctctctctcacgcatgcgcgcgcgcgcacacacacacacacacacacacacacacacacctacaatgaaagtcttcccctttaccatatcgaggaatggtcatgtcgtcactttttacactgagcaagtctgtggcatggaggcagtggtggtggtgtgccggcaccgtcttcccgttggcgtcatgttagagatatgtacattgttcatgacagagcatgtgcaagagggctgaggagaagcctaagactacttttatatcgttctaagggtatctcagcaaaatgctgataggttatttttccattgccggaaaattagccaattcaagccagactagattatgccaaaggcagggttattgggaagttgttcctaggctggttcactggccccaaggattgaggccaggagagtcgccatggggagaggtgggggggagaaaaagatagaaagggnnnnnnnnnnnnnnnnnnnnnnnnnnnnnnnnnnnnnnnnnnnnnnnnnnnnnnnnnnnnnnnnnnnnnnnnnnnnnnnnnnnnnnnnnnnnnnnnnnnnnnnnnnnnnnnnnnnnnnnnnnnnnnnnnnnnnnnnnnnnnnnnnnnnnnnnnnnnnnnnnnnnnnnnnnnnnnnnnnnnnnnnnnnnnnnnnnnnnnnnnnnnnnnnnnnnnnnnnnnnnnnnnnnnnnnnnnnnnnnnnnnnnnnnnnnnnnnnnnnnnnnnnnnnnnnnnnnnnnnnnnnnnnnnnnnnnnnnnnnnnnnnnnnnnnnnnnnnnnnnnnnnnnnnnnnnnnnnnnnnnnnnnnnnnnnnnnnnnnnnnnnnnnnnnnnnnnnnnnnnnnnnnnnnnnnnnnnnnnnnnnnnnnnnnnnnnnnnnnnnnnnnnnnnnnnnnnnnnnnnnnnnnnnnnnnnnnnnnnnnnnnnnnnnnnnnnnnnnnnnnnnnnnnnnnnnnnnnnnnnnnnnnnnnnnnnnnnnnnnnnnnnnnnnnnnnnnnnnnnnnnnnnnnnnnnnnnnnnnnnnnnnnnnnnnnnnnnnnnccataaatgcaattttggggggttttctttgctcctgaataactccagggtgtttctatgcccaatctaggctattttagctcctgaataaatgacacagagaccctgtatatttattaacaagctgcaagccctaagcagggcagattctgagctaatctaacttggctgcactgctaatacacagctacgtggtcctttacctacatccgagtctctccctggctcgctctggtccacgtgtgtcctcatggctgctctctcatcgtgacctcatgccgaatcctcctggttcatccacacggtctcgccacactttctctcttcccatgacccttatttttttccttgggaccccccagactgggatcagaagtcctgccctattttcttctctttccctgctattagctgatcagcactttactaaccaatcagaggtgaaggaaaacaatctttatacaacgttgatacaatatcaggctcggcctcctgagtgctgagacgtaagacatgttccacctgctctacatgaccacctccccatcaccccaccataccccaccactatgaccgtcaccaccacgtgaccactgtgtgaccaccatgtgttcaccacgatgccccactctaggatttttctgtatgaggcgattgctgcaaatgccccaaccatttgacacagctctccttaggtctcagccatgagttcaagtaccctgagtgccaagtccccacatgggggaccaggcagctgatggtgtgtttgccagacacaggtcccgttatttctctttccatgtcccttcatagccatgccatgcggctcttctgtctctgtgcccacagttcccaatataaacaatttaaagggaggggggacttattttggtctccagtgtcagggagttcagtttcctggctctattgactgggacaaaatatcccagggggcaggcgcttgggcaggcgaggccctctatcttaccggtgacaagaagtagagaaagaaaaagcgaagggccagagacagggtaacaccaaggacctgccaccgttgactttctgccttcagctaggtctcaccctttaaaatttccagaactttctaaattagtgcaaccaatgggagattaagcagtcaacacataaggctgtaggggggaaatatctcatattttaagccataaccttgaatctcctatttctttcctttttcccatgtccagctacctctcccgggcctctcatgaaccccactccagcaggggttccagtgctcagccgttaaaaaaatcccagggccatgggggtgacagaagcttcagagataattttactgtactgccactccatcccgtactgggttcgccccttgtgcacaccctcccagggccacccaatgtatccagtcatgaccaaaacgtagcagccagggcactcttctgccatatggttactggctgggacaagaaagaaagacagctgggcactcgagagaagccccgggtcatgttaaaataccttggcatattctcctttagtttaatgtttattgcagacggatctcttatactcagcaatagatagctttagggcatgagctagggttaataattacaaaccacccctccactgactgagatttcagcaagatccacctttactttgcaccattttgttttgtttttattttgtcttgttggttttttttttttttttttttttttaaagacagggtttttctgtgtagccctggctgtcctggtactcacagaggtctgcctgcttctgcctcccaagtactgggactaaaggtgtgcgccaatgtcttccagctatgcagcagttattatgaggattgtgggcaaagaaaatgaagccctcagcagtcctgatgcgtgtttctatcttaccaaattaggagggaaattgtaccctctgtaaagcctcactttcttcctctgtataatgggtttatagcatttcccagataatctattgccagcggggaaactaggtgatttgttgctcagagttggggctgggatggggcaggggctcacagtgaaatacctggcctcagaaggcagtgttagtgttcctgcggtgtctgaatgacccaggggccttgccgtcagcaccatgtgtttatgggaaaagtggttctgaggaagggacttgcttcccctgccatcctggtatccttagcatgtgcaaaacagcagacacccaaccttttggctcctgttgtttcctacccaccccactggcaccgacttcccaggctacttgggaaataaggagacaacacattgttaatacctgccttgtaccctacattccctctttcctggccatcctaggaagataaacaaacagccattttccagtgacaatgccccagggcccagcttcttagaagtcaagtcccaaaatacacaacacaaggaaggggtgttccctcttctgttggctctttgtattttgttttttgtttctttgcagcttcttcttgcctagtttcttcctttcctctgcacaatgggtcttggccctgtattttctatgctttgagcttcggttggacacatgctaaagtgtttaaccttctgaaagagtaagtgctaccagcaggggaccaaaatttcaaccggtgagcctgtggaagacaggtcacgctcaaaccatggcttctccccactttgaaacactggcttcctgctgtgctcagcaaccctcagcctcctcacaaggccctgagctctaacaagagttagagaatgagggctcagtggtgggattggcttccaccatttcaccttagcctttgggggggaatcaagatggctagatatcctgactccaagatattaccccttctccttgcaatcatcccactgacttgagggttcttggttagcacttcagcaaactccacactccagggtgtcctcaccttgaagtctcaggtatgaaggagcgaggaggaagcaagcactctgcctgtctcttcccaccctgggtcctgtgcatcttcaattcagcttcctgcaacttagttcacttgcagagcctttatttttcctgtgtgttttcagggagcaggctggtgatcaaacaaggagactgccagggccatccctgttcccttcccaggcaaggaaggaagagcacagtaactgcctaactgcgtggcattagccagggctctctcaccagccccccaaagcctagttctctttgcactgtacccgaagtggatcacttgctccatctaaagggaatggaggtggagccggtggtgttcggctgtgtctttgaactcaggccacataccctaagggtgagtgaaggtatggtttcatctaaataaagggataggaggaggggacaaacaccctttcagcttttgcattggccaggagccagggagagagcagagtgacagacaggggcttctgtcagaggctattgagaacgcgtggagttgctaagagcattcctggaagattgctttgcaaaaaaaaaagcgcctctgagcctctcccattcggcccttgctgcagtttctctgagcagccagatttttgttgttgttgttgttgttgttgttggatttcttccctccccccacccccacagtttcttcttgaagctattggtttatgctgcccagatgtgtacaatgagagggtttatgtgttgtggttttccagatgtgctcaaacaggaaaatgagatttggcgaaaggggaggcctatctatcgctgcagcctccagaatctcaagaacccacaatcccacccttgttcagcacacaaagctaagaaccaggaaaagagcttccacactgcccagttaaacccgcccctgtcacagccaaagactccgagacccaggtgaatgtgacacagtttgcaaactgatcccctatagctgggagcagatgttagctgtcttagatctggggactggaatcagacatgggactccttcatggatgcacctggctcttttccagtccctgggagcccctggtgagccaacagatagagaggttccttgcttgtcctgataccagaccgggcaggggaggaagaataatattaagaactggaggagctattagtactgtatgttgggcaaggaatgctgttgggaaagataaaggcatgaagcccggaaaaagggaaataggctagcttttaggtggagcattcactgctgtttaacagagtacctcacgacctggtatctgaagccagcaagtgttgcaggtcttgggaggtatcctagtggctgtgattaaaaaccttccagcaaaaagcaactttgaggatgaaaatagcatttactgagcctataattccaagttacagagttcatcatggaagggaagttgaggtgggaactcaaagccacttaccacacccatcatcgagagggaagaaaactgaatgcacactggccaacccgctcattttttctcagctttcatatctcttaaactgtcgtctgcgcaggcacaggggtttcttgccagggaatagtaccagccggccccacgaacctgatgggggtaggtaggtaatttctcattgagactctgcccaggtgattataggtctagtcaagttgaccattaaaactaatcagcactggggattagggacttgaaggtggttttattgagtgactctggcttgggttctctcaagaggtcacggtaaatagatcagccagggtcaaagtagcctgggggcttgactaggactgggacatctacttccaagatggtgccctcacatggcttttggcaagaggccttacctcctcaccattgagactcctcatgtggctacttgactgtgacttcaacatggcacctaacttccctcagaggcatcagtcaagaagagagcccattggagatatttatttatttattaacttatttatttatttatttatttatttatttatttatttatttaaaatgggactgttgaaaatagtgtttcgtttgtttgtttgttttgcctaatttctttcacagttttgtgtaatggctcaggcctcccacctatagaagcagatctcacactccagttgctatgtatatttccattatttgagtgagactcggtttatttgctcatcttttttggacgggcagctgcatggacccaggttgggctaacgtagttagcactgctggggctgagagcattcccctgaacacaagagcacacacagcgcctgggtgcaagaaccacccgctgcttgaggtggcctcacatccagacaatgcatagggttggctttatttgctggtagtcttagcaggtcaaagtcccaagggcctgactctgggatcatagatcccatgcatacctgttgttctgcacgtccacaaagagagctgtgtatggatgacctgaaccaccctcagccaccaccctgccttgtggcctggccacctggtgcccttccctgcccactttggggaaggcagcagactttagcagaattgatgggtcatctgagtcggagccagacaggctctcagaatagcaagagaagggtggggaagatcccttgcgtgctaagccagccctgccgagcgggtagggacccgcagccctgcagggagcacccagccccttcccacctgcaggctcatcaaacaccttgacaggctgcccgagtgggaagccggtgatgtcatcaccaggcctgaacaatcaggtcttttagggcaggacgataacaatcaaaacagtatgtaagggcctgccacgcaagcacacacatgctcgttgcccctgggaggctcccaaagctggggtgaagtggggctttgtcacaaatacgcctttctcctttcctcaccagcaggccagggaacattgcctggagatcaaggttgtaagaggtctaggccctcccctggtagctttgtggcgaagtccataagcccctccaccacatatcccaaagaaagctcaccaccaagctcagaactaaacctcaggctgaacaatggtccatgcttgtgggtcccactgctcaagttcaggggggtgccacatgtaagaaacttcccctccccccagttgaacctagatgatgctggagagtgaccagtgtcttaggacctagacaaggaggtctggtgattctcacatattgtccttacaaatccagccacaggcattgtctccccacagtgaacctccccagagccttcaactctgcttagcctagctctttgcaagatgcctaagggctgggggatatcttggtcagtaaaatgctatacaagcatcagcgtccaagtttgatccccagaacccgtgcttaaaaaagaacaaaaaaatccaaaaaacaaaaaaaccaaagacagatgtgtgactaggcacctggcatgtggcatgtgtgatcccagcactggggacatggggattaaagggtcctgcaggcttgctggccatcccgtctaaccaatcagtgggctctggattcattgagaagccttgtctcaaaaacaattatatggagaggactccgtgaagagaagcacttgctaccaagcctaatgacctaagctcagatcctcagaagtcaggcgatgttgtgtctgctccgtgtccgtgtccgtgtccgtgtccttgtccgtgtccatgtctgtgacccagcacttctctccatgtgagaggtggggacagggagatgctctggaagcccctaagccagccatgctgcagcctacagtgtaacaacaaacaagagagtcgctgactccaaaacaaggtggacatcaaggactgtcacgggaggttgccctctgacctccacacacgtgctgtggcatatgtgcaccctcacacacacaagcatgtgtgcaccatgtacacacatactttaaaacaaatatttttaggatataagacaatggtctaggaaaataagtgatgtcggcctctggcccttcacatttacatggacagaaatgcagtggctccctccctccatacgcactcaagtgcatacacacactcacacacacatacacacacacatacatgcacgagtgcgcattcacacatgttgcctgcttctaaaaagaaatggaacaacatagcaatgaaaacatttttcaataggatgcctgagactgcggtgtttctatatatacattcacacagacttatatacatgtacacacacatatacacacagacacaacacacttctttctttgcttctaaaacaaaaaccaaaaagaatgaagagccattgaaaacgtcccccacactgctctctcaagccaccagaaccgcaggtgatgggctgagaaggtgtaaggcacttcctgcttccctgatagggagtggagccaggtaacctggcggggtgccattgctgctccatgtagaacacttccaaccgcgcccagcatttatccatactacatacacaagaaagtatcatcttttctttttctagccagaggaccccaggctctgtctaatgggcatggtaatcaaagacaggagtttgtttcggctgcaggctgctgcagtggggtgcacaggactctctgcatgtctcctggtgtatgttccatgctgtctcatgttagaggctacgccgagttcaaggcctgagatggtcttaagcaacatgtctgagtgtagtggccaataaatgggtttcaaggatacccatccccaaatatctaccctctgagcgagtcatttcagcaccagggaaacaggatgctggccacttagatacggcctttgaccttgacagagccccgggcttgggttgggctatttagcacttgggttttctttttaaagccactcaagtgtggtaagatagtgtcagagagggtaggtgtccacaagaggcagtctttgaaggtcatcaccattggtagtgtttgtaggctttgacttagtgggaggggaagactagagctgccctatccggtcggttggctcacatcttcctggctgaagctcgcttctctccccaactctgtcagagctgtccccaaagccccgagtgtcactttgtccatgcagtttctggatccactgccactgccaagcttctgagatgtgtggcagttgtttgccagtggattcttttgctcccaagtatcacatggcttaggcttggtcactcaggaggagagcatcacctggccatgctgtgactagaagacatgagaggtcccacctccactaccataatgtaatgtcagtggccaaaggattctgagtgcccagctcaggactacctcttatggaagccttgggtagcgttaacagtagctagcatgtaaggagtacccactatgagatccacacgccaaaaggaatgaagagccattggaaaaaaaattccctacactgcttttccaagtacccagaatggaccagaacctcacatgatgagctgagaaggtgtaaggccattccttacgtggcctccagcctgggaccttaaagtgactatccctcattcatgcaagcaccttgtgaaggaagttcttcaccactttacagatgaagctggtgctggctcagtctctaggactctgtattaattgattttctcattgctctagcaacaatacctaataaaaacaacctagggggagatggctattctggctcacagtctgagagaagacagtccatcctgggtgggggtgggggaggtgagcggggtggggggacatggccacaggtgcttgaggcatcaggtcacactgtatccatattcagggagccaatgctatgaacgaacactcactcattttctcctttttatttagtccggatctgcagcccgtagagcagtgcttcccaacacagccaagccaatctacagactccctcacagacatgctcagagaacagtctctcccaagtgattctagatcctgccataataacggcacaggctcccacccgaatctgtctggctccttacagataacgcagcctccaaaggcatctctgtctgctactgtaacaatgaaggtcccctatgtgggccccttgccacccaggttctctgagaggtgaggctggcctgaggaaaacacagcaggcagggtaggtaggagggcagctgttgggaggctgagggaggagagtcaggcttcattctggctccccctaggtttttaaggaaacgcctaagcactgggcagcttcttggcgtgaatggcctgtgacgaaaagggaaggtggctattctttagctggcaacctggagggacctaggcctttgcctctgcacctccaccaggcttcagatcaaggaatgacagagaccagctagcgagtgtttctagggagttggatccagacagaagaggcccagtctgtaaatgggcacccttgaccttgcctgtacctccttggcaccttgtgtgggcctggctgctctgtctgctgagagttcagtatttgtgactgaacccagcctcttccccaccccacctccttccattcttcccacccatgggggtccccagcaatgtcctggtcccacacagcccgagttatttctgtgtagccaggctaagcctggagcatggcatccatctccctcttggcactgccacttctggagtccctgcaacagtgcctgactagcccgtactgtcaatcaccccgcagggtggagacagcagcctacaagggattgctttgacatcctcaggctgttgagggttttagggagctgtctgtctgtctggagggagggagcgagctgggggggtggcctctaacttgctgtgaagctgagcctgaccttgtacttgtgacccccccccccccagcctccatctcccaagcgctagggttatggacatttattccccaaggcttactccgcactaggaatctaacccagagccttctgcaatgctgggtaagcactatccaaactgagctacatcctcagcccctgacttagctgttgtatacgtatctgctcctcttctaagatgttgtgttccttctccagatataaagtcctcccctgggacttgcctctgccacctgcccttgcaagggaaccagctcaccccccaaggtgtcctgggacagtcctagtttagttctgagtcctctgtccccccaaaccccccagtagccattcctctgggtctggtccgccctggaaaattctgactccccgaggaaaggaaagcagaaatttgaacactcaagccagtgccaactttgatgagagaggcagcccctccacacagacccttggctcacctttccccggtgaggcctcctcaggggctgctcctgcccctgcggttgcagcctggctctctgggagccacataccagccccagccgccagtgtccctatcctgtaaaccctttgctggccctctggtcatgtttcccccactcatgtcccccaggaggcatagctggtcaggaaagagacacatactaccaacgtgtcttggtgttgggggaaacccggcagcaggaaacttgcttggctctgaagggtgtggcagtgggtttaggtctgtgtgtcatcccgtgcgggcccagtgcccttttgaataaataccgcttagagccttgtagccggtcctggaaaggaaaccttctcatttcagctctcccttccccaagctgcaaggaaggaggtcagccaggcctatttgcccaggaatgcctttgtagagtgcttgcttaggtcagaagtcacggatggctgtacaaaagactgtggtggggcctcctccaagccatcggctctacattaggcacatttctccttcacacagtctgccatccctgccagcatactactcagagtttgtcctctaaagactttccttgacagctgagccttccctccctcccttcctctctctttccctttcctcattcctctctccctccccctctccttgatgttcattagtccctgtgtttctaccagctcaggaatattgccattgtatccattactgctttgctggtcctgccctcgttccctggaatctcctccaggggcccccaagtgagattctacgtagagcagacacccagtctgcagaacccacacacagccacagtggctcctggtgtccatggctcccaacctgtgttggcgatcaaaacagcagagcgtaggctctcacaatggagatggcctcgaccgctgccttcatcctcacccttgctgctgacgttgagcatcagctgtagatccgcaagcagagcattcccgtcagactttgcaggaactcgtcccataatgcaccagtcggcagagctaccccaggcaaaggcctctgggaaagctccctggtaactggaatggaggactggttctgagagctgtggattcaaaccacacctcagagctgatgctgatgatgaaggagagaggaagaccccgtccactgggtgccttccctgcccatccggtatctgttgtgctatggatatggagtgtctcctgaagactcatgcaccgaaggctttgcccccagccaatcaatccagtcattgagatatgatcggattgtaatggctctgacccctctttgtcattactgatggattcagaattcagtggcatctgggctagcagatacatactcacaggggtgggacctagttagaagtaggtcactagagacatgtctcttgtcccaggtcgctcccctgtgtttctttgcttcctttgtgtcctgtgaacagctttgctctgccctgtgctccctgtcatgataatctctccctacgaccagacatagtggagcaaggtgaccacagactaaatgcttggaaactgtgagccaaagcaaaccgatcctccttccctccctccctccctccttccttccctccttctaatgtgcttatgttaagcattttgtgccagcaatgagaaactagcacaatgaacagttggaaatgggaacacagctggctgtgtgtgcatgtgtgtgtgtatgtcttgtgcacacacataaaggagagctgaatttaaaagggtcatgtaggagggagagaaggcagaggggctgtagtttcagccctcaccatgtccctggagctcaggaatgaccaggatagacttcctgatcatacagcaaagcatcgccctgcagagaaagacctggcgggatcttggggtgtggctctaaaccttgcgccagggctagggcagggcagtgacaacaagggttgccaggggtggaagaatggggtttctgtactgcttatcagagctcagctccggggcaggatatggaggaggcttccccaacctgcctggtggacagcaggactttggacaggaagcatcactttcaacttgacactgggttggtggctccatgcacatacctaggataggtcatgttcctgtcctgtgtatatggaaaggtggatactaacagtggaccattagccagccaccaagctctgcctctgcatcaaagaagagacacagggcatagtttgacccccattgggctctgtatcaggtcaaggaaactggtcgtatttgaccaccatttgggaagaggcaagagatgactctgaatataaaccaggccgccgccagctatagggaagacagcagggactacagaaacactggaaggaatttattctcaagatgtgttgtttccacagaaatgtatgcctggtgtttcccccttgtggattaggagctcagggtcttcttggacataaaattggtagaagaagcttccagaacaaactgtagttctccctgtggctgactggaacagaagtatagggtcctttatcctaatcaggagccaacaagacttctgtatcagtttcttctctgttgctgcaataaccacgaccaaggcaactcatcaaagaaagcgtttaattggcttatggtttcagaggattagagtttgtgatggtgagtaaaggcatggccgtaggaccagcttggagctcagacctcgaactgcaagcaagaggcacagtgcatcctgggaatggcacattagtcctttgaagcctcaaagcctacccccagtgacacacctcctccaacaaggtcacacctcttagtctgtcccagatggttccacaagctggggaccaagaattcaaagatatgattgaactaaaggaagtgcatgccagctaaatgtttataagttcaattctggttgggtcggtctttgtctaaaagactccttgaaatggtcccagggtacagggtcatcgagccccatatgagatacaggtacatatgcagtgacaggggacaaaggcaaatatggtgtgagatgaagccctcaaacagagtggaggttcgatattgaatactgagtgttatctgtggtgctctttgctggaatctagtccggagggccatggccagagctggcctgatgggctttcagggcagcaaattgtgttcttttcctgggagtctggggccaaggaatggagtggccagtaaagacagggtaggcccagctgtgggtctgtatcccccaccccttatatctctccagagctgaggtgcaaattcctactgcgagcaaagtggacagacaggagtcaattgaccaaagagtcaagcgtaaggcaactgactctcttttctctctagtccacccatgactcctgcaagccccaggcccagcattgctagttaatgcccttgaagcgctgttatcagaagggccttccatggagggactacccctaaggacctggcaaactgagatggaggcagtctcaaattaccattacgtcaccctcaggctgaccctgttccctcctgtggcatgacttgagctttctttgcaagctggcatgagggtttaagtgtgcacattatgatagtcatgcgtgtgccccatctcccttggtcagttatgtgttgcctgtgtgccctcctttccctattatcttttcgtttcgatctagtctctgacttctgcacaaagcagtctctctaagacaggtccctagcattggactcaggtgcgcaacacaagcccctagtgtcctgcagaggcagaaagccagaggctgtcacagtaaacaccacccaaggccagagaaactgcagcaagagtccatgggaaacctgagcctggagccacatcggtgtcaccttcgggttctgtgtctttacttcctcgtaccggttctcatgtggcttctgggtaaaatgagctacgctcatctctgaactacaggaaacaggaactcaagggcacagaacatctatctctctgtgaacctttcaggcattgttagattgtccctcaaggtggaggccagtatctctgtgttgtacacagacatgtaaaagttcagtgactgacacagacctgtgcagtaatacaatggcagaacttgctccatcccgacttggagccaatgtgttctctgttgcactatagcatactaaagacaaagagtgaccagggactcagggcaggagggcaaaaggaggaagatggtatgccctcctatgatgctactgcctacccatgggccctctctctttgtccaccatagagccatgcctggttccctggcacctaagaagggcttcaggacttaacaggcccccactttttgatgggtgcatgatttcagacaagactttttacatgttattctaattttctctctattactatgattctgaccaagagcaacttaggagaaaaaaatggcttatttcagtttacagattacatgtcatctctaagggaagtcgggatagaaaaatcagtcaggaacttgaagcagagacactggaggaactctgcttgctggcttgctcacaggctcatccttagctagctttcttatatagctcaggaccgtcttcccagggaatggtgctgcccacagtgggcagggacctcctaatcaattgcctacaggctagtctgaccaaagcaagtcctctctacgatggctctaagctgtgctaactaggtcttgtaccttcttgtttttgcaggaatctggccattggaattgggatccagaatttcccagagggcctggctgtcagccttcctctgcgtggagcaggcttctctacctggaaagctttctg

SEQ ID NO: 3032 - DNA, 904 bp, Mus musculus
gcccggcggtggagggccacgtgtgctggagtgaagcaggaagtgaccgcgagagtggagccgggcgagcgagtggcatcgggggctgatggaagtggagagggggctggagagggcaccctacagtatccagcatgctccaaggttacagctccgtggtccaggccttgctggggaccttcttcacctgggcaatgacagcagccggggcagctctcgtgttcatattctccagcgggcagaggcggatcttagacggaagcctgggctttgccgcaggggtcatgttagcggcttcctactggtcgctgcttgcaccagcggtggagatggcgacatcctcggggggcttcggagcctttgccttcttcccagtggctgttggcttcaccctgggggccgcctttgtctacctggctgacctcctgatgcctcacctgggtgctacagaagacccccagacagccctggcgctgaacttggaccctgcattgatgaagaagtctgatcccagggaccccacttcgctgctcttcccggagagtgaactttccatccggatagacaagcgtgagaatggcgaggtataccagaggaagaaggtggcagctactgacctcgcagagggcgtggccccctcaggatcaatgcacgggagctcagggcagcctggggggagcagctggaggaggattgctttgctcatcctggccatcaccatacacaacattccagagggccttgctgttggcgtaggatttggagcagtagaaaagactgcatctgccaccttcgagagtgccaggaatctggccattggaattgggatccagaatttcccagagggcctggctgtcagccttcctctgcgtggagcaggcttctctacctggaaagctttctg

SEQ ID NO: 3033 - protein, 255 aa, Mus musculus
  VARIANT (1)...(255): Xaa = Any Amino Acid
MLQGYSSVVQALLGTFFTWAMTAAGAALVFIFSSGQRRILDGSLGFAAGVMLAASYWSLLAPAVEMATSSGGFGAFAFFPVAVGFTLGAAFVYLADLLMPHLGATEDPQTALNLDPALMKKSDPRDPTSLLFPESELSIRIDKRENGEVYQRKKVAATDLAEGVAPSGSMHGSSGQPGGSSWRRIALLILAITIHNIPEGLAVGVGFGAVEKTASATFESARNLAIGIGIQNFPEGLAVSLPLRGAGFSTWKAFX

SEQ ID NO: 3034 - DNA, 897 bp, Mus musculus
ggctcccggagcaaaaggccggctggcttttcggcagcggaccagcgtcccgaggaaggcccgcagacgcctcccggtagcccgcggcggcgaggggcgggctcctccggcggaagcagtatccagcatgctccaaggttacagctccgtggtccaggccttgctggggaccttcttcacctgggcaatgacagcagccggggcagctctcgtgttcatattctccagcgggcagaggcggatcttagacggaagcctgggctttgccgcaggggtcatgttagcggcttcctactggtcgctgcttgcaccagcggtggagatggcgacatcctcggggggcttcggagcctttgccttcttcccagtggctgttggcttcaccctgggggccgcctttgtctacctggctgacctcctgatgcctcacctgggtgctacagaagacccccagacagccctggcgctgaacttggaccctgcattgatgaagaagtctgatcccagggaccccacttcgctgctcttcccggagagtgaactttccatccggatagacaagcgtgagaatggcgaggtataccagaggaagaaggtggcagctactgacctcgcagagggcgtggccccctcaggatcaatgcacgggagctcagggcagcctggggggagcagctggaggaggattgctttgctcatcctggccatcaccatacacaacattccagagggccttgctgttggcgtaggatttggagcagtagaaaagactgcatctgccaccttcgagagtgccaggaatctggccattggaattgggatccagaatttcccagagggcctggctgtcagccttcctctgcgtggagcaggcttctctacctggaaagctttctg

SEQ ID NO: 3035 - protein, 255 aa, Mus musculus; identical to SEQ ID NO: 3033
  VARIANT (1)...(255): Xaa = Any Amino Acid

SEQ ID NO: 3036 - DNA, 866 bp, Mus musculus
ccggaagtccgggaaggctcccggagcaaaaggccggctggcttttcggcagcggaccagcgtcccgaggaaggcccgcagacgcctcccggtagcccgcggcggcgaggggcgggctcctccgcagtatccagcatgctccaaggttacagctccgtggtccaggccttgctggggaccttcttcacctgggcaatgacagcagccggggcagctctcgtgttcatattctccagcgggcaggtcatgttagcggcttcctactggtcgctgcttgcaccagcggtggagatggcgacatcctcggggggcttcggagcctttgccttcttcccagtggctgttggcttcaccctgggggccgcctttgtctacctggctgacctcctgatgcctcacctgggtgctacagaagacccccagacagccctggcgctgaacttggaccctgcattgatgaagaagtctgatcccagggaccccacttcgctgctcttcccggagagtgaactttccatccggatagacaagcgtgagaatggcgaggtataccagaggaagaaggtggcagctactgacctcgcagagggcgtggccccctcaggatcaatgcacgggagctcagggcagcctggggggagcagctggaggaggattgctttgctcatcctggccatcaccatacacaacattccagagggccttgctgttggcgtaggatttggagcagtagaaaagactgcatctgccaccttcgagagtgccaggaatctggccattggaattgggatccagaatttcccagagggcctggctgtcagccttcctctgcgtggagcaggcttctctacctggaaagctttctg

SEQ ID NO: 3037 - protein, 242 aa, Mus musculus
  VARIANT (1)...(242): Xaa = Any Amino Acid
MLQGYSSVVQALLGTFFTWAMTAAGAALVFIFSSGQVMLAASYWSLLAPAVEMATSSGGFGAFAFFPVAVGFTLGAAFVYLADLLMPHLGATEDPQTALNLDPALMKKSDPRDPTSLLFPESELSIRIDKRENGEVYQRKKVAATDLAEGVAPSGSMHGSSGQPGGSSWRRIALLILAITIHNIPEGLAVGVGFGAVEKTASATFESARNLAIGIGIQNFPEGLAVSLPLRGAGFSTWKAFX

SEQ ID NO: 3038 - DNA, 114955 bp, Homo sapiens
  misc_feature (1)...(114955): n = A, C, G or T/U
gtgctgggattacagatgtgcgctacctcgcccagcctatttatttttatttttatttttttaagtgccacactggctgggcctgaatcttggctctgctgcttactaattctgtgaccttgttcaattatttaacctctccagcctctgtttccccatatgagaaataggaataacagtaatacctaactcttagtgttaggaggattaagaaagtttctctgtatgtaaatgttattttatttacgagtgttactatttctattattatttccattttacataggaataaatagtagctccagagaggttaatctcttacccaacatcccccagctggtgaatggtggagcttggatttgaatccaggtagtctgactgacagaaggtggttcttcttgccgggcgcggtggctcacgcctgtaatcccagcactttgggaggccgaggcgggcggatcacgaggtcaggagatcgagaccatcctggctaacacggtgcaaccccatctgtgctaaaaacacaaaaaattagccgggcgtggtggcgggagcctgtagtcccagctactcgggaggctgaggcgggagaatggtgtgaacctgggaggtggagcttgcagtgagccgagatggtgccactgcactccagcctgggcaacagagcgagactccgtctcaaaaaaaaaaaaaaataaataaaataaaaaaagaagaaggtggttcttctttctactaggctacattacctttcgttttttattttttgtttttgtctttttgagactgggtcacactctgttgctcaggctggagtgcagtgatgagattacagctcactgcagcctcaaccgcccgggctcaagcgatgcccccacttcagcctcccaagtagctgggactatggacatgcgccaccacgcccggctaacttttgccttttagtggagatggggttttgccatgttgcccaggctggtctggaactcctgggctcaagggatctgcccacttcgacctcccgaagtgctgggggtgtgagtcactgtgctaggcctgtattaccttccttagagagagaaagagagacagagacagagagagaagatgacgataattactggtgggggtagtatagccaggaaaaacatgtagtattagggacatgcttatactaaaacaagtatttattctttatctgaaattatcatgtaactgttcatcctgtatttttatttgctatatcgggcagtcctaggagggggctttttcgtaggacatccagttctcctttgggattctgccccatcactccttacctcctgccttccatctcccaggaatcatggccaccatacgcatgggagactgctgcatccctctggtgaattaggacagaatacactttcagaacctgtattttcacgagtggtggaatgaaatgtaatattatttagaacaaggaggagcatctttcttttcccttgaccttgaagatctgcctccaagcctcatggctcgtttgagccaagaaaagaggcatgaagctagcaggtgggtggtttgtcatctccatcttgagggagatgagtgaagggggagaaactcctctcttatagatctttgcgttttgtatcagtggagccagactgccgagtcttctcttctccttcaaacataggaggggctgctttcttagcagctagatctggaacagattggatcagtgtgagtgagtggtgatgctggggttggggaggcttgagcagctggtgcgatgcccatcaacagacctgagctgagagagtgctgatgggttggtggctgagtgccacgggaggcagcttggggcaacatgttctcactctcttgatgaccagctggtgaaaaggtttaataaggatgccccacatcactctgtgtttttttgttgttgctgttgttttttaagtctgcatggagttaacaattttggcaaactgaaggtttctgggagtctttctcatctggctggtctggatctgccttgaaaggaccaaagtaatgagtatacttgccatttctattattcagagtaatgggtttgtagaagaggaacattgaactcaaacaaaaaagcctaagcgttattagactggagcacagcagtcttacattaggtgtagctgagatcattgccaatgggagctccagtccagctgggcatctcactcatggtagttgcttagtaaatgttggctgagctgagttgcacttggaaaaaaaagaaatacaggagcttagttttggagcaggactgggcatggaggcttttttttttttttttttttttttttaactctgttttcatggcactggaggtagaattaggtgactggtcaataaatttgaaacccaggtatgtcttggatggttgccttgctgtatggaacttattactgtctaggacttcacctgggggacctacagtcactgagaatggatgctgggaggtccctttgggtatgacttccatgctggtttaacactgctggtacttagagtttgagaatgggcctgggccttgtcaggtacttagtgactgtacccaaggctaccccagagaggccattttaggatagaccccagaacctggatacccaacatgctgtctgtgtagcaaatgtggctcatcagaattgggggagcaggtagcctttttgagacttaaaaaccagatctaatatatatacaatatgcccagatcttaaagtgtcagcccagtgagtttggtcagtggtgtgtatctgtataaccaccacccaaaatgagagaacatttcttttcttttttttttttttttttctgagacagagtcttgctctatcacccaggctggagtgcagtggcgtgattttggctcactgcaacctccacctcccaggttcaagtgattctcctgcctcagcctcctcctgagtagctgggattacaggtacccaccaccatcgccagctaatttttgtattttttgtagaggtgaggttttaccacattggccaggctggtcttgaactcctggcctcaagtgatccacctgcctcggcctcccaaattgctggaattacaggcatgagccaccatgtccagctgagatagagaacatttctaacatccctgaaagagctcctagtccctaagtcaggctccctcccagccaccaactaatgacttctaaccacagagtagttttgcatacccttgtgcttaaaaggaatcgtgtagtatccatatagtttttgttgtttgtcttctttcactccgtgtaatgattttgagattcatccaatgtcggcatgatagtagtttgttcccttttattgctaaggagtatttcatttcataaatatactacaatgtgtttattcattctcctgttgatggacatttgggttatttccagtttggggctactgtgaataaagctgctgtgaacattcttgtgcaagtctttgtgtggacgtatgttttcatttctcttggggaacaaggagaggaatgactgggtcatatggtagattttttttttttcttatttaagcaaaagtactttttcctagtttggagattgtaagccaagctcctgcccatcattatcactgggtaggcgtagctaagaagagtcaggtcattcaagcccatctacgttaattaataactgtaattgaagctgaatgtaattgattataattttgagccgttgggtttaattctgtaaaattatttaaagctggtatattatgaaggcttcttgataaaagcaaattaagtacagatatagctcccatatggatttgattcatactgagtcatgattaataactgacatgccaaatttaaggctgactcaatgcaaaattcatgtggccgctcatcatgggtttctgattgactgacttgatattgaacagacatgggcagcctcattctggagggttacctgcagattccttccttcttccaagtttctctgtctgctctctggtctcctgccctgtgtcacatctggattatgtccagagcccaacagctggatgttggtgtcccatctccccacttaaatcaattctgcttgctgatgccaagttacccttccaaaatgcctccgttaccctgccgaagacagtgggtacttaatgctgacctgctccatgctggctaagctgctgcagcatcacgtgtgaggctttaaaacacagtgtccatacccctgccctggcaaatctgtttctgtaggttgtggaggggagctgacatctgtagcttgaaaactccaggttgattttatagtacaaccagagttggaaacaagccacccattgtgtgaagtccaaaccattctgcctggtttcatcattatacccaaatgtctggttgtaaactcctccctgccttctttcgccttgtggactccacaacataagcctctgtgtacttgcctccagactctgcccactctgcgcttcccagctagaaagttcctaacctcatttcctttccaaattgtgtccagccttccagagcccctccctgttctttgatgttctgctttttaaattttgaaacaatattggtatcccctttcttggcatgactgcagactttcttaatttatcctatcatatgtcttctgtagcctctcttattatagtccagagccagctcctggaggcagcgcccagatccacactagctctttcttcctctcttgcaaccccctggggtctggcagagtgttggccgtgtaacagtctctgcttaggaattgctgattgacttttaactgttaattttatatctgatttggagaacaacttggagacaactcttggcttctgtactttctgggtaattcttcttcttcttattattattcattttgagacggagtttcactcttgttgcccaggctgcagtgcaatggcgtgttctcggctcactgcaacctccgcctcccaggttcaagcaattcttactgcctcagcctcccaagtagctgggattacaggtgcccgccaacatgctcggctgatttttgtatttttagtagagatggggtttcaccacgttggccatgctggtctcgaactcctgacctcaggcgatctgcctgccttggcttcccaaagtactgggattacaggcgtgagctaccatgcccagcctctttctgattattgctttgacctacatggattgcaagtttgtgtgtcctccttaagtacacagtaacctccttgaggttagagtctatgttcctttggttcaataaacatgagggaggatctgctccatagtaggcactgagttgggtgctgttcttttgaactgtgtcttcctgtcctacctctgtgtacctttttagaggtgtgaagagttgacacattcagtgcattgtaagtgagctatgtgcaataattttctttcccctatttgttacgagaaaaattttgttttgtggcttggattttgttttggtattgaaactgtcactactataataaaggaaatgctcaactgtacccatcgtgccagaatattctgatgtatcccttaactcttcacaaattcatttctattgccagagctgaaattccttcaaaatgaacacttacacagaaatggaaaggtttgcctaatgtggggtaggtgttaagttgattttttttttaaatcattctatgctggtacctctgacaccagagggaaattaatagcattataaagtacagatccctggggcattttgcatgatattttgagaaaagagatcggattatgagcctttctaggttttgagaactacaggagggaaacagggattttgttctcagggactatgaagaagagcttgtaaatatctggtgattttaaatgttttctccagtccctttcagccttctgctgttaaggctgtgatttacaagccttccacaaatgcacagtccaggtgggtgttaaggttatcatgcagaaacatttctgaaaattgagtttttgtacataggattctttactcgcattggattttcattgtgaaatcagggtgaagatgtgggaagatgctgggtgcccccattccagcacataaactatcactttttctcctgttttcagcctggtatccccacccttagctgggctgggggtcctgcaatgtctggtgggacagttgcctggctgcctggggtacaggaggaatctggagtttacttgcttcttacccaggcttccatcaggtctcttttaggcccatctgcacactcattgtcaaaggctccctggctattctggggctttgtgggatgaagcaccttccttctagtctcttccttcagccccaggtggcagccttcttgagcatccatcagcgattacctgcttctctcttcaagcttccaaaatgtggctgccatgtcctcttcctttccttctgactttggcctttggatccttcatatccctgtacctttactccagtgagaatttggaagcttgtgttccattggccatgtttaattagaagccctacaacgtacattctgtgatattccaaagtggactaggaatttcacattagtgtagtaaacctttgaaaattagatttagaggggaattattctctgattggatatactgagtaagtgatactgttaatactgttttttttttttgttttttgttttttgttttttgttttttttttgagatggagtctgactctgttgcccaggctggagtacagtggtgtgattttgtctcactgcaacctctgcctcctgggtttgactgattcttccacctcagccttccgagcagctgggactacaggagtgcatcaccacacctggctaatttttgtatttttagtagaaacagggtttcaccatattgaccaggctggtctcaaactcttgacctcaagtgatctgcccacctcagcctcccaaagtgctgggatttcaggcatgagccaccgtgcctgggcatgttataatcattaacttttaataagctctttatttggaagtattttagattttaagaaatgttgcaaaaataatacagggaatttctgaatagtgcccttcatccagtttcccccaatgtgaacatcttacataaataatcatgacacatttgtcaaagctaagaattaacatttgtttgttactattccctaaactccagactttatttggatgtcaccagtttccccaccaatgtccttcttctgttctcagataccaatcaggatacaaactgcttttaaactgttcctattttaaagtgtaatttacagcagagggaggcgtaccttttattcagagacttagaccaaaagtataacatctgtatgttttgttttgaaatccccaactttagctgtgctgctgggaggggattctagtgtgacttacaaaattgcttgtttctctacctacttctaaggaagtcatgggatattaatgggtttaagtttgtgaggtttgatttatctttgtgaagcaagtatttaacaggattattagccctgttcattagtggccacaaattttctagtgctgggttttcttggagtagtttctatcagaatatcggggaatgctatgggatcgattgcattcagttattgctgacactgattcatctcggacttcagctttgggattccttccctgataatgggggaggcggtaacttaaacctggcctttactctgtagcccgcagaatttcttacaagattctgagttgtcaagtaggggtagagggtagcacagtcaacttgggacagaccagcttgctctggggctttgggaaagccactgaatctctttggtgtcagccttttcttctgttaagtgaggtttttagattaaatggtctcctaaagtcccctttgactctaagtgagtctgtgattctatcagtagacttcagtagattatctgtgaagcttcgaaaattctgcgttggcccttttccacacccatgaaaatctcaattattttaaacaattactcaccccatgtttgtgaaaggacagaaggcatttgagtatgagtctgtataatacttaatttggaagctaaaaattactgtaaaaattaggcattagaccaaaaaatgggtgttgaatcacttcctgatcatgcgttctcatttctccaccctcgttcctccccttcattagcaaggatgacagagaatgcgattaggcaacaaatgttgaatagtcgctctgtccaggactactctgatgggggtgccaggtacagagatgcttaaggcacagcactctcctgggcatgtgcgacgttctgggggacatggacacgagtgatgaatctagtgttatggaaaagagccgccttagaagtggggtatagcgcaagatgggaggaggaagagaggatgtctgcagaaggcatacggggagagggatgaatccaaaacagcactgacccgttgcatatttcctgctgggaatcgggttggggtggtatttgcattgactctcaggattcttaggacaatcctgtgaaatgtaccattttcaggtgacaaaactgagctgcagaagagagcttaggttatttgactggggctacctaaccagtaagtagctgagccaagattcaaactcggacttgattctaagtcctgcattttcccataataaatatggacttgggcaaagagttgagggtgttcggaagaaggggcatgggagatgggtcttggcgttttggtgttgtcacagattgagctgcttaggccaaggtgagggagcagaagagttcagcaacaaccaggggcagtagtacaaatggggtccctaacggttgggtaggccagtagtctcaacctcaactcgtcccctcccctccctccctcctccctcctttctttctctctctctctctttctctttttctttttcaacagagtattgctctgtcgcccaggctagagtgcagtggctccatcccagctcactgcaatctctgcctcctgggttcaagtgattctcctgtctcagcctcccaaatagctgggattacaggcacccaccaccatgtctggctattttttttttttttgtatttttagtagagaaagcgtttcaccatgttggtcaggctggtcttgaactcctgacctcaggtgatccgcccacctaggcttctcaaagtgctaggattacaggcgtgagccactgtgcccagcctatactcagcttcttaaatatcaccttgcctgggaatcactttgttcagcattgagacttctgagccctgtggtagacctaccaaaccagccaaagactgaagttagactttcaatccattctcttttgttttttcatttcctccttagcccttttgcaagagttgtttttgttggtttgtttgtttgtttttgagacagtttcttgttctgtcactcaggctggagtaccatggtgtgatctcagttcactgccacctccgcctcccgggttgaagtgattctcatgtctcagcctcccgagtagctgggattacaggtgtgtgccaccatgtctggctaatttttgtgttttttagtagagacggggtttcgccatgttggccaggctggtcatgaactcctaacctcaggtgatccgcctgcctcggcctcccaaagtgcttggattatgggcgtaagcccctgtgccctgccacgagttttcttttgctattgaaatactcatccttgagcttctttcattatttagcaaaagaaattgggctgctttggtcttagcaacatttaacttggaggatgggccccacccaaaccttccccctggcttcattcgattgggtgggcttttcattttcatttcaggaataaagaggcaaaaaagactttgggggtacagcgaggcccctgccatgtgtgttgaagctgattatggattccttttatagacaaaggtgaggaaaaggaagatgccaaccatcagctccttacggttatacctggtgtcttcagcgatggccctgttagcccacttgtttgcctttacaggcggggtcacagctgcagaaggacttttgttctctaccatccggggctatgaagggactggctggcaaaagtattccctgaagtcttgggcctggtactcagcaccttctcctctgtggcctgcccgttccaggccctgcttcttagggatagttgagaggtaatcagataccctgctttctattcctgcaccagctagttcatatgtcactacacccagatttaaaaatgcctaacatataaaggagcattgctgatgttgagagtttcacctccccacctgtgctgggggattatttaaaaagtgatgcttatcataggatccaacaattccactccttggcccttatttaccgaaatgaatggaaaacttccagtccacaccaatacctgcacacgggtgtttatagccactttattcataatcgacaaaactcagaagcaaccaaaaagtccttcaataggtgaacagataaactgtggtacatccagacaatagaatattatccagtgctaaaaggaaatgctttatcaagtcatgagaagacatggaggaatcttaaatgcatgttaccaagtgaaagaagccaatctggaaaggttccatgctgtgtgatttcaactataggacattctggaaaaggcaaaactatagagacagtgaaaagggatttccagggaatagcggggaaggagggatgaataaataggtggagcacagggactttttagggcagtgaaagtatatgatacagtaatgatggatacatgatattatatatgtgtcaaaatccatggaatgtatagcaccaagagtggaccctaatggaaactatggaccagctggtcgtggtggctcatgcctgtaatcctagcactttgggaggccgaggcaggtgggtcacctaaggtcgggagttcgagaccagcctgaccaatatggtgaaaacccatctctactaaaagtacaaaaatgagctgggcggcatggtgggcacctgtaatcccagctgctcaggaggctgaggcaagagaattacttgaacatgggaggcagcggttgcagtgagctgagattacgctactgcactccagcctgggtgacagagtgagaccctgtctcaaaacaagcaaagaaaaaaaacaaaaaacaaaacaaaaaaacgatggcccttcggtgttaatgccatatcagtgtgggttcatcagctgtatcaattgtaccactgtggtgtgatgttgatagtggggaaagttttgggtatgtggggacaggtaggcctatgtcagaattcttggtactttccactcaattttgctatcaatctaaaagtgctctaaaaaataaagtttaagaaaagtaacatgtgcctgtattaattttctattgctgttgtaacaaactaccatgaatgtagtggcttaaaacagtgcaaatttattatcttacagtactggaggtctgaagtccacagtgattttaactgggacaaagtcaaggtggcagcagggctgggttcctcttggaggatttggaggagaagttgcttccctgccttctcagcatcttggggccacctcccttccctagcagatggccttttcttcatcctcaagccagcagcatggcatctttcaatctctttctgactatagcctctgcttttgttatcatattttctctctgattctgacccttcttttttttttttttttttttttttgagatggagtgtcgctctgtcacccaggctggagtgcagtagtgcgatcttggctcgctgcaacctccgcctcctgggttcaagtgattctctggtctcagcctcctgagtagctgggattacaggtgcctgccacgatgcccggctaatttttgtatttttagtagagacaggatttcaccatgttggtcaggctggtctcaaactcctgacctcacgactctgacccttctcactccttcgtaaggaccctgtggttacattggtcccactcaaataagccagtatcatctccccatctccaggtccttaatttaatcccatgtgcagagtcctttttacttgtaaggtgaaatattcacaggttttaggcattaggatacagtcgtcttttctaccccactcgccctttaaataactttttggccgggtgcggtggctcacacctgtaatcccagcactttgggaggctgaggtgggcaatcacttgaggccaggagttcgaggccagcctagccaacatggtgaaaccctgtctgtactaaaaatacaaaaattagctgggcgtggtggctcatgcctgtaatcccagctccttgggaagctgaggcacaagaatctcttgtacctgggaggcggagatggaggttgcaggtcacgctgctgtactccagcctgggtgacagaacgagactctgtctcgaaacaaaaacaaaaacaaaaacaaaaaacaaaaagaattttgctttgggtgcttttttcattttagacaggcaaccctattcaatttcccgattgttctttggtggttttccagtttgtgtgtgaggcagggaggctcacaaggaaaagaaatgaaggaaatccagctggatcctaaatttgactggaaagataaagggcagtgattctcaagaagggggcttacctgaatcagctgggatgcgtttgcattgcaagcatcccaaattccaacacaccctcccttgagagacacttctcttctgctcctgctccttgaatagcttgtggattgtgtgcttctcatgtgtaagggcagaaaaaaggttggtactcagtgatgcagagggatggaaggaaatgtggacagaagagtttggacctggggttgaaaaggagatgagagcagaggttggggacgtctctcaagtgatgctgacagcgatgttatgttttttcatcggagtgcagggtggggaggatttagagggtgagatgagtgggcttacctgggccatgtggttttagagttgttgaaggtgggaccgtatgggagaaccagagaagctgctgcacaggtcaggtttaaaaagaagaattgggccagtagcagtggctcacgcctttaatcccagcactttgggaggccaaggtaggcagatcacttgaggtcagaagttcgagaccagcctggccaacacggcaaaaccctgtctctactaaaaatacaaaattagccaggtgtggtggcaagtacctgcaatcccagctacttgggaggctaaggcaggagaattgcttgaacctgggaggcagaggttgcagtgaacggagattgcaccactgcactccagcctgggtgacagagactctgtttcaaaaaatgcaaagaagaacgggcacctttccatctctgtgtcttgttgcaggtcctcttcgatggggagtttaccatgcagggcagctactgagggctgttgaattctaaagctagtaagacaaagtctggaaaaggggtggattaggctgtagcagggagggggagccctcacatttcctttgatggtctttattgacagcccggctcatggagttgaacggatcagcctcagctcccatcctgttgagcagaggcattttcattcttagagttttggaggcttttgcaggtttccatgggtggcactaagacttttgctgggagaatttggcccagagcaagtgactgtgcatgtttgacagctggaagaagggaatttatggatttatgcttggatttgttctttattgttgctgttgtaatacctgcttctgtcactctgagtgttattttgaagatgggtgatgcagatgattttttaaggcaaggcataattaagtaatttttagaaacccattcaacattttctgtgtcggcgatgactgccgtatagttacgatgggtggtgggtgtactctagccaaaagatgtcatagcatctgtaagagtaaacagccatggatgagtgtttagtttggtcagtgctggagagcttcttatttttaagaggcagagtctcgctatgttgcccaggctggccttgaactcctgggctcaaggctccccagtagctaggactacagtcatgcaccactgcgccagctcatctccagcaactatagtcatgcaccactgtgccagctcatctgctggagaaccttttattgaattgactttgctgagatttgagactagcctaattttttttcttctccttcatgtttctaccgtcattgagttggttatggtcctgcttggtcatttccctggatctgctacttactgcctatggcagaggtccccaatccccgggccatggaccagtgctgatccatggcctgttaggaaccaggccgcacagcaggtgagcagcggacaagtgaatgaggattaccgcgggagctccgcctcctgtcagaccagtggcgacattagattctcataggaacgtgaaccctattgtgaactgtacatgccacggatctaggttgtgagctccttatgagactctaatgcccgatgatctgaggtggaactgtttcatcccaaaaccactgcctggtccgtggaaagatggtcttccatgaaactggcccctggtgcccaaaggattggggaccgctggcctgtaggaccatgagcaaattaccttattatttcaagatccaatttctttatctacaaatcgcaatagaaaacatcatctgcctctggggtggttgtgatgaaaagataagatatcaaatgtaaatcttggcccttggaaataccaagtgatcaataaatattagttcccttcgtcctttttagagataattgatgagaccaatatgacgttgacttgctggttatcttcagatatttcagaggctgtcacatatcacacaggagggacacagtttttggtgttctagggagcaaaaccacagctaaaaggtaaaagtggaaaggagacagatttcagctcaacataagaaagaactttgtaataattagacctgtgttacaatacagtggaactcgtgaagtagtgagcaatttgtcttggaagaatttaattaaaataggattttttgggctgggcatggtggctcacacctttaatcccagcactttgggaggccgaggtgggtgggtcacctgagatcaagagtttgagaccagcctggccaatatggcaaaatcccatctctaaaaaatacagaaaaattagctggctgtggtggcacacacccataatcccagctactcaggaggctgaggcaggaaaatcacttgaacccgggaggtggaggttgcagtgagccaagattgtgccactgcactccagcctgggtgacagagaaagtctccatctcagaaaaaaaaaaaaaaagaataggaattcgcaacagcattctcattgacatttggggccagataattctttgttgtcaggggtgtgctgtgcattgtaggttgtttaccagcatgcttggcctcactcattagatgccagtagcaacctccccctacgctcctcccagtgtgacagctaaaaatgtctctagtcattgccaaatgtcctgtggagggcaaaaccattgctggttgagaaccactgaattataggctagatgatggcgaactggactgcatcctcccaaggtcaactctatcctacccaaaattgagttcttgcaatagtaagctccgggaattctggggatggctttttggtttctgatagtacctcccaacctgggacgaaagactgaactcatgtgaaattgtaggggtcaatctgggccacagagagcaactgaggtcctgcctggaaagccttctgcagttgctttaacgtttatctctcgttgtggtttttgtaggtcatgttggcagcttcctattggtctcttctggccccagcagttgagatggccacgtcctctgggggcttcggtgcctttgccttcttccctgtggctgttggcttcacccttggagcggcttttgtctacttggctgacctcctgatgcctcacttggtgagtaccactctacttttagctgtcgtatcgggatacaaccagctctgtgcaatgaatttatttctgatcaaacctgacatacctgttaatgtctctgttaagtagccagtggtatttaaacagagaacaaggcattagaggaactgattggtgatttctttcttaaagtaatgtcttggtaattacccccttatttacattttagtaagttcggattttgaatgtcacatttcattaaaaatatagagtacagctgatgtgctgggtggcactgtatatatatgagaggacctagaacgatcactgtggtgctgggttttattgagagtatgacatcatcagggagatgatactcccgccccacccccacaatctgtagcattaggcctttgaccatggatcacattatgagggctgacaggagggtgaggcagggctctgtgcagcaggggtctgggctggagctcacacctgccatttactgattgtatatccctgagctctagttttccatcctttaatttgaggataactcccccgaaggactgtacagtaaaattttaaaaatgtaaaaatgcactggaattggggataagccagagatttcaggcttttttactgacatatggcaggagagctggatttgggaatgagcatgtatgtgcttacagggaagcaccgtgcaaaccgcagcctggcatgtggctgtgatcaccgagccaagagagctggggccaggtcatgcgatgggaaccgcaagccattggctaaagccctgtcatctgcatgcaccactgtcagtagaggaaaggggtccaagatcataacagcatgagacagccttaccagacactgggcccgacaagttctagagatggcagaagcacccctgaactggtgccagagttccctgctcccctagaaagggaagtggtgcagggagaactctctggagagaaatgggtcaaagtccatttctcctgctggatcacggtgagacaggattaagtcagactcactggagtcagtggtcatgtaccccgggaggtaggtaggttgaagttctcttccctgccttcctgctttcttttttccttaacttcccaagtggagaaagagaaggaatgatgggtgattctgtaactataacgattcccaggaactatgcctctaggtcctgggctaatgtaaaacagattccttgtgttacagaagaactgtcctttggatcagacagctgaatgtgatgttggacggctgtgatactgtcttaaagcagaggtccccaaccccccagaccaaggaccgctactggtcaatggcttgttaggagctgggccacatagcaggaggtgggcagccagctgccaagtgagctttatcttctgagctccgcctcctgtcagatcagccgtggcattagattctcaatggagcacaaaccctgctgcgagctgcgcatgtgagggatccaggctgcgtgctccttaagagaatctaactaatgcctgatgatctgaggtggaacagtttcatccccaaccccctaccccggcccctgtccatggaaaaactgtcttccacaaaaccagtccttggtgccaaaaaggttggggaccactgtcttaaagaccatgtgtcattttttgttgttaaaagattgagtgacatggctgggcacagtggttcatgcctgtaattccaacactttgggagtctgaggcgggcagatcacttgaggccaggagttagagaccagcctgggtaacgtggagaaaccccatctttactaaaaatacaaaaattagctgggtgtggtggtgcgcacctgtaatcccagctactcaggaggctgaggcatgagaatcgcttgaacctgggaggtggaggttgcagtgagccgagatggtgccactgcactcctgcctaggtaacagagcaagaccctgtctcaaaaaaaaaaaaagattgagtggccgtgtctgtctccgtcccctggacatgtggcttccttgctgccgactatgtgtggtagtggcgtccagtggccctcaatgcaggctgccatattctgatctcaaggccaccctggttttgtgtgaacttgttgttggagtgtattctgcttgccctgacaggtgaccagtggcttcaatccctgagcagcaggcagagatctggctcagtggctctgcatggctcctgctggatcccattctactcttctctcctgcacccaactgggcttccaagatagtctcttggaaaggactctgcaatccttgtgggtcttactatgttactggggagtaggggtggtggggcggtatcagatgtatttggtcagctgtctgaatgtagggattttctctgggcggtgtaaacagtcattggctaatttgcactatgcagcagtaattttttttttttttttgtgacggcgtctcactctgtcacccaggctggagtgcaatggcgtgatcttggctcaccgcaacctccacctcctgggttcaagtgattctcctgcctcagcctcctgagtagctgggattacaggcacctgctgccatgcctggctaatttttgtatttttagttgagatggggtttcaccatgttggccaggctggtcttgaactcctgacctcaagtgatcctcccaccttagcctcccaaagtgctgggattatagacatgagccaccgtgcccggctgcagcagtgttttttttttttttttaaaccttttggttcatatttgttctaatatatgctttgaatatggaggagatcccagagggaagccctggatagaatcagtaatggtttgggagcagctggtgaatgtctggggagggattgcagcagctcagaaacagacatcatcaccacaaatgcccagaacctcactacttggcagaaaggtcagcctgacagtaaacatctgttctaggagatttaaaaagaaatgaattcttgctgtcgacgtgagagggggaatttgtcttagaaggtctcatacatggatgagaattacttatgattgctacagtcagtgaatacaaatgttgttgaaagagttgtgcttggaaacagtctgttgaccttcactctgaggctggccaaaggtttcctttggtttcactattaatttgctcaccagacctgaaaagggcagcagcttggatctatcgaagatgctctgtggggtcggagttaatgggttttgatcttgagtcgttgcggttggccaacatcgactgagcacccacgcgtttatagtctaacaggggaggagcggggctagaatttgtgttcaggatgtttgcccttcttgggatctatgaaccagtggcttttgaggctgtgggaagttttgtgggtaaattcagccccagatcatttcagttcctgattcattcccctgatgatggagtcccacaattcagcggatggccccaggagcagaatgaaggcagaggaaaagcctttggctgcggttccgaccaaggggctctcaccctttgggacgggccccaggatgtagggggcctgtctgcagaaaacctcagggtctcctttctatcccctggggacacgtctgcttggagtttgttggggtgaaaggaagtgggtcagtgtctgtgttatttcacctggagaaataaggagatgcggaagtctggaaaaggcagcgatatggcttgaaggattctgcagcagtgccctgatttgacccttgcccgtgaccattcaggcacaggccccaatgcctgggagcgtcagagccacccaccctggttatatgtgttcgggacgtgaagggcatcacactcttgggttggtgggaagagaatggttaacacatgactgtgttctttaactccatttctgttccttcagcctttcagatttatctgtccctctgttggaggcaaagcaaaatattgctcatggaaagggcattactcagaagagcctgtcaggatgaagccgttgtggctttgttaacttcagatgcctcaagttcctctccaaactgggtgtttgttttcaattatttatctgggaataaagtagagaagctctgcggtaactgttaatgggaagtgaactgacagggatttgcagagactttgccaaatggcgtcttaatgaaaggggagaaaaaaagggggtggacaaggaaggtgcagcctactgggcctgggaggaggctggtgaggggtcggatgatgggaaatgctttcgaggccagctggagcccatgctccccttaggatggttctaggcagaaacagacaggacactgaacagctgtttggagacattgacatgtttctgattttgcagttgtgcttctatgtgaagttaaggtatagcagtatgtgggaaactgtcatcttcagtttattattgttattatttgagacagggtcttgctctgttgcccaggctggagtgcagtggcatgatcgcggcttactgtagccttgacctcctgggatcaagtgatcctcccacctcagcctcctgaatagctggaaccacaggcgtgtgctaccatgcccggctaatttttaatttttttttggtagagacaggagtctccctatgttgcccgggctagtcttgaactcctgagctcaagcaatcctcctactttggcctccccctcttcagtgttgggattataggtgtgagctaccacacctggcccgccttcagtttaaaacagtgatttttctcctggtgggttgatgggtagggtggggaggagggtagtgtgtgtgtgtccccaaggtcaattctttatttttagtcatgttagcgtcgcatcaatacagtacaaaaatctcgttataaaacagtttataaaaattttatgtgaaaacccttctcctacttttatcttttcccccagaccaaccagtcaaacattgttaccagtttagcgggtatcattctagtgtttctcttcttttcttttgtcttctcttttctttctttctttctttttttttttttttttgatgtagtttcgctcttgttgcccaggctggagtacaatggtgcgatcctggctcactgcaacctctgcctccctcccgggttcaggcgattctcctgcctcagtctcccaactatctgggattacaggcatgcgccaccatgcctggctaattttgtacttttagtagagatggggtttcaccatggctggtctcgaactcctgacctcaggtaatctactcacctcagcttcccacagtgctggtgttacaagtgtgagccaccacagccggcttttcccttttctcttctcttctcttctcttctcttctcttcccttctcttctctcttctctttctcctctcctctcttctctcctctgctctctcttttctcttctcttctcttctctctcttccgaggtggatcttcctctgtggcccaggctggagtgcagttgctcaatcttggctcattgcgacctccgcctcccgggttcaagttgttctcccgcctcagcctcttgagtagctgggattacaggcacctgccaccgcacctggctaatttttgtgtttttagtggagacggagtttcagcatgttggccaggctggtctcaaactcctgacctcaggcaggcggatgcctgcctcagcctcccaaagtgctggaattacaggcgtgagccaccacgcccagccccttttccttttttaaagaaaaccaatgatactgtgttttttaattattgaaatataaacacttttccaatttgcttgtattgtttgagtatactttaaatcgactttatagcagtaggaaccctgactccatttcgatcttcttttcttctgactctatttcgatcttcttttcttgcatatgtgcaagcatacatttttacacagttggaatcagtctgtgcattctctttgtgttatttttaaatttgaaatgatttttattgatgatattttaatacctacgtaacattctgtcatccagttcatttgctcagccatctctccgtggttgagtagttagactgctctgtgcttttacatatgtttgcatgtacatctggagatggaattttgtttcatgttttctgaaaaacaaatggcaacatactgtctgtgttgttgctgcttgcttttcgcagcttggtttgcatcttggcagactttttcctgggagatgtgtgctcccctccccctcctctccctctcttggtattcagtatcttgaggaggctgcccaagtaggtaacaggtgcctgtgaccctgaggctgtctcctccacgtggacttggccaacagtcctgcccagacgggctccaggagggtgggggaggctggcaagcagggatcaccctcttctcagctcctgccttaatttatctgagtcctcaaccatgttcagtttattttagttctcattgtgatggcaaagaagatgcctctagtgaagcttaaatgaacagtgtgcgtgtgtactttgaatatgtacccagttttggccaggcgcggtagctcatgcctataatctcagcattttgggaggccgaggtgggtggatcagttgaggtcaggagttcaagaccagcctggccaacatggtgaaaccctgtctctaccaaaaatacaaaaaaaaaaaaaaaaaaaaaaattagctgggcatggtgttgcgtgtctgtaatcccaggtactcaggaggctaaggcagcagaatcccttgaacctaagaggcggaggcttcagtgagccgggatcacgctgctgcactccagcctgggtggcatagcaagactttgtctaaaaaaaaaaatgtacacaacttttactggtatcaatatttggctggctggagctgctattgagagaacaaatatgacaactgtcttagaagtgacagatgttccaagaggcagttttcctcccagaggtgtgtttgcatgtatttatttctccttcgtagatttccttcatctttagcattctgattctagttcacgaaagaatatcttagggaattaaaaaggagaaatgaaaagagtatctcacagaaaacaaaaaggacaaacttcagcagcagccacctgagagtctctacaataagcctgatatcgtcaagtaagcccgactcgtttcgtggggacattgaacagtagccctttgccccatttttaggattgtgctttcttatactctgttgaggctccagatgggcaattctacttcaagctatatgctgcatcctggggttgagctattgttgaaatttctgcctggctgtagaaagcctctggggcaatagcagatccttccagtgtggggacacagttgtgccatctgaagagggtggcatgttgggtggattgggcagccccaggccaaagaaggtggcagttctgcagtcggaccttttacttcactgtctacacatctgtgttatttcgctggggctgccatagcaaaatactacatacagggttggcttaaacaatagaaatttattttctcacagctctggaggctggaagtccaaggctaaggtgccggcagggttggtttcttttgaggcctctccacttggcttgcagatggctgcctttcctgtgtgtcctcacacagtcttgcctctgtgctcacatccctggtgtttctttacgtgcccagctttcctctttccatgaagacaccagccacattggaccaaggcccacccaaacagcaccattttgggaccgggtgtggtggctcacacctgtaatcccaacactttgggaggccaaggtgggcggatcacgcagtcaggagatcgagaccagcctggctaacacagtgaaaccccatatctactaaaaatacaaaaaattagccaggcgtggtggcacacacctgtagtcccagctacttgggaggctgaggcaggagaatcacttgaacccaggagacagaggttgcagtgagccgagatcacaccactgcactccagcctgggcaagagtgagacactgcctcaaaaacacaaaacaaacaaacaacaacaaaaaaaaccagcaccattttgattggacaccttttcaactcttgggctcaagcagtcctcctaccttggaatcccacagtgttgggattacaggcattaaccatggcacctggcccatcttcagtttaaaacgttgattttctactggccctatctctaaatacagtcacattataaagtatagggggttagagctttgatacatggattttggggggcacaattcagcccagggtaacatctttttttttttttaggcactgtgattgaaagatggtagagtggcaggagctcagctgttagttgggcactgggtgttctgaaccagtggtcgcttccctgacactggaacagtgggctggctggctatgccctgaggggcatggcaggctaaggaatacaaatacacagtactaattaatacttcagtttctaagggaggaaacctgtgagcttgcagtaatggaagcggtgcctgataattctgggcttggggagggttgagaaagcttattgttcagaagggttcactggcaaaggaaaactgagtttttttttttctttgtgaaacaggatattttaattcacagggtggggttgctcttgacacactgaagccacaggcccttcatagtgtgaagtttggagagagctggcattcaggctgtcctgggtaccaaatgtattcccaggggcaactggaagccatggttagcattgtttcttccacctttggaggcattccacagcctcccgtgacttttaggaagatgttcagatgttgttttgggtcctgctggcatgcagacaggctgaaaaagggatgaaggcaatttcctagtatggtgggctggccgattctttttttttttttttttttttttttttaagatggagttttgctcttgtctcccaggctggagtgcaatggcgggatcttggctcactgcatccttcgcctcccaggttcaagcgattctcctgcctcagcctcctgggtagctggtattataggtgtgcaccaccatgcccagctagtttttgtatttttagtagagaccaggtttcgccatgttggccaggctggtctcgaactcctgacctcaggtgatttgcccgccttggcccctcaaagtgctgggattactggcatgagccactgcactcggcctgctggctgattcttagagaagacagcagttttgaccattctgtggatgcctgcaagtgcgcatttaggtgatgggaatgcatgccatgaactctctctttcttgccatatgctctcttggttttctagggcagctggtgaatactgttctatgcatttgtatgcccatgtgtgttagctgtgtacacagtccttgctcattgaggctgcaggaaaaatatctgtggctttgcagtcagtggcacagagcatttcaagcgtgtctgctctctggcttttgaccagggttcagaaacccacctctgttgtcgatatatattcccggaggaccccgtgggtctggcacgaacacgcgcgcacacacacacgcactgcgtgggctggcttgctgaggggaactccttaagcacggaatggttcttgttcttggtctaagagtggtggggagtcttgagtgcagataggcttggttggaaccttctaggacttagatttccttctccgtgggtagaacaccttttcatttgttaggccataaagttgtaactggatacctgtcctctcttgctgtctcttgagctcagccacatgtttatgaaaaatgcccagaagccaccgtggaagcatattgaaccagtcgatagccgagggtggcaaagatgattatgagtatggaaggggaaagaggctgggagcggtggctcacgttggtaatcccagcactttgggaggcagagctgggcaggaattcatgaccagcctggccaacatggtgaaaccccgtctgtactaaaaatacaaaagttagccgggcatggtggtgcctgcttgtaatcccagctacttgagtagggctgaggcacaagaattgcttgaacccaggaggcagaggttgtagtgagccgagattgcaccactacactccagcctgggtgacagagcaagactatgtcttaaaaaaaaaaggaaagaaagaaagagtaagggaactgagtatgcatctaatcttcactggatcccttcttcttggcaaaggtgactgggaccgtgtctgtcttgcttataaccgtacccctagctgggtgctccatagagcaggtcctggtcatgcctgcgtggtccatctcctctgggattgatcgtggtgctggtagtgttgatgcaggtccccaggctcaggaaccaaagttggagagttagataaacagttctggctggtgtcagggaagaaatgagaagtgaagtttgggggtagagatgtagtttggccaattcatgggagggagggagttctgtgaaaagcactggaaagccaaagcattgttctctccgggctgggcgtggtggctcatgcctgtaatctcagcactttgggaagccaaggcaggtagatcacaaggtcaggagttcgagaccagactggccaatatggtaaaaccctgtctctactaaaagtacaaaaattagccgggtgtggtggcacgcgcctgtagccccagctactcgggaggctggggcaggagaattgcttgaacccaggaggcggaggttgcagtaagccaagattgcaccactgactccagcctgggtgatagagtgagactccgtctcaaaaaaaaaaaaaaaaaaaaaaaagaaagaaacaaaaagaccccccaaaaacccaaaagcattgttctctctcacatggtcccctggggaggtcatgaacagtataagctgaagcagaagttcttttcagatttcacttggtttcctttagaaatactgctccatgtaaaagtcaaggcagacatcagctaagtgggttcctgctatctaaattggcttgggctgccataaaaaaatactgaagtctggcttaaagaacagaaaaatatcaaggtgctggcagattcagttcctggtgagggctctctttctgtcttgcagatggccaccttcttgtgttctcacatggtagagagaatgagagagggcgagctctctgatgtctcttcttacaaggacactaatcctattatgagggtcccatcctcatgacttcatgtaaccctaattacctccaaaagcttcccatcccactggggctagtgctccaacaaatgaatttttttcgaggggacacaaatattctgtttgtaacacctgatataaagaatgcgaggacattctgtcccgtcatcttcagtacataaagggctctgaatatggtgaaaattttccaaacataactcgaaatggacacttttctagatagaaggagaaggagtgtgattcttcagttttattctcaatgaaattaagttataatactttttgtcctgaagtctactttgtcctgatattaatatagttacttctaccccagtttcattttgttagtgtttccttggtatatcttcttccatttctgtacctttacctgagtctttatatttaataaacaacataacattgtgttttactttttcatctagtccaaggatctccgtctcttaattggaatgttcagtcaatttatatttaatataattactgatgtgattgggtccgtgactaccatcttactatttattttctatttatcccatctattttattttgctctttggtacctgctttcctgccttcttttgggttaataaaatagtttttagtattccattttagtttctttactggatttaaaaatgtatctctttgtgttatgtttgcaggttgctgtagggattacagtttccttaacttatcatggtctaccttgaattaacattgtaatggtccatcatagtctaccttgtaattgtcttatcatagtctacctcgaattaacacttcatgtatgatataagagccttaatagcactatacatctatttatccctctttggttcatactatttttgtcatacattttatttcttcacatgtcataaatctttagtacattgctatatttgctttaacaatcggttgtctttaaaagaaactttaaagtgagaaaaagtcttcatattttctcagccttgacttttccatgtactttcattttcactgcttttcagtgacagtcctcagtagacccatatttttatctaatattatttttcttccatctggagaactacttttaatattcattatagcttaggcctgctagtgacaaattctcttagcttttatttatctgaatacatttttattttgccttcattatttgaagaatgttttcactggatatagaattctaggttaacagtttttttgcttttaggacgttgaagatgagattctaaggtcctctggcttatgttgtttctgatgagaagtcagcattgttctcctatatgtaatgtgactttttctatggctgctcctaagactttatcattagtttttagcattttgactctgttatgcctttgtgtggttttctttatgtttatctttcttgatttttttttttctcccagtgattagtaacattttcttgtttcttctcatgtctagtaattttttattgtatgctggacagggtaattcctgtgttgttgaggatctctattttgttgtcttttcttaaagaagtttgagtgttgtcatggcaggcagttaatatgcttgatactcccaagtcttggttttaggctttgttgggatggataccctttatctgaggactgcaatagccctatttttgtggttaattgtgcttcttgggtctatagattgatttattttatttttactttattgtttttttttgttatggagtcttgccgtgtttcccaggctggagtgcaatggtgtgatcttggctcacttcaacctctgctgcctaggttcaagtgattctcctgcctcagctttctgagtagctgagattacaggagcctgccatcacgtgtggataatttttgtagtttagtagagatagggtttttccatgttggccaggctggtcttgaactcctgacctcaggtaatcttcccaccttggcctcgcaaagtgcctggattacaaccatgagccactgcacctggctgaatgtctagtaattttttattgtatattggacattgtcagtggtctattgttaagagactagatttagtcatcttaaagagtgatggattttattctgacaggcagataatttactggtggttcaacttgatcctgtaaagtcttggttttcagctttgctaggatgggtatagagtagcttttactcgaggcctagaatagctctgcccttaaagaggatctttagggtctcaactgaatgactggggtgtacagtgagatttccttgctaagactagttggaattttatcttctagtaccatatgacctctggaatctccgttcatctcacagtcccttagaaagaattctcttttccaggcctcatagcattttactttgcacatgcatagcttagtatttagtcagcaactcatggatatccctttgcatatttctgagatttcttgtttgtgtgatgatcctcctctgtggtatcctactctgcaaattacagctgtgtcagcagtcctgaattttattttttattattttgtttttatttattttatttttgagacgaagtctatattgcccaggctggagtgcagtggcgtgatcttggctcaccgcaacctccgcctcccaggttcaagtgattctccttcctcagcctcccaagtagctgggattacaggcacgtgccaccacgcccagctaaatttgtatttttagtagagatgggggtttcaccatgatgctcaggctggtctcgaactcctaacctcaggtgatccacctgcgtcagcctcccaaagtgctgagattccagatgtgagccaccactcctggccagcatcctgaatttcaatctttttctgtatactgctgcatttctttatgctgcagtttggaaagtccctacctgcccccagtgttcaggtgaacgtggtgcaccctttgcatgttttccgtctggctaggatcacagccctgcatagtctattattgtctagtccctgaaaatagttgctttatatattttacttaacttcatagtattttacttattctaaaataggaagtcacagtggaattaattggaaacatttgctccagattctttgcaggtgtttttggcctcatttttccccctcatttctctctgccctccaatccactttgccttctaaatgaaggtgatttaacttgtaaggtcattttaagaagaagctatgtgtgtttctggcaaaagtttctatacctctccttgcagaagttgactgatacctgcttctagaatttttgctgcattctggccacaggcatttcttttaattaacaggcgcttaagtggagagctagagtctcttgatcataataaatggagtgttgcttcagatggcaggaataagcataattggatgaaaaccctacacacagagagccaggacactggctgattcagggaaccaactgaaggctgaccctcatgggaaggtgactagttttagctttggttcattggttctgaaatattgccacagctgccttaactcttctccacttcagggggactgcttacatttagcaaatcacttctttgtaacaatgcaattaggtgctctttgggaggttttgtgtgcattggagtgaggtgtggtggctcacgcctgtaataccagcactttgggaggctgaggcaggtggatcacctgaggtcaggagttcgagaccagtctggctaacatgatgaaaccctgtctgtactaaaaatacaaaacttagcagagtgtggtggtacatgcctgtaatcccagctactcgggaggctgaggcaggagaatcacttgaacttgggagggggaggttgcagtgagctgagatcatgccactgcactctagtgtgggcaacagagcgagactttgtcaaaaaaaaaaaaaaatcaagtttctgatacttcttcaccctgagagtctcatttaggagaactggagtggaacccaggaatctttacttttatcaggtgtctaggagattctgatgtaggtaatccatggacctccctttaagaaacatgatatagtggctttttacaacagtgttcattctaaaactggacatattgtcatatctagtactgtattttcccttcagaaaagcatataggcagaatagtgactattaacccatgatacagatagtaaaactgagacctgaagaagttacaaccttcccagggtctgaaagcatcttggtgttagagctggacagagcccagctgtccaagatggctatattctcctctttggactcgttgaccttagttaatgatgtcatagtctaagatgagaaagcaccgccattcctcattcttttcattttgctctaatctccttcttggctgggcacggtggctcacacctgtaatcccagcactttaaaaggccgaagcgggcagatcacctgaggtcaggagttccagccagcctggccaatatggggaaacctcatctctagtcaaaatacaaaaattagctgggcgtggtggtgcgcatctgtaatcccagctacttgggaggccaaggcacgagaattgcttgaacctggaggtgggggttgcagtgagccaagatcgcgccactgcactccagcctgggcgacagagcaagaccctgtctcaaagaaataataaaaataaaaataatctcctccctgttgtagaagtgctgttccacgtggcagtttgttaaggacgagttattggggagaatcggatggcatacagggtacattgaaatactccaaattataaactgtatatgctaatgtgaggtgttatcccttgagcttgggatcagagagaagtttgggatttttgcataggtcgtgacgttatccagtggtgtttttgtagattaatctggcaccagataatagaataatttggaagagtgagaaaccaaaggcccagggactaactatgacatgaatgcagtattcccaaaggcagggagggcccgagatgatgaaaatggaaaggaaggcatgtttgagagacatttagaagaaggaaccgtgcagaagatcagatgagtgcttatatggaggaagaaaaaacagtacagggcaataccgaggtttcagacttcagtggctgtgaggccataccagagtaggatggaaactcagtatttgggagggatagatgggcgtggaagggaatacagttaattggagaaacatgaattcaacaagcactgactgatagactgtgcatgtgttgagtttaggttgacagtgaggtacctgagttgagatggctctaggaagttgggagtatgaaccagtggctcaggggcgggatggaggctggagttacagaaacagcattgggagagcgctgaacaggagaggaagatgtcacgcacgaatacctgagataggaaattgctgcaggccggccaggggcttatgtccagtccagaggcaagagaaacgtgcagccagagggtcagatgacgctgggagcaaagagaacaagggcctcaaaagctggccctctgggacttggtgaagcaacgtgggccccagtttgcttgtatgtgcccatccgcatggttttttgtgaaagggtttcgctctgtcacccaagttggagtgcagtggcacgatcacagttcgttgcagccttgaacttccaggctcacgcgatcctcttgcctcagtctcctgaatagctgggatacagctcatgttagcatgaccgactaattctttttcagtttttgtagagacagggtcttgctacgttgcccaggttggtcttgagctcctggactcaagcagttcttccacctgggcctctcaaagtgctggattacaggcatgaggcactgtgcccgtatctagtttttgatagttactcagctgattgatttctaacaggacagatctgatgggttaattgcaccgggatagggagtgagaactgaatgttcccagcaacatattcctccccagacatgctgggtcgaggttaactgatcatctcattataaactgaaaggacttcaggacggggtagtgtgagactctggctctgcaggaggctgaggccccaggagacatgaagttgatttaggtgcattctgtgtttatatgagagggagtgggctctgcagaggatgggttaagggaactagttgaaggctggggtggccaaagtaagcaactcagatatgtgagggtgtgtggtgcgttcacatctgatttatttacgattgccaaggcacagcagggggcactgctaagagaatttgcactgaggcttgggtgtgactgccctccatcaaatcgctgggcctctgcgtctcagattcctgatttaggagtcattggtgacaatgcctactttcctcctcatctcctctgatgccctgctgtctcctttcattatcccctcattggtcccgaaaccatgtggatgtgatcctttacagcaagtgtgtccaatcttttggcttccctgggccacacataaaatacaggaacaaatactaacgatagctgatgagctaaaaaaaaaaatcacaaaacctcataatgttttaagaaagtttatgaatttttattgtgttacattcaaagccgtcctgggctacctgctgcccgtgggccgtgggttgaacaagcttgctttagagggagggctggcaaagtacagcctgagggccaagtcagctgcacctgttcatttatgaactgtggaatcccctgcagctgcttttgcaacacagcagcagaaatgagtagctgtgatggttgtgattgaacacagaaatagaaaaccaagtatcacatgttcttacttataagcggaagctaaacaccagggccaagtgcggaggctcacgcctgtaatcctcacactttgggaggctgaggtgggtggatcgccggaggaggtcaggagttcgagaccagcctgaccaatatggtgaaacctcatctctattaaagatacaaaaattagctaggtgtgatggtgcacgcctgtagtcccagctactcgggaggctgaggcaggttccttgaacccaggaggtggaaattgcagtgagccgagatcgtgcactgcactccagcctggatgacagcaagactgtctcaaaaaaataaaataagggccaggcacagtggttcacgcctgtaatcccagcattttgggaggccgaggcaggtggatcacctgaggtcaggagttcgagaccagcctggccaacatggtaaaatcccatctctactaaaaatataaaaattagtcaggcctggtggctcgcacttgtagtctcggctactccagaggctgagacaggagaatcgcttgaacctgggaggtggagattgcagtgagccaagattgtgccactgccctccagcctgggtgacagagtgagactgtgtctctaaataaataaataaatatgtggctctaaataaataaataaataaaataaaataaacattgggtacacatggtcataaggatgggaacagtagtcactggggactactagagaggggagagaacagggggcaagggcagcaaaactacctactgggtactgtgctgactacctgggtgacaggttcagtcctactcctaaccttagcatcacacaatatacctttgtaacaaacccgcacacgtagcccctgattctaagataaaagttaaaaaagaaaaaaaaaaactgggaaatactatctgaccctttgcagaaacagtttgctgatccctgatttaaatacttattcagtcgatcctttgtttaaaaagttttttaaatttttgtggctgcgtagtaggtgtatatggggcacattaaatgttttgatatagtcacgtataacgatcacatcatggaaaatggggtattccctcaagcgtttatcctctatgttacaaataatccagttatattcttttagttattttattttatttttgagacagagtcttgctctgtcacaggatggagtgcagtggcatgatcttggctcactgcaacgtctgcttcccgggttcaagcaattcttctgcctcaaactccccagtagctgggactacaggcgcctgccaccccgcccggggtggtttttctattttttgggagagatggggttttccccgtgttggcccggctggtcttctacttctggccttgggtgatcttcacagactgaggaaaaaaaaaaannnnnnnnnnnnnnnnnnnnnnnnnnnnnnnnnnnnnnnnnnnnnnnnnnnnnnnnnnnnnnnnnnnnnnnnnnnnnnnnnnnnnnnnnnnnnnnnnnnnnnnnnnnnnnnnnnnnnnnnnnnnnnnnnnnnnctagggccaggggcagtggctcacacctgtaatcccaacactttgggaggccgaggcgtgtggatcacctgaggtcaggagttcgagaccagcctggccaacatggtagaaaccccatctctacccaaaatacaaaaactagccgggcatggtggtgggtgcccgtagttccagctacttgagaagctgaggcaggagaattgcttgaacctaggaggcgaaggttgcagtgagccaagatcgcgccgctgcactccagcctgggcaacaagagtgaaactccatccaaaaaaaaaaaaaaccaagaaaaccagaaaaccagaggtacaattaaattattttgactatagtcaccctgttatgctgtcgtatagcaggacttattcattctttctactttttttgtacgaatgatcttttgtctatgtgccctggtgacctctctgttcagggtaccttcgtctccccgctccagatcattttccacaggcccccagagtatcccacgcaggttgtgagtctgattgtgtttctggctgaaaccccttcaagggctcctctaccttccatttgcagttctgttttcatagagtgcttcccagagtccttctgatctggccctaactgccgtctgcagcctggtccctccctgcttatctcttgccatccttccggtttccttcctgtcccccctgcctttgcgccagctctgcctggggcaccgcctctgcggtgttttgccagactctcttccttaccctttggggtgcatcttgtgcatttcttccccacaaggctctccagacttgccccatatcttggtttcattttgtactttcctcgtcctggcccttcccttccctgggctgtcatcacctgtgtgcctgtgtgcctgtgtaccgggggcctgaaggtgggggcaagggcacagatgggtcatgtctctgcagtgtcctgtacactagcacagtgcccggcacagagtaggttctcaggaggtatttgatgaatgaatcaatgaaagaataattggagaggttgtgaagatcagaggagatcattgttaggaaaacgcttccttacggcatcgaagttgaaagtgctttacacatgtgagttatttttggggagcagatccatgcccgttgcaattgaccgcttttttggccctacaaacatgaagcacagataattaaacacgcaggagacaaaaagaaaagcttaactgaaatttgcctgtgtcatttgatttttcatgccttatttactttcataattatgtttgcctaagaagctagagactcatactgccatttactacaagcatttttcgagcgacctttgagtaaagggtgaggtggagagcagggaagttgcctgtgttgctttagaaaaaatattaacatctagacctccctctggaggttctgactgatggtgtccatggtacggcctaggtacttttaaaaaagttcccgtaaggactctgacgttcagccaaggtcagtgaccattgattgaaggctacctataactcgcttttgtttagttactgggttatgtttcattctccataattcaagtatcttcctgtttctttttgaagcccaagtcttctcctattgcaaaagcctaagaaaagagggaaagaagaattgtcctgcagttgattaagtaacagtccgaagatgaaaagggagaaagggtctggttgtattgattgcaaacttcagaccacaccagaatcacctaacaaaatgcgagggggggccagggaccccaccccggactctgtgcctgagaggctgttggggtgaggcccaggcgcctgcgttttgaactagatctccaggggacttagatgctccctctagtcagagaaccacagtcagtccagaaaggcaggtagcagcacagcaggagtctggaaagctgtaacatctgggagaagagtaccgaaaccttggagtggagagggctccagaacctactcatctcctgggctccttaaaaaatttgttgtattcgatgagaacacttggacacagggtagggaacatcacacactggggcctgtcgtggggtggggggagtggggagggatagcattaggagctacacctaatgtaaatgacgagttaatgggtacagcacaccaacatggcacatgtatacatatgtaacaaacctgcacgttgtgcacatgtaccctagaacttaaagtataataaaaaaaatttgttgtattgagatgaaattcacatagcataaaattaacaattttaaatggaacacttcagtgacatttagtaccttcataattttctgcaaccaatactgctatctaaattccacacattttcatcacccccccaaggaaaccccatgcctattaagccatcactctccatctccccattcttcgcttactctccaccgcctggcaaacactaatccactttgtttttgtggatttacccattctggacatttcatattactggaatcctataatatgtgaccttttgggtctgatttctttcatttagcattgtgttttcaaggttgatccatattgtagcatgtatcaaacttcattgcttttcttttttttttttttttttgagatggagtctcgctctgtcccccaggatggagtgcagtggcgcaatctcggctcactgcaagctcacgccattctcctgcctcagcctcccccgtagcggggactacagatgcccgccaccacacctggctaatttttcgttttcatatttttagtagagacagggtttcgccgtgttagccaggatgggttcgatctcctgaccttgtgatccgcccgccttggcctcccaaagtgctgaaattacaggcgtgagccaccccgcccccctgccttttttttttttttttttttgaggcaggtctctctgtcacccaggctggagtgcagcattgcaatggcagctcactgcagccttaagggccccaggctcaactgatccaccggccttagcctcctgagtagctgggactacaggcatgtgctgccacgcctgcctattttatttatttatttttttttgtagtgtcagcatctcactatgttgcccaggctggtcttgaactcctgggcccaagtgatccttccacatcagcctcccaaagtgctgggattacaggcgtgagccactgtgcctggccgagaacgtcattgctttttttggatgaagaatattccactgtgtttgggcgtgccatactgtgttccattcatccattgctggacatttgggctggttctgccttttggctactgtgaatagtgctgctagtaagatgagtgaccaaggatttgtttgagcaccgttttcagttcttttgggtctatatcctggtgtccctataatcaggagcacctgattaggttgaacctggtgggcagccaggctggtggctcatctggcccacagcttgctggagccacatgtgtgaagctcagctctgaatgggaggagctggaaggacacttgggcagtcggcacgggcagagggagcggcctggtcagggcagtgtggttgtttgggtagagcttcaggctagctttcattgtaagtgccttcactctgcaaggctacagaggaaatagccagaataatcttattaaaaatatgtttctgctgggtgcagtgacaggtgcctgtagtcccagctactagggatgctgtgaggctggaggattgcttaaagcaaggagtttgaggctagcctggaccatttagtaagaccccatctcaaaaaaaaaaaacaaaaaaaaaacaacaaaccccaacaacaaatgtttctttttctttttctttttcttttttttgagactgagtctcgctctgtcacccaggctggagtgcagtggtgtgatcttggcttgctgcaccttctacctcctaggttcaagtgattctcctgtctcagcctcctgagtagctgggactacaggctcacgccaccacaccccgctaatttttgtatttatggttgagatggggtttcaccatgttggtcaggctggtctcgaactcctgacctcaggtgatccacatgcctcggcctcccaaagtgttgggattataggcgtgagccactgtgcctggcccaaccacaaatgtttctgacgatgtcattccgtgtccaaaatcctttgctatcttcccatcaagtccaggcctttttcctctttttccctttagcttggacttcgttcaccgttctcctcctggcccctccctccttccctccctccttagcttgggctcaggccagtcctccaccacccaaaccacccaccagctcctgcagctggttctcagcacacgtcacactgtttgtctttttgagccttttctcgtgttctccctctgccaggaaccaccttcctccttttgctttcaccaggccaagtccttccttttcaggttttggccattgtcattagtccatgatgatgatggcgttgccctgaggctgtgtctgctgtgtcttgctttatttttttgagacagagtttcactcttgctgaccaggctggagtgcagtggcatgatcttggctcactgcaacctttgccttccggtttcaagttattctccctcctcagcctcctgagtagctgggattacaggcatgtgccaccacgcctggctaatttttgtgattttagtagagatgggatttcaccatgttgacagggctggtcttgaacttctgacctcgtgatccactcacctcggcctccgaaagtgctgggattacaggtgtgagccactgcgcccggccctgtgtcttggttttgaatctctctgtggccccttgactgagcgccgtgctgcgtggttgcttagctgcccatgtcgctgatgggctgtaggctccttgggcagtggcgtcatcattcttgtttgcctctgcatccccagcgcctggcacagagcctgacacggaggggccctgaaactgatttgctacaggaaagagtgagtgttcagcctggagctttattcatcattgaatcctcgaggcttagaacagtgcctgggacatggagatgctgaggcccccttaatctctcccctaacaactcccgccgcaataaacgcttcctaaatgtgtgaacggttgggtggaaaggagactcaatcacgtactgtctgcagtgtgatgacagataattgtatattcatcattttatatcaagggtctttgtgttcctgataatttttgtaggggtgcatgtgtgcatgtgtgtgtgtgtgtgtgtgtgtgtgtgtttacaaactgaattctaagtaaagcacccaaggctttgggtacttattgtctgaagaatcaggtggtcgggtgaactaaagcagggtgaacacactttttctgtaaaaggtcagatagtaaatattttaggctttgtagccacacacagcatctgctgctgtctctcccctccccatcctcttctcccttccccttcctttcccttctccaagaccctttaaaaatgtaaaacacatccttagctcgtgggctgtacaaaactggctggatttggcccacaatccatagtttacaaacctctgatctagaagatccattaaggccagttcttttaaaactttgttttgtgttctcatgttggatgtatttatttatatgttgccctttttcttgatgatgaaaattatgtatgctcattttataaagaaatgtagagaataaaaactccaacaggtaaggaaaatacacttttaatctcatctcatggacgccacccttatccatgtgttggaacattggctgtctgagtattttctgagcttttttttctgtacgggacatgtcgtgacaatgactcacagtcatggagtgtgtgtcctgtctcaggcacggtgccaggctctctataggcattgtcttgtgaggtaggtgctaatgataattttatttattattattattttatttttatttattttttgagtcggagtcttgctctgttgcccaggctggagtgcagtggtgtgatctcggctcactgcaacctccacctcccaggttcaagcgattcccttgccttagactcccgagtagctgggactacagacctgcgccaccacacctggctaatattttttggtatttttagtagagacgtgggttcaccctgttggccaagctggtcttgatctcctgacttcgtgatccgcttgccttggccttccaaagtgttgggattacaggcgtgagccaccatggctgaggtcactcaggtggtgatgtgatcacaggctcacgtgttgagatggagcctctgtgagcaggtccctaggtggctggagcgggcagagcctctgcatatagaacaggaaggtgctttgttgttgcagcagagcccagcccatcctgactggcaccctgcaccgcagagacacttgagcagcctccaaattaattgtgagagggtggccatgagggttaaataaaataacacgcagagagtatcagacacacagtcaggcatgcagtaggtatttgatatgtgtcagttcccttatatcaggaactgtggaagctcctggggataactttttggtcctgtttcttatttgcacaagttgtgggttcaggcttaacaaaacgttgtgtgtgtgggccgggcacggtggctcacgcctgtaatcctagcactttgcgaggcagaggttggcggatcgtctgaggtcaggagttcgagactagcctggccaatacggtgaaacctcttctctaccaaaaaatacaaaaattagttgtaatcccagctacttgggaggctgagaaaggagaatcgcttaaacctgggaggtggaggttgcagttgagctgagttcacaccactgcattccagcctgggggaaggagcgagactctgtttaaaacaaacaaacaaacaaacaaacaaaacatgacatgtgtatatgtgttggggggttaggtcggtgtgcttatgtgctgtgatcttcgtggggtccacattgcagtgtctgctggtcctgcctctcgtggactgtttgggtattccatgagccgatggcccctttccttccaatattcccaagggaatgggccagaaagctctgcccataacgtcgtgccctaggaccacagtccatctttgccccattgcctgtggcctctttttctcagagagattgttgaaagcaacagttaaggatcaaatgacttgaccaggtgaagtagaaacctccaggtgtcttacgctttaacttcaaataatgagacttattttacccactgagcaagttgctagtggagtgccaacctggcaggatacctaggttattgccagggccagaattgtaaaccttccacattcgtatgttgaagccccaactctcagtatgatgggaacctttgggaggtaattaggtttagatgatgtcgtgaggatggggccctcatatgggattagtgtccttttaagaagagacaccagagagctcgctgtctttcttacttcaccctgtgaggacacggcaagaagacggccctctgggagccgaggagcaaggccatgtcagaacctgatgatgctggcaccctgatctcggacttctagcctccagaactatgagaaataaatgttgcggaagccctgtagtctgtggcttgcttgctttttctctttctttctttcttttctttctttctttctttctttctttctttctttctttctttctttctttctttctttctttttttccttctttctttctttcttcctttctttcctttctttctttctctctctctctctttctttcttcctttctttctttacacagtcttgctctgtcgcccaggctggagggcagtggtgcgatcttggcttactgcaacctctgcctcctgggtttaagtgattctcctgcctcagcctccatagtagctgggattacaggcatgcaccaccatgcccagctaatttctgtatttttagtagagacggggtttcaccatgttggccaggctggtctcaaactcctgacctcgggtgatccacccgcttcagcctcccaaagtgctgagattataggcatgagccaccgtacctggcctgtggcattttatagtggcagccaaggtaagagagttgtgaaatctatagtgattatcccggatcttggtgactcaggccttctttgtcccttgcattggttgatgctgccctctgtggccacctcacccctggctcagtcattgtcctgcccaggactcacaacagcacacctctgtgaagttcccttccccttttctcatgtagactcagattgctttctctgccctctccgtgttcagcccggggtcttgtctgcctgctctctgaaacaggcaccagtctcatcctagcctggggtcttgtctgcctcctctctaaaacaggtgctagtctcatcccttttctgtctactgcccaccagtgcctttgtgagggttctagttctccatcagtctccacccaggactctgcccccaacatccaatcagaccggtccaaggtcatttgtcatatgagtactttgcagcattagcacacgcaactcaatttctgttgtaatgattcccggcccgtcaagctggggtgatctgtacatttccagatatttgcaggtaaagtttctcttccactgtaagttttgaaaaatggaaatatcaaactaacatttcaaatttcaacaacctgtgtatatttgcttaggtgtctgggcttgggaagccccagcagcaggttccacctttggtttgtgtggtcagctgaataagggccatcagagatactcaggtcctaatctctggagtctgtggatgttaccttatatgaaagaaggacctttacagatgcgattaagttaaggatgtggagatggggaggtaatgctggattgtctccagggtgggccctaaatacaatctcaagcctccttataagagggaggcagagggggatttgaacaggagaggaggaggcaacgtgaccatagaggctgaattggagggaggaagccctgacaggaggcaaggaacagattcttccctagagcctccagagggagcatggccctgctgacacattgatttcagtacagtgatactgattttgcatttctggccttcagaattatgagagaatgaatttctgttgtttgaagccattgcatttgtgataacttgttatagcagctgcagggaactcacacagtttgcatctttagttctccccatagtgtgcctttcctcttgccttgcaggggagctggcattgctctctgctctgtgccgttgaaggaaatttggtagtgagagccctttctctgaccctgtctgaccagctcagtgctcatggctaataccttttggtcatctaaaagctcaaaatagaacagtaacatttgcacatgttaagtaagagtttgatccctgacttctaaatggtttaagaggcaccagagttaccagtagcgcaggctctggcatcccaccgactgagatcagatgcatgctctgccacttgctgactgtaggacttcgaactagtcactcagcccctgcccctttaagccccaatacctacttcataggaattgttataaggattaaatgagctgccatgttcccttgattgtaagaagcattttttttcatattttactatctttacaattgggatgcatcttacaggcaatggcgggtcattgtttaattgacagcatatttttctttcttagtgatacctcaagtaatggtatgtcttacaatagaatgcattttgtaattgatgactgtggcaatctgtgcagatatgcttagctcaaggcctggaatatcctaagagcatcttagtaatgatgctgttgttatttcagttgtggcaaacaagcagagggttttaggcatgttttcaccattctttcctaagcctgatagtctattccctgcttcccacccactatgctcagaaaacttattattttttcccatacctgttctgtctgtgatactttccattgccctggtacagcctctctgcaggacttggtgcaggggacctgtgggctctgagtagtatgtctggtcttgtctttcttttgcctcctcacattgcagaaatcacccaggtatacacataaccttgcttgctggacttgtatggcttgaactcattccatggcctctgagtctgagactttacatcttgacttggctggaaactcttcttccttcctatttctctgtttctgttttctctggttgcaaatgggatactcatacaactttttctttctttttttttattattattatactttaagttttagggtacatgtgcacaatgtgcaggttagttacatatgtatacatgtgccatgctggtgtgctgcacccattaactcgtcatttagcattaggtatatctcctaatgctatccctcccccctccccccaccccacaacagtccccagagtgtgatgttccccttcctgtgtccatgtgtatacaactttttcttaaggctgatatctatcagtcaggttctagttccagatagaaagcatatcagttatttgaacagagagaatttaacacaacaaatggctaactaactggaataaaattgttagctagggtaaaaagagaactctaaggtatcacaaaggtagcaactatagaaagcagctaccactgctcgggatgaggaaatagagaaagaagttggaattattaaaacttagaaacttagagaagggcccttcagagctgaaactcaaatgtccatgaggaggggccagcaggctggtgatggtgtcttaggctagggcacaatgaagacagttctgcaaatattggaaaaagttcaaactggatgcagcagatactataggaatgaattacggctgccacagtgaagaagcatttctggggtaaagctcacaacaatagtcagcagacagaaaggaacgtgtcccttttcaagcactaaagttttcttctaatatccttgacttgcagagcctaacaaagaacaactagcaaagcaaaaatgtagtttcaaagcctcagccttaatatcttggagctataggaaggtatgtttgggctgagagtcaatgtaggattttaaaaaacttcagttggcctctgaccttgtgatatgatatatgaaaatgagtgtgttcctcagtcagggttctgggttgcaagcaacagagactgaccctggctgatgaaacaggaatggagcttattaaggataccaagtagctcccagaatgttgatgggagaggagggaaggagaaccacactcaaggctcagcttccaagagtaacacccaaaaccaagtcgctgaactgttctgctgagcagactgctactggccatgcagcaccagaggcctatgtgccttgttcccatatccttgtcgggaacataagttggatgcaattgctgccacttttgtgtcagccagcatcagagagagagagaggaggaggaggaggatgaggaggaggcagagagagaggggagaagagagatgagaggagagggattgagagagagagagagaaggcagagagagaggggagaaaggagagatgagaggagagggagaaggagaagaagaggggaatgggggaggggagaaatggatccctcagctgattttgctgccttctgagatagtctgactatcccggtgcatctggtaggcagaactcggtcatctggcagctcctgttatgggaagaggtctttgtccttgtctcataaagtgggcaattccctagacacagaaaggggttcagatacaggataccggccaggtgtggtggtggctcaggcctgtaatcccagcactttgggaggctgaggtgggtggatgagctgagctcaggagttcgagaccagccagggtaacatggcgaaacccccatctctactaaaaatacaaaacttagccaggtgtggtggcgcgtgcctgtaatcccagctactcgggagactgaggcaggagaatcgcttgaacttgggaggcagaggttgcagtgagctgagatcgcaccactgcactccagcctgggcaacaagagtgaaacttcatctcaaaaaaacaaacaaacaaaaaaacagatacaggatagctaaaataaaagaaaaccatctgcagccctaggcagtcagtgttcaccacagcaggaaatggacctgttgccttccgtggctcctcagaggagtctgcaatccccagtgcactaaaaactgctagggattactccttggagagcactcaaaacacgtgtatgaaattatctccaaatataaggctcaataaacccttggtgatgagaactgtttgatggtttaggctccaaggtgtgcagcaggtaggctaatgattagcagcctggagcggatctttccctgcagagtgctaagccctatgagattcctggactgaaagggcctctttgagcccagtctggtttttaattaattttccagcaggcttgcagagtggaaggatcaaatattattgcattccagacaaagagatggctggggagagatgtaaatttttgaggatggcagtgagagaatgagagacagttaaaaagtaaagaatgtaatttggataattgaaatctccagaaagagatattagtgttgcgctaggaacctatgatcttttttctaacgggatgtattttgagatgctaggccttgagaaatgagccaccatcctccttttggtgaggatgggatgtagggccgtgcttacgtcacatcagacctgttgccctcttggaatcatcaccatcttcattgtcatcgtccttgtcctggtcattgttctgctcagtgagactctgaaaccactcttggtatgtgcttcactctcaccacattaaagtcagagagttcttcctaatagctgctttaaaattgctgcctttctcatctgaccccacctctgtggctgcggaaaacgccgccatctcccttccacctctcagaacgggactcctctgctgtctggctttccttgcaactttactgagtcatttcagcggggacccccagagttcagttctgtgattcagtgattggatgagtttcatactgcaaggtgtaccccaaagcagctgcatgtgtcaaaaccacatagagatgtgagtctggacttgagactttttcagacttttgcagtgttcccttctaggctgccagtcttcttcccttttcctcattcccacttactgccccattcctatcacgtctttgttttctgtgattcatttagtgccaacttttggtgccagacattttgcttgtgtcagggatcaaaagccctgtaattatataaacaagcaattacagagtggtaattactgtctataatggaggtgagcataggctgggagcactgaataacagtgactcagtctacttgggagagtcatgaaaggcttcctaaaattggtgcatgactttggacttaaagattaatttggaatttgtcaggcagatgggcttgacaggagatggtggggcatgcatttcagacaaaggaacagtacagtggtccttgtgacatagcacggctctacatcctatcctcgttaaaaggaggatggtggtccttatccatgggggatactttccaagacctccagtggatgcctcaaatcctggatagtatcgaacctgagggccgtcaatcaaaacacatttctgttcatgtcttccactcgtaaatttaacgcctttttcatcttagcagttacataccccgtggtgcaacagcaaaactggcatgaatttattttccttcttcacaatttcatggataacagatttgtttagatctttgcaacctcagcatatgattttcttctgaagtcaagaacttttaccttttcatctaaaggaagcattttatggcttctctttgacatattcaaattcccagcatcactactcttgtgcttggggccgttactgagtaaattatgagttacttccacaaaagcaccatgaagtcgtgacagttgatctgataaccaagacggttactaagtgactaatggatggctagcgtagacaatgcgggtactctggacaaaggaataattcacattctgcgcaggacagagtgagatttcatcatgctactcagaacagtgtgcaatttaaaacctatgaattatttttggaattttccatttaatatttttggaccacacttgacacttgactgggtagtttgggaatgtggaaagcaaaaccatggataagagggggctactctggctgggcgtggtggctcacgcctgtaatcccagcactttgggaggccgaggcaggaggatcacttgaggtcaggagttcaagaccagcctggccaacatggcgaaaccccatctccattaaaaatataaaattagccgggcgtggtggtggccacctataatcccagcttctctggaggctgaggcaggagaatcgcttgaacctgggaggcggaggttgcagtgagctgagatcatgccactgcattccagcctgggcgacagagcgagactccatctcaaaaaaagagggagctactctgtacgttaaagagaccttgcagcaggccggctcgttcattgttgctgtggcacaaagtgtatgcattcgttaactattgctgcatgacaaccccaaaatctcagcggtatacaactagaaggattgattttctcggtgtctgtgaattggctggaccaactctattgataatagagctttctcatgcatctgtggatcagctgggggtcagctgctcttgactacattaagctgcaagactgcagatggtcgtggggagggtggctctgccccaagtgtctgccatctgccttggaccagggcatgtttttctcatgacaagggcagaggcacaaaaggaagagcagtaacaaggctccctaaggcctaggcacagaaccgacccatggatacttccatccacataccactggctaagcaagtcacatggtagaagccagcatcaaagggtgggtatactgggttgaatagtgtctcccaaaatatatgtttcttggaacctcggaacatgactttacttggaaaaagggtctttgcagatgtaattagttaagatgaggtcgtactagagtagggtgggccataaatccaatatgactcatgtccttctaaaaagagaagagacaagggaagcaaagacacaaaggagatggccatgcaaagatggaggccaagatgggagtaacgctgccacgagccaaggagtgctgagggttgctgagaaccaccaacagctggaagatgcaagaaggattcttccttaaagcctttggagagaaaatggccctgctgataccttgattcagacgtttggcctccagaattcttagaggataaatttatgtcattgaagccacccagtttgtggtgattagttccggcagccctagaaaaccaataaagtaggaaaacatactattcccatgacaaggccatgggaagaacgtggacgcacatagaggtaaaacctgaggccaaacgttcaagcggccacggagggtgcagctgcggtaagagacggggccgagacaccaggcagggctgtatcaggaggggcgtgacatgttatacaaataatttagattttatcctgtaggcagtggtgggactgagggatttggggcaagggagtgacatcttcagatttgcattttagaaaggtggctctggggtgaaggagggcagtgtggagggtgctggactagactccagctactacaataggctaggcgggaaggcagaagggtggggattagggtggcatttaaggaagacaattaggggtagatctaaaaaaaagatgttcagaagaaacagctagacttggtaaccaattggatgtgggagattatttttggcttgaggagtatattagtcaggattcattgggcggggggaggatttattaaagaaattggtttgcacagttatggaggctgagatctgttgtctgtgagctggagaaccaggaaagccagtggtgtaattcatccaagtcggaaggctggaaaatcttggggaattcatggtaaaacattcagtctaaatttgatagcccaggaaccaggagtgccactttctgagggcaggaaagatggatgtctcaactcaagccgagagagagtgaattcatggttcttccacctttttgttctattcaggccctccatggactggatgatactcacccatgctgggagggccatctgccttactcagtctactgattcaaatgctaatctcttttggaaccaccctcacagacacacctggaaatagtattttgtcagctatctgggcatcccttagtccagtcaagttgacatgtgaaattaaccatcacagggagttaggtggatttgatccctctccttggagctggttatggcattggggaaaatgatgagttcatttcttatgggtcaggcctgatgtagtgcttagtacacctgctcacaatctcttggccaattcatagtcacttgcacatctatttggatgaaaggcaaatcacatggccaagcccaaggtcaaggggtggggaaacacactgtgctcatgataaggccatgacaagggcatggttgcagggagggctaaagaactggggccagtcattcaacctgccatggagagcttgaaagtgttgagagatgaggtcaagacaggaaggcagggctgtatcatatataatctaactctctgtccaggttgaagaagagacatagatgctagtgggaatggctgttggctgcctaactggctactgcaagctttttagggcagggtcttacctaactcacctctgtatccaggtggaaactagcaccatgctttgtcgggtaatatgttcaattagcccaaataaccccctccttcacctccaacatataatatattcaaagcatggagaagctaaaagcatcaagaacccagtccgtatagggcatttgatttgaaagtctcatggagtgtttgttctttctaaagagatgatttagagttaaatgatgcacagagatcaagcgggtcaggccgtatcctcagctcctatctagagagaaccttctacttaaagtaggctggatcctgtttgtggagtaccagagctcagatttctaattaaaagcgctttttcactttattatgaaatatgatacacgtaaaaaactttatacaacaaacgtaatgaataattctaaagcaaatatctttgtaaccgccaccatgccaagaaacaaaagtccccctaactccccatgtattcccctcttgatcaatccctgttgctacttgctgctaagtcaccactattctgacttttataattacctcttttttatagtttcaacccttatatgtacatccctaaacaacatgatttagtatttcaattgtatataaatgaaaacattctatatatattagttgtgtattttgcttctttcattaaatataggaataaaatttacccacatcattgtctatagctcttgttaattccttttgactgttatacaatgctccaccatatgaatatatttatttattcatcctattgttggtggacattgaattgcttgtgggttttggctactgtatatgaagcaaatgaaatactgcaggatttttatgaagaaaagtagaaaccaggccaggcgtggcagttcatgactgtaacgggtgaaacttgggtgaaactcgtgaggctaaatatgtagttcatatggaaaaatacaggaccaagaataggtgctatcatgagaatagcacgggaaacacccgcccccatgattcaattacctcccactaggtccctcccaggacatgtgggaattgtgggagctacaattcaagatgagatttgggtgggggacacagccaaaccatattgggggtgctgactcggaaggggcagtaggcaccagggaatttcaagggtaggaaaaaatcttaaattttggaaggagagtaagagagggaggaggaagagaaaggattttgaccttgcaaacagcagaacattttggtaattacaacagtgtgacattgtgccatagctgtacagaatcaacggggaagattggcaagtctcatgaatatatagaaacttggtgtatggaacatggcagagttgccattataattcagtgggaaaaggattgattagtcaataaatgttgatccagtggaatcgcctccaaaattgtaatctaccatataccctttgcaaaaatgctcccaggcgaagttagcaatgcttcaacaatatttaggacagtggttctcagccctggctgcacattttaatcatctgtggacacttaaaacaaatacagattgtgggtttcaactcctacagattctaactaaaattgtacgtggtagagcccaggcatctgttttttcaaatcaactgtattgaggtataatttacataaaaggctcccattttaactttctagtttagtgtgttttgacaaatgtgtacacctgtgtaatctttacaataatcaaatttaagattttttcctacccttgtaggaaattccctggtgcctgctgccccttctgagtcagcacccccgatatggtttggctgtgtcccccacccaaatctcatcttgaattgtggctcccacaattcccacatgtcctgggagggacctagtgggaggtaattgaatcatgggggcgggtgtttcctgtgctgttctcatgatagtgaataagtctcacaagatctgatggttttataagggggagtttccctgtgcaagctctctcttgtctgccagcatgtaagatgtgcctttcgctttctgccatgactgtgaggcctccccagccatgtggaactgtgagtccattaaacctcttttttctttataaattacccagtctcgggtgtgtctttattagcagcatgagaacagactaatacatcccccatgtgccaatctgaacccaggtaaccactgatctgctttctaacgctgtaacttattttttagcattagtattttttaaaagctctccaggtgattttaatgagtagccaactagtgataaagcaatttataacattaagaaaaacaaacttctctgtgacaaaagacgttatagagttaaattcaagccaaggcttgtgagaagatatttgcaatacacacaactgatgaaatattggtgtccagaatatataaaggtcttccacaaatcaatgaaaaggggcaaaccgtgcacagtaaaaaaattgaacaaactatttgattaggaatttatgaggaaggagccctaaagaaccaataaacacatgaaaagatgcccagtttcactggtaataaagggaatgcaatttaaattattttgtttttctttttttgttcgttttttgagatgaagtttcactcttgtcaccctggctggagtgcaatggcgtgatctcggctcactgccacctccacctcctgggttcaagcaattctcctgcctcagtctcccaagtaaagctgagattacaagtgcctgccaccaagctcgagtaattttagtatttttagtagagatggggtttcactatgttggccaggctggtctggaactcctgaactcaggtgatccatctgcctcagcctcccaaagtgctgggattacaggtgtgagccgccactcctggcctctgcgatttaaattctcaccttttgtatttgaccaaaaaaaatgagaaaaggtttgacaatattcagtattgacaaaagagatttttgataaataggaactctcatgcactgttgatgggagtgcaaattgatacaaccatcttggtgagtaatttgttaatatctggtaaaactgaagatataacatatcccatgacaaagcagtttcagttttagatacatgttcttcaggcattcttgcgaatgtacacagggaaccctgcatgagaatgttcattgcagcatttcttgtaatggtgaaaaattggaaatgaatacattatcagtcagtagaagaatgaataattaaattgtggtaaattcattaagatagcatggctaagtagccatttaaaaaagtaagttgcatggccgggcccagtggctcacacctgtaatcccagcactttgggaggccaaggcggggggattatctgagatcaggagttcaagaccagcctggccaacatggtgaaacccccgtctctaataaaaatacaaaaattagccgggtgtggtggcgtgggcctgtaatcccagctatttgagaggctgaggcaggagaattgcttcaacccgggaggtggaggttgtggtgagccgagatcacgccactgcaccccagtctgggtgacagagcaaggctccatctcaaaaaaaaaaaaattaaaaaataaataaaaataacaaaagttgccgaatgctacatacagtaaaatactatttaactaaagtttgaaattgtataaaataatagtgtgaattttttgtagacatataaaaatatattagcatggtattaaaagtgtaaaaatagcgttataaagcatacccatggaatttttcagatattgagtacctctaattggtgcggagagagaagagctgcaattctttctgtaatagtttacttaaaaaatctgaatcaaatatggtaacaggttaacctttattaaatctagatcgttggtacgtggacttacatcttgttattctctgtactcttctacatttctgaaagattgccttaagaaggagtcttaaaaactattgactaaatgacctcaaagtaaaggaaaaacgaattgtatttgacagtagatcagcagactttgtctcatgtaatagtcaccaaaatatttcttccgtactttgtataacagtaatggtccctggtcttgacagtcattaacttaagcagcctaaactttagtctctaggttacatatatatacactgtaagattttagtgtagatgtgtgtgtgttggtcggggagaattattagaaaatcctgatatgggacaggcacggttcttcacgcctgtaatcccagcactttgggaggccgaggtaggtgaatcacttgaggtcaggagtttgagaccagcctggccaacatggtgaaaccctgtctctactaaaaatacaaaaaaaattagctggacctggtggcgtgcacctgtagctccagctcctcgcgaggctgagggctgaggcaggagaatcgcttgaacctgggaagccaaggtttcagtgagtcgagatcacgccactacactccagcctgggcaacagagggagactccatcttgaaaaagagagagaaaaaaaatcctgataggaaaaggaaatgtgtttctttaatatatcacactattatacttgaacccttcctgggggttttttccttcttggtcattttgtatttattcatttattttcttctttcttggtcattttgtagtgactaggatcaagctgtctgaacccggcagtcttagggtttgtaactggttggaataatttatttgtagcagccatcaaggctctgcatcggtttgaatgtcagcattctaactgtaagaccaagcaggacctaagggtagtgcatgtcaccaatttttgtttaattaattttgcagcctaatgcttgcttttgagatggaatatttttgatgttatgcctttcatgtactaagatgggtaagtcacttacagcatcatctgcaaatagtctgatactacgtgcagcattatccatttttaggctgtgtagtttaggatgacgtctcatcgaaagaataaattactgaaataatgaagacaaaagaaatttactgaagagcctctaacgagagcagtcattttatcctaggtgacagttatgtccctaaataagtttcgtaatttctgtatgtgaagcccatcactggaagagtggtataccagggctcaaatactggtggagactttacgtaatgatctgtttcattttcaagatgagagtttatcaccttctcttaacaaatgcaaaaatccacatcttgaaacagtggaataagaaaaacagtcttcactcaaagccagcttgataaactatggaaggtgagggtgcatgacagaattgtcattataaatgaacatacttcccaaatacaatgataatttcttggaacggtagatgccctttaaaaattctattagaaggcaaaaacagatacaagactagatcatttaaaggtaatctatgtctttaagacatatcctgggatagtataaacaaaatgatttgacgtaatggaatatttataccctcgctgttatgttataagggatgatagtagctccaagaaatgtaagagaaacttgtactgttatcttggtaaaatcatttcattgcaaataaaaggatcaaacaattaaaggaaggatgattctagagtcaggagaactctgtgaaatacagccaagatctggctgtgctgtgggactgcagcctctggcattgagtaaggatggacaattgttttctttgttgttgttgttttatttttatctttctttttattgtggtgaaagacacgtagtagaaaactgaccagcataaccatttttacgtgcacagttcagtagtgttaataaatacgttcacattgttgtgaagcagatttctagaacttcctcatctttttagtagagatgaagatgaggtcttatcgtggtggccaggctggtctcgaactcctgacctcaagtgatgtgccctcctcggcttcccaaagtgctcggatgacaggcgtgagccaccatgctctgcctgcatattgtaatcttaaaaagagcaaacctgtctctactaaaaatacaaaaattagctgggcgtggtggctcacgcctgtaatcccagctactcagtaggctgaggtgggaggatcacttgaacctgggaggcggaggttgcagtgatccgagatcatgccgctgcactccagactgggcaacagagtgagactccatctcaaaaataaaaataaataaataaataaataagtaagtaacacaattcatagaaacagaaagtagaactgcggttgccaagggctaggggcactgagaaaaggggagttgttgtttaaaaggtaccgagtttcagatttgcaacatgaaaaagtaaaaaaaaaagtggaataagaatgagtaagacctactatttgatagcacagtagggtgactagagtcagtaataacttaattgtacatttgttttgttttgttttgttttgtttgagacaagttctcgctctgtcacctagactggagtgcagtggtgtgatcttgtctgactgcagcctctgcctctcaggttcaagcaattctcatgcctcagcctccaaagtagctgggattgcaggcatgtaccaccgcacccggccaatttgtgtgtgtgtgtgtttttagcagagacgggatttcaccatgttggccggactggttttgaactcctggcctcaggtgatcttcccgccttggccccccaaagtgttgggattacaggcgtgagccactgtgcccagcctaattgtacactttaaaataaagagtgtaattggattgtttgtaattcaaagggtaaaagcttgaggggatggatgtcgcattctccatgatgtgcttatttcacactgcatggctgtgtcaaaacatctcatggaccccataaatatacacacctatgtactcacaaaaataataaaaaagagagctgacttttacgtggctctcttttctggtttatagatgctctttttaaaccattcatgccaagagtaataatggaaagtaggctttgctcttttacgattcaggacgagaacatgggaagaagtagcccccaccggctgtttgtttttttaagtggtgtcatttttggatgggtgagtggatgagggagattgttcccaaaacaaccgttggggcttcacctttctctgtaagtgtcatgaagttttggagtggagaaagacttggtgtggaagaggaaggggtattctgattcaggactttgtctttaggcaaggaaaaaaacatttcttattttccagagattgctaaagaattctagtgcaagccatctgttcccctaatagcccattcagtcccctttttggggaatggggagcatattttaacatttctgaatttgccatgggagtgtcagggtacctcttactgatttctttagtagattgtgggattaattgttcattccatcttatttctgtcacaaatccaggaactgtatgctaagtgccccattcactcaaactggatacactttacacaagtacatttggtgattacctaataagagacaaacttcaggtccttgtggagtgtcttagtccattaagtgttgccataaaggaatacctgaggctgggtaatttacagacaataggtttatttggctctcagttctgcagactgtataagaagcatagtgccagcatctgcttctggggagggcctcaagaagcttccaatcatggcagatggtgaagggggaacagatgtgtgacgtgacaagcgaaggagcaaaagaactagcaggatctttcaaacaaccagtgctctcctgaaccaacagagtgagaactcgcacattactgtggggagggcaacaaaccattcatgagggatctgctcccgtgacccaaacccctcctaccaggccctcctccagcactggggctcacatttcaacatgagatttggagggaacacacatccatactatgtcagagctttgtggtttattggacaataccctgtgcttttattctttcccttctggtataaaaaactagtcattgtagttgaagacagtaaccagttcatccctcatgttggcgaggctggtcttgaactcctgacctcaagtaatctgcctgcctcagcctcccaaagtgcttggattacaggcatgagccaccatgcccggcctgtgattatgtcttatatccaatctacaagtgcttctcacacctgaatgtgtgcacggttcaccccgggagcctgttaaaatgcagatgatgatttggcaggtctgggttggggcccaagactgtatgtgtctcccaagctgtcaaggtggctgatgctcctgatccatggagccccctcgggctagctgggggtggagggtgcagcagtgtggcagtaatgggacctcacagttggaagggtccttggagggtctgtgggccagtgcctggcaggtggcgcgtcacactcgactttctgatgttctgatttaggaggctttgggtggagcttagacgtctgtatttctaaaaagcttcaccggggctttgtctgcatggccaggcttggcaaccaccagtttgtccagctccccagccgtggtttgcatcacctcaacatctccccctagtggttgtgttgtgactagggtgtcctggctttcaaagctagctccacagccgtcaggcttctgggggaccctggagtcttactggggagtgaactggtttcctagggctgtgggaacaatatatcacaatttgaatagcttaaacaacagacatttattgtctcagttctagaggctagaactttctggaaagtagttctaagattctgacctcaagatgtcagcagggccatgtgcctcctcaaggctccagggaaggatgagctccaagcccctctcctagcttttggtggttccttggcttctagtagcataactccagtcttcccatagtattttccttgtgtgcctgtctctgtgtccaaatttctcctttttataaggaaaaaatcatattgaattgggacctgccctaatgaccttatcttacctcgatcatttacaaagaccctgtttgcaaaaaaggtcacatttatagacaacatcttttgcaggaatgcagttcaacccatcacagggagatagggcatcgattgcaggaagattaataaataaaagacagtaataaaaagttaggcctggccagatgcggtggctcatgcctgtaatcccagcactttgggagtttgaggtgggtggatcacctgaggtcaggagttcgagaccagcctggccaacatggcgaaaccctgtctctcctaaaaataccaaaattagctcggtgttgtggtgcatgcctgtagtcccagctactcgggaggctgaggcaggagaattgcttgaacctgggaggtggagtttgcagtgagccgagatggcgcccctgcactccagcctaggtgagagagtgagactctgtctcaaaaaaaaaaaaaaaaaaaaaaaaaaaggcaggccccatgcaaataaagaaggtttgcatggaaatgaatgtcacaagtgggtaatacctgatagggtcagatatagctggctagtcccgtcagcaaagttgtgggcaaaaattcagagagcgactctgtgacatgttcctccttctgtgggcgctgtctgcgtggccctcactcagctagctctttctgtcccttcccccctgtatgtccctcccaggccacttaagcatgagcagatcattgccttgtacctggtgccttgtggagtggcgtcagccacgcggagtgtgcacattcctagggaggtgtggccccagacaacttactgtgtttgccctgcctctagcccggctgggcctcctagtgtgctctgatgaactaatcaatgcaggttggatttttggaggggagaattctttgttcctaaccagagaaaattgattccataagagggttattgctgctgtgtgcaattctctagagttattggattgcagaatcattagctttagaagtaaatgaaatagatttgggatattgttatgtttcagataaacaaatggccttcctccttattcatttaacattctgcttccagaaggaaatgtcagatgactcagagcctgataaaatactttgtggcacacaggaatggtaaccagatgcggtgagacttcacctttctcagcccctgtaaaaggcgttgcttcactgcggtgattctcacatttgagagtgcatgagaatcccctggaggtcttgcggaaacacgggttgctgggcccaccagaggcctggaatggggcctgataacttgccttgctaacaagttcctgggtgttgctgatgctgctggccttggggaccccactttgagaacagctgctttgctgaataaaactcgaactcctgggaagcctgtggattcagtgtgcctgggctttacacgtaccccacaacacccaagggaaaggaatcttatttcttgaattttctttttcttttctttctttttttttttttttaaatgtctgagttccaataaagctttatttacaaaaacagactgtgggccgggtttgaccaagccccttcaggtttcatggctacttctgtgcccatcctggggtggctgagtttgttctgcccatgctctgtgcagtgcaatgctacaagcagctttcaaggccgttctgcttcatgggggaagaacaggggcaagagctgggtttttttgctgctgatagtggcaatttgatgggcctgcctcctgtttctctatttcaatgtggctctgaggctcccagaatcactccacgattccagccccactctgagccatgagaaacctgaggctacccaggtcctctctgcctggttacccctctgctggcacttctctggagcttgccaccaccctgaacagcactcaggaaaggggtctagagggcccctgctcttagattcccaaatccatctggggatttcacagatccccacttcccttggggcctcgcccagatggtgagggcagatcccagggttcccttttccttagtaactcaccagctctcagcaacccctcttttcttccgacttcgttctcaccgttgggcatctttatggagtctgggtgaagagcctggctctgatttgaaagagaaaattgcccacagcccatcactcaaaaggtacaaagggatctgtggtgaaaagtctttctctcacctctgtcttctggttacttattttatttcctcagaggtgaccacttgtaaccaggttgttttctgtatttttccagaggtgctttctgtctccctaagcatgtaagtgtagatatattagtctgttccatagcctgatttcaccacatcttggacagaggagttccatcttagcacatccatatatgttgctttatttaaaaacaaaagcaaacaacaacaacaacaggctgggcacagtggctcatacctgtaatcccagcacttcgggaggccgaggcaggtggttcacttgaggtcaggagcttgagaccagcctggccaacatggtgaaacctcgtctctactaaaaatacaaaattagctggttgtggtggcgcttgcctgtaatcccagctcctcagggggctgagacaggagaatcgcttgaacctgggaggtggaggctgcagtgagctgagatcgcggcactgcaccccagcctgggctacagagtgagacttggtctcaaaaaaaaaaacaaaaacaaataaacaaacaaaaaacaacaacaaaaaacaccctgggtactattccatcaaatgaaggtactgtgagttatctaatcagttccctgttgaggggcattttgattgtttcatgtcctttactcttaggaacagtgatgcagtgaatatcctggtggatatttaatagacgttctctgagttgaccttgcctggatggagatgcatggataatagacactctgtgtttctgctgcccattatactccaaacacttgcagccctgtcgtcagtgcaacctgagtcagttgttcattaatccaactatttattttagctgcacttgctgccatcatttgatttcatcaaatgttatgtaattttaatgaaagttcagatttgaagagatttgctaacattgaatcaccaaatttctgtcaaataaggcatagtagagacagctgttaaaaaaaaaaaagacttggcaacgaattagaaaaatggagattctatttccagatttctccccaggtgtctttaagtctttccaccactttaaagaaacaaaatctgaagattgtaaatgaagtattacgaacaaggtttttgcaaaatagacgaaacagaacttttatcagttgaccgatatggacgaaagaggcctctgatttacatcataagatttgcaagtgaatgcacatttatttgcttgaaattaaaattacttttggggggagattcttcccattttccatgtttaaaattaacctattaatgaccagtttggaccacatcagatagaaagtagctaccgtctgtatttgagtccatgtgaacatatctataaaactaagtttctgaaagtgggattatacagtggatatttgtgaattttcccttttacagaaattctcaagttgcccttccttgagcttatactgatttatacttttaccagcaatgtttgagaatgtctttatccataccccatccctatagggttttagtaaaatttttgattttttgttaataggaataggtaaaaaatggtatttcatggagtcttctttgtttaaaaaaaaaaaaaattttagagatggagtctcaccatgctgcccaggctggtctcaaactcctggcctcaagcaatcctcttgccttggcctcccaagtggctgggattacagatgtgtgccactgctccggcctacagctttgtcttattagtcagcttagcatctttccacgtgtttcaaagctgtttgtatttccctttctgtgaagtgtctgtgtctttctcttacttttctgttccatggttggtctttcctaactcattattttggagctccttgtgtattcagaaaattatctgcaatattattataattcttttctcagttggtcacttgtgagtctgtttatggtgcttccaaccatgtagatttttatttaatttgtacctctttgaacttagtcttttttgattcatacttagtaaagtcttcctcattccaagaggattaaaaatacctatttttttctacaacttggtttcctttttttttttttttgcatttaaatatttaattcatccagaatctattttggtatacaaagtgagatagggattaaaataatctattttggtataaaaagtgagatagagattaaaatgtatgtatttccagatggctctcagaagtcttgataccatttgttgaataatccatcttttctccgttaatgtaaatgccagctataaaatttactaaatcagaagatgtatttacgtatttgcttctggatttttgtagtcctaaggtgaataataaactagccatttagccagccatatgtgtgtattgagtgcttgaagtgtgactagtccagattgagatgggctataaataaaaaatacacagtggattttgaagacttactaaaaatatatatgtataaaatatctcattaccaatttttatattgcttaccttattgaagtgaaactattttggatatatttggataaaataaaatatgttattacaattaatttcacctgtttccttccccttggtgattgtgcctaccagaaaatttaatgttatatttgtagctcacattctattttttttttttttttgagatggagtctccctctgtcacccaggctggaatgcagtggcatgatctcagctcactataacctctgccttctaggttcaagtaattctctgcctcagcctccatagtggctgggattataggcacccaccatcatgcctggctaatttttgtatttttagtagagacggggtttcaccatcttggccaggctggtctcaaactcctgacctctttgatccacccgcctcagcctcccaaagtgtcgggattacaggcatgagccaccgtgcccagcctcacattctatttttattatatggtgccgctttaatcttttcagctctgcctcttcaggtactattctgtttcagttgctgcaacttcacgtcttatcatctattcgtcttctgtattacttgtattacgttccttttcaaaagtttcttggttattcttacagcatattttcccatgtgaactttagcatcagcttgcgaatttcaagaacatcgtctaggtatttttttttacaagctttgtttcaaatttctacattaacgtaggcagaaatgacaggtttatgacgatgagcgtttctgcctaagaacaaagctcaccactccatctatccaggctactcatcgcgtctcccagtagcattttaagttttcttcataaggacttttcatgtttagggttgaatgtattcctgggtatttcatttccttttatgagtattacagacggggtctcctatttcatgacatattccatctggccgttgtttttgcatagaaaagctattgattttgtcttgagccaccactaattttgtcttgagccaccaaacaaaatacctttttttgttaataatcgttctttagatgattctttgagatttgtacatgtacagtaatatcttcataaataagcacctgggtcccgctattgttggtgggagttatagatgcaaataggatgtcatggtcttaacagagcagggtggctggggacaggaagggtggctgtcccagctggagagctggtgtaggaatcagtggatccagcagcaagtcgtgggagaaggatgcaccattttggggaggtcatgggaagtgggtgtgctgctttggggagcaagtcatgggaggggtgcttgccgctttggggagcaggttatgggaggagggcatgctgctttgcctccatctaccttgggcagtagcataggtttgagactctgccagctgcatcatctgaggtcttggttttccagcatgctacctgttataggcaagatttgttttggggtcctgtgttggagggaggtgggttagtgtgagctctgcagagcagcctccttgcagctcagctgggtagggacaaggcaggggcctgaactggctcgattttctgtggcgcttcacacatcaggacccaaattttcccttttctagaaattctcaagttgccctctcctgagcttgtactgatttacactttcaccagtaatgtttgggaatgtctctatccgtccctcatcccattgcctgctctgcttctcaagacaggtgaagacagacagtatttccatggatcagatgtgctctcggagtccaggttcctctcagcataactggagtgagaattatctgtctcacttacatagcccctgtattagtctgttttcagaccattataaagaactgcccaagactgggtaatttataaaggaaggaggtttaattgactcacagttctgcgtggctggggagccctcaggaaagttacaataatggcggaaggtgaaggggaaaaagtagcttcttcacaaggcggcaggaaggagaagtggcaagcgaagggggaggagccccttataaaaccatcagatctcgtgagaactcactcactatcacgagaacagcatgggggaaactgcccccatgattcagttgcctccgcgtggtctctcccttgacacgtggtgattatggggtttacaattcaagatgagatttgggtggagacacaaaacctaaccatgtcagccccagagcaagggccttcttttttatctttgtaaaattatgtttctggctagtcagtcacctcattgaaagcaagacccagacctcatccttctttgtatcccagggctgaaggcagggccttaccagagttggcgtgccctaagtgttcaatgataacagagatgatttgttgtttcctttcgttctcatgaacaagtgctgttggcacctttccaaaaaggtcttgtggacccatcctgtccactcctttccaccccagcctaaggcattactgtctctgtcccagaacctggcctcctgactggtcccccttactccctcacctccacttccatgctccccacagtctccccacccccttcttagaagctccccaagccctgtcccacctcccggcctttgcatctgctattccttttctctgaaacagagttcccgaagctctgtgcgtggctgcctcagtgcaaatgtctcctcccaagctcctccctgaccccccacaatgtgcgtggctttctctgtttatttccttcctagaacttgtcagcaaccttccttatccagtttgttcgtttgtatattttttacttctttatcatcggtttccccaccacaatgtaggctccttgaggacagggactttgttaggcttgttcttggccgtgtcgccaacaccagcacagtgactcacagggaacaatgctcggtaaatatctgatgaagggagggagggagcaagggaggaaagaagggaaagaggaaggaaggaaggaagaggaagaggaaggcagggaacgcctaagggcagggaagagggctgtggtttggggtttacaaatggggcccagacgacagcccagattctcactagaacctccccgtacttcccctgcgttcgcaggctggaggacggcctggaagattctcaacgaccaccctggctaggaatccaatgatagagaagcttgctcggagactgacattttgctggtttttctctggtgacccggtgactcactgctggttgctattcctgtggctttgtgggtgggagaggctcctgggaacaggtgccgatgcagtcggtctcctgggcaccttcgctctcccaggcagctggtggctggccgtgctctccaggccacctcggtactttactgctttattgaataggaagcattcattcactttgggagccgttaccctttggataatatcactaccgtttccccaaactcattgttgctgtgtgggggtgtttctgttccagccctttgtttgtgtgttttatggaaggtgctagcacttcatggttctttcccacatgtccctagtccctctctctgctctttgctctttcactttctctgatgctttttcaggtggttcatctaaacttgtccctggtgtatctcaccaggggtgggggtgttctccccttgcctctgatatccaagacaggttttatctgcatgaactagggcctggggacacgctccttttcctgccctggtattttagttttctcttgctgtgtacaaatgattataagtctaacagctttaaacagcaccctttgttagctcaaaactccataggtcagagggttgggagcacgtgggtgggtcagccggtcgtgttctcatctggatttcggagtcccttccaagctcctgtctgctggcaggatacagcagggctgcgggagtgaggccccatgtcctttctggctattagccagggcctctctccactccttggggccgtccacattccttcccatgtggctccctgcttcttcagccagtcatggctcaggcactttctcactttcgaatctctctgacttccctttctgccttcactggacacagctttctgcttttcagggctcctgggactaggtcaggcccaaccgggtaatcttatcctaacgcaagctgtgactcacaacacaccacagcatggtactgatggcgtgtcatagtcataggtcctggggataagggcaaaacatctttgggggcaccatgttagaaattcccaccactcctgtccctttgtaacattggttacaatatataatcctgagacctaacagagacatttctttttttcttttttctttttttttttgagacggagtcttgctctgttgccaggctggagtgcaatggcacgatctcagctcactccaacctctgcctcccgggttcaagtgattctcctgcctcagcctcccgaggagctgggattataggcacgtgccaccatgccaggctaatttttgtatttttagtagagattggggtttcaccatgttggcctggatggtctcgatctcctgacctcgtgatccgcctgccttggcctcccaaagtgttgggattacaggcgtgagccaccgcgcccggccaacagagacatttctgtgcctttctgcaaatgaggattttccccctcggtgtcattttcccagcagtggttgttgcccattgatgattcatactttctctaacatctcagttatcactctttttctttttaagtggaaaattggaatggagggtgagtgtgagacctagggactgagttgttgtttgccatgtctttatccttttgttcatttattaaagaggtgtgatcttaaagtggtagttctcaaagtgtgtttgggggactgcctagagtttcctcaagatcctttcaagggagctgagaggttaaaataataataataatttaaaaattcaaatattaattttcataagaatgctaagacattatttgccttttttttttttttttttttttgagatggagtcgcgctctgtcgctcaggctggagtgcagtggcatgatctcggctcactgcaacctcctcctcccaggttcaagtgattctcctgcctcagcctcccgagtagctgggactacaggtgcccgccaccacgcccggctaattttttgtatttttagtagagacggggtttcaccatttcagccaggatagtctcaatctcctgacctcgtgatccacccgcctcagcctcccaaagtgctggaattacaggtgtgagccaccacgcctggcctatctgccattttcattcttgttttctcaaagcctcagtccttcttgatacctgctctatacaccatacctgctgtagccttactaccaggacttttacctaagaaataatactggctaagaaataatggtctattgtactttagtcattgttcgctttctatctttgttacagcagctgaactgataccctactgtcttagtccatttgggctgctataacaaaatagtataaagtgggtagcttatagacaacagacatttatttctcacaggtctggaggctgggaagtccaaggtcaaggcagcagcagatttgtgtctgtgaaaagctcactttctggttcatagagggcaccttctcactgtgtccttacatggtggaaggggcgaggcagctctctaagacctctttatttttaaaatttatttaatttattttattttttgagatgaagttttcacttttgttgcccaggctggagtgcaatggcacaatctcggctcactgcaacctctgcctccagggttcaagtgattcttctggctcagcctccaaagtggctgggattataggcatgcaccaccacacctggctaatttttttgtatttagtagggacagggtttcaccatgttggtcaggctggtctcaaactcctgaccttaggtgatccatgtgccttggcctcccaaattgtgaggattccaggtgtgagccaccgcctggtctaggacctctttataagggcactaaccctggacctaatcatctcccaaaggccctaccttctaataaagtcatgcattactcaacggtggggatacatgctgagaaatgtctcattgttcaaacatcatagagtgtacttacccaaacaaagatgggatagcctactgcacacataggctgtagggtgtagcctattgctccgaggctacaaacctgtatagtatgttactgtgttgaatgctgtggacaactgtaacacaatgacaagtatttgtgtatctgaacatagaagaggtgcagtaaaaacatggtataaaagataagaggtagtacacctgtctagggcactcatcatgaatggagcttgcagggctggaagttgctctgggtgagtcagtgagtcagtgagtgagtggtgagtgaatgtgaaggcctaggacattactatacactaccgtagactttgtaaacactgtatacttaagctacactaaagcaatcaaaatatttttctacaataatacattggccttaacttactgtaacatttttaccttatcagcttgtaaaaacgttttgactcttttgtaataacacttagcttaaaacacactgtaaagctgtagctgtacaaaggtattttcttgtttgatatctttgttctgtaagcttttttctattaaaaaatttaaattcctttttacttaatttttttttttttttttttggtacaaaatgaagatacaaatgcaaacattaggccgggtgtggtggctcacacctgtaatcccagcactttgggaggccaaggtgggtggatcacctgaggtcaagacttagagaccagcctggccaacgtggcaaaaccttgtctctactaaaattacaaaaattagccaagtgtggtggcgggcgcctgtaatcccaggtactcaggaggctgaggcatgagaatcagttgaacctgggaggtagaggttgcggtgagccagatcgcgccactgcactccagcctgggtgacagagtgagactccatctcaagaaaataaaaaataaaataagcacgaatgttagcctaggcctacaaagggtcaggatcatccagatgtcactaggcaataggaatctttcactctgttatgatcctgtggaatcactgtcttatatgtcacccactgttgactttcatgtcatcatgcacacaagactggactgtcacctcggagcttaggaatccactgtattaattttgggaggacacaaactttcagaccatggtacctactgaatcacttactggccaggtgcggtggttcatgccttaatctcagcactttgggagtccgaggtacgtggatcgcttgagcccaggagttcaagaccagcttaggcaacatggtgaaactccatctctacaaaaaattttaaaaaattagctgggcatggtggcacatgcctgtgatcccagctacttgggaagctgaagtgggaggatcatctgagccccagaggtcgaggctgcagtgagctgtgattgtgccactgcactcctgccagggtgacagagtgagaccctgtctcaaaaaagaaaaaaatccacttatccttttgtctttctaacagaactccaattctgtttgatctagcaatgtgcctacctataattcctagacctacagcctcccctgcagcccagggaaaccatgtgaggtcagcaaaagtcatcagggaggttgtcccttctcatcttctacttgcccttccttctcctggaaacagcagggtggtccttggggtgcgacagccatcactcaggtgacagagtagcctggtgcccccccggcagtgctggggccactgtacccgctggatggctgaccctggtccttctgctgacccagacaaataaacctttcctgtgtaagtcgctgcagtagggttttctatttcttctaatcaaacctaatcttaactagttgtttgagccaacttttatgcaaggaaaagatggtttccataatttttctatgttattgtttgttcacgtttcctaaggaaaggacaagcagaaggcagcttggggtatttatggtgggcttcgtggtgtgcatgtgggcacaaagggctcagctgaagcctgtgtggtcgctgtccaggagctcggttgaaggagctggtcatggtgtccagcaacccacagcatccttttccttcctgcctgacctaccacagaggttggtgtttatttttgagacctggacaaattaaaaagaatatccaacaggagggttggccaaaacttgaccttggcagggaaggtcaggacaggaggccagacaactaaatgtgatgaccacagtgatttccacgggcagagcaatatcctgtttctaaagccggctccaagaggcctagtgagggctgtctttggttgctacagtctgggaagagatcctcatggaccccaggaaataatctgtgtttggcaaatagagaagaacaaacttagaaacagtgaccttttctttgtaagcttctcggagggttgtaatgatggaaaataattattaagtctccgttggctcagggcccctgaatggaaatgggagaggatattgattagctcaatggctctttaaagagctcgctgtgtttgccctcatgcctcataagcagacagcctcttttctgtctccatacttattggattttagatggcaacgcacacaaatactgctttcactgagtaaatattaggtttacgattggatcgggagaccacagaacacatctatgaaatggaagggtggggcggtgatgtgtattgcaatgcccttacctggctgggctgtgaacccttcatctcacctcccacccactgatttgcatccttggctctctggacatgatgggccgtgatggctgtcacccatggggaagggagaaagcggtaacaccaatacctataaagtgtccttttctattctgtgggatatgcttttattcacttatttagatttgagtggctgtggttttgttacagcaacgttgagaccgtttttctttctccttctctgttccttccactgctaaggtagttccagaatagtatttggtttaataatgattctggtgatgatcacagttcatattaattgagggcttattacatgccaggtgtcctggaaacttcacacacactgtattctccttctagagagaagctcgggtcccaacaggttgtaagcagaacttgagtctgcaaaccgtaggtgctttgtagataaaacctgtctccccagatggctcatttggaatcctgcgcccctcccacccagcccctgagtcttctcctttttaaacacactacaaaccagttttggtgttgtaagcccacttgtgtaggtagactgtgggggtggcatcccggttgcatatgctagtaacaagggatacagtttggtagtcctcctggggggcggcccggccccagctgggacagccaggagctgctgagacccgccttcacgttggtgctctgctcacggggagtcaagcttcctcgaaatgctgttgatcacaagtgctgatggcagactctctcctgtggattttatgtttgctttccatctggatgggaagtgggagaaaatgcattcccagtccagagggttttggaaataaagggctgagattttcattaaaatcggggggcgctgtgccatttcctgtgggaggggaagttgagcagtgggcccagagctgctttcttgccacctgagaagtaaactggtttttcagagagagagagagagagagagtgtgtgtgtgtgtgtgtgtatgtgtgtgtggagggggtgagcagtggtgcatacaaaccatgattatttctgtaagcagatttagaggtaaccggctaccagaaatctcattttagttcaagttctcaaccgttcccaaatctatcatcagagatggtcatagtaaatgagtggttatttgcattttatcgtcttccttctgggtcactcgtatggtcagcagagactgatcagaaagcagggaattggagaaacaagaggtctgggtgattcagaggcaggacagtcagcctctccgatgtaacatccggccgcataaggaaggtgctgctgcgatcagcctgtttgtgggcactggaggagtggtggggacacccagagccccagacacccagcggaggtgccgtgcaaggggaagacaaggcagggagcccatgagccaggctctgaggacacagtgcccatgcggccagctcgaaggagctgtctaaggagaaataagttttccactgtttctccacttttcttttggtggggaggcttcctctcatccccttggggggctgttagaaacccaaggtgaccccaggatccactggccctttgacccaggcactcctggattgccattttcttagccagtcctccagccactttttaaataagcataaaatgacagtcttctgggcaattcccggtgcattacagctgacttaattctcatcagtgagtttgcccccagcaagatgtcaaaagcttggttttttttgtgtgtgtagctttaagctgatggggcttattatatgttttctcttactagcagctttgcttccctgcctctctggcaattcagcagcacatttgctcagaattccctttgtttcagacataaaagggaaacccgtgttggtgtgatgtggctggttgcagagcgttgctgcatctgagggcttgttacttgtaataagctcttgcttcccggctcacataaatagtattgcaaacgtgaaggtgtgaaaagttgtgaccatgagaagcagaaagttctaagctaggaagctggttcctagttcagagcaaaaaatgaatttgtttctggagggaggcagagagtgtgtacagattctgctgatatcttttctctaactccaccaaatgaccgtgacctgcttattgatgatttttctccagacttattttggaaagactgaccttttaacggttgaaagatgaaagtctaaatggtttggggactattaacatttttttggaacaaaagataagtgctctggggatgctgggaagcatctcgctcaggtatgtggaggtggtgctgggactgccgttggtgtctctttccctgggcttcggtccccggaccagcctcactgcaggaagatttcattttaggaggaggaatctctgtgccaggggctggcctgccaggcttgggcagaatattttagaggccattatattctgggatgaaccttccacactgtggcctgtgtcataattttttttaaatattaaagagaaaaccaacaagctctctgccacccatctattttagtgttgccatccgtttccctagtaaccagggagatgagttgggtgtgtttccttctggattgtctgctgtgtatttatatacataggttttgaaaatttatatacataatgtagaggaaatattagaggtgtgtgagtgagagagaaagatggggaaaaggggagaaggggaagggagtagggggaagaggatgcgagagaggagggaacaagaaggaacgtgaatgccatattgttggcatctcaaggttcctggttggtgtccataaggcatgacacagaagtggttttgaactccggagatgccttggtttttgtccccaggggcttgttttagtggagaattgaaatggatcctgtccctcttctgttggtcccaccccctttttccctctctcctctctcccctgaatctggctgtcctcttctgtaagaccctgttctccctccgcacattacagccctccctggaaagtcctctggtgggcgctcggtgtctagctgctgccaatgaagctggcttcattttggtctccttggaaccagctggttttcccatccttaccctaggcctgggccatcatgtttaagctccagtgaaaatgtcaaaccctgtaaccttcctgcaatatgttccctgagggcagtgtgactccttaagttgagggaatgtgtcccagacatgggaaaagcctccgagagccccgtgcctccagaacacgggacatcgtggcctgtcctttgatggcattggcttcccatggtagacctgagcacgtgcatcagagatgggtgagccagaggaccctggactctgatctcctactcaagcaggggacggtgtaggggcagggcacaatgacattggcttgggaaattagccaaaagaaaaaaaagaataaaaaataattctttcctttcagttaactctgggaggcccagggattgtgtcgtccgcacgtgtgtagaaccttccttggccgagaaggatcgtgtcttgctctttgtgaattctgtggtggctgcatttttcttacacaggagtcaacaccacgcttttttcctctgtcctttgtgtagagttctgtagcctgtaggtgctgatgggcggtcggggaggattctgcccaaatgcacaggtgtgtgtgaagagcgaggcctctgtggtcactctgtcccttgctgcttagtccaccacctgcacatcaggctagttcccaccttgggcagaagcagagggacagtggtctgactgggttggggaaactgaaagaccattagtcacttccttctgtgtgaccttatgcatgacctgtagcccttcagattcccaatgggtttcctccacacaattgtcctggtcttaggaatggagaaaaaaagaaaaaagagagagagagagatcgtcatgcagctactttgctgtgagttggtctcggctctggtggaacctgggcaaactcttctctgttctctggactgagtctcaggctctccatagttacctcgcagatgccttccttttaaattctagaactgatgtcttcccttcctgctttcccgcttagctcatggggtttctggggcaacagctaattttctggacatgcatcagctcctaaaaccaaaaacaaacattgctttccaggcccacaagggaacacaatcttttctccttgttgctcccaggccgggatgcaggatgatgttacaggttggatgggggctgatgctgtcaggaggtggagaagaaggaggctggggtctggggtggaggagagggggtggtgaatgctattagttctccacgtgtagacaattgtaacaaccgagggtggaaaagaactgagactgcagagaggaaagcgccctccttagctctgctgttaaggggctgggcacagttattaacctccctagttgatccctcatgtcctggcagtgatgagctctccagcggctctcaacattaatccgaggctgatttgctggcctggagcatccactctgaaggtgcacagtgcgaatgctttgtgcattgctccagctgaagatacatgtcagagaaaagcaatcagtaccttttgcctctgatgggtttgtgttttttgcaaagcactctctcctctggctgttggagcttttcgtcacggattatttttcctgcttgggaagggatgcttttgattttcctagcttaagttagcccaaccctccagggacctgtggacataccaccctcttttgcctgcttcctgggcgggcactctggtgtggaggctggttttaggatggctcccaggatatgcttaggagctggtcttctagataaaaggaaaacacacacacacacacactctctctctctctctctctctctctctctctctctctctgagcatgcttatatagcattttcttctcatgagggtgttttcttataataaaaaggtataatatctcactctagcatagtagtccctagcctttttggcaccagggaccagtttcatggaagacaatttttctacagagcgggggatggatggttgtgggatgattcaagcatattacacttatcgtgcactttatttctattattgttacattgtaatctataatgaaatgattatataactcaccataatggacaatcagtgggagccctgagctcattttcctgcaacgaggtggtcccatctaggggtgatgggaggcggtgacagatcatcaggcattagattctcataaggaacgcgcaacctagatcctttgcatgcacagttcacaatagggctcatgctcctttgagaatctaatgccgctgctgatctgacaggaggtggagctcaggcagtaattccagcagtggggagtggctgtaaatacagatgaagcggccgggcgtggtggctgacgcctgtaatcccagcactttgggaggctgaggcgggcggatcacgaggtcaggagatcaagaccatcctggctaacatggggaaaccccctctctactaaaaatacaaaaaattagctgggcgtggtggcgggcgcctgtagtcccagctactcgggaggctgaggaaggagaatggcgtgaacccgggaggtggagcttgcagtgagcagagatcgcgccactgcactccagcctgggcgacagagcgagcctccgtctcaaaaaaagaacaacaacaataacaaaaaaaaacagatgaagcttcctttcctcaaccccctgctgctcacctcctgatgtgcggcccggtttgtgacctggggattggggacccctgccctagaagatctgttaatttctgaaactactatcacttccagaacattcccatctttcacctgagtatatgtgctaagcctccctctgtggggggcggtagtaattctcaacagataatctttgtaggaggaatgcccacacccaaaagagcctgggccggcttgcgtggaggtcacaattttctcagtttaaaccttcacctttgctgagagttcttcctctctggaacccactggatgtgatgttcccacagggaacctctgactgagaaaggcagcaccacccaggccagcaggggtgccagcctgcgcctcccttggatgccctgtgggttttcagtggctgcgttgccctcagctgggcctgtcaccctggttcagcagaatgaagacctgccttgcagccaagggctcttttcctcaaggtgtgctacgtcttctacaagtggcttggaaacttatggggaggggttggagccattttctcttccatggaatgggagttggtatctttttttctagaaatttgtaggtttgtggatggtttggtatagagcaggcttcagggactattcagtctgaattccctagttttatgaacaagagttgaagtgacaaggtcaggtatctaacagcagaacttcctctctgttcagatttctcagctgttggcatggtgtggcaccttgtatctccctgcatgattttctggtcttccatcctggtatcttttccacacattaagcctcacctccttccttttggagatactccttgacttacagtgggattacatctcaataaacctatcatagctgaaaatactgtaagtcaaaaatgcatttaatacaccgaacctgctgagcatcatagcttagcccagctaccttaaacgtgctcaaaacacctacattagcctgcagttgggcaaaatcatctaacacaaagcctagtttataataaggtgttgaatacctcatgaaacttacagaatattgtactgaaattgagaaaccgaacggttgtataggtattcaaagtgcagtttctattgaatgcatatcacttttgcaccgttgtaaagtcaaaaaagcttgaaacgccagaaaccagggatcgtccatacttttatccatctcagcatttttctagtcccatatttcctccagctttttttttcaacctttagagatgttttattccagtttctttttttttaaattatactttaagttctagggtacatgtgcacaaggtgcaggtttgttacatgtgtatacatgtgccatgttggtgtgctgcacccattaactcgtcacttaacattaggtatatctcctaatgctttccctccccccttcccccacctcacaacaggccccggtgatgttccccttcctgtgtccaagtgttctcattgttcaattcccacctatgagtgagaacatgcagtgtttggttttttgtccttgtgatagtttgctgagaatgatggtttccagcttcatccgtgtccgtacaaaggacatgaactcatccttttttatggctgcgtagtattccatggtgtatatgtgccacattttcttaatccagtctatcattgatggacatttgggttggttccaagtcgttgctattgtgcatagtgccgcaataaacatacgtgtgcatgtgtctttatagcagcatgatttatagtcctttgggtatatacccagtaatgggatggctgggtcaaatggtatttctagttctagatccctgagtaattgccacactgtcttccacaatggttgaactagtttacagttgttggcatactctacctggtttcatactaatggccaagtatctcacactagcacttacctcagaacattgagtgtcacgcccattcccaatttacagtcttttacttcaatttcttctttttccttcttcctttgtttttaaacaggatgataatcctattgatattgctgataatagttttatgcctgttttctggcatttgaggaggattttaattgtttcatttatacccttacatctccctggaggccatcagcttacagctgttaggtggctgatgcggaccgggaggccaaggtaaccatggatccaaacaaaactacgcagctcatccagggaccacatgtggcttcattagccctgtgtttgtaactttaggttaatttgttctcattaagcaaattagcatattaattctgtcctgcagtggtctgggaactatcttcatttgttgcttagcccaaaggtcagcactggaggatcagagtcttgactaaagtctctttctgagactggctcaggtgccctttggaatagccatggcacttgcatcgtacgaggaaaactcgtgtgtacctcggggggcgccactagcagagccacctttgtacttttgggggtcctagcagcttttgcctttctgggctcctttctccacaaaaaaagactaaaacttatattttgcagctgtgttggtataaggatgaatataatctaggctggattcattatcatgtagttgttattttttcttctgatttgagaagaaattaaaactgttcatgggtccctaaaggtgggctactggacattgcgtctcctgtgcctaatgctgcttttgcccctgaggccaacacagatatcttccctggatggctgagctgaagcctttgccaggcagaacctcgactatataatgacttgttgtcatttattgatgtatcagaagaaatgggattcctcctatgagtttggagctttgattgtaagtttgtgccataaaaaaattggtggagcgctacatcttattcataacacatggctccagaattagtttcctaagggtacatttagaccctagaaatgtcaacgtgctagaaatgtcagggagagagttttttctaaacagatatgtggtggtaggtggagatctgagacggcccttaagaattataccccacagtggccgggcgcggtggctcacgcctgtaatcccagcactttgggaggctgaggtgggcggatcacgaggtcaggagatcaagaccatcctggctaacacggtgaaaccccgtctctactaaaaatacaaaaaattagccgggcgtggtggcgggcgcctgtagtcccagctactctggaggctgaggaaggagaatggcgtgaacccgggaggcggagcttgcagggagctgggatcgcaccactgcactccagcctgggggacagagtgagactccatctcaaaaaaaaaaaaaaaaaaaagaaaggaaaaaaagaattataccccatggtgtgtgtgccctagaagcccctccctgtgatgggaattaagtcccattaagttactgatcaggttatcagtctcttgacttgactccatggaaagggagattatcctgggtgggcctggcatagtgaggtgagcccttaaaagagagagtgggccttccttgaggtcggagagacttgaagtgagagagaagtctcctgctggtcttgcagaagctaacagctgtgtggcttatagtcatatagccagctctttatggagctgactccccgtagaggcagacacttgtcaggaacctaagggctggccgggcccgatggctcacgcctgtaatcccagcactttgggaggctgaggcgggtggaccacctgagggcaggagttcgagaccggcctcaccaatgtgatgaaaccccgtctctactaaaaatacaaaacttagccaggtgtggtggcgtgtgcctgtagtcccagctacttgggaagctgagacaggagaattgcatgaactcgggaggcagaggttacagtgagccaaggtcgggccactgtactccagcctgggcaacagagcaagacttcatctcagaaaaaaaaaattagcaaaaaacccccaaaacccaagggcagcctctaggaacagagagaggtcaccagcctgaagccagcaagaaaatagggacctgaatccttcttagttgcaagaaacgtaattcttacaacagccaatatgcttggaagaggaccctgagcctcagaggagatcaaagccccagccactgtcttcatttcagcctgtgggactctgagcagaggacctagctgcaccgatccctggactctggccccatggaaacggtggtgaaaaaggagtgttgtttgaggcctctggacttgtggtaattcttcatgcagcagtgacaatcttatccaggcatggtgtatgtctcaatttggttatttgctttggaatttaggcttagaaaagagagagaagggaagatgccagtctccacatacccacagcaggaagcagagaaatgtttcccttagaagcaagctgcttcagtactttctcagctctcaagtcctcatcaagcccagataagtttaataatgaattctgctccaagttgagtgatgccatgtataaagccccgttaaagaaacattgaacacgttcttcaaagccacagcttttcttttgaagtaagttaggtaccatttgcatgctatttctttcttttttttcttattatactttaagttctagggtacatgtgcacaatgtgcaggtttgatacataggtatacatgtgccatggtggtttgctgcacccatcaactcatcatttacattaggtatttcttttaatattatccctcccccagccccccacctcctgacaggccccagtgtgtgatgttccccgccccgtgtccaagtgatctcattgttcaattcccacctatgagtgagaacatgcggtgtttggttttctgtccttgtgatagtttgctgagagtgatggtttccagcttcatccatgtccctgcaaaggacatgaactcatccttttttatggctgcatagtattccatggtgtatatgtgccacatttttttaatccagtctgtcattgatggacatttgggttggttccaagtctttgctattgtgaacagtgctgcaataaacatacgtgtgcatgtgtctttatagtaaaatgatttataatcctttgggtctatacccagtaatgggattgctgggtcaaatggtatttctggtctagatccttgaggaatcaccacactttctccacgatggttgaactaatttacattcccaccaacagtgtaaaagtgttcctatttctccacgtcctctccagcatctttgtttcctgacttttaatgatcgccattctaactgatgtgagaatagcaagcatatttctttccagccttatccattgtcctaatactcggaggtctcaccagaaggtgatgagaacaggcctcctgagccatcagtccactctgtttggtggcttgtgactgtcttaggctcgctctttcatgctggctcttttgtgcacacactctctctcaccctcgtgttcctggagtcaggaaaaatcattttatggttgccaaagctatgaaaaatgttgataagccatactttaaccttttttcctcagcagtgctgagataaagatctcttttccaggattggtaatagaagcgctggtgtacttacttttatttttataaattgtggtgaagaaaaaggaagggttttttttttgttgtttgtttgttttttgagacaaggtctcactatgttgcttggcaggagtacagtggtgcgatcatggctcactgcagccttcagctgttgggcccaagcgatcctcctgcctccctagtagctgggaccacagagatatgccactatacccgctttttaatttaattaaatttaatttaattttttacttttattttttgtagagatggggtctcgccatgttcaggttggtctcaaactcgtggggtcaagggattctcctgcctcagcctcccaaagtgctgggattacaggcgtgaaccaccacatccagcctgagggctgggttttatagaaaaattaccttcttggtttttgtaatctccagctggtatgactacaagaggctatttatctatctatctgtcaatctatctacctacctacctacctacctacctatgtatacaagaggctacctatccatccatctatctatgataaatgctactgaatcatttttatctatttatctatctatctatgatgaatgctactgaatcattttttaatgatggtaaacaaagacatttatttgtgaaagtgatagacattttgaggccaagggttccagtgccttttcccctggataaatatgaccatgctgctgtgtaaggagaaatattttgctgagtattctgctcattgaatacagaatagaattgcattaaacactgtcccctaaaagttcatctgctgagtatgaataggctttatatgtggccaaataagtatgggaaatataggattaaacaaaaccctgttctttactgcgggatttctcagaatctttatctgcttatgaaatagacctcaccaaacatatttgtctgcagaatctttcccttggagcatctcacgaagcagggaactctgggaaattgtggtttaagacagaatgaggcattaaggagattttgtccatgtacagaggtacacatggactcttggctcctactttgaccactggaggcacagagagtggtgacttaaatagtttttgtgatttttgagcttagaagaatcattgttaggttctcaatattagtatatatttaaaaaaatttttttccataggttattggggtacaggtggtatttggttacatgagtaagttctttagtggtggtttgtgagactttggtgcacccatcacccgagcagtatacagcaccctgtttgtagtcttttatccctcctccctctgccacccttccccccaagttcccaaagtccgttgtatcatccttatgcctttgtgtccttatagcttagctcccacatatcagtgagaacatatgatgtttggttttccattcttgagttacttcacttagaataatagtcaccaatctcatccaggtcactgcgaatgctgttaattcaatcattcttatggctgagtgtagtattcgatcatatatatatatatatatatatatatatatatacatatatacacacacacacacatacatacaccagtttctttgtccactcattgactgatgggcatttgggttgattccatgattttgcagttgtaaattgtgctgctacaaacatgcatgtgcaagtatctttttcatgtgatgacctcttttcctctggctagatacccagtagtaggattgctggatcaaatggtatttgtacttttaattctttaaggaatccccacactattttccatagtagttgtactagtttacatttccagcagcattgtagaagtgttctctgatcaccacatctatgcaaacatctacttttcaaaattttttttattatggtcattcttgcaggattaaggtgctattgcattgtggttttgatttgcatttccctgatcattggtgatgttgagcattttttcgtatgtttcttggccatttgtgtatcttctttttttttttttcttttttcttttttttaagacagagtctcgctctgtcgcccaggctggagtgcagtggcacattcttggctcactgcaacctccgcctcccaggttcaagcaattcttgcacctcagcctcccgagtagctgaggttacaggtgcatgccatcacacctggctaatttttgtatttttagtagagacggggtttcgccatgttggccaggctggtctcgaattcctgatcccaggtgatatgccttccttggcctcgcaaagtgctgggattacaggtgtgagccactgtgccgggccatcttcttttgagaattgtctattcatgtccttagctcacttttggatgggattgtttgtttttttcttactgatttgagtttattgtagatcctggatattggtcctttgtcagatgtatagattgtgaagattttctcccactttgtgggttgtctctttactctgctgattgttccttttgctgtgcaaaagctctttaagtcccagctatttatatttgtttttattgcatttgcttttgggttcttggtcttgaaatccttgcctaaaccaatgtctagaagggtttttccaatgttatcttctagaatttttatagtttcacatcttaaagtgcttaatccatcttgagttgatttttgtataaggtgagagatgaggatccagtttcattctcctatatgtgcttagccaattatcccagcaccatttgttaaaaagagtgtcctttccccactttatgtttttgttggctttgtagaagatcagttggctttaagtatttgggtttatttctggggtttctattctgttccatcggtctatgtgtctatttttgttgttgatgatgttgagacggagttttgctctttcgcccaggctggagtgaagtggtgcaatctcagctccctgtaacctcctcacccctctaggttcaagcgattctcctgccttagcctcctgaatagctgggattataggcgcaagccatcacgcctggctaatttttgtttgtttttttttttgagacagggtctccctttgtcgcccaggctggagtgcagtggcaccatcttgggtcactgcaacctctgtctcctgggttcaagagattctcctgcctcagcctccccagtagctgggactacaagtgtgcactaccacgcctggctaatttttatatttttagtagagatgggattttgccatgttggccagactgttctcgaacttttgacctgaggcgatccatctgccttggcctcccaaagtgctgggattacaggcatgagctgcggcgcctggccgaaattttaaaaaatctgtgtaaaactttcagacctctaagaatgtatccttgtgtcctcactggagaagccctattttaagtgaatgagattgagtttgtgggtttaagctaaagcaattgtttctagtctggatccatggagagctgcagggaattcctggggttcctcatattacacacaacattttgtatgtctgtgcatatgtactgcaataaatggcaaaatagccacaaatttccccgtcagcatccgtacctgacaatgtgacattgcaggtcctcccaacaaaaagtaccattgattcatccaacccttcaatgtggatacccatttacttgctttggccactgggatgatgctttggcctctgtgatgtagagacttgaaaagcatttgacattggatgctgaggttagcgtacgaatgagctccatctagtctgctggaagatgacaggccccaccaagaagaatcagtgttttccagtcaactcctggccaactgcctgctggctgccaggtgcatgtgccatcttagaccatccagcccctcgatgagccaccagctgacctcagatgcaccagtgagcccaggtggatgagcagccatgcccagttgaccatagaacaataataaccggctgtttttttaaaccactaagttttggggtgttttgctacctagcaatagttgtgcgatacatacacatttttaggaaagagaaattgtggcttttgatggatttttgaaggcatctaatatcctccaaaaggataacataggtcagaaaaactttattgataaacaccagctggaggttctcagtctgttgagaagccagaaaaagctcagagtggattatatgggtgcattttaataaagtctgggactaagtctaggattagattaagagtgttggataatcatcgaggattagaaaagaaatacttcattatacttcggttacttgtgttcttttggatttctgttactgttttaaggaaaatgatatttttgagcgaaaagaaaaagcataatgctttggaaaactctgccaagctctacctctctgtcagccgtgctagtaggagacctagctctttggaatacaagctcagggctgcttacctggaatggctactggagggctatctgcagattctcatagagctgtgtctctgcagagctgtgtgatgctttcaaatctgttttatgtgcttaaatacgcttgattttgaatagaactttggcatcaggactaggaaaaggttttgtctctcacaagatagtttgagtaatggcgtacttatgtagcttaaatatagctagaagttcgtaattaacttccaccattgtgaagtttcatgttaaggtcatgaaggtgatggggacgaagctggaagatgtggcattggagggatcgtgggcttcagggtggaaagatcttaccttaaaagggagtgagctaggctgtcccactctgactatttatgccagaaaggaggatggagatggaagctttcactggggagtcataggataggtatctacccgtcctcatgtggtcgcagggctgatattgattatcttaatcatcaagaggatagacggcaggggtggatggaacgtcacgctttttggcattagctagaaaatcgttaattcttttaagccttttcttcccctctgtgcaccaatcctctcttttctcagggcctaaccacttgtggttaccctagatcggtatgttctgtattatgcaacatttccctcttattttggagcctctgtcatttcgttcgttcagataaattaattgaattattgaacacagaccgtgtgctgggccctgacagtagggccgcgagacacagctgccattttgagcctcatggctttgagatgcttaagaaaactgaaaagtcagctgggcgctgcggctcacgcctgtaatcccagcactttggaaggctgcggaggatggatcacttgaggtcaggagtgtgagaccagcctggccaacatggtgaaacctcatctctactgaaaaaaaaaaaaaaaaaaattagccagacgtggtgttgcgtgcttgtagtcccaactactcgagaggctgaggcatgagaattgcttgaacccgtgagacagaggttgcagtgagctgagattgcaccactgcactccatcttgggcgacagaacaagaaagtctcaaacaaaaaaaaaaaaaaaaaaaaaaaaaaagagaactgaaaagttaaagcctattcaggataccaggggaggatggaagggagtacatttgatccatactaggttgagtacatctaggaaggcttcctggaggaaggagctcaggcttctttggccaagattttaaaaacctcaagtgtagaataattcaaagcttgaaaacctgccttgctgtccactgattggatatagcattattactgtacaaggaatgaactgaagctgagttagaggtacaatcctagtgctttggacaaggcaagaattgcattaaaaaaccaggagagaccaagtacttaaaccgtcatcctccttgtctttagggattctgactatgacccatgatccctgaatgtataggttaaccagggcaaagaagacagcggtgacctgcctgacacccgaggcaggactgtaccctctgcctcagtgtctgtgccactctgtgtccctgtttgcttcttagctggctgctcatcaccgggagccagcctggccctgggcagctgcctggtgccgggctcccgaggagagaaggtcatgtgttatgtaagcaccatccatattctgactgttgatcaggggcgacatttaattttttttccattatgtggaataatttaaaagattgtgttacgagtgtcattattatggcaacttctcagtaataaaaacagcatcaattattgaacgttgccttgtgtgtctggggttaagtgaggatggcaggaggcagaggctggggaatgggaggaggcagcacctatgctgggccccaggcaggccacccgccagccccttccctggcaactgcacgtcccaagccccttgggtggctcctcttgagatccctgtacccttttccactggcgtgtaacacttggcttccatgtagctgtagctggcagggggcaccaattagtcccctgaccttggccttggcctttcctcagggagctctgacttgttgacaagcttcaattaaagagactgccttcctcggatcacttgaggtcaggagtttgagaccagcctggccaacatggtgaaaccctgtttctactaaaaatacaaatattagccgggcatggtggcgggcacctgtaatcccagctactgggaagctgagacaggagaatcactttaattagggaggcagaggttgcagtgagctgagatcacaccactgcactccagcctgggcaacagagtgagactctgtctctcaaaaataacaaatacaaaatttaaaaaaacgaagagactgcccttcatgggccagcaacgtgcagggtcatcacagcctgagttgaatgaaacctcagaacaaaatgaacagagctcccccgtcctgaatccgtgcgatagaaggtgtgtgcgggtttggcggaggtcaggtttgcctcccagacgctgacaatcatcacaggttgctttgttttgccatcctcagacacggttgttagtagcaatgactcaccccagtgaggaagagccagaaaggaggtgatgggacttaagacctgttgaaggttggtactgggacctggagcagatgcaccaagctgcttgcagcaaggtttgagggctgcagggtctgcggttctatgacacccaacgtgctttgtagggggggccttagttcgcccttgtagacttaatatgcaggtagctctgtcccttcagtgatgctctggcctgtttctcaggtgacttgtttcttttggggggctctggagacatcagccactaacagttgccctcctcctgcctgggacagcaggccacactgcacagccccaggattttatttcttgaaggagatatacatattgttttgtgcagcctttttggtttaatgtaaggcaagttgcagagctgctttcctacctcctgccccctcacctccttcacattatttcatcatctttctttctttttctctctatttcctctctttttgttctggaaagtgctattcttcttcttcagctcctgcctttctgcatggcctttccaaagtgggtggaagttgctctgtttattccgagccagggattggccccccaccaagaagaagaatcattatgataataattccattctaagaggacaggagtctcaagttccgtggccctgggtggtgggtgggtggtacctcatgcctccattggcccacaccctgctttctgtactgagctgggtttggagtgggtggggatgcgggaagaaggacagggaaagaggatcgggagagggaacaatggagaaggagagggggtgaccttgcagctggagaaagagcccttgtatttgacaccttgacatttgggagctgcaaggtgacacagcacacttgaactattcagagccccagaggcctacctgaagcactgtgtgttgtggagatgggaaagagtgactcactgaccctctgatgggcagcagagcagactgtcggggctgctgtggaaagtcaagaacagcttgcgttggtcacgtgtttgccctaagaaggatcacgctcgcactttgccgaccttgcagggctataaggattgagtgaggtaatatggatagaaaggcattgcagagatgaaaaccaaatcaaaccaaaccaaaccagaaatgtaaacaacaatatcaagtaaagaagagagggatgtagagaaggaatttctccctgagggccttggttcctcatgcacgggccaaggctgtatttattttaggtgtcctggtaaagagctccagtgccctcaacctgcagtccccatgcccagtgagcagatggggctccatggcagcaggggggtgggggatatgcggggcatgtcagcccagcaggttgagagccactttgccacagcaggagcttctgactttcccccaccgccagggacgctatgataaagctagcaaagcgagctggcctctccctccatgctgtttcttgaaattcagagggatgtattcctcttccctatcaataattgagagttggaggaatgttgagaatcctggaaaggtgtctaaaaagagccctgggaggccagtgcctgggatcagaggcatgtggaggttttgccaggtatggagatagcgaaggagctgtccttggcattactccggagatactttctgtagctcccacgctgcatagctgaccctggttgttctgaaggctaaatgttggagggagcacatgggggaagcggggggtacaggcgggagtgggtacaggtggagataacggatctctgtctagcttttaaaagggcagcttctaagtgaagttagggcgggattttcttagtgctcgtctccctgccccgaaaacgccgaaataaagcaatgcaacccacagaatatagattgatagaaaggtgaaaagagatggaggggaagagggagtcagtgtttgagcaaaaacctgaaagtaagggaagaacaaataccatcttcccacaaagacctctcttggcatcttccctaaaggaacactgtctttacagttaataatgggctagtacatgtaaaatgcttggaacatcacccggcacaaaccagaaaccagcctgtattatatgggctaggttctggtttgtgccaggcaatgttttggatggctgtgaattacagatatggcttatttttcttttggcattatcactacctgacactcttattttttagtttatcatgatgggtttattatcatctgtctctcgaaggagaatgtaggattcatgaggacaggagacttggcttttttgaattgccagtacctggagcatctctgatacagagttgacacttaacagaaatctatgggatgcgtgaaggtgagcagggagtcttcctagagaaactagcgaaattcttctctttacagtaaaaagagggtctgtgagtttccagcattacagggagctatggcgtcctgattgatcatcgtaactctttctaaagcaggtatctgaagctcagcactattgacattttgctggctttttttttttttttttgcaacagggtcactctccgttgcccaggctggagtgcagtagtgtgatcttggcccactgcagcctcgccttcctgggcttaagcagtcctcctgccacagcctcccaagtagcttgagactacaggcatgtgccatcatacctggctaattttttttttttttaagaaatggggcctcactatgttgcctaggctggtctcgaactcctgggctcaagtgatcctcccaccttggccttcagaagtgctgggattataggcatgagccactgtgcctggccctggctcattctctgttgtgggggctgtcctatgcattgttgaatatttcatagcatccgtggtctctacccactagagatatcagcagcatgctcagccccccagttatgacattccaaaatgcccagtgctcagtgtcttctgggtgggggggacaaaaatcacataattgaaaacaaatgttctaaatgaaaaccagggtctctgtaagctgcaccttaccagatgggcttcaatcaaatacacagttgcagcttaatgcgtattaatgctgcggcatttcttctgtaatgaaatggttctccttttattccttcccccagttacgcatcaatcacattataaaaagaaagaagacaaaggaaggaaaatcagctgacatactttcatagtgaaacatatcttttattgctgcagtgattcctcggatgtcagcaggagatgtagaattagaaataattaaagcatataaacaaacaaagagctgtgactccatggcccgtggcatatcacacagacaccaggtgtcagcagggttagggaggggggtttctacagagggagagaccggccttcccaaagcctctctgttcccaggattctggccatctgtaggtctaccttaaccgtgatactgcagggcagctgcctttatgtgacagaagaggtggatacccaaaggggactgaaaacttgtacaagggtagctcaaacaggggcaggaggcttttttgtgtgtgtttgtttagttgagacaaagttacatgggggtgttggcacctttattaaaagacattcatagaggacatcgcaaataagtgatgacagtagcgatgtctagacaaatgagaatagatgagaggaagggcatatgtgttcattttcaacatttggttggaagcagataatgaaataaaagatctgaatcattaggttctctttcttaactctcatcatcatgacagtgaaaaaacaagaaggggtgtgtgtgtgtgtgtgtgtgtgtgtgtgtgtgtgtgtcacagcagcctggtatcccttttgtgagattccttcatgaaaggaacttatccaagaaaattgtttcagtattttttaaaataaatggatgcatttatgtgattagattttaagccttctcctctcccgcattagagacacatgttttaaatgaaaacttgtgtttgtttggacctatttctgcttggtgctgtggcctgaaaatgtttgcatcccctcagaattcctatgttgagatcctaactgccacagtgattgtattaggaggtgggacctttgggtgatcattagattatgagggtagaaccttcatgagtgggattaatgccgtaatgaaagacgtgtgaaagagacccattgccccttccatagctagcctgtgccgtcgtgaaccaagaagcaggctctcaccagtcactgactgtgctggtaccttgattggaatttcctgcctccagaaactgtgatacatttctgttgtttaaaagctggccgggtgcagtggcccacacctgtaatcccagcactttgggaggccgaggcaggtggatcacttgaggtcaggagtttgagaccagcctggccaacatggtgaaaccctatctccactaaaaacacaaagattagcccggcgtggtggtgagtgcctgtgatcccagctactcgggaggctgaggcaggagaattgcttgaacacggtggggcagaggttgctgtgagctgagattgcaccactgcactccagcctaggtgacagagtgaaactctgtctcaaaaaaaaaaaaaaaaaaaaaaaaaaaaaaaaagctgcccagtgtatggtattttattttatggcagcctgaacagacagagacacctaggtttcaagaaatatctactattttttgccaattgagatgattctgcctcccttcccttagctttgaggtgtttggatgaaagtggaggtgcttgtgtagttggttgagtctctcctctgccttgttgttcctgttgagatcctgtgcatttgtaagtggtcagcggggttggggcttccagatgatgcctttggaagagaagcttaccaccccattgtggattcatttatttactcccaagcggaacacaagcttcagaagaaccgggactttgtctctttcactaaatatacacagagttggcagttaattaatatttgtcaaataaatgtgaggatcaaacgcacgattttgcctggttaatgcgaaacagtcaaactgatcagtgcttaactagttaggacaaagctgaagaatgacatgattgttttaaggtcatctggagttaactctaaatatgtgtgcattctctgcaactcgcactgcttccttcctttgagatggttttgtttggatctcctcttttgatctcataagacacgtgaagatgtggagatggtgaattccaaataagttgaccgtggttcctgtactgagactgccattcacgtgaacctgccatatggacttcttttgatagatcaggaaccaacttcattgctcatttgcccggcagtgatgatgcttgcagtggggttttgtgtgcgtgcggcgatgacgcttgcagtggggttttgtgtgcgtgcggcgatgacgcttgcagtggggttttgtgtgcgtgcggcgatgacgcttgcagtggggttttgtgtgcgtgcggcgatgacgcttgcagtggggttttgtgtgcgtgcggcgatgacgcttgcagtggggttttgtgtgcgtgcggcgatgacgcttgcagtggggttttgtgtgcgtgcggcgatgacgcttgcagtggggtttggtatgtgtgcggcgatgacgcttgcagtggggttttgtgtgtgtgaggcgatgacgcttgcagtggggttttgtgtgtgtgcggcgatgacgcttgcagtggagttttggtgtttgggtcccaatctttcctggtatatattttccccatttttaggatcagcactgactttttagatcgtgttgtttttttcttttttgtaaccactaaagtcctatacctggaaagtttgtcatcttcctgaagacccagcatggcctggcaactgggttggccggaggactggctcagctgtggcggtcttggtagagactggcaagttgccttggcgcccgtgagccagaagcatctggggaattaacacagtagtggtgctctagtgatgttaccgcttcttgtttcagggtgcagcagaagacccccagacggccctggcactgaacttcggctctacgttgatgaagaagaagtctgatcctgagggtcccgcgctgctcttccctgagagtgaactttccatccggataggtagagctgggcttctttcaggcaagctctttgctgcagacactgagctgagtcaggcaatatggacgtgggggctggtggtaggatgaatagtgagagaaatgccagcactgtcctatccctccgaatcactcaccctactactgcatggagctaaactggcatctggcccagcaccttcatttctcatttgttgtccaaaccacatgcttagtctacagaaggtaacggtaccttttgatcatcttttcgacttggacaggtggacagtggggtcactctgatggtgatggggctgctttgggttagagagtaccagcatttgtccctcagtgtccccctctctgatgaaccctgaatactccttttcatttgtgttgtaatttacatctttttgatttacctggggagactgctgtggatttttttttccccccgagatggagtcttgctctgtcgctcaggctggagtgcagtggcgccatctcagcccactgcaacttccacctttcaggttcaagggattctcctgcctcgacttctcaagtagctgggactacaggtccatgcctggctaattttttgtacttttagtagagatggtgtttcaccaatttggccaggctggtcttgaactcctgacttcaggtgatctgcctgtctcggcttcccaaagtgctggaattacaggcatgagccactgcacctggccaactgtggacgtttctctcactgattcaatttggagccagaaaagctaaagatgctgacagcatagtcatgccttttctctgagttagagggaatgcgtccctcaagaggaatcagacagcaattactgaagctgggtggggagagatgcagagtgggctgttgccctttgagaagttgttgaagatggaatgcaatacattgttttccagcctcggggtcagacgcctctccttcttgcccctcattgtttactaaggacacttggctagtttaagggccagtgagcatgaggagagttggatgcctttttttcccctttggatttatatagaagttccccatttaatcctgcaagaccccggggacgaaaaccatgccaggatgctgtggagaatgggcccctcctcgcttatgtggagtgctctcctgagtgaattaaggaaaaacaaattggtgaccagtcactgtgttcacaggagtgatttcagggagaacagtcctttcccatttccatgctggcattttaattgaatctttttgccatctctatgctaagatgatctctaccccttagggagagcaaatgtacaaaagttaaagctatgctgcagccagggctctggtatctgtgttcagattatgtcctgcatgaattattcatggagaactcaaatgtcttctccatttgggttaatcctcactgccgcccacaacttcctacgtgggatggaaccaggaaataaaaatttcatccaatgtgagcttaaatcatagagggttagaatgacaaatcttcctcctgcctccaatcacacttgtcacttatacccatcagaacgctttaggtatcatcttctctttttactggaacatagtcaaggactgtctggtgacacagtagagcactgtattcaagtaaaacttgtcatttttcatgctgagttctgaacacaaggccacaggccttttctgtctattttcactaacatgactgcgctgggctcctgggttcccctttgaagaccttatgatcctgattgtgagtcttctctagggtataaaagttggccagactttatctgatttttctatcttcagggccatgggctggtggggtcgggggaaggtggtacagtgaattcagtgcctgtcagtcaaaaaaggtaaacattggcaagcccttggatggacattttccaatggagtcacagccgggacggggtcaggggagttggctctgcaggacagcctctgggtactgctgggtcttcttggccaacccagagttaagtggtagcggagtgaggtgtgtgggagggagatgtaacccagtccccctgctcaagaacactaggcacagcctgttaccgggttaccaagcaacccttgtaaccgttgctagctgttcagctgcaaaagcaaatgcagctcttggggaagcacagagatgatctcccagccatctcttgaaaggtcgctgttcttctcacctggacacacctgtgggtgtcaggcacctgaggactccaaaactgataatggctatttgataactggcttcatgcagatggagcctgaatatgcattatttgtaccatctggatttgcccttaagcttgctgtaaatggagcaaggagatgggtttaatgggtatttagtgaataacattagcctttaaaacatcatattggtgctgctgttgtaatgtcccataattggttcgaccagaggaagaactagaaaggccacactctgggagaggagttcagctgctctgaggagcagcagcagtgacggcagcctgagctgggaaaagcatttatgagatactttcctatttaggtcttagtgtgcaatgttttctgatatcagctattctcaaggctggggatattttgggacttaggtaggccagaagaagttcctttaaatctatcagtctctctttctttcattctcatccatccatccatccatccatccatccatccatctccaattagctttcttttaattaaaaatataatgacatcggttaaaagtaatttttcttccaccttcaaatcccttatggtctagtccccccatctcagacacaaacatcgtttctagtttcttgtgcatcctttcagaattatcatgtttctataatcacacctgacccattgttctgtatcatatgtttttgcacttaacagtacccttgggtgtttttttcctgaggtgctcatagatccatcccattcttgttattggccatgatgctacctaattagccctctctggatgcccatgaggttaattctgatgctttgctattgcaaagaatgtggcacagagcattttagtatctacatctctgtggacagttatattgttgagtaaattctagaaatgaggccaggagttctttatgtctgggctccatgcatgagtaccaaaggactcacgagcctcttgcattttatgcaaagtctgtgtgtgtgtgtatgtgtgtgtgtgtgtttgaaaggcaagggactataagttatatttcatcacaccccagatggctgcatacacccagtgttgttcaagatcttgggcttctctgtctcagttgtccccactcagctgtcaagttgagttttttttcttttcttcatagcatcctctgtaggctaaagagaaggtagttaaaagtgaatcagttgattctcttactaattgttaatttccccatttaaatatgcagtatgttctgggggaggaagttgaaatgttaccaagcatcagtgggcttgctgcccgatgcacacagaggccaataccgtggcactggcttttgagagaagaacagctttattgggagtcaagtcaactggcagggagacaggagggaatgcccaaatctgtctccctgagctgggggttgggttgggttttataagcataagtaatgaggtgtgatctgattggatcttgcaatgaggtgacgttaggaggcattatctgattggatcctgtcatggggtgatgccagagttcaatctcattggatcctggatcctgccatgtggtgtctgcttcttaattcagtcccactcctctgtcccagcacttaggttccccctgtggttgtacacttggttcatctgagcatgcttaggttacatgacctgagggtccatggcaactgaaaagcagctcacagctttgttacataaaagttgaaccagattggtctgatgcagttatagatactcttcactagtgaactttgtcatcactattattattggtgaatttcatcggtctattagcataggagaattgcctatcattttgtgtatctgtggaaagaccaggagaaggcattattttctggtagagcaagaggtggatttactttaggagattattcagttgtgaggtgccatctgtgcattttctgtaaatctttctgaagtgttgggggaaaaagtgaatgggtactcaagtcagggaagcgtaagccgtacgacactcaggtaagaaacagatttttctcttaatgccctattcttataggaaaattcacttggcaataagaattctgcctacacagccttgcagatctgatgcaattatcaaagccatgttttgcaaaatgaaactgatgccaagctcgtgtcaagtggattatagattgtagaactgcagtcactggccattagctgagtgtctttgttttctactctaaaatcttgaattccttattggttctgcttctgatgtgctgcgtggcactcttcctgtggaaatggtcttgcaggagatgattttcctttctagctcaagcttctcaagtgcccaaccccggatcagcaaccccagggcttgtcctgttcgggaacacgatggagttcagttgctctttgatccccttcttccacctcaagacactctctcttctccaggtatcacagtgtcctctttcagtcttttatttggaatcatccctttctcccattttccctgttaaacatcctcccttaggtgcctttggaaaaagatttgatgaactgaagaacagggaggtattggcccattgacttcatgttttactactgcttacgtgtttgtctgttgactgggaacggtttctctagttcaacaatgaacccaataggtgggttttcacactggctaggctttggaggattgcatttttttagacataatgtgtggggcttagggagggcagccaggcagtgtgggatgcaatctcttctctgaagcagctggttctcgctataagctcagccacgtacattccactcccaagtttccttggcgctaaaactgcttggaatagcctaagcctacggaagcaaagatgacttatttaaacagcttcatggttcctattacctttctttttctgtatcttctaactttccatgtcttcctgaaggacatgttccttttgtcactgatatttccagtcaaatttagtgatcttaaatttgatcgagagtgaggtgtaactcctaggagaaattctgagtgtttataactaggtttccgaaataatgtgtttggggaagtctctgagatgttattaattttgactttttattggtaagatctctaaaaatgaaagagtattttcacaacagttcatgtagatataatttcttggcatgtggttttggcaatcagagttttatttatttatttttttccctgtacctgcttggttaggggagactttaaaatcttgtcctggcccaattgagaggagttatctaggaactgaaaaataggtaggccctggctgctacctcctttctgggctaagacccgtaacctgggtttcttcatttgaagtgtgagaatgcacgtgtaatcccagcactttgggaggccgaggcaggtggatcacctcaggtcaggagttcgagaccagcctggccaacatggtgaaacccctgtctctactaaaaaaaaaataataataatacaaaaattagccaggcgtggtggcacatgcctgtaatcatagctacttgggaggctgaggcaggagaatcacttgaacccaggaggcagaggctgcagtgagctgagattgtgccactgcactccagcctgggcgacagagtgagactctgtctcagtaaataaataaataaataaataaataaataaatagaatgaagcaaaccagcgttaaaatgtgccgcacaaaaatattttgcaggagggcaaagggctcaataataataactgccagaagctttttcgcatctggatattaaataaacaatgcagagataccttcttggacagggatctgtgcaggcagcatgagaccgttagtgtcctagctcatgggaacattatcagggtgggtacgctttatagagtcttttgcttctgaagagtgttctatttggcctaatatggagcactcaaatagcactttatctgcttctgccttttaaaaaaaaaaaaaacacagtcctgattttctaagccaggcagtaatttcagagcaaattttcatgtggcatgaggctagaggcaatttggcacttacatgtgtttgctagggctgctgtagcaaaataccacaaaccgggtggcttaaactgcagaaatttatttttttcacagttctggaggctggaagtccaagactaatagttggcaagattggtcggtttcttctgaggcctttctccttggctagtagatggctgtcgtctccctgtggcttcacatggtctgtctttttatcgagacagagtctcactgtgtcacccaggctggagtgcagtggtgcgatcatggctcactgtagcctcaacctcctgggctcaagctatcctctcacctcagcccccggagtagctgggactacaggagtgcgccaccacacctggctaatttttgtatttttttgtagagatggcattttgccgtgttgcccaggctggtcttgaactcctgggctcaagctatccacccacctcggcctcccaaagcgtggtctttcctctgtgcctgtcggtgtcccaatctccttttcttataaggacaccagtcatattggattagggcccactctaatgacctcattttaaccttattaacactttaaaaatcctatctcccttacagttacattcttaggtactgggcgttaggacttcaacatagaaatttgaagcgggggacgtgattcaggccatagttgcgctgaacaattttttgagaagttgtcttccagagatagtagttagcttcaaggaattccaggtgtcaggagaaaggagttctctttgtttctgccttctagattctctcactgcatggctgcctccttacgttagcctcatacctgcatgggctgggaatgcagactatgcaggatgaaaaaagagtagaatgaagttgaaaagttactcaaagagtgcagcgagaaagaaagtcagggccgggcgcagtggctcacgcctgtaatcccagcacttcgggaggccgaggcaggtggaccacctaaggtcaggagttcgagaccagcctggtcaacatggtgaaaccccgtctctactaaaaatgcaaaaattagccgagcgtgttggcacatgcctgtaatcccagctacgtgggaggctaaggcaggagaatcacttgaacctgggaggtagaggttacagtgagctgagaccacgccattgcactccagcctgggcgacaagagcaaaactccgtctcaaaaaaaaaaaaaaaagtcagatggctctaagtctgatcttttaagactgctggcaggtgtacatctatgctatcatgaagttaaagggatggcaccgttaaagggatgaccgcttccactgtcacctgaaacagtcggctcagttaacttctggggaaataattgcaatacacatctgaatgtgtagaagttctctcctgactgtgtaagtttcctgttgctgtcacaacaaagtacatattgagcatctcaaatctgaaaatccaagatctgaaatgctcccaaatccaaaaccttttgaacgctgacatgatgctcaaaggaaatgctccttggaacattttggatttcacattttcagatttgggatgctcaattggtaaatgatgccagtaaaataatgcaaatattccaaaatctgaaaaatctgaaacactctggtcccttcagagaagggatggttatcttgtactatacagagctgcttaaaacagcagaaacgtattcccttacagttttggaggccggaagtctgagatcaaggtgtcagcagggccacactctctcgaaaattctagggaaattttctaacttcttttggcccccagcgtttcctggcttgtagctgcatcaattcaatctctgcccacattgtgaccttcgtccctgtgtgtgtctgtgaagtgtgtctatgtccaaaactccgtatcctttgtctcataaagacaccagtcattggatttagggctcacttaatcctgtatgactgcttcttaactaattacatctgcaaagacccaatttctaggtaaggtcatattcttttttttttttttcgagacggaaccttactctgtcaccaggctggagtgcagtggtgcaatctcagctcactgcaacctccgcctcccgggttcaagcagttctcctgcctcagcctcctgagtagctggaaacaggtgtacgccactacccccagctaatttttgtatttttagtaaagatggggtttcaccatgttggccaggctggtttcgaactcctgacctcaggtgacccacccacctcggcctcccggagtgctgggattataggcgtgagccaccgcgccctgcctaggtaaggtcatattctgaggttctggctagacatgaattttggcgggggacagtattcagcactgtacattgaccaaccccatactctgatcactccgtgaccagacttcaggagcttggttcgtctgaggcgccatgtttgtcttatacaaaggaggaagatggataaaatgagaggaagcaagaggacgagtcctggcagtaataaaagtccacttaattcatctggagcccttagagcagctgctggggtgctttgtttgaaatattcattaagtatctactgaggagttagggatacagtctccttatgcaaaatttaacatttgcttggttagcaggttctatcatatttataagcattctgacacattcatttcagctcataagtctattaaactggaaaatgtgtttttaatgtgctttagggaaacagaaagaacagacaagtggcttgggtagcagcagccttcattaggatattcctgccaggcttttatttgtcgaagatttaagagtctgtgcctgaagccacacagcctgggcgcttttcatattattattttgctttgttttgcagcagttatttttgcagaagctccttctggggatgcaacagggtggcacgttggttttgagtgcttgggatctttaggagtcctttgcatttattcactcccatgtcaaccttttgcctgttactaaaagtgcctaataaggaacagaaggctggatttgagcctgtgaagctgggaggaaattgacagcagttactggaatagtcagccttcgagaaggaaagggttaggaggaagatgtggaactgggctttgaacctgcgtgaagtacagaacagcgctaacctttgggatggggcccatgtaacacttccctaaagaaaggaatcagggatatgctccactcgacctgcatttgctttttcctgttcaaccctccgtctcctttctgggtggcaggtatgctagcattctgttctgctttcttctctctggtgtattttccctcctgagtccagagaaagaaaatagctctgcatatctgaaaattaaatcagttgtctcaaggaaacatgattttcagagttgcaacgtgattttgagggtcgtaacattttgaagctggatgttcagggatttgccagcaactcccagcttaggtctctgaaacagaattcactctctctgtctgccaacttcttgattacacaaactcaccatgagcttgctgggaggcagaggcattccgggaggatggcagaggagagaagtgcatgatatggtctcttacagctcttagatgtggtgagccagaagtctctgctctattcccccaggagaccaggctcacctagcggtttctgccttggtgaggtttgctcaagtcaatcttagtgaattggttgtgccctttccagtagggaaggccctgtcgtacacataaaaccaggagacacgtgccttcaaggagattcagccctcctggggaaacaaatatgaggtcgttttgtatggtccagcatgaaagctatataaaccactagcaatcatataagtgggtcccaccactgtgctggccttagtgggccagctttcctaactcctctgtagcgcaaatcatgcctttactgccttacagaccttctgaggccagctggccagtgagatttattatttatttatttattttttgtttgtttgtttagacggactctctctctctgttgcccagactgaagtgcagtggcgcaatctcggctcactgcaacctccgcctcccaggttcaagcgattctcctgcctcagtctccggagtagctgggattacaggcatgcgctaccatgcccagctaatttttgtactttttttagtagataccagggaggggggtggtttcaccatgttggccaggctggtcttgaactcctgagctcaggcgatccacccgcctcggcctcccaaagtgctgggattacaggcgtgagccaatgtatctgactgccagtgagattttattcaaggtatgaggatgagcaaatatagtaaataacaaagagagaaggatatcagctgaccatggcaaaggcagccctcagagcccactggcgcttgctaacctcttgggaccctctaccgcaagggtccccaacccctgggcagcagaccagtatgggtctgtggcctgttaggaactgggctatgcagtgggaggtgagtggtgagcaagtgagcattactgcctgagctctgagtccagccagatcaacagcagcattagattctcacaggagcgagaaccctgttgtgaacggcacacgtgagggatctaggtcgcgccttccttatgagaatctaatgtctgatgatcggaggtggaacggtttcatcctgaaaccaccccctaccccccgcctcctatgtgtagaaaaattatcttccataaaaccagtccctggtgccaaaaaggttgggaactgctgttctccagggagagtccctgtctggctccagggctaggttcttacttagttccatgtctttagaggtagagtttgaggtttggtttttctcaggtcttcagatctgcctgcccagagagaggtcatttccaccaccttggataaagaaagtgaggcccggccaagacttgccttccaaatttccattgcctttcctaggatctcctgtttgttccccgggtaattgccaggggaatttttttttttttttttttttttttttttttactttttttcagatgagatactgccataacctgtagttataccctgtggtctcaccaaaacaaggatgccaggattcattagttcattagtataagccacactgcacattgggatcatctcggaaaatgtgcaacttggtctcaaaaaccctgtgaaatacaaattgtgacagtccaagctccctggtcatttcttttttgtttgcttgttttggagatagcatctcactctgtcgcccaggctggaatgcagtgacgtgatctcggctcaccacaacgtctgcctcctgggttcaaatgatttccgtgcctcagtttcctatgtagctgggattacaggcgaataccaccacactcagctgatttttgtatttttcagtagggacagggtttcgccatgttggccaggctggtctcaaactccttagctcaagcgatccccctgccttggcctcccaaagtgctgggattataggtgtgagccactgtgcccagccttcatggccatttcaagaattgctgaggtgatagccaggcacagtggctcatgcctgtaatcccagcactttgggaggccaaggcagggggatcgcttgagctaaggagtttgagaccagcctggccaccatggcgaaaccccgcccctactggaacttacaaacacacagacgagcgtggcggccttcgcacggaatcacagccacataggaaaccgaggcacggaaatatcggaacgaggagnnnnnnnnnnnnnnnnnnnncttttcatgggcgtcctgggcccgtggggccgcttgctctggggggcgggagggcttgggtttcaactcgggtcctctgtgcacagccttcttgaccctctctagaattgatgatgtgatgcccaggcacagtggctcatgcctgtaatcccagcactttgggaggctgaggcgggtggatcacgaggtcaggagttcaagaccagcctggccaacatggtgaaaccccgtgtctacgaaaatacaaaaaaaattagctgggcatggtggcgcgtgcctgtaatcccagctactcaggaggctgaggcaggagaattgcttgaaccgggacccgggaggtagaggtagcagtgagccaagatcgtgccactgcactccagcctgggctgcagagcgagactctgtctcaaaaagaattgctcagttgataaaggacatgaatatttttaaaaatttattctttaaattaatatatcataaagctcattcttttggagtacagttccacgagtttttaagaaatgcacagatctgtaaccatcaccataggagagttccatcacctccccatattcccttgagcagcctcttggccccttgtagttaaaccctaccctcaacctatccctgtttcccttttgtttaacctctggtgacctctgagctgttctctgcccctatatttttgcctcttccagaatgtcacctaaatggactcatgcagtatgtagccttttggatctaacttctttctacttggcgtcatgcatttcagagaacttcattatgttgcaagtgtcaacagcgtgttcctttttaaggctgagtagcattccatcgtgtggatacaccacaatttgtttactttcaccagttgaaggacatttgtgttgtttcctgatttttcagcaattatgaatgaaacgtctatcaatattggcatacaggcttttgtgtaaacatatgtttacatttctcctggctaaatacccgggagtgagatggctgggtcatgtgataggaaacctccaaaccgttttctaaagcggataagccgttcttcagtcccagcagagttctagttgctctgcaccctcactagcccttggcctcatcacttttttgttttgttttgtttttaaaacttgagccattctaatgagtgtagtagtggtctctggtgactttcatttgtatttccctaatgactaatgatgtcgagcatcttttcatgtgctcatttgccatctgtacatcttctttggtgtcaaaatcttttgcttgttttttaatccatttgtttaattatggtagagttttgagaggctttttattttgagatggagtgtggctctgttgcccaggctggagtgcagtggcgcaatctcggctcacagcaacctccgcgtcccaggttcaagcaattctcctgcctcagccacccgagtagctgggactacaggcacacgccaccctgcctggctaatttttgtatttctagtagagacggggtttcaccatattggtcaggctggtcttgaactcctgacctcaggtgatccacttgcctcagcctcccaaagtgctggaactacaagtgtgagccactgtgcccggccccgagagttctttttctgtattctgcatagaggacctttgtcagatatgtgatttgcatttctttttctcccagtccctggcttgcctttccctcttcttaacagtgcctttggagatcgaaagtttttaatcttgatgaactgccaatttatcagtttttctttttttttgttttatgaattgtgcttttggtgttacgtctaagaattttttgcataacttaagtttgcaaaggttttctcctattttttttttctaaaagttttacgttttacatttaagtctactatctatttgaagtttcaaaaaaatatggtgtcaggtagagttcaaggttgagtttttttttttcatatggatgttaaattgtcccagcagcatttattgaaaagactgtattttctccattgaattatccttttgcttttgtaaaaagttcgtgagccatatttgtttggttctgtttttggacccttcattctgattcattggtttttgtgcgtatcctttctcctttcacattttagaatcagcttgccaatatctacaaaaaatcctaatggcaccaggcgtggtggctcacgcctgtaatcccagcactttgggaggctgagtcgggtggatcgtttgaggtcaggagtttgagaccagcctggccaacatggtgaaaccccatctttactaaaaatacaaaacttagctgggtttggtggtgcgcgcctgtaatcccagctacttaggaggctgaggctagataatcgcttgaacccgggaggcggaggttgcagtgagcagagattgcacccctgcactctggcttgggcgacaaagcaagactccatctcagaaaaacaaatcccaatgggattttgactggggttgcactgaatccataaaccaatttggaggaaattgacatcttaataaatatagagttttccattttatgaacatggtatattctccaaagtctttgatttcctttatcagtgttttgtggtcttcatcatacatactctaccgttggttagatttatacctctaagtgttttatggtac

SEQ ID NO: 3039 - DNA, 402 bp, Homo sapiens
atgggatgtagggccgtgcttacgtcacatcagacctgttgccctcttggaatcatcaccatcttcattgtcatcgtccttgtcctggtcattgttctgctcagtgagactctgaaaccactcttgtggaaaattggaatggaggctggctgctcatcaccgggagccagcctggccctgggcagctgcctggtgccgggctcccgaggagagaaggtcatgtgttatggtgcagcagaagacccccagacggccctggcactgaacttcggctctacgttgatgaagaagaagtctgatcctgagggtcccgcgctgctcttccctgagagtgaactttccatccggataggtgcctttggaaaaagatttgatgaactgaagaacagggaggtattggcc

SEQ ID NO: 3040 - protein, 132 aa, Homo sapiens
MGCRAVLTSHQTCCPLGIITIFIVIVLVLVIVLLSETLKPLLWKIGMEAGCSSPGASLALGSCLVPGSRGEKVMCYGAAEDPQTALNFGSTLMKKKSDPEGPALLFPESELSIRIGAFGKRFDELKNREVLA

SEQ ID NO: 3041 - DNA, 376 bp, Homo sapiens
acaaaggtgaggaaaaggaagatgccaaccatcagctccttacggttatacctggtgtcttcagcgatggccctgtcatgttggcagcttcctattggtctcttctggccccagcagttgagatggccacgtcctctgggggcttcggtgcctttgccttcttccctgtggctgttggcttcacccttggagcggcttttgtctacttggctgacctcctgatgcctcacttgggtgcagcagaagacccccagacggccctggcactgaacttcggctctacgttgatgaagaagaagtctgatcctgagggtcccgcgctgctcttccctgagagtgaactttccatccggataggtagagctgggcttctttc

SEQ ID NO: 3042 - protein, 64 aa, Homo sapiens
MPTISSLRLYLVSSAMALSCWQLPIGLFWPQQLRWPRPLGASVPLPSSLWLLDLERLLSTWLTS

SEQ ID NO: 3043 - DNA, 161005 bp, Homo sapiens
  misc_feature (1)...(161005): n = A, C, G, or T/U
agtggttatgagcacattggaataaaggatctgggtccaggttctggctgtgccacctgcgagcttagattggacacttgatatccctaaacttcagctccatcctctgcagagccgggccacgatggtgtgcatcccgtgagttagtggggtattagacgaggtagtgcatgtcaagtgcctggcttggtagatgaggctgctggtattagaatgtgtgcaccacagtcaattcgccctcctcaaccctttacttggccctgtcttccattattcccccaagcaaatagagcctttccttgccagtaccccatcttttaaattagccctcatctaatgctaccttcttcttgcctgatcatcttcatggaagatggaaggaggaggaaggagagacactcaagtgcctttacctgccagtagttactctattccttatcttagtcagtgttcctacaaccccatttcacagatgtggacactgagccctgcagaggctccgtattgcctccagcagtagaatagatgggttggcattcctcagggacatggctactattatttattattattaacactagcatagcctcttgagctgctttggatggcgggtatttgtgcacaagtcttacatcctcagcaagatggtaaaccccttgtaggtagattcttgttttgtattaggcacattgaacatggaacaatgtgtgagatacacgctcctcacacacaggcactttcaagctacaacactgttgcaggaatcacgaagttcaagctctgactccctcaggaaagttcagggacggccccatcctagggacagctcccttctgacacatgctgtacacatcacttctttggcacttgccaccttgtattgcattctcggtcatcatttcgtctgtgtgttatgcccacaggtaactttgaaaatcagggctgggttgtcacatcttcttgcatacttagcacttcacagtatcgagcatgtcagtgaaacccctgcgtggtggtgggtgcctgtaatcccagctactcaggaggctgaggtgggagaattgcacttagtcagtgctaagtcagcatcgaatttgaggtggtgatgctgctggatttgtgtgtgtgtggtttgctctgggcacagcgtgccccctccagggcctaggtctcgttttttcagctgcctgttgaaacgtgctttctgctcatgattctgtcttccctttcccctctgttctcctttgccactcgcccttcccctcacctggcatgccctgggctgtgcctgcaggggccaagctcagactgctgtgtggttgatcctggaagcccagctccacggggagggtgtatttccaagaatctgtagcagtggtcttgggaataggagcgcagcaaaaagccctccttctcatgcatatagagtgaccccaccagcagaagccaggaaaaacctactggctggcttccctgggtgctgttgatgggagtgtgtggatttgaagcctgtcgctaccaagaggacgatgagagaagcctcgcttgataaaggagatgtgacttcccggctcttctgtctcgtgtgttggaaaataggttttctgttttaccagcagcctgctgagccagtctaaggagtttcctgctgcctgaggctcagcccagggcttcatcctcataactcagagtatgtgagctgcagtcctagcaaatggaggctggttggcctgctgctctgaatttgtatttcattatcttagcattgcactgtataaaaattcttgcaattttgacctctttgttgtagtcattttctatatactatttcttctccccccagtattcttccctctttcatttgttatttgctcatttgcttattcatccaataaatatctcttgagcccctgttacataccaaatggtgtgctattcaccagggatatagcttataatagtccttgtcttcctgaagccttggatttagaaagagagactgatagtaccctgcagattacacacataattggttaattgcctctgtgacaagtagtaagaagccgaggcatggtgtgctatgaccactgagccacctcacagggaattttgaactcttctgttgggaggatgggtggttttaataatatgtccagaaatctgttaatatcatcccttcaagaaatagagcaatagagcctaattctccttctccagtgtgtgctagacttctcagtggttcacttctaacaaataggaaaaagcaaaagtgatggtgtgcgaccttagagttgaggtcaagtgaagtctctgtggcttccatcttggttgctctgttgtgctatcactgtcttgctctcttgcactctctctctctctttctctgtcatgtcttgctctgtgggaagccagctgccatgttatcagcagccctgtgtctttaaggcaaacctatgatgccaagggactgaaactccaagccagcagctgcacaggtgagcttggaagtggatccttcagccccactcaagccttctgatgacaacagcccaggctactgtcatgactgaagcctcatgacagaccccgagccagggccatccagctaagcccctcctggattctgagtctcagagactgagaccatacaggattattggtatgagccaccaaatttgcagggaagatgttatacagcagtagattgttaatacagggcatgagggagataaattatttgatactctgcgtacctgaaaatgttatcataacttcactttgggctgataacttgactgtggatagaatcttctttcacagtcggaggtcctctgccctcagaattctggtggcattcatccctcatatccagtgtggatgctaatgtcgtggatgttgacaggtcttgtgcctttctttccccatccctgacccacagaaacagtgtgagatagtcaatgtgtgttgttttgagctgctaaatgttgggtaccttgttatacagcaaaagataattaattcagaggggcagagaggaggcacttgctggaggaaatgaaagtcaccctgggacttgaaggaagagaataaattggccaggtgaagagatgggaagagggaggcgagtgtcccaggctaagggcatagcacacacaaagccctgcacaaggaaggtgctaatgagatgcaggaaaagaagggaggactggacagtttgagtgtagagaaggagggagcagggagtggcttggacacagctggggatataggcagaggacaggacaccggggccttggggaccatgataagcactttgcacttcatctttagagtgatgagaagaaacgaaggcttcagtcaggggaacaatattatcagattttctcactcaattagaaaaatgattggctgggatccaacagaaggattgtggagtcagtgtgagtcctcaccgcgctcgctggcttggtgggggctggttgcctctgctgtattctccaaggctttgctgccttttctccagcaagctcctttcttatgatgggtgatttgtactcatggactgtgtgatggtgatgagcaggagcttctgaatttcctttctaggtgagagcaggtgctgggacccattgtgagctgtgtacagtgactgttcccaggcgttcccatcagctccaaggtgcaaaatctcattttctcaggatgggtaaagcttctctcaggagaatgccacaaacctcaggcagagcctgatgctaacaatggcctagattttgaaggctgttattacagttagaggcaggactatgggtccctcaagctttctttcaacctgaagactctttgttcttctctgtatactggccggtgtggtatcagctgtgtcatttgtaacccagccttgctgtgaagggggagaaaggatacaggagtcaggttctgcaactgccaaggtacactcccctagccttaatcttagagaagcagaatttgttgatcattgttattcatttcctttctgggcactgtattccattaattcagatagaacgatgtgcacatcaagaggcattttccagactgggtgtggcagctcacgcctgtaatcccaacactttgggaggctgaggcaggaatattgcttgaggccaggagtttgagaccagcctgggtaacatagcgagaccccatctctgtgtttttaaaaaaaaattaaaaaaagaagcatttccctcttaaaagctagaaatctggtacccttagtccttttcctccctgtctatttctctattccacacaatccaatctgccatcacatgttatacattgtatgaaagaaagaaaagctctccctttcaaacataaacaccttagggtaccaggcaattcatgtaaacacagcaagtcagctaataaaagacagtagggaggggtggggtctgtggctaactggagaatgctttctcagctctaggacttaagatgtgccagccaaaacctgtctgtcacccttgttgcatggcaccctgggaatctgtgaccctgcctctcttctttgatcatcctgcttctctgtctcagggtgtacaatagcctttgtctggtgctttgccataagcccatcctcattctagcttttcccacaccatcccccagaattatcttcctaaaatggcaaatctgctcctcactccctgacttacaggcctctgttgactgaccagagcctccaggatgcagtccaaacaccttgggaatgaatataaagccttttgtaatttgcccgaaatgctctgtttgtatttttgtccctcgcccccaccccgccggcagtagggagcatcctgagccttgttttgatgttatctttgtgtgtctggtcctaacatagtctctgcaaaaagagtcagtgccatatgctagtgaatgaatgtgtttgtgcatgctgcgcacaatgggcagtgtttatgtccttattaatttccagtggggtgtgtggaggagctggtgaaggagatgcaacccccatataaaggagcatttaagtcagtgggggaagacctctgaccttaacctcccacagcctccgtgacctggcctgcatattgacccaggagggatcatggcagttcttacagaggtgtgcagtgtgccttgattaaagacagtgggagacaggatagaactgtgatttaaaactagagcatggactctggagcacaggagcttgggttcaaatgctagctctatcacctcctctctcatactttctaaggcctgaaatttcatgtgcttccttgacacctttgagcctcacaaaacctcaaagacttagctgcgagttccctggctctggctagatttcttcccacccagtaggaaaggctccccacctaggtagttccacatcaaccagaccaactgcacccagcccagtcctcaactttctgggttctacctcactgcctgccagcagaattcttcaaacaagccagccacatcctcctgcgggaactaagggtcacctcaccctcttgtcattacagaacctgccttgcacagccccttctggttcactgtgtgcaacctttgagtggccccacatggcctgcgatgttctcctcttctgagttatgtcactagtctgtgcagcattgcttgtcatatgttcagctgtctcacactattttcatactatttaaggtgagggatgtctccctcaccactgcagtgactaaagggggtcagaacaacttgtgaaaatgacctaaccctctgtgcctcgattttcttctctgagaaatgagaagttatcatactacatgtgttaatccattctcatgccactataaagaactgcccgagactgggtaatttataaaggaaagaggtttaactgactcacagatctgcagggttggggaggcctcaggaaacttacaatcatggtggaaggggaagccaacatgtccttcttcgcatggcagcaggagagagaagtgccgagcaaaagggggaaaagccccttataaaaccatcagatcttgtgagaactcacttgctatcatgagaacagcatggggggactgtctccatgatctaatcacctctcacgagctccctcccccaacacatgaggattacaattcaagatgagatttgggtggggacacagagccacactatatcagtacctttatcacaggtttgccatgagcattgaatgaaataatgtctataaagacttaaaacagtgcctacacacaggaagcactgtggaagtatttgtgattgcaatttgctatttttgtcttagtgcagtggctgtcaaactttttcctttgtttgtttgttttgagacagagtttctttctgtcacccagtctggagtgcagtgacactatctcagctcactgcaatctctgcctcccaggttcaagcgattctcctgcctcagcctcctgagtagctgggacatggtgtgcaccaccacgctcggctaatttttgtatttttgtagagacagggttttaccatgttggccaggctggtctcaaactcccaacctcaagcaatctgcccacctcggcctcccgaagtgttgggaatccaggcatgagccactgtgcccagccgggttaacatgcatcagaatcacctggagaactttgctgtgtcccaccctgagaatgtctaatttagtaggtctgaaatgggacctgagaattagtatttctaagtctctaggcaatgccgatgctgctgatctgaggcctccactttgagaaccactggattcgtgtaaatatctgcaggtgagggagctggggatttgtcttcaacgtggctaagttgctacatggattggcctcaccatttgccttgaagctttccttcttccttctgctcagggtcccactaactgtacatgtaattgtgatgcaaattcaagaaattcattgtttttggctgggtgtggtggcttacacctgtaatcccagcactttgggaggccgaggcaggcggatcacttgaggtcaagagtttgagaccagcctggccaacatggtgagaccccatctctactaaaaaatacaaaaattagctgggtgtggtggtacatgcctgtaatcccagctactcaggaggctgaggcaggagaatcgcttgaacccaggaggcagaggttgcagtgagccatgatcgtaccactgcactccagcctgggcgacaaagcaaggctctgtctcaaaaaaaaaaaagagagagagagagagaaattcattgttttctttgaaagatggattctcttatcttctcattccttggagaagcagcgcttcaggtctgtccatggtgtgaagaatatcctggccagagaaaaccaccatctggtgtctttgtattccagaagggtgcggttttgttgttcagatgagcactgcctacttcctcaccatgttctgtttatccaggtcacatggtttgtatttcacatgtttgtttgtgggcaaccaggatggattctttctcacaaccagaaaccccctgggatgaccccccagcctggctgggggtatgtaccagtgtgctctcctgaggacacaggaaattgaacactaaatgatgccccctatgctagtctttcgaaagacaaaaataaatggataatctgcccacccggcttgttatcctcagctcccctataatgtggcagcagataagtagcctcccttgcatacagtgctgctacttcatgtctttgaatcctgcaggattgagtggatttgagctttcatagcattctggcatccctgatttccctcagctcaatctttggcactccacgagaagtcagaaaaacccagttaaattccctgcccaagcatctccacgtttgccagaccagacatggaaggtgaaattgggccatgttcctgaattattcattcagatggcaggacacccatacgtacccacagatctttctcctatcttcagtaaggcctgactctcggcctggatattgatgcctggatttcatccgccccagggaacgaggttctatataataaagaaccctcataatgaaaaggttctttcttataactaattcagaggcttcagaggaagtgtggcctttaatcaggttgttgttctatgtttccaaatatcagcctgccctgcacagtgggtgaccaataagtgtttgctgaagtgaactgaagggtggaatcagagctgtggctattatcttccgagttataggcctgttcccagggatggttcttacctgggcgacagtttacctgctttcacagccaattacaaaaccattcttcatttcgtgtgccctttgccctaacaagtacttctttgacttgaattttgaggtggcctccattgttcttctccatgatagcacgtcacagtgcatgtgctaagttaacaaatatatcgagattgtttggccacagggtaaatattacactgcagtcaaagcctttgggaggcctaggcgggcggatcacgaggtcaggagtttgagaccagcctggccaacgtgttgaaaccccgcctctgctaaaaacacagaaattagccggacatggtggcgtgcgcgtgtagtctcagctgctctggaggctgacgcaggagaatcgcttggacccgggaggcagaggttgcagtgagctgagattgcgccactgcattccaatctggcgatggaatgagactccatctcaaaaaaaaaaaaagcctttgtcctctctggtaactgggagaaaaatgaaggcctctaagaatctgatgctcaaatgagggtcataacataacattcatgcagacaaaagaaaacatgctataatgaaatcactggccttgccacagtacatgtcacctgtggtcacgcttcagttgcatggtttctgacagtcacctccttttactccatccatgcctcatactctccactgaccagtcttaatacacagcatctgatcccagcctttggggttggggcccctgcctctagtattgtccaggacttaggtttagttgggagagcatcacctcttaaatgtataccattggctcatgtcatctccatcagtttttgggtggagccccggtgtttggccattgtaacgaggggccctcctgcctcccaaaattatgtgtgtattattcttatattcccttttctggagacaagttcttgatcatgcctaaccaaaaggtgggttttgaggaagcagtacagcaaagacagttggaaaattgaaggaaagtacagcctgggactgctgcctggtcgtgtgacattggtcgacttccttgacctttgttgccctcttctctaagaaatggttaaacacagcttaatcttcagggaccctctagatgctaatgtcatgtcattctcatatgagaaagatcatcagagaaaactaataatgcatggaaacaaggggaaatgttgaacccagctgggacaggcagtgtcagagggctgttaggagagctggatccagcatggatgcatagcagagaggccagatgaagaaatttctggtcgaggggtccaggatgtatggagtaaatacctgggcctaaccagtggggaaaggattggcctaggacccaggggatgaaattagaggctacctgacttattaaatgctgggaagcaatgattaataaataaaagtttacttgaactgtgcctacttgaggtgttgaggattcagtggttaataaaacatgttgaccctgccttcttggggatttacagtccagggaggagaaggacattcatgaaagaattgtacaaataaatgcaaatcttcaaccctgatatatctacctacaacagagagggccacggtgctatgagagctcaaaataactggatgcgcccagtaagggagcccagggaaggagggggagagtcagctggggtgaatgtgcatcccaggaggaaacagaatgtatcagaatgaggctttggggtcagcagaaatgtggctacaaaggtgagtttagctagacaatgtcagattttctgtgtacttggtttttgctactttaaaaatgatgtttacctccaagattccacagacatttgttggctgagtatatgatagactgaatagttagaaagaaaaagttgaagagagggaggaacaactgtagaaccccaataatttaagagagtaaaattcccttgaaagccatgggttggccgggcgggtggctcacgcctgtaatcccagcactttgggaggccaaggcaggcggatcatgaggtcaggagatcgagacaatcttggctaacacggtgaaaccctgtctttactaaaaatacgaaaaattagccgggcgtggtggcaggcgcctgtagtcccagctactcgggaggctgaggcaggagaatggcgtgaacccgggaggtggagcttgcagtgagccgagattgcgccactgccatccagcctaggcatcagagcgagactctgcctcaaaaaaaaaaaaaaaaaaaaaaagccatgggttatagcagtcaaagtgacaaatggtaaagactggtggcatactatttcagagcctcttaagatgcattcatccgcataagctgataccaggtctgctgcactgcatcttaaagataagggattgcggccaggcttggtggctcacacctgtaatgccagcactttgggaggctgaggagggcagatcacctgagatcaggagttcaagaccagcctgaccaacatggtgaaaccccgtctctactaaaaatacaaaaattagctgggcgtggcagcgggtgcctgtaatcccagctacctgggaggctgaggcaggagaatcacttgaacccaggaggcagagtttgcaatgagccaagattgcgccattgcacttcagcccgggtgaaaaagtgaaactccatctcaaaaaaaacaagaaaaatagatatgggattgcctctctgcctagagtctgcctctaggaccccagtcctcagcatctctcacatatcactgcccccaggacagtacaagaatcccttaatctcattacccatctagatgtgcgtcccacttcctgcccatacagaagcaagaagtctaagacagagctagaagctgctgtgtgaactccctgtcattgaggaatagcctgagtgtccttcagtcctgaaaaacaccccgggatccatcagccatccagatatcttctgcttttgtaacaagctgaacatttgggggcatggcaaggggggtttattttggtatctaggactactttcctatcttgatggaaaggcaagatggggtgtataaaataagacatgtatgtgggagggtatatagcacatttgcctttgaaattgggttgtttacagtaagacaggaagataagtgtaaaattttgttggcataggctgtgggttaattgtctggaagtgccagcatcgaagatatctgtagttacagtattaactaagaatagaactttccatcaactattctggcacacttaaattcttcacagaagttttccatatgtttgtggatgggaagggtgatgtttccatcagattccagctgggtgcccaggccctgactcctggtttcccatgcagtcaattgctaaaacccaaggttatgccataaggccttagcatatgcttgctaccctataaaggtgtcactagcctccctgtcggtttctgataatttggcccattgtgatccagagatgtcggggagggaatctcatctgtcaaggtgaagaaaatgaatactcagcagcctgaagggtgggcttggccaatcaaatttaattttttttaagcataaacgatcatttctagccaagctaacatattttcctggtctgaggtatttttgcatacctgtatgtgaaatgcatttagcatctctgagtgacaagaaagaccaggaggattgagatacatacttaacttactcttcaagctctgcaaatccaatgggcaggatgagaaaaacacatggaataaagaaaacgatgtatccagcatttctgtaattgtttctccttagctcttttccaccctcccggtggtggccatttgaagccaccactaaagcccttccaccttcccttcctacgtcctctctgataattgtgccctggcttctctgaaagctttgagggcatctggtggaagcatctccactctccgccctctacctttgagctcaagtgacatcatgaaccatctttcagccctctctccccttcggagatggaggagccaaatactgcaggactaatgtcttcacgtgctcctgagctccctcaccacctttcctcaatatcttcttccctctctctctttctctttgaaattctcccgactctttctctgggttcttcccttcagcctacaaacatctagccatggaggagagagagattgggagagaaggaagaggaagaaatgagagaggagagaaaacctccttgatggtaatttcccttctaagccctcatcctatatccttgcttcttttcatctccaaatgtatcaggctgttcttgcattgctataaagaaatacctgagactgggtaatttatgaataaaagaggtttaggcctgtaatcccagcactttgggaggctgaggtgggcggatcatgaggtcaggagttcaagaccagcctgaccaatatggtgaaactccatctctactaaaaatacaaaaattagccaagcatgggggcgcatgcctgcgtacctgtaatcccagctacttgggagactgaggcaggagaatcgcttgaacctgggaggtggaggttgcagtgagccaagattgcaccactgcactccagcctgggcgacagagcgagattccatctaaaaaaaaaaaaaaaaaagaagaaagaaaaaagaggtttaattggcccacagttctgcaggctttacaggaagcatggtgctgatatctgctcagcttctggggggtctcaggaagcttataatcatggcagaaggtgaagggggagcaggcatatcacatggcaaaagcaagagcgagaaagaggggaggggaggttctacacacttttaaacaaccagctctcgtgagaactcactgtcaccacagcaccaacccattagggatccacccccaggatccagacacctcccgccaggccccacctccagcatcggtcattacaattcaacatgatatttgagcagggtcaaatatccgaactatatcaccaaagttttccaaagcagtttgaggccctagaaaatgctctctgcagtaatgctgcactacgttgacattctggtgtcaaaccccctgtcttcttagacatctttgctctgtgttatcttccagccccacgcaccccccaacctttttgttttgttttgttttagagacagagtctctctctcttgcccaggctggcgtatcgtggtgccatctctgctcacggcaacctatgcctcccgggttcaagcaagactcctgcttcaggctctggagtaactgggattacaggcatgcgccaccatgcccagctaatttttgtatttttagtagagacagggtttcaccgtgttggccaggctggtctcgaactcctgacctcaagtgatcttcctgtctcggcctcccaaagtgctgggattacaggcgtgaggcaccacaccaggcctttccaagtcctttcaaggcttcattcatactttctttgcttgtacccctacccacagttacccccacatcctccagttccctttcccatctgcttctacttttcaccctaccctgtgaccatgggacagccatgccctgggtgggggctggctgccctggctcctgaaaattcctggctgagggtgtgctagggggcatggagaccccccagctccttggaagtgtcagctttctcagttcctcttaattcttcaatccatccattgtgacgtgggcgcctgttaactctgactattcccgttccctcacctttgcaagtcagactcctgcctgcgtttagaagctgatgtagatctgatctatggttttcctctggacttgttttctcatcctgggcattcttccctgcccccacggcttcacaccatccatacactgataacttccagatcaatagctgtgattcaagcttctctcctctgttctgggtcatttcgtttgctgccctccagccatctggctgaggtagattcatctgaatgttctacaggctccaaactcagcatgttcagactttgaacctgcattatttgctgtaatctcaatttccatgagtatgaaggccttagggctcagaagggaggtcctggctggtgataggaaggggcgtgtgtgatcacagccatgggaggccttttccagcacagccctgactctgctccctgcctggttgtctcagtctgttacagcttctataacaaagtgccatacactgggtggctctagacaatagacatttatttctcacagttctagaggctggaaactccaaggtcaaggtgccagcagattcagattcagtgtctggtgagaatctgctttctggtgagaatcatctgctttctggtgagaatctgctttctggtgagaatcatctgctttctggtgagaatctgctttctggtgagaatcatctgctttctggtgagaatcgtctgctttctggtgaaaatctgctttcttttcttttcttttttctttttttttttttttttttgttgagacagagtcttgcgctgtcatccaggctggagtgcagtggcatgatctcagctcaccgcaatctccgcctcccgggttcaagtgagtctcttgcctcagcctcccgagtagctagcattgcaagtgggcaccaccccgtctggctaatttttgtatgtttagtagagaaggggtttttgccatgttcgccaggctggtctcaaactcctgacctcaggtgatccacccgccttggcctcccaaagtgctgagattacaggcataagccactgtgctgggcctgctttttttttttttttttttttttttttgagatggggtcttgctgtgtcgcccaggctggagtgaagtgatgcaacctcagctcattacaacctccatctcccagttcaaacagttctccagcctcagcctcccaagtaaccgggattataactgtacgccaccacacctggctaatttttgtattttcagtagagacaggattttgccctgttagccaggctgatctcaaacttcagagtctgtccctagaaagtgtgtgccaagggacttggctagtgaatcagtttcccgcagctcctgtaacacagtactgcaaactgggtggcttaaaacaacagagatgcattgtctcacagttctggaggtgaaagaccccggagcaagctgcctgcagggttggttccttctggagactctcagtggagggagaatcctttccatgccccctcccagcttctgggggtgcagcaagtcttggtgttcttggctcatagctgcatcactccagtctctgcctctgtcctgagattgtcttctcctctgggtgtctctatgtctgcttccccttcttttcctcttagaaggacttatcattggatttaaggtccatcctgatgcaggatgatctcacctcaagatccttaccttaattatatctgccaggcgcccttttccaaacaaggtcatattcacaggtacaggggattgggacttgaatatatgtatgtatatgtatatatagagagaggcaggaagcagggaggtacagttcaacccactacagtgcagaggagtccttttataaatagaatttttttttttttttggatggtgatggatggaaagtgaagtattttctcaggatgaaatgtaccgagagtctgttatttaaaaattaaagcgtcttgcatctgctctttttcaagaatgttagtaatagccattcctctgcccttcctcaccccaacacgagcttgtattagaaacaaaataaggaccgggtacagtggctcacgcctgtaatcccaacactttgggaaaccaaggtgagcagaacatgaggtcaggagaccaagacgtggttaacacagtgaaatcccgtctctattaaaaatacaaaaaattagctgggcatggtggcgggtgcctgtaatcccagccactcgggaggctgaggcaggagaatggtgtgaacccaggaggtggaggttgcagtgagccgagatcgcgccattgcactccagcctgggcgatagagcgagactccgtctcaaaaaaaagaaaaaagaaaaaaaaaaaaccaaaagaaacaaaataagacaaaatgatggaaatgtcaaagcatttccaaagaggtggaagtgaaggacaggtttcagtaaaataaattctctcctgaaagttctgggaggagttctctgaagctggttttcttgacgtgcaaggaatggagcagaagaggagagtttgagaggatcgtggattcatggggcaccgtgaccctgagagacacctgttgagtttcccaggttttctcatggaacttataaatatgactttattttaaaatgttcactttagtgatggtaaaataagtgaagcccaggaaagaggagagagaccgaaggtgccagacagtttggggattagagctcaggctgagatgatgagtgtggactgtaaagaaataagctgatttgggaattacttatttatttctttttttgagatggaattacactcgtgttgcccaggctgcaatgcaatggcgcgatctgagctcaccacaacctccgcctcctgggttcaagcaattctcctgcttcagccgcccaagtagctgggattacagacgtttgccaccacgcccagctaattttgtatttttagtagacacggggtttctccatgttggtcaggctggtctcaaactcctgacctcaggtgttctgcctgccctggcctcccaaagtgctgggattaacaggcatgagccaccacgcccggcatgatttgggaaatattttaaagaaaagaaaatgaatgctgacctaatagagagtggagagcaaagcgaaagagcagttatggtctacatggaatgatgaacttgtcaagtcccggaattgctctgacacagagcaagttcaagataacaaagcagacacacagttgtgcccccaccccccccccatcttcagggcccttagcactgtgcggtgcacgtagtagacgtggaattaataccctcacattgactactgcctctttcatcccgactatcagctctgaaatcaacattgacattgacgagtgcttctgggcccctcaggaaagatgtatttcccctccatgtagttatgatcagcccagagacatgaaaatcagcccccaaaccaagaagagaggccagggtgtttacaccagctctcccttgggaagtgttttcagagaaggccttgttgatccagctcttgcccttcagctagctcagtttctcctcactgctttctctgggcagtgctggcccacttggaactcttaatcagctcttcccagcatgcttagtccacagactgcctgagttgaaatagaaaaagaagggcttagttcatctttgcgttggctacttggtgatccttgagtacactgaccaaggggatggtcaatgcttgaccaacacaattatgagttcccttcaggccttatatgtgggcctccagtcactggggaaagaatccctggtgccaagactttgagagtagaagggggtgtggattacagataggggttcctcatgggtgccacagactccttgccctattgaaaagggagttgccagaagagaccaagaaaggggcccttataagggcagggctaagagcaagcctggtggccccagtctaaaggcagttgtggattcagatgttcctctccacagatgtaggtgcagctgagaagtccggggatcacaagttgcagcagaagcgagctaagtgagaatagagaccagaaggtgtgaatttccccttcaacttgagatgctgccatgaaaatgttgaatgggtgaaggtggaggtttttggtagcattcccttgccctagcagctgtaacaaagagagcgatgggttagcacggtcaggtgaacagcgcttgtgctggggaagcagaagccaggaaaggatttatcctacacctctcatgtcccaggatgtctgggaggtcccctaaagccagccccctccaaatgctctttatttttttattttattttatttttatttttttgagactgactctcactctgtcacccgggctgcagtgcaatggtccaatctcggctcactgcaacctccgcctcccaggttcaagtgattctccttcctcagcctcccaagcagccaccacatccagctcgtttttgtatttttagtagagacggggtttcaccatgttggccaggctggtctcgaactcctgacctcaagtgatctgctggcttccgcttcccaaagtactgggattacaggcgtgagccaccgcatccagccccaaatgcccttaatgaggccatcctgccaactggagaaaacacaggtggacactaagtgaaaatctttttcttgtgctggagcctcatccaacgtattccttgccccaaaaagtgggtgttcttcagttcggcaggatcagggcaggatggtaaaagctcttgtgttgtgaatgcagctgggctgacagggatgtaggggagaagagaaaccagaaaactcaatgccctatagcacatggactggatccataaaagaactccttaacagtccagaatactgtttattctgagtctctgccgaattctaagaaatttggttatctacttccccaacctttattagattaggggagaaaaaccaaatgtaatgtggaagggaaaaggtcttgctcagcgtagggacaactaagagatagcaaagcagacgccgtgatgacagtgaatcagacataaaatcaatgaccatatgtcatccatagagacgccactaccgtggacagagcagctggtggtggctctaatgaaagccctgacatcccctcctagctcaagatgtctcaggccatcatcattttgtgttgtcacacagtaattaatgtttctgaaatgcttctgagtcatcaatacagaaattaaattaaggaagcaggaaaatgagtattgcctttgaaaacaacttctttgaaaatgaaggaaaatatcagtgcttaagggtgaacccttcactgtaggaaaaagccacacgaattagactagctggctcccctgattgtgccggccgaacaggagagggcagaggcagtcctgcgtggcagtgtggtccaggggctgagaccggggcctcctgatcagagcatgaatcctgctgctgcctctgcggagctgagcctctgtggtcttctctgtgaaatgatggttctaatactgcttcccccatgggataaatgagacaatgggccaggcctggtggctcatgcctgtaatcccagcactttgggaggctgaagcgggtggattacctgaggtcaggagttcgagaccagtgtggccaacatggtgaaaccccatctccactaaaaatacaaaaattaaccaggcttggtggcaggcacctgtaatcccagctattcaggaggctgaggcagaagaatcacttgagcctgggaggtggaggttgcagtgagccgacgtcgcaccactgcactccagcccggatgacagagcaaggctctgtctcaaataagtaagtaagtatgtacgtacatacatacatacatacatacatacatacatacatatatacatacatacatacatacacacagtgtacgtaaagcatagtgcctgtctcagaatcttccattactatgtttattcatttcctggggctgccataacaaagtaccacaaactcagtgacttaaacacaacagaaatgtattctctcacagttctggaataatctagaagcctgaagtcagggtgtccacagggccatgcttctcctgaaggctctagagaggacctttcttggcctctcctagtttcctagagttaccaataattcttggtgtaacttagcttgtagatgcatcgttcccatgccacctccatcttcacatgtacttctcccctctgtatctgtatgtctctgggtttcggttttcgttttttatagggacactcgtcattggattggggacccaccctaatccagtatgacctcatcttgactgtttacatctgtaaagaccttatttccaaataaggtcatgttctgaggtttgagtagacatggattttggggggatactggtcaacccagtatactattccctggcatgatttacaattttctgagaagagttcctattaaataggtaactcccttcctgccccagtcccctttgacctggcaggctaaatgagacctgaagctatgatcataatgccctttttttggtttagagctttgtcccctcttaaaatgcacatagttcgatagggatttgttattgttgttttaagtcttattaaacactaaagcccgagtgtgaatacgtttattcaggctccgtcccagatcccaatgataacagtgcagtttacgaagcaggcccacccttgacctcagccaatcctcacggccccccaggaaggtaggcagatcatatggccccctcttatgagatgaaaaaagtgaagttgagagaggtcatttagccatgaactgcgaaagtcagcttcaaagctagggcccccagtgactgctccggttaaggcaggaggggacttggtgaggggtggggattcgatttactgtggaccagctgctacttttggcaggtgacttcagctgtccaaaccactatttttctacctgtaaagtggagtggataagatccttggaatgctgttgtgaggatgaaatcagaccagaccacgggtatatatataatgccggtagaaatgtcccagtaagcgctagtctctctcttcctctgtctagcagccggattaccaacaggctgtcttctgtttttttttttttttttttttccatgcaaagtattttatttataaacaaacataattaaaaacaaaatagtcaatatgaaacgaaagcaattttaaaagacaaattaattattttgatatagagaataatttgtatttcaacattttgatacagatttcagtaaaagcaaaactaaaataacacagataagtataataatataaagtcaagcattgcaaaaaattcaaggccaatactggaaagtgtatagaatatttggcaaaacaatttattaggagagtaacaaattgtttgtaagaactttaaatgctgtcttctggttttgttcagtgcttgccctgcatgatcctggatggtttacatttgggaagcattgagtgccgtcgtgggatggggaaagaatggaggcaacgacctgtgagtccctgcagaatctaaacatctgtctggagtgggcacagagcagacttctggggtggcgcctccaatccgccatctggcacttgaaagcagagtctcaggcctgctgtttgtaattgcatctcccccaagcagggggtctgcccatctgtattccccaattcttcctggaccagcctgatccagggagagggaacatgtggcaggctctatgggatctgtttggaaaagagattttcagaaataactcagagctgtagagggacctgaacaagagccagtggaggagttctgtgtgagtatctgcaatagttcagaaatacgtgcagatacgaagccggccggggccaagttctcagcagcagaagagtaagagctaaaatcttatccctaatttccagcccagctctgtggtaggttcttcaatcgctggaccccagagaagggaatctgcttggtccttccaggtagagcaggaaacatgccttatggcagaggctggccttgagcatagccctgggtgattcttgtgtcttgaagcttgagagtcacccatggaaattagctagtgccttgtagcctggctttctgcagctgctcctgaataatctgattgctacgtcgcccccaagattgtctcgcagcatgcagtcctttaggagagcatgtagatcttctcactgagttgcaccatttgttagctcggctttctactctctaccttgcagcccagtcaccttgtctagttgtgccctgcacctgactccccagtgcctccaggaggcagtgctagaatcaacccgccctacttgttataaataatacaacatccctgtccctattgtgtttctctgaatccaggtgtgtgtttcgaggagggtcacagatgatgctgatgcagctgccagcctgaaggttggaccccaggacagtggccagtggggcacctcagcagcctggaaactgggctgcaagggggtcctcagtggtgctctaggcttgggaccacagacgctgttatagagaagaaggtgatacgttagctgagtgtcacagtgggaggtcttggggccagaaatggggctgctgaaagcgagcaaaacaaagaaaagggccaggtgttgggggaatgggtgctcacaatattagccagccctccaaatcagagagtttctgctggtgaagtgggtgccacgagcttattttttttttttctttgtagccagacaccattactcccttgacaatgggtgcctgaaagttagacaggcatgaatcagaagatgaagccaaggagaagggaataaggagctggtattctctgcgctccaagtcatcctagactaaaggggatgtatccttgaccttgacttagaaagaagagtaaagcaatctagcctaaatggcaaatgtatgtagctagatcccggcagatgagaggtgctctaactagaagccactatttcctcttcaaataagttttttaattttttgaatagcaaatggggcccatttgtcagcagtagattgggtcactgcccggctgattgaattcttaaggccaactgacatgcccaattaatgcaagatcagagtccccctccaggcatgacttcagacgagtctgtttacctttatttggtgaacagtggtgttagcagggtcctgttgggctcaggttattccagggaggtgaagccttcgccagtttaattacatgctgctctggagctactgttttgtaaaatgaagcgcgggtttgtaactgaagacctgttatttggttgcttggaaactagtgcatttacttcccaaagttgtcaccaaacccttctagggaggcaaggtgagctgccacaaaccctcccaagccattaatttctcaggagcaagacataaatcagtgcagccagaagatagagagtttggtggtcactgtcccattagacacaccttgagtccctgcaagggccatgagcctgtctgctccctgccttcctccctgcttctggttccagctgtccattataccagcacaccattattcacgtacatttccatggaccacatcaccagtgtaagcacagctacttatctggagaaatcaggagtgattcagtgccattttgcaaacagagagacacggaggcccagggcagttaattggaagcccaagcagctttaggcttcaaagttgcccccattagcacgtctggcttcgttaatgccatgtcttgctctttggtgtaagaggaaacatagatgcttcccagtccaggctcatctgtgggacaggctgctcccaccagttcaggaactctgcagatggttggtgtttcgcgcttcagcccctgttcctccttgtctgtggctaagcctgaatatttttttctaggtctacaggtcagtgaagatcaagttatttatgttgtattttaatggtcatagaaatggtcaagagctatagtcagcctgataccaacctatgcttttggaagcactgcaatgacactgatatcctttatatactgggtgtgtgtgtgtgtgtgtgtgtgtgtgtgtgtgtaagatggtctcccctgtattagtctgttttcaagctgctgataaagacatacctgagactgggtaattcataaagaaaaagtggtttaatggactcacaattccatgtggctggggaggcctcacaatcatggcagaaggtgaaaggcacatcttacagggtgacagtaaggagaagaatgagaaccaagaaaaaggggtttccccttataaaaccatcagctctcatgatacttattcactaccatgagaactggatgggggaagccacccccatgactcaattatcttccaccaggtcgctcccacaacacatgggaattatgggaactacaattcaagatgagatttgggtggggacacagccaaaccatgtcacccctgtctatagaagatacatttcagagtggtgaaccaggctgtggctaaaccatgcctctctggaagtcaatttcaggacaattcatttgtgtcaaggcatagcctgtctaaccaactcttccagatcaaagaatatctgtgcatttctttttctttctttctttcttttttcttttttgagacggagtttcactcttgtcgcccaagatagagtgcagtggcatgatctcggctcactgcaacctccacctcccaagttcaagtgattctcctgccttagcctcccgagtagctgggattacaggcactcgccaccatgcccagctaatttttgtatttttttagtagagacagggtttcaccatgttggccaggctggtcttgaactcctgacctcaggtgatccatccaccttggcctcccaaagtgctgggattacaggcgtgagccactgcgcccagcctgtgcatttctctctttcatctctcccttctctaatctttggatcctcctttctattcatttcactcattcatttctttatttgttcagcacttatttatcacacatctgctgtgtttgagccaggccctcagctgggtagcaggtgtgcagcgatgcaacaggaacacgcctacaggaagcctatacctcctccacacttaccttctctttctgtcactctccttggctgactccttcctgccaggtgggagacagatagcattttcttaagcagggtcagttattctgctcatgggcctgagcactcactatgtggctgccggattaacggagagatagaagatgcccaaggcaggcccatgggccccaacccccagtagtttagtgacttggtagaggaagtggagttatgcatataaaacatcgagataaataaagggtgcagatgtgcgccactgtgctaaacttggagtcactggtgggctggacagtctcaaaggccttgaacaggttggacgtgccagcagtggcacagagtgctcaggtatgaagaggaaggcacaattgtagcgtgaagatgggaaccccaaagactgcccttcctggggtggagggcattgctcagccctcctgaagattagtcctgtagcagaggattgttgggccagcccctcctgttgtccaggcctggaaaggactctgggaaggagggagagccccagggatatcaccaggttagaagaatgaggagtgtctggatttcttgtttcaatgatggaagggaggcagcagaagtgacaggttgagttggaagaaagccacaccctctgcaggaaaaggagggttggtggtggaaagaggctcccctcttggagagaagagggagggcagcctctgtgccttgcccttccttccccaccccaagtctttaacaccatctccatttcttttgccgatcactggtttgttgcattatttttgaaatcagcatgatgtgagacgttgcattttccttgatcgtttgacatgtaaaagataaaaatcatttctttgtaaatcacacatcgttttttcttataaatcctcaattgcagttggcctcagcgtggctgatgagcacattaccgcacagtcttttttttattaggaatctgagcctgtgcactttatcacccattgtcctgtcttgtccctgctgtgtaaccagagatggccccaggaaactttaaaggtaatccatcctaccatggagcttctcagctgcaggctctcctcctgcaaggtgagcctggagggccaggtatgctgtaacccccccatttcctcctctgggtcagctcctatagaacacgaggcacgaagtgactctcagtgcacacctctgctcatggctcctcgtcattccctaaaatatggggctgtttaaggattttttttttttttttagatagggtctcgctctgttgcccagctcaggctggagtgcagcggcacgatctcggctcactgcaacctcagccacccaagtagctgggattacaggcatcgccgccactcccagctaatttggtatttttagtagacacggggtcttgccatgttgcccaggctggtcttgagctcctgacctcaagtgatctgcctgcctcagcctctcaaagtgctagtattacaggcgtgagccgctgcacctggccaggattttttttaaataagcaacacgcacataaaaaaaaaaaaaagtatagaaatggtacctggcatgtcgtaaatgctaaatgatgttgcctattactttttaacatcattaagattcattataaccaaagtgtgtcctagaataacctcctacggtttactcgtgtgcagaatgtggatgagaaggcctgcctgcctgcctcagaagtgcaagctgtgcatgtgttcaccatcagcaggagcttattacacatgtattgaatgactaacatgggctgtcaactgtaagccctgacaaattcgaaggtgtttgttgctgtgcttccgaatgcatagtgctggttctaaatgtgcttgttgccttgcagtgcatttattgggcatgttgctcttttggcctatgtggtgatgttatcagcccaggtcctctgagaagcagattccaagaagggattagacctgcatgagatgagattgactgggagaaagacctgagaaggaccaaggggagggagcaggagctggcagactgccgtgcaggtctgacacccgtgaaaggagagggggaaggaaggaggcctgggaagaagagccgccaatcacagcagatttctaagaacattaggtcaggctgaagggaggcccatgagccaaaagtgtcctctaaaaggagtgccacatcccactggaatgggcctacaaccatcagcactatctggctcccgaacttttttatcttcccaaactgaaactctacctccatgagacaccaacttcattttcaccttcccagccccctggaaaccagcattctactttctgcctctatgaattgactactctaggagcctcacataagtggatcagacagtatttgttcttttgtgtctggctcatttcacttagcataatgtcctcaaggttgtgaacccagaaaatctgagacagatctcagttaatttagaaagtttattttgccaaggttgaggacgagcccgtgacacagcctcaggaagtcctgatgacatgtgcccaaggtggtcagggcacagtttggttttatacattttagggggacatgagacgccaatcaatagatgtaggaggtatattggttcagtctggaaaggcaggacaacttgaagcaaaggcagggagactggaagccagggggagcttccaggtcacagataggtgagatacaaacagttgcatttttctgagtttctgattggcctttccaaaggaggcaatcagatatgcctctaatggccaggctcggtgtaatcccagcactttgggaggccgaggcaggcagatcacaaggtcaaaagattgagaccatcctggccaacatggtgaaaccctgtctctactaaaaatacaaaaattagctgggtgtggtggcacgcacctgtagtcgcagctaatcgggaggctgagacaggagaatcacttgaacccaggagggggaggttgcagtgagccgagatcgggccactccactctggcctggcaacagagcgaaactccatctcaaaaaaagaagaaaaaaaaaaaagatgcatctatctcagtgagcagaggggtcactttgaatagaatgggaggcgggtttgtcttaagcagtttccagcttgagttttccttaacgatttgggggcccaagatccgtttcctttcacaaggttcatccatgttgtagcatgtttcagaatttccttcctttttaaggttgaataatgttctattgtatgtaatgcacgggtttttaaaggtcattaacctccacttggtagatgagtgacaacactgtatatgagtgacacgttggaaagaaagatgagtgccgtggaagggtaaagggctgttaactgtcatggactctggggtcaccccaggtaggattaaggcattttcttgagtcagacagagccactggctaagagagtgaactccaggccattgtgagagggtggtgagcagagaagggtggcctgggggaagtcgtttgttaaatgtgatctaaaagccaagaagttggctgggcgcagtggctcacgcctataatcctagcactttgggaggccgaagtgggtggatcatgaggtcaggagattgagaccatcctggctaacacggtgaaaccccatctctactaaaaatacagaaaattagccgagcgtggtggcgggcgcctatagtcccagctactcgggaggctgaggcaggagaatcactggaacctaggaggtggaggttgcagtgagccgagatcacaccactgcactccagcctgggtgacagagcaagactccatctcaaaaaataataataataataataatcaaaataaataaataaaaaccaagaagtaaccttgctcatttgcacctggttatctcttggagacttggctagattcgaccacagcaaggactgtgccatatgccagtcacatatgagataatgtggggcccagagggtggagttgccaggtccagtgttaggagaggtggagaaagcaagcctcggttcctgcctcatatgtacacacagcccctcatgggatggttgcttgggtcagcttctgggaggctaccctctgcctctggggctcttccagtctgcctggtgccctgtgccattgaaactgcctttgcaaaaatgacaacaatgagaagattatggcagtgaaagagatctgatctaatccacctcactatcttgccttttccttaactactcctgggcttttgggctgagctaacttcagaagacatttaggttatagtttaaatgataatagcccttctccgaaactcaactgccttgtgaggctattgaaaggccgtcaggctggagaagaagaatctgaattctgctaaagtgtatacataggttgccagccattcctgcagataacaccactattgcagattggccctttgagatatcttttcaggttttttgcatgtctgaaacccatagctccacctggacctgatagctcctgtggcccccaccagggagcaactcagcttaagaggacagccttgactctctatgatttcatctctgccccaaccaatgagcagcaagcctagccacccccaccccttcacccaaactgcctttgaaaaaaacgcataacctaggagctttggatgcgattgatttgagtactaactctgtctcccaagtggtatggccagcctcgtgtctattaaactctttcttactccaatgctttggtctttctttgtacagcaggtctttctttgtaacccctgggtggttacagcatggtcaccaggatccttgagggcaatgtcgtttcatctgcccatttatcctgttgtgtgctaagcattcactttggtgctggagatttgtaaggtaatgaagggaacgtacacaggcattccttaaccacagctcacagtctagtgggcatgacagatgctccacccagtcacctcctgtgtgaagctctgctgaccaactcctggaaggttgctctccgtggagctgtcttccagctctgcagtatttttcttcatggcacttagtaccacctgacatgaaattctgtctccattgattttgtctgctctgtctcccctacaagaaaatgggctcccaaagggcaggcactgctttgcttattgcagtctgccccagccctcaccctgtgcagccctcaccttttcctttgaaaggaaggtgcccagcactgtccagcccagctccctggaacttctgggaccatttctctgaaggctgtctctctagtacctagaatgatctctggccccctgtaggtgctgagtaaatactgagaaaatcagcaaaacaaaatactacaataaacgtgcagttccaacagtaatgaaggactagttgtaagagttaaagaatgaggaaagaaacacaaaaagcagctcaacagtcaaaggtttattttggagaataaacctgagaggggcttctggccgattttggtcaggagctctctctcttatggacaaagaatatttattggtgagagagcttatcacaggcttggaatgtttctgtgtcggggagaagttgggggagaagtggggttggaatgtctctggtcggaggggaggttatcttgagggtgacatctctccagctggaggggaggttatcttggggctggcatgtctctggtcagggaggtgtttggaatgtttctggtcagagatgttatttgtggtttatggtcatgccaaccttagccattaggctgatgccctttggatttaggcagcttttggtcacagtgaactttaaaaaatgacagtgcttgtccaagatggcaatgctcctgctttgtcactagtaaaagagggtgggagagcaaataacaagcagagtatctgacccagtttagaggccaggaaaggtttctctgagtaagttatattgaaaactgcgatctgagagacaagtagatgttagctactcaggcagaaaggagagagaaagagccactagcagaagaagcagtgataagtagggccccaaggctggagggagaaggactatttggaaagtccaggtggctacaagccaggagaaggataggcatggccagatggtacaaggccttgaggtggtgtgaacactaactttctcctgtgtataggaaaaccactggaaggttttaagcagagatgagaggtgctgagatctatgtttttaaaaggtcctgttgacccagcaattcttcttctaagtatatacccctttgggcgatggtttcttccagactaattgtctttccacccatagcgcaacttaacaagggatgacagtgacagccagcatcacacagtgctgtgtgattggggaagcctctcccttgtaaccatctcactccatcctcacctccaccttgtggggtaggtgtcattctcaccctccctggtctagagctgggaccctgcagcaataagtgattcacagagggacgaacattcagctgatgaatgatgcttggcatcattctcactctgaaattcacatcccacgttccaccataagctcttgcggccacttttgccaacaggagctgctagcagctcagcgattcctgccccagctctatccgccgactgtagatcattactcagctggcccctggaggagcctggccatgctgagagctgtctgggcccttgaggttgttgaaaactttcccattatcttgcagccagcattgggccaagttataagtcagacggtcctttctgaataggggaaaagaatctctctttggggccacattagaacacaaagatgaaactgacaaaacatgttgttaccagcttgaaaaatagccacctcgccattgacctgattttaataagttgtggctgcgagggaatatagctagtgttttcctttgaaaggaaagtgcccagcactgtccagcccagctccctggaccttcctggaccagttctctgcatgctgaaggagagtacccccaggcagatttatagccatagatgaactaatgggttcattttgcctgctgcccagataaagccaatttatcaagatgaggaaattaattcaatcgagaaagagtttaattcatgcagagccggtggaatgggaggctaaagttttattattccttaattcagcctttccaataatttggaggctaggatttttcaaggatagtttgacaggcaagggaatgggtgctgctgatttgttgtgaatgcaatcattggggtgtggaaaatggtccttgcatgctgagtctgctgctaggtgggagcttcagaaccgattgagtcaagagtcaagggtccagggaagaaatgtcaaaaccagaaaagacacctcaaaaggccagtcttagtttatttgcaggagaaactggggaagtcgcatatcttttgacctctggaaagatagctggtagtcatttatgtctacacttggcaggattcaggctcctatcatcctcctaatttgatgatccttcactagctttacaaaggtagtttagtttgggggaagagctattatttaaactataaactagctcccaaagttaccttggcccaagcccaagaatgactaagggcagtttggaggttgtaggagagatggaggttggtgagatcactgccatgattttctcactgttataattttttgcaaaggtggtttcagattggtctacctccaccatcactggatggatgactttttgtggttggtttttggaaacgtgcctgaactccccaccagcactgatactcatttttctctcctattgctgggctgcaaaattgcagatgtgtcatatagcttccataaggtatagaatcacccaacctcctgagctgggagcacaggacttcgataacatggcctgtggtgtgtctgagtttcagtctgccccagccctcaccgggtgcagccacagccatcggtgggctgtctcactgaccatgccgtgtaggtttttcttattgcatgagtcagaaagagggtcactgaaggggtacacaaggcctggaactgtaggaggaaaactgtcatccccctaaggacccagtgcccctaaccaatcctacagttacccaccatggggagccacttcagttattattctgatgaaccaagggaaattaggggtggggagacatcaagctatataaatacccctgtgtccttgccaagcacagaagagctttgccttgtccccaccacagctgaaccgctaggaaggcccaggatttgaaatccaagggacagagcagcacacagctccctgagcccccaggctgtctcccacctccccaaaggtcagccattaagatggctcctccctccgccacagggaacttcctgagccagatactgagtgaggcccgggaagagacaggctgggaagagttgcatgaaagaggcctgtggttagtgaccctgggccttcccactggactctaacttcagagtgcctggcaaaatagcagcccacaggaaatcaggcactagatccaaaagcaattggataaaccaagctttattcgggtactcaggagaagacaagtcaagcagagaccgtggaagccatagatgcaaagatcctgggaggtaggtgctgaaaatggaaccggatataagcaggtgagctgggttcatctggatggagtgggcactgaccgttagcttcatgtgctggaaaatttctttaagctccaagtcaaaactcagtttttccatgaagccctttctggctccttcaagtgaagctggtcgctccatcttaaagggccctgtttcctttgtcagaacacttgggtttcagtatgtccccaattctaagcaaattcctggtacagaggaggtgctcgataagtacttatggatggaataaatgggtaacctacatggatgggtgaattttattttattcagatacagtcaagagatggtggaggatgagtttgtgaacagctcttaattattttgaattctttcaggcagtatttcctaaaatacaaaatacaggttctgtaagatgttaacaggtgttatctaataaaagggttccgttgtcaaatacattaggaaaacaaaattatacaggtgtctttgctgcagggaattcttcaagcctataaaatgtgatgtcggttctgggtcttgaagagtatttaagatttctaaaactcattaggttggaccataggaaattcctgttttgtagttttttaaacattgttaaatagcagcaattttgtatggtttaacctaatatttaactgtggaactcttttaaatgttactgatgttccatggagctcaattttgatctctagaacattggtttcatttgggaggcaatgagggagaaggggaggaaggtggagggttcgtggatgagaatctaaatcctgttgggagcttctcctgtcccaggagagtctgatgtgctttaaggttgtggtcaggtggtctttaggaaattaactccttgaagattcaggtctagttctctctgcctccaccccatggcagccaattggaaaccacagtttagagggagaactccaaaaaggaccaatgctcacatgctggacatcaaggcctatttcctcatcccaaatggtctacgtgggtctcaaaagaagagtcacagcaagcagtaatgaacatgaatgagcacagacatgggtgagagtggaaccgcctgggcattctgcttgtctgcctggagctgagaaagagttctgtttgagtaggaatcgaatgggaaggtctgccatgggtctgaggaaacaaggttaaggaggtacgcaataatcccatgagggaaccctgatgttactggaaaggggtcctgatccagaccccaagagagggttcttggatcttgtgcaagaaagaattcagggcgagtcacagagtcaagtgaaagcaaatgtaataagaaagtaaaggaataaaagaatggcttctccataggcagagctgccccaagggctgctggttgcccatttttatggttacttcttgattatatgctaaacaaggggtggattattcatgaattttccaggagaggggtgggcaattcccagaactgagggttcctctgctttttagaccatatagggtaacttcctggtgttgccatggcatttgtaaactgtcatggtgctattgggagtgtctcttagcatgctaatgcattataattagcatataataagcagtgaggacgaccaaaggtcactctcgtcaccatcttggttttggagggttttggctgccttctttactgcaacctgttttgtcagcaaggcctttacgacctgtaacttgtgccaacctcctatctcatcctgtgacttagaatgccttaacctcctgggaatgcagcccagtaggtctcatcctcattttacgcagcccctattcaagatggagttgctcttgttccaacgcctctgacgctgacagcagcacatccagactcctgggtccttatcagaaggtcaggcttcgccaactcattatctctcgtgtactctagactcgcctaaaactctgtctatacttgctgtccctctctgctcataactgaccccagaatggggctctggtccctgatcagcagtagattccctgtattctttcctcctctttatgggaatagcatgaccctgcatgcctttctctcactttctctttgctctttgatgcctgttgatctgagcattgcatgttgctcattaggacattgcaattggcccataaatagaaatctctttccctgggaatgtacagtgatgggactcctgggccaaacccacacttgatcttagacaagtgaaaaaagaaaaagtttgggcttgacagacacggttcaaaacgttgtatgacccaggttgcttagcctctcagggatcaagctttcttatctttcaaatgcagacattgattgtatctccaccccatggtggctagaaggattatgtttgaaaatgtgaaataaaatggctaaaaaatagcaagttctcaaaagacatcaccctcccctttcattactgctgacgtttggcattatgtttgagctcttgcactgaaatgctttaatagaacttaaaaattgggaggcctgggctgggtgcatggctcacatctgtaatcccagcactttgggaggccgaggggggcggatcacctgaggtcaggagttcgagaccagctttgccaacatggtgaaaatccatctctactaaatatacaaaaattagccaggcgtggtggcgggtgcctgtaatcccagctactcaagaggctgaagcaggagaatcgcttgaacccaagaggcggaggttgcagtgaaccgagatcatgccactgcactccagtctgggcagcagagcgaactccatctcaaaacaaaacaaaacaaaaattggaaggcctggggtggaatttgatgaacatgctttattttgctaaatttagctggggcgtgcactctgctgtttaccttgttccatagatgcggtcagagtcctggggaacaggtgatgagatggctgttggttggatggctatgtggttaaaggggcagtagtgcccacaaaggggattctagcagaaggaacaggcaagtaggaagttgagcagctgccttggccagaggatttccctccaggcgttgcccagtggggtggctggaaggcagatcagacagtaagtgacatcggaggtggcatgagtacacagccttccatggagagcagtgatttgagttgcctgccgagctggttctgagatggctgtggggatggctgacttccttggtcgtgaatatctgttcttaataaaaatgaaaaggatgccttctgtgtttaccatgtcaaccccgttgatacaccaaggtgtcctttaaatggtttcccagtgttgggggaggtctgtgctgagtcacccacatgttctcagcactcctcagggtaggagatggggtgtgtaggtggtgtgggttggagattggcttggctcagtggccgtgggattgttcagtgtcccacacggaaaccaacgccacctctctgtttcagagcccagggtccagcctcatcaataggagggagcaaaaggctcagatggatcatactggctctctacaggaagcagatggttttcttggatgtcttttctaaatagcctatgctaaaatatgctccacaatggctgggcacagtggctcacgcctgtagtcccagcactttgggaggccaaggcgggtggattgcctgaagccaggagttcaagactagcctgaccaacatggtgaaaccacttctctagtaaaaaatacaaaaattagccaggcatggtggcacgtgcctgtaatcccagctactcgggaggctgaggcacgagaatcacttgaacctgcaaggcaaaggttgcagtgagccgagattgcaccactgcactccagctttggtgacagagtgagaccctgtgtcaaaaaaataaaatatgcttcacaaaacctatatgtgacctgtgaagaaaaaaaacaaacaagattccatgacctaagacatttggacatctgcatacccaatacttctctgggtatcacaaggcagggggccccgcacaggtaactaattacaagacagcgcttccttgtttggagcccagagctgctcacctgtcttctcttggttagttctttatacctacattaagaatcttatatttttcttgaatactagatctgagctaaatgttttagctcattttccacccatgagaattctatgtcttgtttatatcaagtatattacctttgttttcagctttgtgcttttctcatgaattttttatgtctcctctagagttgttgatgttaagatggaatggacaatagcaatggccaaacatgtggcttatctcctcctaagattgcataaattcattaatttatacccactgagtagccactcaaccagttatgaattcagttaactgaaccatgatgttactgcttttaaaaagctttttcacatgctgtcatgacaatcaaaagctttaaggaaatccagacacgtgatttttaagaatcctttgtattctcctgctctactagttaaaattcaatcaaaagaattttgtagtttgtgtgaagtgagttattattaatgaatccaccctggtttctcttgatcaccacttccgttcctttgctcatttgtctgttttagaaattcatgagccagacttttaatgacctctccttgatttttttttggctccacaaaaaaacatttatttggtttatatagtctatcatcttttctgcatattgaaaatccagccattttctgctatctggtatctgtattattttctgtaattgttttccaagattatttattattattattattattgttattatttttagatgaaatctcactctgttgcccaggctggagtgcaatggcacgatctcggctcactgcaacctccgcctcccgggttcaagagattctcctgcctcagcctcctgggtagctgggattataggcatccaccacacccggctaatttttgtggttttagtagagacagggttttgccatgttagccaggctgtcgccaagattatttataattgctgtcatccatgggtcatctcagtcctgtgtagaatgttccggttggcgtatacaagttaggaacactctggctgcaagtatcaaccgatctgggcagctgtggcttccacaggtggggatttctgtgtctcacacagtgtgaagtccgggtggctgtcagttctgggctgctcaagtgaccaagtgcagaagcctttgccattgtttatctcctgaccttcccagtagttcatggttccaagcatcccacccgtgttccaggcaagaaaaggaaaaggatctcccttttttaacctttcttcaggatgggttggagtctatattagggaaggaaagactttccaggaaacccttaactgcggtatcactggcctgaactatgacaatgggctacctcctgccacaagaaagatggggaaactgaatatttttatccaggcacatttcaataccgaacaaaatgagaattctgttaaaacgggtaaagagggaatgttgattgaataggggaactgccagagcatgccacatgtagctagagattgcaattaaagtaaccaagtattgtcttattgtcacatttttattaaactccttcttgactgtgtcttccagacctttcttataatcattatctttgactgactaattgatccaatccatgattaactttacttattcaataaatactaactaaagactgggagcagtggctcacatttataatcccagcactttgggaggcggaggcgagtggatcacctgaggtcaggagttccaaaccagcctggccaacatggtgaaaccccgtctctactaaaaatataaaaattagccaggcatggtggcacaaaactgttgtaccagctaccggggaggctgaggcaggagaatcacttgaacccaggaggtggaggttgcagtaggccgagatcacgccactgcactccagcctgggagacagagtgagactctatctcaaaacaaaaacaaaaacaaacaaaatactaactgagcacctcctaggtccccaggcctggtctagatccaggggacaccatggtggatacactcagcaaacacacaataaggtgagaatatttaacagaaatcctaacccagactagggagccagcgatggctgcctggaggagaggacttccagactgagaaatgacgcatgaggagccagtgaccaggggaagaaaagtaggcaggaagggataaaaaaaaaaaaaaatgtgccagacagagaatagagtgatggcatgggcaaaggccccatggtgggagtgcctgccactaatggtggcataaggcaggtttcattgccctgggagacaaaaagccgtcccacaaccgaaactgtcctctcgaccataggcagccccaacccctggaccatccttactcagcagtgatgctctaggagagcatgggagagactcagcgcccacctttcccaccaccaggaaataactgggagcagctctgaaggagaaactcaattgagtcatcacagcatcctagggggccaccatcttcagggtcattgagtcaaattcatgtcctggctcatgtgattcctgtctttacttgaatcgggtcttacctgttcttacccctaagagtttagtgcgagctcccacttcaggccttgaaccttgaaccacttttttctttttattttattttattttatttattatttatttattgagacggagttttgctttgtctcccagggtggagtgcagtggcgtgatctcggctcactgcaacctccgccttctggtttcaagcgattctcctgcctcagcctccttagtagctgggattacaggcacccgctaccacgcctggctaatttttgtgttggtttttttttttttttccctagcagagactgggtttcaccatgttggccaagctggtctcaaactcctgacctcgtgatccacctgcctcggtctcccaaagtgctgagattacaggcatgagccattgcacccggccattgcaccacttttaaaccttagccttcattttagttttttttctccccaaatattttaattgtggtaaaatactcataacaaaattaccatcttaattaactatttgtaaggctgtggttttggattattaaatacatttataatgttgtgcaaccatcacctccatccacctccagaattctttctatcttgtaaaatggaaactctatacctattaagcagtatccacatgcccacttcccccagcttctggccaccaccattctactctctgtctttaagcatttgactaagtacttcacgtaagtggaatcatatagtattcgtctttttgtgattggcttatttcactcagcataatattctcaaggcgcagccatgttatagcatgtgtcagcatttccttcctttttaaggcagtatactattccattgtgtggatataccacattttgcttatctgttgatccatccataaacacttgggttgcttccaggtttgagctgctgtgaatagtgctgctgtaaatgtaggtaggcaagtatctctttgagaccctgctttcagtgctttgacggatgtatccagaagtagaattgccacctccttgtgaatcaggacttcccataacagaaatatttggcagagacagaaaacggaacctcaggaacgtcacaactgctatcaccatatggtaattctatttttaattttttgaggagccaccaaactgttttccacactggctgtgccatttttcattcctaccaacagtgctcaagggttccagtgtctccacatccttgccaacactgttatgtttttgttttctcgagagtagacatcctaatgggtgtgaggtgctaacctccattttcaaacgttacccatattgggattggaacagcgtcaacctttggctcattcccctccactgtcagccaactattagctcccggctctccagagctaccctagttcagtttggcatctccctcccagaaatcacagggttgcatctaccagtggggagagcagattccacgtggtggcagctgaggagagaagcaccctgtgtcctgaattttggggcctggtggtgaagcttgtcagggaggaggccagtcccacagggcgggattctctgagcacctgcctgcccatctagcctgagaatgtcttggatcaaatctgacattaattaaaagaaggcctctaggcttagagcaccttgctgcctgagttgcatattttatttatatttggcatttatgcctgactttaaatttaccaagtgttttgcagtgatttatgagattatcttgcctgcacccttgctggatggtaccttgattgtcggctgttattgacctgttgccggtgtctatggagacccatggtcatcctcccaactcccctggcattggcatttcctgcttttgtatgtgggttttaaagacactgttgctcactcctgacaggcgtagccctaacttgctccaccttctctgcccagtccctccattgctatatggccttcgcctcctgatttcgttgcccttattcactcctttgcaatctgactttgatccatgtcttcactagcactttacttgcaaaggtttccttcatttccagacaaattcacagacctttcctcatttcacatctgtgatcccagcagctgtttgaaagccgggttcaaaccacctcttagcagttctctctcttccctcaccatccctgttcatgggccacactgagcttgacattcctaatcagagaccagtcctgagagtgtccccgtgacacactggccctgcctaattgttagggctatcctgtggatacaaaaaggcaggtttcatgtaaggatggtctagtgtttcaggacttaagagactgatttagacttttgtttttgtgtgtttagaaggccatctccaagtctctttctatgcatgcttgtgtgggaatttgtgtatgtgcatgcacactcacacgggcatgcttgcatgtgcacactcccttttgctcacaccatcactgcattcgtgtacgtgtctgaaaccacacctgcacacactccttttctctgcatcatcactgcatcctgtgtgtgtcagcattggtctgctcccaaggttggctctgcacttcctgctacttgctcctggcatgtgtcaccccggctgcggcccggcacccctggtgtttctgcttaggagggagccacataaggaatccactgtcccatcattccagtgctgtaatggtggaatctaaatacccacagcacctacctttatgattcccacactctttccctctcttctttcatccttcctcatcctctgtaggccaactgctaagttgaagctataatcttttttttaagctttcaattaatttttttaaaaaattccataggtttttggggaagcgacggtgtttggttacatgagtaagttctttaggggtgatttgtgagctttttgggcacccactacccgagcagtatgcactgaacccaatttgtagtcttttatccctcacccccttcccaccctttcccaagtccccgaagtccattgtgtcattcgtatgcctttgcatcctcatagcttagctcccacttatgagtgagaacatatgatgtttggttttccattcctgagttacttcacttagaataatagtctccaatcgcaaccaggttgctgcaaatgccattaattcattcctttttatggctgagtagtattccactgtgtgtgtgtgtgtgtgtgtgtgtgtgtgtgtgtgtgtgtgtgtatgtgtatatttatatatatatatatatacatatatacatatcacagtttctttatccacttgttgattgatgggcatttgggctgtttccacatttttgcagttgtgaattgtgctgctataaacgtgtgtgcaggtttttttttttttttttttttttgtataatgacttttcctatgggtagatatccagtagtgggattgctggatccagtggtagttctacttatagttctttaaggaaatactttgaagtgaaatttcagagttgtcagggaggcctgttagggaaacagacttgtacaaccctggagaatgccctttccaactatcgtcaatgtcaacccgcctccctgaatgtgctctgaaggtaacagatccccagacacctgagaaaaacccaaagaatgaaaaaaagggactgaagtaagtaggacaacctactctggagaaaacagggagcccaggagacagaagaacataaaaattcaaagcagtatgttcagctggagattcaagagcatatttatcatgctcataaagcaagaactgactgtgataaaaatgaataatcagagaataagaaagagttcttgaaaattaatcatatcgtataattgccagaattcttttagaaagttaaatggatagattcattagaatattctgaatgaaaggccaagcaggttatctggaaggttaagtagaagacaattctccagttcccaaacacaaagtcaaagatgtaaggtatgtgtgcaggcatgtggggaaatttttcctgagctgaaaaaaagcacaaccttgtagatttaaaagaccacctaatgctgaatagtgggaatggagaaaataccccactcagacatatcttgatgaatctcaaaactctgaaaacaagcagtggctcatgcctgtaatcccagcactttgggagaccgaggttggagggtcacttgagtccaggagttcgagaccagcctggccaacatatgaagacatggtctctacaaaaactaaaaataaattagctgggcatggtggcatgcatctgtggtcccagctactcaagaggctgaggtgggaagattggttgggcccaggaggtcaaggctgcagtgagccatgatggcaccattgcactccagcccgggccacagagtgagacctatctcaaaaatcaaaacaacaccaccaccaacaaaaactccagaaacaaagatgaaattgttgagagcttccagagagaaaagtcttcttaaatacaaggaaatgagaatggaattagcatcagacttttcagcagcagcatcagatactggaagatgatggaacaataccctcaagacattgagcaggccaggcaccatggctcatgcctgtaatcccagcactttgggaggccaaggcaggaggattacttgagcccaggagttagcgaccagctgaggcaatacagtgagaccctgtcttaaaaataaataaaaagaaaaaagatactaaggcccgggcgtggtggctcacacctgtaatcctaacacttttgggaggctgaggcaggcagatcacctgaggtcaggagttcgagaccagcctggccaacatggtgaaaccccatctctactaaaaatactaaagttagctgggcgtggtggtgcgtgcctgtaatcccagctacctgggaggctgaggcaggagaattgctggaacccgggaggcggaggctgcagtaagccaagatcacgccactgctctccagcccgggtgacagagcgagactccatcttaagaaagaaaaaacagaaaaaaagatattaaggagaggtaacttgggatgcagcactttcaagtcaagctattaagtcacagagaaaaatcaaaatttttcttttctatgtcagggttcagaagtttatcacccacacatcccgtaggaggttaaggaggccccctgacaaaatgaagaagggacacaaggggataatatgacataagaaagagggcatcacagatactgtgtgagtcctgctctgcgagacacctgaggagtcagtggcacagaggcaggaagtagaaggatggttgccaggggctgtgggagggaggaggaggaatggggatctgggttcagtgggtggagagtttcaattatgcaagataaaaagagctctggagccgggtgcagtggctcatacctgtaatcccagcactctgggaagccaaggcaggcagatcactcgaggccaggggttcgagaccagcctggctgacataacaaaaccctgtctctaccaaaattacaaaattagccgggcatagtgatgcatggctgtactcccagctactgggatcactgaggtacaagaatcacttgaatccaggaggcgaagattgcagtgagctgagatcatgccattgcactccagcctgggcgacggagcaagactctgtctcaaaaaaaaaccaaagagctctggagatgggtggtggcgatggctgtacaaaagtgattgcacttaatgccaatgaatgtacacttaaaaatgaggaagatgctcaattacatgttattcattcacattttatcacaattaaaaatggtaataagaaagggaggaaggaaggaaagaacctaattaaaacctagacgatgagaggatgggggccacgattcttagaactgtcttcttcaaatgggaagagtttgaagctttaggattgtttttccttaccttcatatagcaacctgattatataatcatatgttagcacaccaatattgtacgctcacttttttgttttgagatggagtctcactctgtcgcccaggctggagtacagtggtgtgatcttggctcactgcagcctctgccttctgggctcaagtgattctcattcctcagcctcccaaatagctgggattacaagcgcccaccaccacgctcgtctaatttttgtatttttagtagaggcggggtttttgccatgttggccaggctgatcttgaactcctgacctcaggtgatcctcccgccttggcctcccaaaatgctgggattataggtgtgagccaccatgcacagcctcctgccttctctttgagctaagccataatgccagcttctcagacatcatcttggcatgaccaacaaggccatgaccacacggggcctatcccagggcgctgacaggctgccgtctgacacctgaagcctgacaattgctgaactgggatgtgtaaggaaggcagtttttttttttcctccattaacaattgaaatacttctgcttgtaggaaaaaatgcccctccctcccttggatacatacgttgtggtatgatgcctgccctccatgtagcaaaacatactagtgatctgagacttcagaatctttttcttgcctggattttagaaatactttggtgggaatcacatgtggggagtgataaatgaacctgtatcttaggttattcatcatcctgaaggaactgccagagtctaattttgttcgaaagtcctccaagggaattaaaaaaaaaaatcctttcctccagtttttttaggccctcaagaacatgcaaattacaaaaacataaataagtcctccccaccccccaccccacctccagaggtattccatagtcaagtgtgtgctagagttcatgatgcccatgtacggcctgtgggatggggtgaggctccaatcacaggcgatgtggttgtggttccgaggtatctggccctaggctgcctttccctttgacaaggcaatcgggtccaacctgggacccagactgcacgacctcttcatgtgaacttgggggaggaatagcagggatcagtggccatccacttcctggggatgtgagaccctcttgtgggataattcccagggtgactctcttggctcccaaggggcacagaatgggcgccacccacctgctgcagaggttcacctgattcctcgacccatctggcttgtgccttgccccaggaatccccagtctctttgtggagaactcctggcattgatcttttcatgagccaggtgagaggctgggccaatggagcctgtgtctctttgtgcgtgtgctctcagctgcaggccttcccagccaggagggatgtgtggctgaattcctggtacgacttccatctagtgttttacgaatctgagcctggagtcatagaggtgctttcagccatgctttcccctcttcctcctggaatggtctacccacctcagaggcagcattttcctaggatcaagcagagagatccctgtgaccagtgattagagacctcctgccttcggtgtgcagtgtggggctggggactgctcccactgtctagggtggggtggcacttagcaaagcctccatctgcagccccggtttcccaaggggaccagagagcctgcccacctctgctgcccagggcccacttatcacaaaataggcttgtcttgggaaaaataattcccgtctgaccacactactcattgcctcatgcttccttcgtcctgtgtcctcatatttacagagctgcttaggttgtccctgctttctaagcctcccagacaactttgttgtgaatatacaaggttccccagaacataagcctgtccactttcatacagtgaatctgtcagatccagacacttccctgcctgccgtggactttggacgtagggagaggaagcccagtggccaggtgattgatgaggctctgacttcagagtcaaggaactttgctaccgggttgcaagcttttctacaccacggcttcattggtggaacagagtgtttgggagcaacagatagcagccctccccactcaaagggcacagggatttcatgataattccctgctgggcaaagcagagggaatcttgagtttttgtgtcttccaagatggcagctcttctgacggcaggttcccccactgagtcagaacctacctcacctgcctctttgcttctgcttagtcccttgacctcaaaactaacaactcccttggttataagcaattattcattaaataaataaataaaaaccaacaactgcgtgtgctcagctcggcagaaagaggcccggagggtagactgcggtgccctttctggcccctctcccgtacttggtctgtccttgggcctgcagatatacttcttcagattcagggcaaacccaggtgtggacgaccatggtgcaaggtcaggggagttggctagaggcatgcatctgggcatgacacggagctcgttagttggaacagctcggaatcttccatgccagtataggcattctctccctttttctctgaggaaacacagagatctgatctttgtctggttattgagaactaaagcaaattgaaattgactccgagatgtgggtgtttaaccagatgccttcacctgttgtttgaagatgtggctgtcttcagtcatacaaacgaggcgctgcctgtgtcttcgcagtctgctggagtcaggctcaactctaagtcggcagccatgactggagaatagcattttctgggtctgtcactgttcagagggatcccaacgtgaaacaatcggatatgccaaaaaagcacacttgtcaacattaattaggaagtagttattttagttacaaaggggattcatgttagagtatcttcaattgtcaatatttcttaataaacaataggatgtgactttattgataagaatttttttttttttttgagatggagtctccctctattgcccaggctggagggcaatggcgcgatcttggctcactgcaacctccacctcccgtgttcaagcgattctccagcctaaccctcccaagtagctgggactacaggctcccaccaccacgcccagctaatgtttgtatttttaggagagacggggttttcccatgttggccaggctagtcttgaactcctgacctcaggtgatccacccgcctcggcctcccaaagtgctgggattacaggcgtgagccactgcacctggccttattgataagaatttgatttaaagtcaacttttctagaacacttctatttttcatctttccccacatgtatctttttccaatataaatagcaggattagtaatccacactggaaaactgcatcaaactactttttcaagaaaataagttggtaagtttccatcctttatacagcctctaacagactccacagggattccttggcaataatacctggctggttctaccaacatttggtttaataattgtgtaatatgatcagagttcctgccttcttggttttgcttcctgctagacctttgcaaccaaagacacgccatgcagggttatcagcaaatcatcagccagctagtctccccagaaggctcagctaagttttggggctcagagtgagaatgaagacagcagccctgccccatggtgtgtctaagcctgtgagtcggctctcctgatagactgtggccaggaaatccctgctgcagtgttacgtgacgttgctcccgtccctagtgtgttgtcctctcccagtttagtgacacttcccagacaggctgggacagacaaggaatcaaagccgagcttgtccttggccaggcgcggtggctcacgcctgtaattccagcactttgggaagccgaggtgggcagatcacctgaggtcaggagttcaagaccagcctggccaacatggcaaaaaccccgcctctactaaaaatacaaaaattagctgggtgcagtggtgtgcacttgtagtcccagctacttggtaggtggaagttgcagtgaactgagattgcaccactgcactccagcttgggtgacagagcaagattctgtctcaaatggaaatattaaataaatctgagcttgtccagcacctcagaggctcctgatgcagctggaggtgggcacaccctgtccccaaagcccccattgtccactccagcaatagatgtttcaacatgttttgtttttagttttgtttattaaattagagccagagtctcgctctgtcacccaggctgaagtgcagtggtgcgatcatagctcactgcagccttgacctcttgggctcaaacgatcctccctcctcagcctcctgagtagctagtaccacaggttcatgccaccatacccagccaatttttttgtgtgtggtagagacagggtctcactatgttgtcctggctggtctcaaactcttagcttcaagtgatcctcccatctcatcctccctagtagctgggactacaggtgcacaccagcacacccagctaatttttattttattttattttattttgagacggagtcttgctctgtcacccaggctggagtgcagtggtgcgatctcagctcactgcaagctccgcctcctgggttcacaccattatcctgtctcagcctcccgagtagctgggactacaggcgcccaccaccacgcccggctaattttttgtatttttagtagagatggggtttcactgtggtctcgatctcctgacctcatgatccacccaccttggcctcccaaagtgatggggttataggtgtgagccactgcacctggccaatttttttaattttttgtagagatggggtcttgctatgttgcccaggctggtcttgaactgggcccaagagatcttcctgcctcagcctcccaaattgctgggattacaggtgtcagccatcacacctgacccctcaacgtggttatttttctgtcctttaatgagtgccttttgggacctgagaatgtacatgtggatgttcagccttgctcctagaactgagcctgtatttattggtgaagtgtcatctggcctgagggatgttatgaggctacctgccctgttcttcctaacccaccttctctccccatcccagtcatccctgactgaggagtagctcccaccttcagagaacactcctcatgcagagaaggacacccttgaccttccttcagtttctttatcatatgtttcaaagccctcctctctcaagcatagttttgcctcttgcctaaatccgtctaactgtaatttaagtcatttttctcttactctgtctttaggggagatggaaatgaataagccatcccataactcgtcatttctccacctttggggtttgttggtggtggtagtggctgtgtttaatattcattaatcctccacagggtcttatctgcttatcttaatttaaatacttttttaaatcaaggaggaaaagtcgtagcatcaccgcttattttctgcatggcctttgcattgatattttctagacttcttctggctataacttctaaaactgatactatgagtgcttaaaccagaggcccagttggagaacaaatggcgtggaacagagagatttagtgacatccatataatgccctaagagacaaagaattaatggtacaggcacagggcggagaatagtggcttcacaacagcatacagggaaagattgagctttcagttagcctgtgagcccagaagggatcccctgtgagaaaaccacccaagaggaatgcattcatgagcttccatgaggtctgggtcaagtccagaacaaggggaatgacagccctggagttcctacccctggtctgaccaccctgaaacaactgtatcctatttagaagcccctctcattgctgagatgatctgacagctgggcccatatcccagggaccatagtctggcaggaagagaagaatgtccccacagcacctctgagtgggccatttctgccccagcagcgggctctgccaaaccaaggtgattgcacttctcaagctaccgtgtacaggtgccctttcccatccactcattaccaatgcccataaatgtcaggtgctgtggtctcaacatttgtgtttctcaaaaatgtgaggccaggtgcagtggctcatgccggtaatcccagcactctgggaggccgaggcaggcagatcgcttgaggtcaggagttcaagaccagcctggccaacatggtgaaaccccatctctactagaaatacaaaaattagccaggcctggtggtgcgcacctgtaatcccagctactcaggaggttgaggcaggagaatcacttgaaccagggaggtagaggttgcagtgagctgagattgtgccactgcactccagcctgggcaacagagcaagactccatctcaaataaaaaagaaaagatgtgtatgctgagatgctaacccccaatgcgatggtatcaggaagtgaggctttggggaggtgattaggccttgaggttggagccctcatgagtgggattaatgcctatataaaagaagcccgagagagaggccccctcacccttcctatcatatgaggacacagcaaggaacccccagtctgtgaaccaggaagctagccctcaccagacaccaaatctgcggccaccttgatctcagacttctcagcctccagaactgggcaagaagactgcaaactccaccccatgcccttaaaagtaagagctgcttatggctccattgaaaaagaaaacacttgttttttattgtttgctttcctagcactgacttaaactctaagaatgttctattaatataagagtttaattttttttttctgtaagtgtccctcattgggagagaagaaaagtaacatttggcaacctctgaagacatctttgtcacaactgggacaggaggtgctactggcatctagtgagtagaggccagggatgctgcaaaccaccctagagtggccaggatagtccccgactaccaaatgtcaatagtggggaaccctgaacaggcctgtcaggtacatttcattgaacacagccatcctgtaagcaaagcagtgttatccccctttcatttttgcaagaaccttaaataatatactaagatttgagcctgggtttatctcaaccaaagcccatgccctttttgttactgttttccgcagaggaggccatggagggatggagttgcaagggcaatggggaggtggagagaggcaggcagagccgccttccagccccaggaggaggttggagccagctccttccgctttggtgcttatgttcaagtttgtcttccagactctgcctcaccctgcgttcagtcggacttactaacccaggccaggcagttcattttccctgagctaatggcagtagctgtgtaaaggggcaagaagttattcacagtatgagttgggtttcttctatttgcactcgaggtgggacactgggggcaggagcatcagtcggcatttttcctcctttccttttccccccagtgagttctttctaccgtctgttgatcttcagtgtcggcctgaattctcgttttggtgttccttctgcatgcataactaacgtgtcctgccttctcatgagcttagctctcggggatcacctctgttttcagacacggtaacagatacattgtcttcccccaggacctcttcttcctgtttcgctttctaaatccagggggaaagtgggctgatgcctcctaaggcagcgtggagttgtggttctctcccgccagggccactgcagacctgagaggaaggacctgctcctttgcaaaccatcacggaatgctcatttgtgaacttttgtcccctgctactggcctggcctgaggtacaggatgggccggagggaaaatgcattccctttgctccaaacctcttcagggtacagagactcagatgccagtgttcactacccatggggccatgttgtagctgggggaaagctgcaagcaaactgggcagcggaggacacttgggggcaggaaacaatgagagactgcggtttacggcccagctctagcccccccagctgggtcacctagggcaggcccttttcttcatctgctcactgggtgctcccttccccaatctcccaaagctgctgtgagcatttatgtcacaagtcagcaagctcaggctgtgagctaagctactccaagcgattgttttgctaattagcacaggtcctagtgctctgggctgcactattatttgcattaaaatgactaattagaagaaaattttgggggcattttgaaaacatggcttctcctttggcatgtttaattgtgatatctgacagatatccttgtggtttaagatgacacttttaaaataaattctctcctaatgatgacttgagccctgccactcaatgggagaatcagcagaacctgtaggatcttatttggaattgacattctctattgtaattttattcctgtttatttttaaattttctttttgtttccctggaaaggaaagatgatgctcagttttaaacattaaaagtgcacgagttgtctgttacaataaaattaaatgtgtacacaaaggaaaaaaaaggaaaatttttaacaaaagagtcaaccagctgttgtttatggttttagaaagtgaattttctcaaagggagggatacgcctgtctagtgtcaggaaatagtttgcttggtttctccccaaggatccctggtgaagatctgtgccttgcagacccaccgttactgatggtctcgggtgtgttagtgccaaacaaggttgagaacagcaggcttgtaaatcctggactcctcaaaggcaggacactggccaggtggcagcaggtcagatgttctcgaagttcatattctcatgaccatggacacgggcagctcccacgactcgggctgcaaaaacgaggctgcctcctccctaacggaaaggatgtcagaaacccttaggcatacccatcgcagcctgccctgaaattcagctctcaccagtgtcagccacctcacgtaggatactcttttttttttgagatggagtctcacactgtcgcccaggctggagtgcagtggcgcgatcttggctcactgcaacctctgcctcccgggttcaagcgattctccagcctcagcctccctagtagctgggattaaagatgtgagccaccatgcccagcaaattttttgtatttttagtagagacgaggtttcaccatgttggccaggctaatcttgagctcctgatctcaagcaattcacctacctcggcctcccaaagtgctgggattacaggcgcgggagccactgtgcccggctgggtactcattcttgcttacctctttttgatgatgttgcatccatcaggcaaaccttaaaatattgaacatggatccacacccctttctgatacttgagttatggctttcatcatatatattcctggagtaatgaaggaccaacaccctgggcctcggactcagaacccacctgtgtctctcagaccagctcccatcaccttccctctctgatctgtggactggaggtgacagttcccacctatatttgaattagtcattttaatgcaaatactagtgctccacattaggcctctaggctccaaattaggcctcctcttcaagatcctaacgtctctgtgattctttgcctcgggaaatgggggactggtggccctttgtatgctagacactgggctataagccttatacctgcagtgaaatatatgtgtcgatactagtctagtctatcattgattactgtaaaaatacacaaattataaaaagttaaaatttatcaaaaattatacccacaaacacagatcatatatggtgccactcacagtgaagagaaatgtaagcaaacgtaaagatgcagtgttagcctgtattctcagcactttgagaggctgaggcaggaggatcgcttgaggctaggagttcaagatcagcctggacaacttagtgagaccatctctatgaaaaacttttttaaaaattaaaacattttgtaaacgatatattaagtcataactacatagaattaactacagcccactgtactactgtaacaattttgtagccacctcctgttgctgttgcagtgagctcaagtgttgcgggcgtctgcttaaaaggccttgttgggtggggcgcagtggctcatgcttgtaatcccagcactttgggaggccaaagcggacagatcacctgaggtcaggagttcgagaccagcctgagcaatatggagaaaccccgtctctactaaaaatacaaaattagccgggcatggtggtgcacgcctgtaatcccagctactcgggaggctgaggcaggagaatcgcttgaacctgggaggcggaggttgcggtgagccaagattgcgccattgcactccagcctgagcaacaatagcaaaactccgtctcaaatacaaataaaaaataaaaataaaaaaaggccttgtgacactgagcatctcctcatgagcagttcatctctgcagtgaattgcatagtcccgtaaaaagtgatctctctcagttcttacgtagttttcgtcatgtttagtgcaatatcgtaaaccttgaataacagcacgggacccatacaaagtaccattaaggatgctggaagtgctcccaagaagcagaaaaaagtcatgacgttataagaaaaaatgaacttgcttgatatgtaccatagtttgaggtctgcagctgtgggtgcctaccatttcagacacacaactcctctttataaacagacaacataaacgtacggtcttgataaatacagtacggcactgtaaatgtattttctcttccttatgattttcttaacattaagaaattctggccgggcgcggtggcttacgcctgtaatcccagcactttgggaggctgaggtgggcagatcacgaggtcaggagatcaagaccatcctggctaacacggtgtgaaaccccgtctctactaaaaaatacaaaaaattagccaggcgtggtggcgggcgcctgtagtcccagccactcgggaggctgaggcaggagaatggtgtgaacccaggaggtggagcttgcagtgagccgaaatggcgccactgcactccagcctgggcgacagagagagactccatctcaaaaaaaaaaaaaaaaaaaaaaaaaaagaaaaggaaagaaattctatctagcttgctttactgtaaaaatataagaagtgttatctagcttactttcttgtaagaatactgtatataatatatatagcacacaaaatatgtgtcaattgactttatgttcttggtaacgtcaatattagactattagtaacatttctgggggagtttaaagttatatgtgggttttcaactgtgcgagggattggcgcccctaatccctgcattgttcaagggtccactgtaaataaaaaataatttttaaaaatgcgtatcgattttaaagcctggttgctctggtggtgctgactccagccagccaccttcagcctcagagctgttaaagggagggttttggagccttctctgtgggctgctaaggtgtgcacgtgcacgctgagaggccgggcccagaaggcttgatgctgctgtctggttttggaaagacctccctctgactacctggcttctgaatctgacagtggcccaggagtcacagtggctgatctctgcagtttcctccacctctgttgtcctaggactccgtgtcctgacattggttgttataaaaattcttataactggaaagatacttggtagggaatcagaatcccaaattctcactgcgtgcagtggctcatgcctgtaatcccagcactttgggaggctgaagcagacaggtcacttgaggtcaggagttcaagaccagcccggccaacacggtaaaatcctgtctctactaaaagtacaaaaattagctgggcatggtggcgcatgcctgtagtcctgctacttgggaggctgaggcaggagactcacttgaacccaggaggtgggggttgcagtgagccgagatcgcaccactgcactccagcctgggcgacagagtgagactgtgtctcaaaaaaaaaaaaaatccgaaattctcaacctgcagcttacagtgatcacagctatcccatcaggaccccgcaggagatcaagcacaaaaggtaaaattaggcaaaaaaaagaacaccttattccttagcaggatctttgggctccagaccccattgcggactcttgttgagctggagtgcatcacaggtgagcactttcacctgaacatgggataagtctccgctgccttcttgtccccaggtgtctcctggagtcagtgtcacaattccagcatcctggacccacttcaaacagacaggacacaagaaagaaatgcgctgtactaagaggcaatgaatcaaaagaaaacgagttcctctcattcagtcgatttttatgtcttccctcttcttaaaagaaagttcgaatttgacccccaaagcccttggccttgctcctgaacagtggtggtaattcagtagttctccttcgtgtttggatcgaggggaatcatcgccctcttcacagatgtcagaagcgccctgatgctgtgcttccactcctttggtccgtggccactggatcaggtccatttccttccatgaccctcgctgcgccatcagatacacgcagaccagcatcatcctcccacatctgatccctaggcgagtgggtggtgaacttggcaagcccatgtaccacaggaaaggacgtgaaaacccatcttgtctagccccacgctgcacactcgactccagccaccccatcagtgtagaccgcatctgtctgcaccatatgagggtggttcctttgaaagctggaatgttcttcaaagagcagtcatataaaaatgcttgcttggccaggtgcggtggctcatgcctgtaatcccagcactttgggaggctgagatgggtggatcacgaggtcgggagatcgagaccatcctggctaacacggtgaaagcccgtctctactaaaaatacaaaaaattagacgggcgtggtagcgggcgcctgtagtcccagctactcgggaggctgaggcaagagaatggcgtgaacccgggaggcggagcttgcagtgagctgagatcatgccactgcactccagtctgggtgacagagcaagactccgttctcaataaaacataaaaatataaaaataaaaatgcatgctggtggtggtgatcacgccacccctcctcctttgctactgacaagaccccagtttattcagatggtggctcccttgatttcagggagcatgggcagggtagactctttcccagccccagagagggattgagactggcctcaattggtcctggagtctcagtatttggggcctgaggctgcgatggatctagggatgggcgtttgctcctgttctggccgaagaggtatgagggatgctgggaaagatgttccttccagagtaatgagacaaagacttgttaaagaaaggtttctacctttctactttcttcttgcctaggatgtaattgagatgcctggaggtagcacagtcactttgcaactatgaggacctaatggtgagaatgaaggaaaaaaaaatgaaaactaaagacacctatgtctgcagtgacatctttgggctgccgtatcaaccttggactttctgttgcatgagctaataaataaagccctgtgtgtttaggccaggggttatgaaagttccagaaagtaaatattgtagatttcaggccatacagtttctgtcccaactactcaactgtgctcatgtactatgaaacccaccataaacatttcgtcagccaatgagcatggctgtgtgccagtacaacttcatttacagacactcaaatttgaattttatataaatttatttttatttttattttttgagacagagtctcactttgtcacccaggctggagtgcagtggcacactcttggctccctgcagcctccgcctcctgtgttcaagtgattctcctgcctcagcctctcgagtcgctgggattacaggtgtgcaccatcacgccctgctaactctcgtatttttagtagagatgggatttcaccatgttggccaggctggtctcgaactcctgacctcaggtgatctgcctgtcttggcctcccagagtgctggcattacaggcatgagccactgtgcctggccaaattttacataattttcatgtatcatgaaatagtcattgttttttcaattacttacaaaatacaaaaatcattcctaggttgcaggccatagagaagaaggcagcagccatttggcccccatgacttagtttccctgggtttaagctgctgttacgatgattttctttgactggcagcctcatgcagtcctacttaatgcagtgacagtgatggtgatgttccttatggggaaatattcctaacccctcttgcttttcttacatctatttcagagggtctcgctgttggagttggatttggggctatagaaaagacggcatctgctacctttgagagtgccaggtaagccagcatcctgggaccctagagcatggttctgcacccaggggtgctctgggtgtgcgtgtcacctgggtgggctgtctgtgcattattgttcagcaccccagccccacaggaccaagactgatggaggccacatggggtccggtgaaggccatccctgagagaggagtctcctaagagaggagtctttcaactgagctattaagtgggtgatgatcattttggaaacaaagcatggatagaatcgcaagctgtactctaagcacttcaaaggtgtgaagactaatgacaaaaaacaaaggcagccgctgacactcttcaggcctttcctttttgaagccctccctttgtctttcttgatgctagggtcccttcgtttccctctctctttccacctgctcctggaaaggccctttggtggtgggcttgtcatcctatggcctgttcttaagaggtgatgttcccagggacctgtatccagagcatccttccttctcactgaacacaccatttctgggcaatcttctccgtccttgtgactttattttccatgtgtttgctgatgatacccaagtcaagctccagctgagtcttttgtcctgaatatgttcctatatttctccatctgctgtcatgtagaacctgcccctcctccagggttccctgtcaccgctgtacccagttgaccaagccaaccctgccgtcactctcaatgccgcgttttccctcaccttccatacagaagcactgggccttgtaaattctttgctcttctacctgcctggaaataaacagggcataggtaaggtcacagccttgggatcacatgctgttctctagacatcgtgcagctgtggtttccatggtccacccaggcccataaagccataaatgccacactctgcaggatggagccttctatctgagggcagcaaactcaagtggcttcaggggactaaaagatcatcaaaatgggtggagacagtcaggtgaagacagctgggaaccatgaggaataaggcgaactttaaacagcacgcgcactatctaaaggtacttgaattcacagttattttaaaacataactcagtgcagtggctcaagggcgactggtttatcactcttggagctcattcactgtcttcagactgatgcagtcccaaaatattctccctgactcccccaaggaaatagcactccctcctgcacccattgatcgtgactgtcagaaacgaatttctcacataaccccttttccatccttccccggttaccaagcctgcgtggggcctgtttatgcgccctgaggactgtgttcaggccgcttccttgcatctgtttccccagctgaagtggagcccctgtgtgttaaatgtagtcattgctggtcgctgaattctaaggctgtacgttaagaagcgtgcctgctccatgaagccccgaatatgtgcatgggctggaatgttccagggcgaaacttttcttattctcaacttcatgttcctgcctctcagactcccaagtcattcattaaaatgatgcttatggtgaaaatcacatgagatggtagacaaggagggcagagcctttagaatgtaagaaatgtcacccaaaacaagggctaatgatgactcgtcacaccctgcagactgctcttctaagcgcggggcctggggtgggggcatgtagctcttctgcccctggcacagcagttttgatcctgactccactagaccacaagagacttcagagtcaagcagtatccacggggctgaagagcccagagggtgtgaccttataaacattcaaaggccaagtcctcccagagcgcaggaaaccgcacacgctgcagaggtctgtgcccagcaagtgacagctgtgccccaggcatggaactcacaggccaggctctctggtggcaccacgtcccccgcgacatcatcatgtcaactccgatgttcttctgttctgtcacctgcactttctgccagtctttataagtattttggaagaaagtggagcaaaaatatttccaactcagctcctcccttccccggaccaaacagattctctctcagttacaaaagccctcgacaggatcctctaactggggtggagtcggggcagcaggccttggtgttttcagcctcacgagaccctctgctatacaagcatcactggagggtccatatgcccccacacctgacccattattgtcacagcctgaggggcaggaatgatggagctgtgctgccattgccactatgtccacagagtactggggccaggggacccctgcaatgcaggctgcagagaaggaacgagggaagaacattccctcaagcagacccttcagcccattctccccactttgaaaaacgtgtagagtttgtgattccctcctctctaaatgtctggcatcttcttcttgggtggcaagatgtagaacagcccctgggccaagacttgttagctttctctgcctttagttcacactacacataggatttcatgggaggatagggacaaaaggatagtggagagtgaggatttcccacttgagtagccatgagggaaaggtatgtgctgaactgtagcctggacaggcagagcctaccaccctgcaaggctgtagaatgctcaactcatagcaggtcggggccagtgttgtgcctgttgacacaaggaggtcaagggctgcagcttccagttatctcataatgctggggctttcgaaccagcatctgtgcttgtgtgtagagtccagagaagccagccctgcagaaacagcctgctatggggttcatacaccaaggcagtatcttgccttagatgaccacctgcaatccaggatgagactttggcttgatcaattgcactaaatccacccacactcattctcagttccctctttcaagagggaaaagaaaaggcactgacactgtaagatgatgaaagtagaaagtgaacaggcaaccctgttggatgagccattggtgaaatcatgtggtcctcagcattgaataaggccgcatgaggccaggaccactgtgacacagagtgccaggcagggggactgtgcaccagcccctgcctgcccggagtctcccagactcagccagtccagcctccacggaggctgcagatgcttagcttatcttctgagcagtcctggtctccactcattcattcattcattcattcatgcacccgttctttagtgagtagtggtatatgtctcatattttgctagtcattgcagaaaacacaatttgtatgaaaaaactcttcctagaagctgaacatttgtcactagtacttccagtaacatggtgagatcagctgacatggatgtcccaccacaaacaaacaaactagtaaacatggtttttactacacagccaaggactaaggagaaagaaatgccagatgctagaaataaagggaaaaatcaaagacaccgtggtaggtggtttcagatcctcacagagcttcaaaggattgagggttggacctcttgcctatggagcggatggagccgtgcccttgcccttggatgtcagggaactgaaacagcccagcctaaagaccagggcttgtaggcattgccttctgtaaaagggactataaaactccacccactggtccaggaacttgcgtgtgcaacttgtcctctctccaggatcttggacagagagatggggtatagggcatagtaaatgatgtgcaggataggaaaaccctagacctgcatcacacaaagggtgtatggtacaaacttttatactctatcttgtaccagaaacctcaaataaagagcataaatactggcctaggataatagaaatctttcaggctctagcaggaacaaacataaagtccttacctacacaaagccctaactcttccactaaccagccacaccagatgcctgggggcaaggaggaggactcttaagtacggttgcacttacactcaaatagaaaataaaatacagacaaaccacagagggaaacatgccgctgcgcaggaaagatagcactcacaaaactagaaataacaaaactgcaggagaaatgcatcagacagacccgaaccgagggacaaaatacctgaccagccctcctcaaaactgccaagatggtcccaaaacaagggaagtctaagaaacagtccagagaagacgaaggagactaaatgcgaggcgctgttctggatgggatctttgtacaggaaagagacgttagggaagaactagtgaaatctgaatacactgaatatagtgtagttactagtgaaatctgaatatagtgtagttaaaagtaatgcacatggccaggtgccgtggctcacgcctataatcccgtactttgagaggccgaggcgggcggatccctcgaggtcgggaattcaagaccagcttggcctacaaaaccctcccatccctactaaaaatacaaaaattagccgggtgtggtggtaggtgcctttgatcccagctacttgggaggctgaggttacagtgagctgagatctcaccactgccctccagcctgggcaacagagcgagactctgtctcaaaaaaaaaaaaaaaaaaaaaaaaaaaaaaagaaaagaaaagaaaagaaaaaaataaagaaaagaaaagggcctgtaatctcaccactttgggaggccaaggtgggtggatcacccgagatcaggagttcgagaccagcctgaccaacatggtgaaaccccacctctactgaaaatacaaaaaactagccaggcgtgatggtgggcacctgtaatcccagctactcaggagctgaggcagaagaatctcttgaacctgggaggtggaggttgcagtgtgccaagatcgcgccattgcattccagcctgggcaacagagcaagtctccatttcaaacaaacaaacaaacaaacaaacaaacaaacaaaaaaaggaatgcaccaatatgggttccttagttgtaacaaatgttccatccaaagtgagatgctagcgataggggaaactgagggcagggtacacaggaactctctctactatctttgagcttttctgtagacctaaagctaatctaaaatgaaaggtttatttaaaaaaaaaactgcataaggttgcacaaatgaaagcactttttaatacttaataatggatagatttataataatataatagttttacaaaagacaccaaggaggaaagccgcccccatgatcaaatcacctcccaccacgtcctacccccaacattggggattacaattccacatgagatgtgggcggagacacagatccaaaccatatccaccagggactgggacagaatctggagataccggaggcagagacggattctctacacagaaacgacagttcaactcacagaagatttctgagctctaattgaagacaggggaatgctgtcttcaaagtgccaagaaaaagtaactgccattctagagtagaagctgccaaactttctcttagaattccagatggcctgtgggccatataatctctgtcacaactgcttgactgactgtcgtgcaagtgccaaggtagccctaaataatacgtaaagaaatgggcatggctggccgggcacagtggctcacacctgcaattccagcactgggaggccgaggcgggcggatcacctgaggtcaggagttcgagaccagcccaaccaacatggtgaaaacccgtctctactaaaaatacaaaaaattcgccggacgtggtggcgcacacctatagttcctattgctcggctgagtataaagatgggagaccccatctctataaaagagaaaaaaaatcatctaggcatcatggtgtgcatctgtggtcccatctactcagggggctgaggcaagaggatcacttgagcctgagaggtcaaggctacagtgagctgtgattgcaccactgtgctgcagcctgggtgacagagcaagaccttgtctcaaaaaataataatatgctagtgaatctaaaaggacaactactaatgagagagagaggtataggatggaggagggaagtgagaatgcatgaacgaataaacactgggaagagagatggaaaatcaaagtgaaataattcagccgtcagatggtggaattcatctcttcaaagaggttttgccttttaaatgttcagttctaagtgattaataagtggcacacctaaaatatgacatggtaaagttgaaaggaagaaagatacaaggcaaacgctaatcaaaagaaagcgggtattacatttttgtctcagacaaaccagacttgaaggcagaaagccagataagggataaaggtcagtacttaaggaaaggggaagtaatgtaccagaatgacatcatgatgctgcgtttgtaggcgcctagcaacataagcctcgaactgtttaaaggaaaaatcatcagaattgcaaggagaaacacagtcatggtgggggagtttaatgtccctgtctgatacttgtagatgacgcagatattaagttaacaaaatgcatgcagtggacatatataaactgtagcccagtcattagaaagcttacgttcatttcaagccacgtgagggttcctaaaatggattagagtgctctgccacagagagagtcagaatacataccctaagatcaatgccattcagaccgcattgtcttgatttcgatgtgatatagttgaaagtcaatagcagaaaagatacccatagtaatttattaatcgacagttaagcccataggcggcataagattaacacagtccaagctccaaagggcttgatccaagccagaccaagaaaccagtagaagacaggcaagctttttgctcctctcaagggctcttcatagaatggtctacatttcatcaggagcataggggtggtctgctttggtaaggggatgataagggcaggtagtactctgagcaaatgccaaggtaggtgccaaggttttttcagggctggtggacaaaccgatatgactgagatagaattttctggtgctttagagaaggtatgtctaaaggattggattggctggttgcagtggctcatgcctgtaatcccagcatgttgggaggctgacataggtgggttgcttgagcccaggagttcaagaccagcctgggcaacatgatgaaaccctgtttttccaaaaaaaaaaaaaaaaaaaaaatatatatatatatatatatatatatatatatatatatatatataaatagccaggtggggtggcatgcacctgtagtcccaggtactctgaatcctgaggtgggaggaccacctgagcctagggaggttgaggctgcagtaagccgtgatcgtgccactgcactccatcctgggcaatagagagactgtgcctcaaaaaaaataaaactaaataaataaaggattggattgaggcaggaaagaaacaggtgcattactcagcaaaaagttggcaactatggtgggttccgatgcaggcaagagacatcacccaagaggtaactcaaacatgcatctggctaagataaaataatctgggagagcaggtggggagataaaccagtgtgaagaatgcaccaactgaaaaagaatatttacagcccaccccactgctgtgtgttttagcagcaatgaagaagatactggatgttgtgatgaccatgagaatgaggactgatcccaggaagagctgttgcgtacagaacccacagacagcgtttgccagctgattttgttgtcgcgtggaagggagaagggagaatttgagtccaagtgacaaggagacgtaggttaatctcgtgccgtggagtgaactgagagggaagaaggactccatttacacagattggggaaagcgttacccagtacaggcccagggtacacgtgcaccaagctaactgagccagatagtttatgactcctttagtggaggggttggcaaactatggtctgcgggccaaatttggcccaacacctatttctggaaatgaggctttattggagcatacgcgcacccatttgtttacatattgtctttggctccatatgtgctacagtggctgatctgcataatggccagagaaatcttaaggctgaaaagctggaaatacttactatctgcaaagctgaaaatatttactatctgacctccctgttcctttgttcctttcctttccctttccctttctttttgacagggtctcactctgtcactcaggctgtagtgcagtggtgcaatcatggctcactgcaccctcgaccccctgggctcaagcgatcctcccacctcagcatccctcccaagcagctggggctacaggcacataccaccacacccagctaattgttgtattttttgtagagattgagtttgcccaggctggcctccaactcctaagctcaagtgatctgcctgcctcagcctcccaaagtgctgggattacaggcgtgagccaccacacctggctatctgacccttttcagaaagcgttagacccctcctttagtggacacaatccctgtttttagcccatattcatcattaaatactctgaggccaactgtcttttttatgacctcttgcttgtgccctgtctgttgaagcaggaggcttcatataaacgtcgcctgtggcattatagccacccacaagaaaaggaactattccaagaaggcactgtcttcagttcccacttcaggggtttctgacctgggaagaagacaggcaggcacctcgcctatcatgtgtgtgtggctgctgccatctggtgtacagatgccgttacttcctcaccttcctggagccctccccagctccttcccatctgtccacctccctacctggccaggtcagcttgcaccaaggtgttcattcagaggtcattgtctcctgaattaggaagactctcagccagcagagggaggcctgtagttcaagggaaacacagcttgcttctttctttttttttttttttttttttgagacggagtctcactctttcacccaggctggagtgcagtggcacgatctcagctcactgcaacctccacctcctgagctcacaccattctcctgcctctgcctcccgagtagctgggagtacaggcacccgccaccacgcctggctgattttttgtgtttttagtagagatgggtttcaccgtgttagccaggatggtctccatctcctgacctcgtgatccacccgcctcggcctcccaaagtgctgggattacaggcgtgagccactgtgcctggccccagcttgcttctttctgttctggtcccatagcagtttctttctgtttcaatcacagaggaattcttcagaccgtatgtgcttggggaattgcatgcttaagcggttttcctttctgctgtatcgtcacttcaaagaacatgttctctggagaggagacatgccctcagctcccacttcactcagtggcaggcatcattcaaaccagcagggagagtaagactgtttatgcttaaacactcagcttcacataccacttcctgttttaagctttgactaagcacgcgtcaagagacgtttgtagtctgtggacctgccttgacctacaggtgcagcggccatcccagagcaggctgtgcacagcagaggaggctggctgcgaactttagtgtgccatggatagtccacaaaacacatccccaagatatgaccggaccagctactgctaatcaacacccagacacttggtaaaggaggcatggttgattagtctacatttggatgtagtatagcccattaaattacacatggaggcatcaaaaccaattttaagatatatgtttgcctctctgatcaaagaggaaagatcgtaagtcagataaatcctttcccctggcttatacatatatatgttgatatattaacaattgtttaagacagcagccattagttaacaaagcaaccctttatttagaaagaaaagtggcatattttgacatattttcctggtcattcatcaacattagctagtagatgagcatgtctgtatgtgtaagatacgttacatgtgtgtctacctgtccaagcagcccctctacttttgctccagtagattgtgtgtgtgtgtgtttgtgtgtgtgtgtagacaggatcttgttctgttgctcaggccgcagtgcagtggcacaatcatagcttgctgcagccttgacctcctgggctcaaataatcctccctcctcagcctcccaagtagctgggactccaggtgtgcatcctgtagattattgaaagcatgcttgcaggttacctgtagagaagttacaaaggagacttcattgttgtggcggggaggagtctcggagaactcacatggaaacattttaattatagttcactctaacatctttgaacaagcaagctgtcttcactggctccctccaagcctccatgcagctgctcttgcaatgcctagacctgccccaggcagcactcagtctcccagactcgtggagcatcctagggagacccttacttcctcaaagttgctgatcttaacctcctccctgcctagcaacttgggtctcagcattcccagcctggtctccctggagagtggcttttagcctgagaattggagacccagcctgaggacactaaggtacttgtggagaaaatactttgacatcttgatcccactgtccccaccctttcacagcagaaaaatgcccctcccacccttcagtcacttcggcacaatcctgttctattctttatctgcaatcgcacattgtgctctcaattttattttatgcaggcaagctcttctcttgaacctatcacactaccctgtctggaattctagagtgatctattggcagctccttctcttcagttttcctggctcatcctgccacactacacagcctcaccttgcaaagagacagtggaatttgaaagtgccggctggcagcggtggacagacggcgccaccacgcggtagcttggtatcataggttgctagacacagtaccagaaggaaaaagtttgaccaggaaaggtgactgtgtgtcgctgtccaaatccatgttcggcttgtacagaaggtgtatctgcagaaggctaaggaccatatatgtaagttacatgtaactttggacatgtccaactttgctttggatatttttcaaaatagtaacatccttatattctggctgttataccctgatttttcaccccccatttaattaagcatttataaagctcgttattgtcttattttcccatgttgggaataaaagtatagcttttatgtgaccctacgtagaggggtagaaatgtgaaatgggccaattaaagtgtcagaagctactccaagcttttgatggtctaccctagcaggggagcatagaggtgcgaaaagtcctcacttccagacacccaaaaatcagttcagtttttctttttgccatttggaggggagagggtgacatttacttttctagtgacttaaaaacataatgttatttattgcatgcgttctgggaagtgaagaaagtgggccaggccaaggaagtccaccggatgcatgggcaaagccagaccaggatcaaacaggttctcaccatcctatgtaatttgccatcaagtcattcatcagtctgtccatccatccatcccttcaatccacagagattcactgagcacaggattcatctttttggagagagagaacttagaatagttatttcatcaactgcaactgggaaaacaggcttgaatttgtaggactggtgggctggacatgactttgaaagatcatcttgcctcttaagtatttttttttttttttagcagttgagcttttggaacaagttcctaagcgaacactctggatggaatagataccaccctttccatgaaagttcccctctgcacttggcagaaaatccctgatctagcccaagtctctaatgttataagtgaagaaactgaagtctcagagtggaaaaggaagtcatcagggatgactcaagtcagagctcctggttcctgaaccctggggctctttcctcccctctaagagctgatctgtctgtagctggtcatgtttccatttcagagggtggagggaacatccaggatgtctcaaaaggtctgctttcctcattgtctcagcttcccctctgaagctcactcccccccaccgctttcttgatgttttttctcttgtcccatttgaactgcaagaagtgcccctcccattcttggaccacctggaagcttttgagcaagcttttggaaaattatctgttttgtgcattgcaatagaaaactcaaatgaaaggagccagatgggattgagggctgggaagcgaacagggagaaatgaatcatcttgggcctcatctccagagtccttgtccaaacctgggcaattcttatccccctctgtccctctctttcctctccccttctcccttcccatggctttttatgataatgcttttcaagctcccaataagagcaacgttttacagaaaaaaaaaaataaaagggacagtgttttgccagtaagatgtgtgttcccgtgttagcaccactgatcgcccaatagttgcacgtctaagatttttctttgactgagaaatcctaccagggaagaagaactactccttggagactttgtcctccacatccccagttctgtgctgacaaatacaatcccgtcgttacctggaaacctggtgattttccagaacacgtggaggagaatgaagaacttaatagccatttgcctgcaaaatatgccatcatggagcctggtgcttgtgaatctctgggttgaattggataaacagatggacagatgggtgaatgatctgattacctgctaacctgagattgcccacaaggttccatcttggtctggcttcgtctgtgtctggcagacttttacgacccactttcttcactccccaggactgatggaacaaataacattattcaacggaagtcattcgaaaagtaaatgtatcacctcaaaaatggcaaaaagaaaaatctagttgattttggggtgttctgaagttagcactcttcacgcctgtactttcttctcctagcacagacaatccacatgtagggtgatggttgtgtgtgtttggggttggcctcactggtattacaaatccagttactgtcatccatctcttcctgctactacttactctgaaagatggttttcctttgaaggatggagaaattctctaatccagacctcctgacagctaggctgcaaacacacacacacacacacacacacacacacactcttacactcctacaaagacaaagaaaatcctgggagggattttaagacacgtgctcatttcagcactctgtcctcctggtgacatctctctatgaagcatctgggacttcacctgacaagcacctgacaacctgactgagcactcggcccttactgtatgtgcctcagtttctacgtgcatcatgtgagaaaggcagattgtatccatggctatgagactgttgggctttgttggacaatgaagacgtcccccaaatatgtaaagactgacaaacgacggccaccctttatatttttcaaagtgaaggcattgaaggaaagatgcaatcgtagaccgccatggtcagtgaattattttatgagagatcacccttctagaaagtgcagccaggtgcagtggctcatgcctgtaatcccagcactttgggaggtcgaggctggtggatcacttgaggtcaggagatacagaccggcttggcaaacacggtaaaaccctgtctctactaaaaaatacaaaaattagccaggcttggtggcaggcacctgtaatcccagctactcgggaggctgaggcaggaggatcgcttgaacccaggaggcggaggttgcagtgagctgagatcgtgccattgtactccagcctgggcaacagagcgagactctgtctcaaaaaagaaaaaaaaaagtgttatttaccaccagaaattagttcatgaaatcaggagctcaggataaaacaaagtcctttctgtcttccaaacagaaagaccaaagaccttccaaagaccttactttttccctcccccaccccaccccagttcaaattctgtaaaacaatatgaaaaccttgcataataatacctggtttgtcattatgctcttgatacaaactaatccgtttgaactccattgggcaatgcgacaagatgatctggactctgcaatttattctgctactgttttcatctgttgaaaatctagtttcttgaaattggacggtgtatttttaaaatgtgttcccttgacttttgcttccctgttgtctttccctgtgtgcagaagccatcaatgagaggagggcagggagggaaggggagtctttttgagagaaggaagtcacagccctaggagggatctcgattcttgaattcctaagtattatcccaaaagagaatcattagcatggaaaagaaattgatactggaagatactgaattcctttggattgaccttttttttttctttggctacttcatggaaatgggggccctgggacagaataatatccgagagaaaaataattttttaattcacagctgagttacagggtatacttttttttttttttttttgagatggaggcttgcctgttgcccaggctggaatgtagtggcgccatctctgctcactgcagcctctgcctcccaggttcaagcgattctcctccctcagcctcctgagtagctgggattatgggcatgcaccaccacatccagctaatttttgtatttttagtagagatggggttttgccatgttagccaggctgctctcaaactcctgaactcaagtgatctgcctgcctcgtcctcccaaagtgctgcgattacaggcatgagctaccacccccagccaattttaacttttaaagttctgtttctcaaacacagagcatcatcatgacaagggcctttctcagggccacatcctgcatcttggtccatggaccacagtaatgatgagtgttatgtaggggagctctgctgagtgcttgttgtgtgcccagtcctgtgctgtcttttaccttcattctcttgaatcatcacacatggacccaagatgagccctgttttacagatgtagaaaattgaggcactgagatgcctctcgtccacagccccgtagctagtaagggcagcagtcaagaccggacatggtggttcttgcctgtaatcccaacactttgggagggtgaggtgggcagatcacctgaggtcaggagatcgagaccagactggccaacatggtgaaaccccgtctctagtaaaaatacaaaaattagccggacatggtggcatgcatctgtaatcccacctactcaggaggctgaggcgggagaatcacttgaacccagcaggcagaggttgcagtgagccgagatcgcgctgctgcgcttcagcctgggcaacagagcaagaccttgtctcaaaacttaaaaaaaaaaaaaaaaaaaggcgagggacagcagtcaagtctgtgcctagtctagtctctggccccagaacctacctcttttggggtgttctaggctatgaggcgacctggccaggcaggaggagaagctaagtgggagagcctgggggagtgggtgggtcttgtttcctatcaagtttaacttactgcagaccccctcatacctcattgtatgtgttcgggggatgaataggcactattgatgctatataagaccatggattctggggcttgactccctgggttcaaatcctggctctttcatcaactgggtctatgaccttgatgcgttgcttttcttatgtgcctctgtttcctaatctgcaagatgagaataatagtatctacctcagtggattgttctgaccaatgaactgaatttctctaggaaaagctccctgagtggagcctggtggatggtaggtagcactgtccatggtgaagctactgctcttgcttcctggcacacccatgacacatcctacagctagatggccagcccatttctatttccactcaggtccaggacaagcactccccactccctgcctccccaggagaagaactgtctcagaagtagcttccactgtctgcagggaattgacatccaagcctcggggcccaggtccaggagcagggtctctgagtgtgcctggctactcggagcccaggtccaggagcagggtctgtgagtgtgcctggctgctctgccctcccactgcttctactcctgtttctagagctccgtgctttataaggggccttcacatcctttgccctctttccccccaggccctcccaggctgacttcgtcatcttatcacagcatggactgtgcatgcttatgagccctggccctggtactgcccagcccttgtccccagccttcgttgtgtggtgtttttctctctcctgtgtcctccctgggagcagagcctgggtcacctcttttatgctctgcacgggacccagaaccaggcaatgcgtggtcagctctgtgctaggggtgtcgacggcaagggtcggcccctccagaccacacaagcacacgagctgcttcccttttgcgccccagtttcctggactcatttgggggccccttccatctaaccacacaagtcaccttctcagagcaaaaaggaagatgacagtgctgcccctcccccatccgctgggcagcagcgtctcctccatgagcagcacaaggggcttttatgctgcggccctttcctcctctgccactgcccccagccacccccacccaagtccctggcgacagggattggacatcttggcacaggaagctatctctgcacaacgtatactctgttagcctggagcagaccttgggggagggagggccccgtcaagctctctgaaaatggcagtgtggtttccttgcggctttcccgggcactggagatgacgcacacttcttttctcttctccgttcccactgctgccctgtccgtcctccccaacagcttgttacaagcgacttggggaagaaagcaattctgtcttccagggcagcctgctgaggaaggtcgggccactacagagggagctgtgggtgcggtttagttctggggggcagggtcttcattttaaaacattctgcttggtacgccaagaaaggcagctcaggagcactggtgcttgtgtcgcactcgtggggacatgtggcacttggtgctgcttacatgcattgctcagtcctcgctgccatcccagtatggacatgtggccacggggcctcgggaggcaggggaaatgctcagaggtcattcttctggtaagaggcagattcaggattgctttttttgagatagagtctttgttgtccaggctggagtgcagtggcatgatcttggcccactgcaacctccacctcccaggttcaagtgattctcatgcctcggcctcccaaatagctgggactacaggcatgtgccatcacacctggctaatttttttttttttgtatttttagtagattcggggttttgccatgttgccaaggctggtcttcaactcttaagctcaggtgatctgcctgcctcagcctcccaaagtgctaggattgcaggcgtgagccactgaacctggtagattcaggatttgacttacttctgtctagccaggcatggtggctcatgcctgtaatctcagctacttgggaggctgaggcaggaggatcacttgaggccaggagttcaagacttacttccatctgattcagaagcccacgaataaacttcctctgccagcctctagcaatcatggaacaatcaagaaagctggaaattatcattcccattttacagaagcaggctgtgtccaagagcacacagcaagtgaggggcagctgccattgtactttctgtccctatgaatttgactcctctaggatttgaacccaggtgaccagctccagagcctgtgctcttaattatcactctgctgttaagtgacgtgcctggctgtgaccccaaggtcttcaaaactctcccccaaagtcgtgtgggaaatggggtcaactcagttgtgaaaatgtctaatctcccattatgaatcctttgaacattgactatagtaattccaatttgtcagacactttttttcccctgagatggagtcttgctctgttgcccaggctggggtgcagtggcctgatctcagctcactgcaacctccacctcccaggttcaagcgattctcctgcctcagcctcacgagtagctgggattacaggcgcctgccactatgcccaggtaatttttttttctctttttagtagaggcggggtttcaccaggtctcaaactcctgacctcaaaagatccgtccgcctcagcctccccaaatgctgagattacaggcatgagctgctgccctcagcccagatgcttctttaaaatcaaacctcatttggctcattacgaaatgcaagcctaggtaaaaaatccacagtgagggacagatagagattttgtattcggtgttaactggaagcaaatatttctgttaaagatggttttgagtgttgctccagatgagtgttactttggtaagaaccataacccttgccagtgccgcccagcagtgagataccgggggcaggaagggggaaagaagggaaaactccagacaggtggtactgaggtgatctggtggccttgcggtcatgactcacttctccagcctcacctcctagacagccgatgtgcagggtcactccgagggagagctacagagcaagagtgacctgtcctgtaagttccagaataaggagcgatgctgaagtcatgcaccccagaaaggtatggaagtcttaatccccaggacctgtgactgtaaccttatttggcggtaggatctttgcagatgtaattagttaagatcagctcgtactggattagggtgggcctaagtccaacatgactgggtacccttataaaacaaggagggatgacacatgcggagaggacagtgccccgtggccacacagggacacgtggagggaagacggccttgtggtagtggaggcagagactagagtcatgtgtctagaagctggggaatgccaccaagtgccagggccaccagaagctggaagagccgagggaggatcctcccctagagccttcagggggagcatagccctgcggacaacttgatcttggacttctggcctccagggctgtgagaacaaatccctgtggtacttcatcacagcagctgttaagaaaccagggcatcgggtctccctacctccatcggcgtcttctctgtccctgaggtcctctcttagctttctccacttcctctcacagttggacacaaagccccaaggccacttttttttcctctttttaaattttttaaaatttttatttttatatatatgtatatacatatatatacacatataagtatatacatatatacatatatacatacacatataagtatatacatatatacatatacttatatgtgtatatatgtatatatgtgtatatatattttatatgtgtatatgtgtgtgtgtgtgtgtgtgtgtgtgtgtgtgtatatatatatatttttttttttttgagacagggtctccctctgtttcccagggtggagtgcagtggcatcgtcttggctcactgtaacctccaccccctgagttcaagcaattctcatgcctcagcctcctgagtagctgggattacaggcacctgccaccacgcccagctaatttttgtattttttgtagagatggggttttaccatgttggccaggttggtctcaaactcctgtcctcaagtgatccgcccacctcgatttcccaaagtactgggattacaggcgtgagccaccacaccgggctctgaggccactttttcatccatattcttctctgtgcctctgcatgtgtgttccccatccctttggtaacttctattttttatttcaggagtgggttaaagtttccgattttttttttccttatactctctcagttcagtctggaccaacttggagaagagcggcggctttccctccctttttctgtggccgccttcagacgctggcccatgggagagtcagggctgtcccccgtattggagctattaaactgtcgtaagaaaggggcctttgtcacgggaaacacgttactcagctcagtcatagagacagactgtgccagaaaacaaacaacaaaaaaaaaaaggttcaaccacagcattctttgggacttcagtcatccgcctcccgcttgttcttaaaagacgaatttcctttcttccgtgtaattccatcagataggtcgtcaggttttcattctgtccagaatggagtgctgggggccctaccctgccatctgccaggggcctctgcccaacaccccgcttgtatgacctcatgcctgcaggttgggaatgcaggggggctcccttgggcctttttggggtgggtcagggagggtgcgaggagaacgagggcgggagttaggtattttttcacacttaccatgacctgtctgtgcacttaaaaattgatcaagatggtacattttggccgggcacggtggctcacgtctgtaatcccaacactttgggaggctgaagcgggcggatcacttgaagtcaagagttcgagtccagcctggccaacatggtgaaaccacgtctctactcaaaatacaaaaattacaggtggcacatgcctgtaatcccagctactcaggaggctgaggcacgagaatcgcttgaacccgggtggcggaggctgcagggagccaagatcacagcactgtactccagcctgggtgacagagcgagactccaccaaaaatcaaaaataaaaaaagatggtacatggtatgttatgtatacattaatcattaggcactaactccccattccttatctccccccagcccctggcaactgccattttctttctgtctctatgaatgtgactcctctagggacctcatagaagtggcatcacacagtatttgtccctttgtgtccgtcctatttcacttagcataatgtcctcaggggtcatcatgttgtaacgtgtcataattttcttcctttgaaggctgaacaatattaggttgcacggatgcatcattttgtttgttcattcgtctgtccatgaacacttgggctgtttcaccatttagctcttgtgaatagtgctgcttgtgaacatgaatgtaagaatatctcttcaagaccccacttgaggttctttggggtatatggccagaagaggcattgctaaatcattcggtaatttgatttttaattttttgaagaacttagtcatggtgcatcttatctgccttgtaacatcgtgcccttgggcagaggggtacttcctggaggagagagcctctcgcgggctcccggggcccctttcgtggctgggtgcatgagatgtatgcagccaacccttacctcctcctgagtgcagaccctgggatgctgcactggtcgcacacccgtggagttggccctgagtgagaatagacatcacgagaggaaaaattgtgagcgtgaaggggctacatggatgcaagatgcgaggtgaagtggttttgaatatgtacgtgtaaagatccttgattccatgcttttccaccaactgctgtttaaacaaatgaacctctcactattagcttcacaagtacggccacgttccttcttcagccaggcaggtgaaacactccatgaacccagatctgaaacagggcagtccacaggaggtgaacagctgcagaccatgtcatccgccttcctgacaggtttggggacagccccataatcacaaaaaggtggtgttctctggtctttaccaaggaggctcaacacagacacggtgtgcaaactcaagctctttctccttgttaaggatcaggttcctcatctgtaaatgggatttcctgaaggggtaaatgaaagtggaaggaaagcccttgggtggtactggttgcgtagcaggcactcagcaggaggtggatgttgacactgtcagcagcagggttatgaacttggctgctgcgcttcttacctgcttccttccttttttggcgacccattattgaacagtattagcctggtgcaaaagtaattgcagtttttgccatttcattggcaaaaaccgcaattattattatttttattaattttttttttgagagagagagaaagagccttactctgttacccaggctggagtgcagtggcgtgatctcagctcactgcaacctccgcctcccaggttcaagcgatcctcccgcctcagcctcccaagtagctgggagtacaggtgcgcaccactacacccagctaagttttgtatttttagtagagacgaggtttcaccatgttggccaggctggtctcgaactcctgacttcaggtcatccacccgcctcggcctcccaaagtgctgggattacaggctttagccaccgcgcccggcctgagccactgcacccagccaaaacccacaattttgcggcaaacctaatatctatgcacggcctttgtggtggactgtagatctaaatttgaggtccctgacgttattatttaccagctgggtgagctttgaaatgtcatttcacttctctgggcctcagtttgcttttttaaaatctgtataatgggcctatgaatggctccagggtcaaagtgttgggggattcagcgagagtgcacttgaaaagcatctagcacagccctggaatgagagaagttatagctgttattatcaccctcagatgagggatggcagggaggtgatggaagaacattgcaggggaaggatttggttttaccattttgtaagtataataaaatcagctagacttggggtccaattagatataggggttgagaatggctagaaacccctcccagttttttttatgtgtacagctagttggctattaatacctttcggagagattgggatccagaggaggaggaggaagaagaagagtttgatgactgagttaagggcaatgtatgagaacccttcgggtttcactctgttgacctggcagtcactaatctgtattaagggtaatgtggtttgtctaggacagtggtgtggggctgctgcctccccctggaaactctcccatctacaccctggctgggagtgcaggaggagctcctgctttgtaagatgcgggcccactatcaaggtgaccaagggcctttgtggatggagaaacagggagatgctgctgctcacctgtgcttggctcccacctcgttacccagtttctgacccaggctttaggactgtggctcctaatctttcagccgagattcttaccctgttacaaacctggtctgtggatccagaagtctccaccacgaactccacgggctaagtcttatcaccccgggcttcaatgccatgtcttgcctgctcgaacctgcttcttcctgtttaccttcccctgtacctggactcttaggactgtcttgtctgcttgaatcttgagctgctaatccatccttccttattggcactgacttttccattgccccctcatctgcagggtcttgaacttggtttcctgccctggacttaacctgccttcctgacaccgactgacttcacctctccccatgccctcatgtcatgtcttatctgttcctattgtggatccgggattccttggcctgtcccttggcctgctgctgatcatatctccactctgacccacaatatagattttcaaggtaaaaatttttttaaaaaatgtttcactctgttgtctagtaaaatacatgaatgtgtatcctttgactaagggtctttgtgggtgaggaaacaaggaagcaccgcagctttctaggggagggttaccttcaagcttcgtggaaagttcctcatgtcgcctggcaaagcactggacacctttcaaagcacactgaaaattctaacatcaaaactcacaaacactgctttctggtaaggccatccaaaattttaggtggatccaagacatcctgcaagtgttctctccatattgcctttcagatcaccttctattaaaaaacaaaaactctattaactgaaactcagtagaagctttcaaaaaaaataaagggagggttgacctttgttgttatttttctttggtctttcaagatggagtgagaactggcctctagtgtttggtaaataccttacgctgcccagcaaggttgactgtgttatcccccggcaggctagctcaaataggcaggcaggccctgccacaggcagatgaaaacagggagaagaagtccacatatgtcacatgtctttggagcctgtcccctgtctgtcttccttcttgaagacccagtcctttctctataggtctctggctcagcccatctgctccctctcagcttaatgacaacaactttgagtcttctgaaacaaatgtgcttgcatggggaggcaacagtctttgtcccacctctgccagcagaccttgtaggacaaggcatcagtctaatccctcactaagccctgtgctttgcagccttcattttaactgcttctgttcaaggtacagaagcattttctcaaattaagggcctttccatcaatctagaaagcaggagacagagaaaggttcttttcttgcacaagtctgttcctttccatttctggctgttcatgtctttcgttagaattttctaaaagtgagcacatgccacacttctgaatttttcctacagaaaaattccccccagagctatgaccatcaaggggcagccaggggagatgtcactcacggtgttgctcaacctgatgggaatctccagctttgcagcctaaatgttcctgtgtccccaccgcctgcactcaagggcttccaggaagctgttgccccatggttaggtcttgttacttgcagtacttcacttacagtgccagttctgtagtatttagaatatgggtttgctctttgtaacagaatccaaatttataatggtataaataagaagttgatttctctctcacctagagttaagtagcatgacaccacggtcatctgtgacttagattgtgtctagatttctactttaccatctctagccccttggtccacagtggtactcggccatcatttccacatcccaaatagtgggatggaggcagagggagtaaagaagaaatacacttcccccctttaaggacctgtccggaagttgcacccgtcttttccccttcacatttttttggccagaagcttagttacatgttctcacctagctgcaagggaggctgtctttattccatgcaaccatgtgtccagccaaggatcagggattcttttcctattgaggaatggataagggaataatgagcagagcctgccttaggcaaccaggctgagtcctgaggattgcataagaattaggcaggcaggtggggaaggaggaaagggagaggctgcaaaggtaggcaggacccacatcatcagaggccttgcatgctgtatgaaggttgtgcaattctgtcgcaagagcaaagcagagacactaaagggctttaaaagggggagggaggatgtgattggaattgtattctagaagcttcactttgggccatttggtttaaaatagcatcttgccagaagccctgtgtgaagacattaaaatgatgaaaacttgctcaacaatgctaaaaataaagacagcaacatctgggcagaatttcccctaattttaaagccagtagtggagttggaggaagaaaaatcaaattctcattcaactaaaataatctaggaagacactacgtggcttcttggaaataaaatcaacaatttataagatttataaggtggagattgtcttagttcattcatgctgctacaacaaaatagacagggtaatttatgaatagttgaaatttatttctcacagttctagaggctgtaaagtccaagatcaaggcaccagaagattctgtgtctggtgaagggcttgctctctgctccacaaatggcaccttgttgtgtcctcatatggcaagagggcaaaaaagacttgggtgttcccttcaacctcttttataagagcactaatctcatgcttgagggtggagccctcatgacttaatcacttccccaaaagccccacctcttaatactactgcactgggtctttggtttcaacatatgaattttggagggacatacacattcaagccaaagcagagatgaaagaataacaggatgtgattcaaagaaaacaaatcaaggtgaaaacaaaggtgggtggatttaaaaaatgagaaccacaggggaactgaaatcatggtgccagagtagaaagtcactggcaggagataagaacagcactggcattgtagaaaagcatgctggctgtatgaaagaaaaatgatatattctccctgtaagcaaaggacgaagagggaaattaagagagacaggggaagcaataggtgtggttggcagaacagatgacccagagacttctgcatgttcctcaaagagcaaccagatcaatttgaacaggagcaacaatcaaaattataattgaaaataaaacctctggaacctgaggggaaaataatctgaggatgcagctcaaaagaaatcaaccacattttagttgaatttaatgaaaagaaaattgcaatgtgacatatcctgggaaaacttttgagttgcagatacataaaatatcacaaaaccatccagataggaaaagcaggttacttataaaagagttaagttcaggttgatcagcaattagaagtgaaaagggacattcactgaaaggatacaggaaataggggcaagaaaatcttcagcttcatgaactgaaattgaacctggaaagttctctctctctccctgtctctctcatacacttacgtgcacacacacaaacttccttcatcatttctttgcccaacagccattgtccattgaatacctttttctttatcaagttttaattaagtgagaaggaagatatttggctcagctcatctctgttcaaggagaaaccctcaagcaataggtgaaagagcagcctatacatcagatctcttgaggcaggtgtccacacctgggccaattggtgagcacacctatcaagaaagagctcaagccaggcatggggacatgcacttgtattcccagcactttgggaggctgaggtgggaggatcactggagcctgagcaacataatgagaccctgtctccacaataaaaaagcactcagctatttcctcatcaggcaagtgagtttaaaaagaaaaaggcttggccgggcgcggtggctcacgcctgtaatcccagcactttgggaggccgaggtagatggatcacgaggtcagaagattgagacgatcctggctaagatggtgaaaccctgtctctactaaaaaatacaacaaaaattagctgggtgtggtggcaggcgcctgtagtcccagctgctcaggaggctgaggcaggagaatggcatgaacctgggaggcagagcttgtagtgagccgagatcgcgtcactgcactccagcctgggcaacagcgcgagactccgtctcaaaaaaaaaaaaagaaaagaaaaaaggctttgcctaggtttctcagaaaacagagccaaaggcaaagttcatgcgttatgagttgtgagcagtgtgctgccgcagaagcaaaagtgaaaaggaagtgaacaacacaggaaggcaagaaagcaaatccaaggcttatcattgagctagctacagcttctcaaaacaagtcaatcttgatgctcagtcatgggttgggaagaatatcttcaaggagactgaatggaactgctgagtgaactctccttggaaagggcagagagattgtagaagaatggagaagcaatgctgtggccatgggtcttcctgaacttgggggtccctgagaccatccccgatattaggagatgaggtaacaggctgtaggcaagaatgacatgatgtaccagtcaaggttctctggagagacagaaccaataggatgtgtatatatagaaagagatttgttacgaagaatttgctcatgtgattatgggagccagcaagtccaaattcacacagtgggctggcagattcaagacccaggagagttgatggtgtggttctagttcaaaggcagtctgctggagagtatttttccttttcctacttggtggtggatcagtctttttgttctattcaagccttcaacttacttggatgaggcccacttagattcaggagggcagtctggcctactgtaccaattaaaatgcttatctcatccaaaagccctcacaaaaacacccagaatgtgtgaccaaatatctgggcacctcctggcccagtcaagttgacacataaaattaaccatcacacatgagaattgctggggctgctcaagcaggatacagggcaagtggccaatgtccagagtccaggagaacctcggaactggagtggagcagtctggttctgtacaatggacttggcaagcagattgactaccatgtctggtacaaaattattatagtgtagttattgttctgcagaaattagaattgattatgtgtttatctttaaattctattgacttgcctcttactgataaaacccttatcgtttaaactggttgtcctttgaggatatttttgccatgcttgagaagaatggataaaaagaggcttcaaggctgaactttggcttttgcttggcaattattattccatgccgtacgctttgccttcctaaccgttttctctttggtggaaacaagatgaaccctgacttaatataacagaacaaggatgtgtacccatgtggatgtaggggtgccagagggaatgatcgggactttgtgcaactcgtaaatgtggagatgatgatgtgttcatagttgcttgatgacacaggagttcttcaatatttctcctccttaagtgatctttatttgctttcctgtctgccctgcagtaccaccagtgtctccctgcctatacatgtatacatattctcacttgggacaggtccacattgtgtcagttgtaatcaatatagcaaacttattttctttgttgtttttgagacatctgtcattcggggtctctttctgtcttgctctgtcatccagggtagagtacagtggcatgctcatagctcactgcaactgccaactcctgggctcatatgatcctctcacttcagcctccaaagtagctgggattacaggtgtggacccctacacccagctacttaaagaaacattttttgtagcaatgggggtcttcctatgttgcccaggctggtctctaactccagggctcaagcagtcctcctgcttcagcctcccaaaatgctgggattacacacatgagccatgatgcccggcctagcaaaattgctaatgagatagtttacattctctttttcatactaactctcaaaaatccactgtatatttacatttacagcacatctcaatttggattcaccatatttcaggtgctcaacggccacacataacccatggctaccatattggatagagcccggccctagagcagtggttctaaaccttgactacacgttggaatcaagtggagaactttcaaatactgatgcctgggccctgttactcagtgattctgtttgaattgtgttgggctggggcccaggctcttcaggtagctgttgggcagacaggatgagaaccactcttccatagggagcactccctgggaaggcagatcctcttccctactctggccagacctctcccccttcttccccatgagacttacattgtaaacagaaattaagcaagctctaacttgggtcatgaggggaagaaaaacagaagcagggtggtattaaattctttctgacaggcaagagtgaacaagctgaattcacttgtctccttgggtctgtttaccaacaggctcagtaattatttgttttgccactgccctttaagcttgcaatgtgtttcccattctttctttgccagagtgttctttgagaattgagaattctttaggaacactacagagttggcaagacacgcccctgtgctccactgggagtttccaaagggaaggaaggcattccatcaggaatcctgattcctggagagaactaaagaagtatatgagacagaaaatcaaggatactgtgacttgtgtacaacccatttttctttgctttagacaagcaaactccccttcttctcaaatagaaaccagtccagacaaaccgcagagactcaagtttctaaatgcatctagaagagattgtttcagggaagtgcacaaatgagacatgaataattcaatcagaaggaaaacaaacacgatgacaccccacatctgaaacccaaggtgtcggcaggcagctgtttgccggttccagcaggtcccaaacacctgaggctccatctggccagttggtccctcacacttaaacttcccaagatggcagagagctggcagccacgtgtcctggggaccagaaaatagctgaaagttttctgggggccttggaataaaaaatgtacagagaatagaaccattgggaggaagaaatgtgcttccttgatctttactctctggatccaggattaataaagtaagtaactggtccaggcaaaagatttttgctgtagtgaatgtcgcacattcactacaaagagatggaattgtacccgttgtcgacggtaggctcacagtctgatccctggagctcagaatggagccccagctgaaccacatggactgagaggtgaagagggttcccccagggaactgctgggtcacattaatgtaagagcagggaccttcatactcttggtccttcatggttgattccaaaatccaacctccgccatcgagttaggtagccctctgtctgctagggtgccacacctttgatgttgaccttcagatggaagagatgggccaacccattcacccttaatccagcctgtcacccagatcccatcgttacaagtggccagctggtgtcaagggtacattgtggctgtggatgagagaattgatgcagctgggtaaataacttacacaggaaccaattctatgaatttactgataatagttgcaatcagctgtacttattaatatggaacatataaattcaaccacattcctcatgttctacaaaagtttacattctcctttaagataaaggttgggggagagggagcaggaccttgataaccgccttttccccactgtcttcactataaaagtatcattatagtgtacttttgcgtctcctttaatgacatgtttctagttttcatttatatcatttgcaagacacagaaacacaattcatattgtcctaaactaaaaagagaatttactggttcatggacctgaagagtctgggatgctggtttcaggcacagtttggtccagaggctcaaattatatcatcaggtctctgcttattttttctctccctcagctctgctctcttcagcataggcatgattgcccatttctaatggtgttaagatggcttcctgctaatgactccagccctatatcctcccaggttcaagtccaaacaaaatagaccgtctcctctcaatagctcccttggaatcctaatagaccaacttgggccacttactccctcttggaccaatcactgtggctagagagatggagttgcacccattgttcagggtagggtcacagtttatccctagagcttggactggagctccagctaaaccacatggactgagaggggaagaggacccccccagggaactgccaggtcatgctaaggtatgagaggggaccttcatacccctggtccttcatggttgattccattggtttgtggataaaatgcacacagatggcgctttggcttttttgagggacagcatcactttatgcatagagtctaccataaaattcagggccttgcaggacccactgaaaagcgtatcaaataaaagggatttgtcaacatacatcctcatctttactgttattccttaggaccagtgaatctagccgcatctttgacttctttaatctaaatgatgggaaaactggggagctgttctccagaaagggagcctagcaccacattagagcaaggaccctgaagtcagacttcctaggtccaaatcgaggtgctgcgatttactagctacatagtcttgaacaagtgaatcgagatctctgtaccttggtttcctcatctgtcagtgagggatgataatagtttatctcccataagaagattacatgaactagcaagttgatatgtctaaaatgctccatacagtgtttgggcaaatagcaggtatgctctggtaaaaataatagttgttgttgttttggaaagagtctcactccgtcgtccaggctagagtacagtggcatgatcgcagctcactgcaacctccacctcccaggttcgagtggttctcatggctcagcctcccaagtagctgagactacaggcgcatgccaccatgcccggctaatttttgtatttttagtagagatggggtttcaccatgttggccaggctggtcttgaactcctggcttcaaaggattcacccacctcggcctcccgaagtgctgggattacaggcatgagccaccacccccggccaacagtttttcttattttgaggtgggttcctctgtttagggatcatcaaacagagaaattaatttctaagcctctcccaaagagacactgagatagaagatagctaaacatctcctatgttcattcaggttcttggtttctgaaaactctgagttgatcttggttggccatggatgttaacagttttccaaaatggatttaaggactgaatctgtctggacttcagtttggccatggagaaacagatcatcagaaaagtgggggcaggaaaccttactctgtgtgtttcacgggcatattgtcaagacaaagaatgtgggtgacatgcttggaaccctgtggggtatcgccccccaaccccccatgttacctttaccccagcaagaaaatgcccattcaaaggtgttcttttgcttactgtgtctccttattataatagttctcctatttctccccacacggaactgctataattaaaaggccatcagctttgcatatcattacttggctataaaaatttctgcaagttggaacttgagtgtagagggatttggctttgatgcacagggtttatgttgctgtctttctcgctcctaaagcacatacacaccagcacatcagtcccacatgcaggacttttcattgccttgtggtttggaagggatccactcctgatggaaaccccctaatatctcaggaaaagcctataaaataaacccaagtgggaggaagaggcagacagatgaagacctgccaaccgacagctctggtgtctggtgatggggcggtaagggagcttaggagatcaggcagcccatttatgtcttctttctttctgactcccaaccccacaaagacagagggaatcaattttttttttcctttcttccatttttttttttttttttttttttttttggtgagatggagtctcactctgtcacccaggctggagtgcagtggcgtgatcttggctcactgcaacctccacctccagggttcaagcgattctcctgcctcagcctcctgagtagctggaattacaggcatgcaccaccacacctggctaatttttgtatttttagtagagacggagtttcaccgtgttggccaagctggtctggaactcctgacctcaagtgatccacccgcctcagcctcccaaagtgttgggattacatttgtgagccaccatgcctggctggaatccactcttaaaattccctggaaaagaggaattcccatactctcccatggacccttcctgcttttgtgcaaatatgactgctagaacttggcactgtcgtgtactttgatgactcatttggtagagtggaagaccgtcggtctctagaacttggcactgttgatcatctggtagataattctttgttgtaggcggggggtgccctgtgcattagcctcttcccactagatgccttccccctagttgtgacaaccaaaaatgtctgcagacattgcccactgttccctaggggtccaaattggcctggttgagaccaccaccctaggtagtacatgcttcaagcacttgaaggcctactatgtgccagccactgtgctaggtgctgcctaaagaaaaaaacagtagcctcctatctttggactcagtagaacacaggaagatagggttagcttgcgagtttatgagagcatgtggattggtatatccaaggttagtgatctgtccaccctgagaaatgtctatgttcttttttattttattttatggagacagagtctcactccattacctaggctggagtgcagtggtgtgatcacagctcactgcagcctccatctcccaggctcaggcaatcttcccacctcagcctcctgagtagccaggactacaggcaggcaccaccacagctggctaatttttaaacattctatagagatggggtctctttatatcacccaggctggtctcaaacttaacttctgggctcaaacagtccttccacctcagcctcctgattagccaggactacaggcaggcaccaccacagctggctaatttttaaacattctatagagatggggtctctttatatcacccaggctggtctcaaacttaacttctgggctcaaacagtccttccacctcagcttcccacagtgctgagattacaggcgtgagccaccacactctgcgtgtctatgttctttttttttttcttttccttccttccttccttttctttctctttctttctttctctttttctttttttttttttttttttgagacagaatctccctctgtctcccaggctggagtacagtggtacaacctcggctccctgcaacctccgcctcccaggttcaagcaattcttgtgcttcagcctccccagtagctgggactacaggcatgcaccaccacacctggctaatttttgtatttttagtagagacagggtttcaccatgttggccaggctggtctcgaactcctgacctcaggtatctgcccacttcggcctcccaaagtgctgggattacagacatgagctaccatgcctagccaggtctctgttctttaaactgcatcactcactatctcttgaaagagctctttctggccccacagccttcctgcttagcatcgccacacaaggagatggtccctcaacaccacgtccttgtgtgccctcctcagtggagagcggagctagtttttgtcctccatagatccccacttctgaggcttgatcagcttcctccacacctccctctcttcaggcgaaattccaggtctttaacctcctggaaggcattgttggcagtgccaaaaccatgccaaacatctgggtgagaactgcaaaatgagaccagttcttccaaagtttcccagctctgccactgggatggaatgtgatggaaggtgaatgtggcccccaagcacgtcgtcccatctgagcttggtggagcttcaggctgcaggttgtgcagggcccacgtgtaccacgtgtgtcagcctgatatggcttggctatgttcccacccaaatctcatcttgaattgtagctcccctaattcccttatgttgtgggaggggcccagtgggagataattgaatcatgggggtggtttcccatatgctgttctcatggtagtggataagtctcaggagatctgatggttttataaggggaaacccgtttcgcttggctgtcactcttctcttgtctgccgccatgtgagatgtgcctttcaccttctgccatgactgtgaggcctccccatccacgtggaattgtgagtccattaaatctctttcttttgtacattgcccagtcttgggtatgtctttatgaacagcgtgaaaacggactaatacacagccccacctctgtcttacccctttcttgcccttgccttggattgcttgttctgtctccttcattaaggcctggggaccctgggggcagggctgtgcattctgactcctgtgtcccttccctggcagtccccagccccgcctttcatggcggtgtatcttggagatgttcagaaaccactgaatacatccagatgttggctgttgtatataaaaatagttaaatgtcctcctggcattttaggtttccttcaaactgtatgtgattcagaagcagctgtacttactgcccaaagattagatagaaatgactttatgattctgagatttaaaatgaccgctccaccccaactgttaatggaaaactattaaaaaataaaattgcagtcaagttctttgtcctggtagaatgcagtagaacaagcacaggatgtgaaatacggattttaacaaagatgctgacccaaactttgcccatctcccgccaaagaagccagcagcatcatgtcccttcgccccaggcgcacgatggcaggctgactggcaaccaagattacacattcaaccttcgtctcccaagagcttctgttcttgcagaaacccctgatctatcttgccataagtcaggtaccagaagtaccactctggaggaggccagctcctgtgttgaggtttttcgtggactgatttttttggtgtgggtctctaccaaaccccagatgctgaaaagggcctccagaggggcggatgtaggtagcaaacccgaaagctagtgatttcaggatttcagctacccatcccctgccaagtaagatgaatcacatgcggtggagttaacagcacagagcaacacagaaggctttgtcccctggtccctggctgacaaatccacagccctggccgcccttgccagctctgtctcagggttgctctgtccccagagatctttaaatgtgggataggcaggcatctatcccaagtgtttacagcatggccccaaggcaaggagtggattaaactctttctagaaatatgtttcagccttagaggagggacaaggaggcagctgttattaatgaatgaatggatagaccagcacacattgcaggggcttcctgaagctcctctccctccatctgagctgctgtagggtgcttaagagtaacagactggatagattcccaggccaagccagggccgctcctctttgcccctacctcccagcaaagtctacagcaagcttgcccaacccatggcccacaggtcacatgcagcccaggatggctttgaatgcagcctaacacaaattcataaactctgttaagacattatgagatttctttgcaaaatttttttattttagctcatcagctgccttagtgttagtgtattttatgtgtggcccaagacaattctttttcttccagtgtggcccagggaagccaaaagattggacacccatggtctagagtgatttcggtcccctcccaaagaaccaacctccggccaggcgctgtggctcacccctgtaatcccagcactttgggaggccaaggcgggcagatcacaaggtcaggagatcgagaccatcctggctaacatggtgaaaccccgtctctactaaaaatacaaaaattatctaggtgtggtggcgggcgcctgtagtcccagctactcgggaggctgaggcaggagaatggcgtgaacccaggaagcagagcttgcagtgagccgagatcacgccactgcactccagcctgggcgacagagcgagactccctctcaaaacaaaacaaaaaaagaaccaacctccacaccccagagctaccctttcactgctgtgaaagcccctccaggtattcacactggaggaatgtttgtaccgtggggataatgccagttccactggggcagggacttctgtcttctcagtagctagaagaatatatggcacaaataaatatttgctgaatgaataaataaaaggaaagtggctttaagtcactgttgttcaaccaaagtacttttctttttgtcttttcttttttaaaccatgtaacattttaagcaaacacccaaaaaggagaatactagaatcataaaaccccatatgctcatcacacagctacagcatttattcagacccaactgccttttttttttttttttttttggtttttattatggagacttgtaaatatacataaaaataggagaataccataataaaccccgtatgtgtgttatccagcttcaacaattatcaacaatagcaaaccaactttaccacactgaaaatgcaataaacggttttggagagtaaccacatcagtttagttctgagctatttagagacaaacctaacatcttataattacattcaacttcctttctggaaagagatccagaaaatggctttttcttctccctttaacttgcaaagcagtcccccaatttcagcctgtgcataagtaaaagtagacgtggagacacatatagaaaagtaccccacctccagccagctatgatctgtgtttatcttatcaggataatactaaaccaggcccgcgtagaacaaggcgtttagtctttgcagatgggcttctgttcctagccaccagttcagtttataaatccactgtccaaggcggaaaacaatttgaaaggcaacattgttcctggacaaggcttttactgtgataacggagcttgtgtggctcctgtctacttcataaattgcccagccctggggttacagccagggggcattggcaggagtattgtgtggtatctcatccttcctgagcccatccacgtggcgagtgtatcagtcaaatcagacataggagcatttatggagcccctaggatcatgagggtcggggcgggggtggggggttctgctctgagggggacagaatggagcagaggtcatggtccctgccaggggatatgactcagtgtttctcagagggaggacttagctgccactggtgatctgattttcagagcaacccagggatttgcactgtggcatagcgagctcattgtttggaacacttggattttgggcttcgttgagatggtgtggtggtgatgggcactgatggagattgtgggagattgggtgagacagagcctctccccagagcctccaccctctgtccctgatcttactgggagcaaattgaagatagacaccttcatctggggataatcaggaaagtttttgcaataaaatgaaatatgtgccaggggcttggtggctcacacctgtaatcccagcactttgggaggccaaggtgggcagatcacttgagttcaggagttcgagaccagcctgggcaacatggcgaaaccccatctctacaaaaaatacaaaaattagccagaagtggtggcgtgcacttgtagtcccaactactcaggaggctgacatggggggatcacctgatctctcgagttccaggttgcagcgagctgtgatcagaccactgcactccagcctgggggacgagtgagatcctgtctcaaaaaaagaaaaagaataagaaatatgtaaaagtattttgcaaagccgtgaaaatgaaacgtctggtgttatggctattagcagaaagaaacaagaacattgtgggcagaatgtagtagaacacattgggcccagacacataatcagcagtctcgggccagggtcctaagttctgtctataaaacgcagctgctgaagcgtatctcatgaggcgcttgtaaccgcaagctgatcatacaggccaagcctctagcacagagcaggacacatagcagggctcaaaaatggtaggcagtaacaatgtcacaattgtatttttttataatatgatttataatacactttataacataattattaaaagcaggttcataaaggtgctaaaaacaggtgagtaggtctgtgtggatacattggaagttccctggtggggtgtggcagtagattggaagaaaatttatatggaaatcagagagatagggggccctgaatgcttctctaaggagcgtgggtctcatatgtcagacagcagacaacacctgggcgcttttgagcgagatgggaatggtgaggagagtccattaagcccagcggaacaggaacagactccgggatcagatctcggtttaaacatggaagagtcacttaccctccctgagcctggcttctttgatcttagaatggggattagtattagccacgtcccctcttgcagctgtcctggtaggtaccttgtaaatggcgactgctattatttgtgcttagaaggatcatccctcctgtggggtggaggacaggggaaggagcaagtagactcagaggccggggtaaggagccaggtggggactcaggctttgccatgctttccgatctccaccttggaccgcaactgaaatgccaactcctgccttcccctccccctgccccatgactcccaatcccacctgtttccttccgagatcttcacaagctgtaattatatacacttttttcctcgcttaattattgtctgtctctccttgcagactctttgccccatagcggggtctgtttcaccacgcccagcatccaggtgtggtggtgcctgcccctgcattagtctcctgtggctgcctaacaaattaccacaaactgggtggcttagaacagcagaagttgattctctcacacttcccaaggacagaagttggaaatcaaggtgccagcagatagctgtgctctctgcaggctctggaaggaggacccttccttgctgctttccagctcctggtggctgcaggcatcctttggctggtggccgcatcattccggtctctgtctctgccttcacttcacgcagccttcctcctcctctcctctgtgggtctctcctctggttgtcttttctaaggacactcgtcattgaattcagggcccacctagataatctagaatgatcttatctctacctcctgaagttaattacatccacaaagacccttttttttgtaaataaatcatattcctaggttctaggacatggctatcttttggggactaccatgcaaccctctgcaccctcttctgtgtgagatttctcccaaaggaaagaagttttcagtctatggccataatgcccagttagtacttggatgggagaaatattcagcaataacagcttgccaggaagcacccagggggtgcagcgccctgttttaggcacagaatccagctggctgcagcccaggcagctccttccctcatggagcttattccctggatgagcagatgcatgtggacatgtcaggctgtggatactacgtgccgggaagaaaaactcaagccaggaatggctcaaaactcctgagaacatgatagggaggagtgggggtagagagggttctgtttgaggaggagacactgaggcagagacccaatcaagggagggacagaggcctctgggagatgaggtcagagtaactcaaaacagacttcccgtttctacccttcttggcatttctgacctttgtgtaccccattcccttgatttccaaagagaaccaaggaactgcataccagcagaaagaaaggggcagctgcttcttaaagggaggagatcacaaaagaagggtcaagggaaggtctatgctcaactaagggcagccatgcccacagcacctgcctggcctcggtccagaaagatggagtgagagacagagactctcccggggaggaaatatcgtaatggatgtccatggaggccaccagcatctccagttcacagagccaggacaggagcatctgcaaggcaaagtagcctgggatgacagtcagcagaccccagccccaggtcttctctctggtggcccagggtttgtcaaagggaaaatgctattttggattgtggtagacggaccctgaggggaccaccccaccctgcccacaaggttcctccaccttcgtattcaagttttgtccgtcatcttccggccaccattccttagcttgccgtggaaccactggaggtgacccaaaaggaatttccaaaccagccctgctacaaaacaagtcccgcagtggttggggcaatggaggggagccccacagagccgccctgcagacagctgcacagtggcgagcagctgagatccgggtatcgtgatgtctgagaccaaggagacagttcttccaaagtctctgaaacaggagccagagaaggaagccacgatgggtaccagggctcggggaggtatcctaaggagccaattctagctctccttcctgaagtttaataaagaagaaaatcacatgagctcagaatgaagcaccatctttggttttcatttacatgttccacagcccggtggcaacctcacagtggattttgtgagacccccttctcaggagtccccatgctcagcagagccagcatgagagagggctcgggccaccctgcctcacccaccgctggctccacttccccaagactgtgtctgccagccatgctgcaagctgggaagcccagcacaacctcctctatcttcctcctcttcttcctctgggactccctcagtccagccccagactgagcaaggagaggactctgtcccctcgggagagtcagggcagggaggtgggtgctttttctataaagagctgggggctgggctcggtggctcacccctgtggtcctggcactttgggaggccgaggcgggtggatcacgaggtcagaaattcgagaccagcctggccaacatagtgaaaccccgtctctactaaaaacacaaaaaattagccaggcgtggtggtgggcgcctgtaattccagctgcttgggaggctgaggcaggagaatcgcttgaatctgggaggcagaggttggagtgagccgagattgcgccattgtactccagattgaggagtggcatggccatttgtcctccaggaagttgattgtggcagctgcgggctgctgtttccttggctgtgggtctcaggtgctgttggattctgtgctgctgagcgtgcagcggctttcgtgagatctgccacgcttggaaagcaagatgcttactattgtgcgaccgcccaaggaatggacagtttattgatctaatttttaagtaaaacattttaataatgtttaaaggcttttgagctctcctggcccagccctacccggcatcaaggcagctgcctgtttaaagcattctaaagagagggcagcactgccagtctgaacatctgttttgattaaagatggggaggagagaggaaaggaagtttcccagaccgtgagcttgctggctggtcagtgttccctgcagctttgtagaagtgggggcacctgaggagcatgttctcacacagcttcctgggacaagaggacagtgggagggtgggtgggcccaggggaggggggccaaagggcatgtcttcatgagggctcagccttttgacctagattggaggctgcctttgaatttgagattcattattttcccttttgccttctatttttgtcttgggactctaatttcaaattgatccagatgtttggtttataagaagatatttggcatccgataaaacccctagaatgctgatagtatttaatatccttttagtgctgggtgtatccaaattgtgtataatattagcacttcttggcaaacaggtcttgtctaagaaagcagaccctggttaggtctgagccccgtccagatgagagtgagtgctttgatgaggtgctgctgagatccagccatgaggtttcagctccatgctctctgcccctccttcttttttccagtcccaagttgtcctgtgtgtacaagtatctcatggacattgatgtgaacacatgaacaactttctttacctctctgttctcatccccaccccatctgatagggtttggctgtgtccccattcaaatctcagcctgaattgtatctcccagaattcccacaaattgtgggagggaaccagggggaggtaattgaatgatagcagctggtctttcctgtgctattctcgtgatagtgaattagtctcatgagatctgatgggtttatcagggatttccacttttgcctcttcctcattttctcttgctgccgccatgtaagaagtgccttttgccttccgccatgattctgaggcctccccagccatgtggaagtgtaagtccaattaaacctcattttctttccagtctcaggtatgtctttattagcagcgtgaaaacagactaatgcatcacctcatcattgtaggatttgagcagtttaataaaaatgcgctattttggtcgggcgcggtagcccacgcctgtaatccgagccctttgggaggccgaggcgggtggttcgcaaggtcaggagatcgagaccatcctggctaatgtggtgaaaccctgtctctactaaaaatacaaaaaattagccaggtgtggtggcaggcacctgtagtcccagctactcaggaaggctgaggcagaagaatggcatgaacccaggaggcagagcttgcagtgagccgagatcgcgccactgcactccagcctgagtgacagagcgagactccgcctcaaaaaaaaaaaaaatccactactttgaggtaggtgggggagggattataatccccctgtttaggcacaggctcccaggttcagcaggcgagtcccgtttcctgtctcctgattcctcaaggacagaggtcacatatcctatatagtgctaaacctcctatttggcactgttgaccaaacttggacagtgtcgtagctggcagagaaagatctgatccagaaatctttatgtttgcaaggttctgggaatgttttagagaaaacattcccaaatgaaagtcatctacgcatgggaatgactccagtgtgagtcaagagcatgcacaagctgtatttttatttagtttccacttatgaataattctccaaaatgccacaggttcacaatttccatgttagtggaattcatctcaaacagctgaaattatttaatgtactgtttttcattgaaaataccttttgatccagccactgaactgttagtggaaacagcgaatgaggacgaaaccgtcaactcttacatttctggcacaaagtaggtgttcagtaagtaactgtcaagtgagtagatgaatctgtctgctggaaggaccattagttatcaggtgattacactggctaaccattttttttttatatacatgaaatagatctcagaggggctggaccaagggtaaggccgggtctacacttgacacggaaagaaacaggtgcagagaatttgggggaaagaataacttgcccaaagtcacctctaggaaatgcctgagccaggattgagctcaagattactccaagtcccttctccctgcacatggtcatctgtgaggattgcacttctgaatcaccctcggggttgttcagtaggcctcacctccagagtcagcatctgtgtttggagaaagctcccaggaggtcccccacccctagtctgccctcacctgtgcagactccatgtatggaatcattcctttgagctaagcctttgagagtcctcctataaaatggtgtggcccttctgagactttcccctccccagtgtggccacttcctcccttgtacagatttgggaaatctggtctggtttatctactctagacgtttccaggtgactgccattccttggagctgtgttctcctctcccctcccagccctgcactggacctggtcttgttggtctcgggcacaccaggagccctgctgtgaccttcacaagtgcttgatggtcttatgagagagggtggagtggagtctatagagtgggcctcccttccctgagactccaccacctctctttccttccatcccaccaccacagggtgcatctggtgtctccgatgtcactgaaggatttgggggaaccaaaagggcattataacacaagaaggaaggaggttatagaactgttcacaaaatactctcttacatgtccatctcattgtgtcgatccattcataagctgatggacatttgggtggtttccaccttttggtgatgtgaataatgctgccatgcacatgtgtgtacaagtacgtgtttatctgtttcagtttcccttttcatatcccaagggaaaagtacccgagaagctaatcctccaaaccccgtgtgagtacccccagcacttcaatattctcccttcttctgagagccaggagccccttggggaattctccgacgtgtatcctctgactcctaacttgtttttaggaaacctcaccaggacgtccccctgggaggaggtttggtttcatcccctcttcccagctgtcagatcccaacaccaacacaggcacatgccttcaaagtttcaggaagtcctgctgtggcagctttggtacccccatcccatgggacagtctcacctgggctcttgagccccgccaccagcctgggtacagatgggcctcgcttgccccagcgcgtcactcctggatcacacacgctccccagaaggaggaaggagagtatttcctggcttccctgcagcttgcaaggccccctcccagtggagtgtatgatcccctcacacagcgctcggtggagaggaggctttctttgaacatcccccactttggaaattttcataatgtaaaattagccacttggaagtgaaccatttattggcatttagtactgtcaatgttgtacaactgccacctctatcttccaaaatgttttcatcaccccaaaagaaaagtccatacccataagcagccaccctgtcttctccctccccccacagcctttggcaaccacaaatccatctaccgttgctatggatttgcctgtttggggcatgtcatgtcagtggaatcgtacaatatgtgaccgttcgtgtctggctgctttcacttagcatggatgtttttgaggttcatctgcattgtggcatagatcagcacttcattcactttctcggctgaataatattctcctacatgcccaccacgttgtgttgaccctccataggctcatggacaattgggttgtttctaccttttggcgattgtgaataatgctgacatgaacaggtgtgtgcaagtgtgtatttaagtctctgtttccatttctgtatggtgtatacccaggagtggaattgctgacttatatggtaattctgtgtctcttctccccacttttcaaaactgccccatcgggccttccatgacctctatagctgcacatagacccagctgaacgctttcaaacaattactttcaaggggctggttaatttcttagaaaaggcaaatcctcctccctatcttgggagagtgagcggaggtgagattttatcttctcgactgcatttagaaccacttattaacgctctagcatgaaactgagtacagtcgagcatcgggccagccacctacaaggctgtcactgtgcagaggacaccaaatatttaccggatttttgattggcaaggggctcgggaggggtccatggcacaggagacaggacagggatgactggctggcccacctcaggtacctgctccaagaggggccctgggcagtgtggggggaaacagaacaccagttgtcttggggagtagaggtacccagagcctgcggggtgtgaatagacagatgtcacaaatcaccttggtatttgcacctgttgaacaaagtcagagctagagtagctgcagccatatttctggagtccccagagtctacccaccagggggaacctgacctttctcacctcttcttggacccctctacatcagagacagcaatttggttccagggatttgcacagaccagttgatgcccactgaagcgaaccctttcccctgaggtcctgctgctacattaagtttgcctggaactatcccttaccctatgtgaagtaatttgacgactggaaactactgtgaaaagtatatgtgaactgctcatgccctaaggatctcccattgccacctgaagtcctgttaaacttggggagccatgggggacacatggggagcagccactgcatcctccacttcctgaagaggatcgctcagaggaggcatttgtccccagtggagggcagctgaaggcacacatggtatggcctggcagtcgccagttggcctcgcctggactgagggggttgtccagcatgacacggctgcagggtttccaggtagagaagctgcattatttgcctggaaaatattcacatctctctcctgccataatgcttggccactgggccccctcgtagcctggcaccagcttctagctccaacaatgactgtattttgtacttcctctgtgcccttcattcaggtatcttaggccctattcttgttctgccgggtgcctgcaaagtacagcttcctcattcagagcagaaacgggcctgtacaggcccaggatagctctgtggcatcaaagcacacttgtcttccctgaagttcatagtcgttaatcagcccagagcatttgacagtcagctcaagtggcctccagagctgctgggttctttcctgtttgtccccggcttgggtcattcaactggagtcatgcaatccttacatacaaagggaccctctggtgtcgttggctgtcagtggggcactccgaggttcaaattatggctctccaggaggtgtgtggccttggagatgtcactgtatgccacagagcctcagtttctgcatgtgaaaaattggaataattatgcctacttggcaaagattttgcaggttcaacaatagaacctatagagcatccagccgggtcttggcatatgcttgttggtcaaaggcggctgctgccaggattttgtcagcttcaacactattagcatgatggaccttccctactccatgcctcctcctcacaggagtctatttgccccacatcttaggatctctgtattttcagcaatggttttcaaacagcctcccacagagttctacagtttatggtgggtgtgaggagcaaagctttgctctcatctgttttcaatattatgctcctggccaggcgcggtggctcacgcctgtaatcccagcactttgggatgtcgaggcaggtggatcaagaggtcaggagatcgagaccatcctggctaacatggtgaaaccccatctctactaaaaatacaaaaaattagctgggcgtgttggcacgcgcctgtagtcccagctactcgtgaggctgaggcaggagccggaaggcggaggttgcagtgagccgagatcgcaccatcgcactccagcctgggcaacagagcgagactgtctaaaaaaaaaatgctcctacccaagagtttgccagcctgggcaacgtagtgagaccctgtgtctacaaaaattttttaaaaaaactaaccaggcatgatggcatacgcctgtagtcccagctacttgggagactgaagtgggaagatggcttgagcctaggagtttgaggttatagtagctgtgattgtgccaccaaactccagcctgggtgacagagcatgaccctgtctcaacaacagcaacaaaattaaaacacttaaaaaaaaggactttatttgaagaaaagaattcccctcctgattaatttggaaaatagctattcggaagcctcttgggagtctgtatatttctttagcatgtctaggtgatgactagcaggtgacacaagcatgctcttcctttaatggcaagtggcagagggatggattaaatgacctgtggtggtcccattacgcccctgtttagaagatactctaatttaaatcttttactgcaagggaagcccatttaatagggaatctgctggcagtctcttttttcataggccccttataaacttgaacatatgccctgattcctgcctgtggagcacacgctgaggctagcatgtcgttgggccatagctgggcattcacagcagcaggttggggaagagacgggcagaggcctggccctgagactcagccccctcactggacagaagaacagttttagatgttgagagggagctccacctgccaagcagaggggggtctggagggaagggcccaggcagggtgtggtgcacctgtctttactatcacgaacgagccaagagccatgctgggtaaggagacgggtggagcgggacagcagtgggatcccgaatcaggcactgtttgaaagtgcaggcagaccccagtcagcttctggaaggtctgtcgccacatagcaagactcctgacactggacgatggctcagaagcagggatgaggctccaatcctaggaaagcacagcatctggctggaagcatgccagcaacagacctgggggacagggactcgtccaagcccaggaaaaaggcagatagagatactgtttgcagaacaacaaagaacagatgttgagtgtcacattatgggttgaggaaaacccctaagtgtaccttgtgataagtccagattggtcctagggacaagaccaagcctgcagatggaggtcaagggtcaagaggtccacctgtcaatagattttttttttttttaagacagagtctcagtcacctaagctggagtgcagtggtgggatcatagctcactgcaatcttcatctcctgggttcaagcaattctcctgcctcagcctcctgagtagctgggattataggcgtataccaccacgcctggctaatttttgtatttttggtagagacagggtttcatgttgcccaggctggtcttgaactcctgacctcaagtgatcctcccacctcggcctcccaaagtgctgggattacaggcatgaaccaccacgcacagcccacctgtggatagatctgatgcagaggttggaaattgggctgtttcaaaatcagaaaatgtccctgtattcctaaatcattccctaatcctagatgaccatgttgcatctgtgtgttgcatggaaagccaaagaaaaagtatgagggggacctggtaaaaacccaggtcagatgaaaactgacctttgccacgttcctgagatgaatccttttggggcttattgtgtttgaagtaaaattcaagttcactctccccatcacttactagactccagatacacaggacttcaagtttcttgaacacacaaagatcctgcccatcgctgggcctcgttcttgttctttcctctgcacagaaagttattttgccctcaaccgcccctccccctttaattcttcagatctcaatttcagttgcagttgcaccttttcaaagagtccgcctctaaacacccttcctaaacgaggtcctcccctgaaattctccatcagctcccaaaggtggcctccttcgtagcatcggagcagagtgtccagcgtgggggtatctgtttgcataccacctgtctgctcccaaacttcctaagagcctggccctgtctcattcacccctgtgtccccggcacccaatttgggccttggcatgtaggaatgcttaataaattgttaccaactaaatggacgaacatctactcagtggagttgaatcgatgatcatttccctgctcagcaccatttgtatcttgtgtctggcccattctgaattggttcagctgggatcagacggaaccaaaagttctgcaggatgattgccacatggcctatgagcttaacgtgtcatcagaacccccggggggcctgagacaaacttgtgtgcccagatatgctgacaacttcaagccattgggcacccacacagagcaccaacaaatgcagagccaaatgctttctcttgtagctacactctgaggaagctcacccctccactccccagctctctgatgacaccgtagtccccttctgcaaacagagtgagcctcagtcagggaccacatctgtgatttgaagcaggagagagactcaccaaagtcataatcatgggggtggatgatagtggtggccgcgataaaccagctgccaaatagagtttggggacagtgttaaggtcccttgatctggggagtctcttgaaagcctcccaaggtttacagttgcttcttggggtctagaggaaagcacgatgcgttatccttggtcactgtggtcggtgctagcagggcacgcctgcccaaacctgggacagtggctgtgtcagtttccctggtcggagagaaaggtcctctgtcctggcttgtaggctcattagtgtttgctgctcaattttatgatgtgttacttaccttgtaaattgtctgcctgtcccacgagcctgggcaaagcctccaggccacaagctggacacttgtaccattgactttactaggctatggtgctgtaaatgtgctgctgacctctggtatggtgagcccaggtgcctccgggcaagggagtgggttacgggaacccagtctcttgactcatgagctgtccagggagcctacggataatcatcgtaaactgctaacagacctggggaaagagccctgtggctccccaggggccagaaggagagcagaaaaacctctctggtgagtcactgcaaatatttacccttgaaagtttgattgcaaaatcttctaagcacttgaatagcccttcccctgggacttaaagagcccctccactagcaggagtcagatgggtagtgttggaaaagggtcaggcagggtgattcccccctttcaaaaacagcctgggaagagccccaagctgccagactgccaaaggaacccaggggcttagacttctctaggaaaatgtaagtgatggagtcccaggattcccagctctctcgggggacctgtctaagagcacatctgactttgagctgcactttggttttttggctctgtctttagctaaagagttttctacgagatcaaccctttgactcttggttggagcttttatggcacaagtattgggtgtgtaatcccctgttgacctcactactgccagaatcagcctcaggccaggcgcagtggctcacaccagcactttgggaagcagaggcgggaggatcacttgagcctaggagtccgagaccagcctgggcaatatagtgagacccctggctctacaaaaaatttaaaaattagccaggtgtggtggtgtgtgcatgtagtcccagctaccctaggggctgaggtgggaggatcccttgagcacgagaggttgaggctgcagtgagccgtgactgtgccactgcactctagcctataggagatggcgagaccgtgtatccaaaaaaaaaaaaaaaaaaattagtctcaaggaaatggggcagcaaaaccaatgcaaatcatgacattggatctatttcttccttcttccatgggggtgtatactttatccatttttcggttcatccttccttctttccttccatagaggatctattgagaaccagctacatgggaaagtctgagtgggccttttaccaacagttacctgtagtaaattagaatgtagggggcacccaaaacattctgcatgaagcagcaccttcagaagccactgataccttgccacatgacagtaaaggtgctgtgagtgacagttcctcttgtagatgccagtttgcaggaggactcaaaagaggtgcaagtggacagtttccatttttctttggtttgctggcatttttgttttttgtttgtttgttgacaaaatgggtgcctcaagataatgttctaggtcttagattattcagatgggagaagatgtgaacttttatcctgtcctaaagattgactcataagtcagacagttatataaataaaggactgataagaagatagtagagtctccacgtgaatcagcagcttcctttacagtggaaaccacttcatgattggaggtgaagagctgatggttacaggacagcctcccacagaaatcatggaggcttggagctaaaagagaccatgaaaagttttttttgtgggggtcagtgagtttctcatagtccagctgggaagaagttcaaaaccacctgtcttgcccacaatcagctgtgcttaccagctcactacattgacccttggataatgtggggcttgggggcaccggccccctccccacacagtcagttccatttagtcaattacacgtataactttggactccccaaaaaattaactgctgatagcctaccgttgaccagaagccttaccaatagcataaacagtcgatcaacacatattttttatatgtattatataccagcagtctccaacctttttggtaccagggaccggtttcatggaagacaatttttccatggactggggtggggggagggatggtttcgggatgattcaagcacatgacatttattgtgcactttatttttattacaatcacattgtaatatgtaatgaaataattatacaattccccataatgtagaggagcttgttttcctgcaactagaccgtcccatctaggggtgatgggggacagtgaccgatcatcacaacataggtcccttgcatgtgcggttcacgatagggttcgtgctcctctgagagtctaatgctgccgctgatctgatgggaggcggagctcaggtggtaatgtgagtgatggggagtggctgtcaatacagatgaagcttcgttcgcttgcctgccgcccatctcctgctgtgcaggcccagttcctaacaaaccatggaccaggtcaggtctgtggccgaggggctggggacccctgttatatactgtattcttacaataaagtaaatgagaaaaaagaaaatattattaagaaaatcctaaggaagagaaaatatatttactattcattaagtggaagtggatcatcttcacactgagttcgctgtggaggaggaggaagaggaggtattggtctggctgtctctggggtggcagagacagaagaaaatccacatgtaagtggacctgcacagttcaaacctgtgttgctcaagggttgttgttcaacccctcgttgtttcagaatgtgaaaatgtctgcagggaaaatggttatttctcgcttgtggctagatgtctgcggctgtgatagggagaagagcaggagcaaaagagatgaggagaatgcaattcgtgacttctctccttccccctgccaccagcctccactggtctctctcctggactattgtcacctctggccactcctgcttccctccaactttccacccacagcagctatagccaatgcttagaaacacagttctaatcatgcagctcctcacttacatggcctctagctgctcctatgatgctcctaagcatgaaatccttagcctgtgactcagcaattccactcctcagagtaggcccaacatcactgaaaacaggcattcaaacaaaaacatgtagaccgggtgctgtggctcacacctgtaatcccagcactttgggaggccgaggtgggcgggtcacctgaggtcgggagttcaagaccagcctggtcaacatggtgaaacccaaaaaaattacctgggcatggtgttgtgtgcctgtaatcccagctactcatgaggctgagtcaggaaaatcacttgaacccgggagatgaaggttaacaatgagccaagattgtgctactgcaatccagcctgggcaacagagtgggactccatctcaaaaaaacaaacaaagaaaccgaaaacgtgtacaccactgttcacagcagcattatttacaatagccagaaggtagaaacaacccaaatgtccatcagtggatgaatggataagcaaaatgagacatacccatacaatggaatattgttcagctgtaaaaggaaagaagtactgatacaaatacatgattcaatatggatgaaccttgaaacattttgctaagtggaaaaagccaacacaaaaggccacatgcgtgtagttttatttattgtattagtctatcctcacactactaatacagacatacccgacattgggtaatttatagaagaaagaggtttaatggactcacagttccacatggctggggaggcctcacaatcatggtggaaggcaaatgaggagcaaaatcatgtcttacatggcagcagcaagagagtgtgtgcggggaaactgccctttataaaaccatcagatctcatgagacttattcactatcatgagaacagcatgggaaagacctacccccatgattcaattacttcccaccaggtcccttccgtgacatatgggaattatgggagctacaattcaagatgagatttgggtggagacacagccaaaccgtatcatattcatgtgctgtcctgagtgggcagatccatagagacagaagcagagtcatagttgccaggagctgagggcggtaggggtggggagtgactgctaatgggtatagcatttgcttttgggtgataaaaatgttctggaactagattgtggtgatggttgcacaacactgtgaatatacactaaataccactgaaatgtacacctcataaatggttaaaatgctgagttctatgttatattaattttaccacaattcttttttttttgagacagagtctcactctgtcgcccaggctggagtgcagtagctcgatcttggctcactgcaacctctgcctcccaggttcatgtgattttcctgcctcagcctcccaagtagctgggactacaggcatgcgccaccacgcccagctaatttttgtatttttggtagagacagggtttcaccatgttggccaggatggtctcgatctcttggcctcgtgatccgcccgccttggcctcccaaagtgctgggattacaggcgtgagccaccgcgcccagccaattttaccacaattctttaacaaatccttaacgtgtcctctaagcccacctcccaccaggccatcctccacctgccacccagcccaatcaagatcaatacctcctgcaacatgtctctacacacgttggcccctttgcctccagtgggtcttcaactccttacctggccagcttcctccaggagcccttgaagaagcccaaggtgggcgcggctgtctctattcaagttccaatagctgctgccctcctcctgcagaacaggttccctggggggttagtgcctttctctgtgtctgcgcatctcagactctgagcagccagaggacagggattcaagcactattcttttattttatttttaattgataggtaattgttgtctatatttttagcatacctgtagacactgtgtaatgatcaaatcagattaactgagatacccatcacagcaaacgtttatcttttctttgtactgggaacattacaattcttctcttctacctattttgaagcatacaataaattactgttaactataatttccctactatactgtcaaatactagaatgtgatccttccatcttactgtattcttactgtaccccttaacccacctcttgatcactcttctcctctcttccctccccagcctctggtagccaccattctactctaccagcatgagatcaacttttgtagctcccacctatgagtgagaatgtgcaaccattgtctttctgtgcctggcctatttcacttaacataatggcctccagttccatccgtgttgctgcagatgacacgatctcattctttttatggctgaatagtattccattgtgtaaatgtaccacattttctttatccatttttctcttgatgaacacaggttgactccctgtcttggctcttgtgaacagcctcaagcactattctttgttgcaccctggatgtcgtctctgagagattaggagctcagaaattatttgtgaatcgatgaatccctaaactacttcatgatcgttaccccaagagcatgaggcatgctcttggagtttctctctcttttttttctcatccacgctggagtgcagtggcgcgatctcggctcactacaacctttgcctcctgggttcaagcaattctcctgcctcagcctcccaagtagctgggattacaggcgcacgccaccatgccgggctaatttttgtatttttagtagagacggagtttcaccatgttggccaggctagtcttaaactcctgaccttgtgatctgcccgcctcggcctcccaaagtgctaggattacagatgtgagccaccgtgcctggccatgttcttggagtttcaaagcaaggagaacatccctccagcctccacatttccatctcttacacatttctttagtaccctccttctcgctgttcacagggaaggtattttcccacagtgggggaaaaaaaacacgttgtaaatggtgattcagttcctgaactcccccacaagctttacataacccacaaggcacttaaatacttataaactatgcacacttgagttaaatgggcttttgtgagcggaacgggcatccaaactgccatttatggcagccctttatgggaagctttgctgtgagctcaggaaagttataaattttttgtatgcccaaaatgccattgaaacatggaccctctgcttctgtttgtgggatattagttgatgaatgcatttgactgtcttccgagatcctcaagggaaagggcgctcctgccaggttaagcttggtattcaaactaagaggagaacacgggagcactggatgggcttgtaggtggtgacgttgtttccaagacgaccttgagtatcaggggaaaggccgtcggtagccttctctccctcccgcattgtgtaaatgtaccacattttctttatcctgccctctacttgcaattcctggccctctactctgctgtgttctagtaattctctagggaggaggaccaaaattgagggagtctttctagcttcattttcccaataccccaagtgttcctggatgctatgcctgccggggaggggcccacggtctgtgctttaacaaaccctccaggtgattcggatgcacactcgggtttgagaaccactgctcttggtgaacctcactcacaaacttatttgccctgatgttaaaaacatgccatttaaagatggccgcgtcacttccggctttaaatttgctcagttcaggttacagatgcattcaatttgagattctcccaccctcttctcttttttcctaaaggagatctgggttctcagaatgtcccatctcctgacccgaaaggagtggcatctgaccagatgttgtcctttctccttgcagcatctgctgtgatgtagcagggcccagctggtgttggccatggcctcctgtgtgcctcttttgctggtccctgtgttcccactgtcatctttggccctggattttatgtacttagcctcttccaaccccagccctgcaactcccaccccactagggtcaggaatgctggctgccttccatccacagtgctaggatgtgatgggttctgagagaggcttcccttaggtccagccacctgacaccaccctcagccactgcggctgctgcttgtgcagtggctacccaaggcacccaggtttggtgattttacaaggactcacaagactcagcacatagtcacagctgagatgtattccagtgagaagctacaaagcaaaagcagcaaagaaaaaaggtacccagggaaaagtccggaaaccaccagcacaagtttctaagaatcttcttccaggggagttacaccagatgggcttcactcctccaacagtgaggtgggacggcacacgcacaatactgtcgaccagagaagctcattcgagaaccagtgcccgagattttattgagggtactggtcacataggcaccctctgcctaacgtataccaaaagtctagacttccataagtgaagcgagcatttgacgtaagcaatattagttgcacaaactgtttaggtacagcaaggctctcttcttatttagggaatttttatatctgtgtagggaactgtttaccattcaagttcccaggaactgcctaagggccaactttgtaagcagacatttctaaggacagcagtctcacacctgctatgtttactctttctgcatgctgctgctgattgtgatgacgataagaagtctagcagtagcatttattgagcatctagtgtgtaccagctctttcgatgtgctaatttcatctacttcccaggtaccatattgaaatgttgtgatcatcgaggttacagatcccatttgctcttggaaccaccctctctccatctgccttcaaaaaaattatctaagatttctgttgaaggcacccttctgggatttttacttcagaaggtatcaggggctggggtccctccctggacatcccgcagtgtctaggtttccatcacatccatgccagccctctatttctattttgctttcgacatgtttacttttataattatttcctgtttcaggcaaataaggcaggtgtttctttatagccatattaccattttatttgaaaaaaagagagttgctttaatacagcaagtgtgtgtgtgtgtgtgtgtgtgtgtgtgtgtgtgagaaacattgtgagttgaaggagagtgacaagggcttgtaacccacctttaggactttggctgggcaggatcctcaagtaaattgggatatctgggccgggcacagtggctcacacctgtcatcccagcactttgggaggccaaggcaggtggattacctgagcttaggagtttgagaccagcctgaccaacatggtgaaaccccatctctactaaaaatacaaaattagccaggcgtggtggtacgtgcttgtaatcctagctaggaggctgacgcaggagaatcacttgaacccaggaggcggaggttgcggtgagccgagattgcgccattgcactccagcctgggcaacaagagtgaaacaccatcttacacacacacacaattgggacatctggcgccgggcatcacacactggcagcactcacagagcaacgactagagacccaagttctcagccagtttgctgggactcccagggctgtgctcagcctgttggcagctaaggtcttccaagagtgtcttgtcatagagaagccacgaaggcaaaggaaggggaggttgggagattatgttgactgttgctacatgtcttagtccatttgggctaccaaaacaaaataccgtaaactgtgtagattacacacaacagaaatttatttctgacagttctggagactgggaagtccaagaacaaggtcccagcagattcagtgcccgtgaggacccacttgctggttcgtagatggtgtttccctgctgtgtagcctcacatagtggaagaactagctagctcactggggtttcttttatacaggcactgatctcatccatgaaggtggatccctcatgacctagtgacctcccaaaggccccagctcctaataccatcacaatcgtgattaggtttcacaatatgaaatttgggggcacacacacattagaccatagcgctatggaagggaacatagtagcctgttgacaactagctctttgtgtatggaagcggggggcagttgttctctcagatagatggataaactttctctctctctttctgtctctgtgtctcacacacacacacacacatacgcacacacacttttttttccaatgaacgacttgacacttcaggatccttctcatctatgtatatttcagtggcatcttttaagaataaggacattttgatagaaaaattgggggaaagatgtgaccagataattcaccaaaacacgttttaaaaatcatcctcaagcagatgagaaaaacgctgaaactcacctcctcattataaacatgctagttgtaacaacactaggacaccatttctgacctatcagtggggaaaatgtaaaactgtgaaattatactctgtgatgaggatatggagaaatggctctctcataccttgctggtgggcatgcaaattggtacaacccttctggagagaaatttggcaatatctaataaaagtacatacgcatttcctttttgatccaggaaacccactcctaagaatctaccctaaagatacacctccaagaatatgaaactacgtagacacacaaggtaatccattacaacattgtaattgcaaaatattggaggcaacctaaatgcccatatgtgggagagtggatgagtaagctatagtgtagccacaccatggattagtatatagccatcaaaaagagtgggaagatctctgtgaactcatttagaggagttttcaggatatactgttaaatgaaaaaagctaaatacaaatgagtatctgtagtatactgtcactgatgtaaaaaagaaggagatataagaaaatacacatatatccacttacttgtgcagaagatacttggaaggataaaacaggaccaaagaagacagattacctagagagggtatgtggcaagggagggaaggagggagtaggggtggggaacaagggtgaggaggaagtgacagttgtctatacaagtctacctttatttatttattttttttaaagacagagtctcacttcattgcccaggctggattgcagtggcacgatctcagctcactgcagcctccttctcccaggttcaagcaattctcctgcctcagcctcccaagtagctgggattacaggcccatgctaccacgcctggctaatttttgtatttttagtagagacagtattttactatgttggccaggctcatcttgaactccttcctgacctcaagtgatccgcccacctcagcctcccaaagtgctggattacaggtgtgagccactgtgcccggccaagtttcccttcttgaataactccgactgtttcttacagaagtgtttcacattgccccaaatcaataaataattaaaccaaaatatgggggagcccaaatggaatacaagcagtaacaaatgaaactaagttgtattacaaatgaattacataaccacaccaatctctttggaaaacagtcttttgaacagatactacaaggctaaaggcaaaaagaaaaaaaaaactgtgcaaacattgttctctggatggtaaatctttttctcacaggaattctattaccacctgatgtgcaaactatgattaaataaataagatacattgtagatacaagaatctcatcctcagtgttggcaaaagaagatacaaatagagaaagaggccgggcacggtggctcacacttgtaatcccagcactttgggaggccgaggtgggcagatcacgaggtcaggagttggagaccagcctggccaacatggtgaaaccccgtctctactaaaaatacaaaaactagccaggtgtggtggcacacacctgtaatcccagctactcaggaggctgaggcagaactgctggaacccaggagctggaggttgcagtgagctgagatcatgccattgctctccagcctgggtgacagagtaagacaagactccgtctcaaaaaccacaacaacaacaacaaaaagagagaaagaaggaatcctagaacaggggcccataaactgtttcttttaagggccgggtatcttcagctttgtgggccataaagtctttttctcaactattcaactgtgcctttgaacaaaaacggccacagataatatgtaaacaaataggtatgagtgtgttaaataaaactttattgaagcagggttaggcgtggtggctcacacctgtaatcccagcccttggggaggctgaggtgagagaatcatttgagccccagagttcagtttatggagatcagcctgagcggcatagtgagaccttgtctctaccaaaaaataaaaaaaattagctgagcatggtggcatatttcagtggtcccagctactctggaggctgagtaagaagatcactggagcccaggagtttgaggcagcagtgagccatgatagtgtcattgtactccagcctggatgacaaagcaagaccctatcccaaaaaacaaattaaaaaacagacaaaaacaaaacaaacaggaggtaggccatatttggcccaacggccacagttcactgtctttttaggttaagatgaatcttatggtgctggtcgagaatgagagttatccatgaaatcatgattttgttttttatgtttttatttttgagacagagtttcactctgtcacccaggctggagggcagtggcatgatctcagctcactgtaacatccacctcctgggttcaagctactttcatgcctcaacctcccaaatagctgggactagaggtgcacgccaccaagcctggccaatttttgtatttttagtagagtcaaggtttcactgtgttggccaggttggtctcgaactcctggcctgaagtgatccacccacctcagcctcccagagtgctgagattataggcatgagccatgcgcccagcctgaaaacatgattttgttttgttttgagtttatatacatatttatagtgaaatgattaccacagtcaaatttgttagcatatccatcaactcacatagttaccatctgtgtgtgtgtgtgtttgtgtgtgtatgtgtatgatgagaacatttaagatctattctcttaacagatttcaagtttacaatacagtattgtctactatagtcacgattctgtgtattagattcccagagctgattcatcttattactgaaaaattttaccctttcaccaatacctccctatttccctcacttcccagcccttggcaactaccattccactctctatttctattaatgcagctttttaagattctgcatataggtgatattgttcagtatttgtcttatgatttacttatgaagtaaatagctatagaaacaaatatagctatttttttttttagacagttttgctcttgctgcccaggctggagtgcagtggcacgatctctgcttactgcaaccgccacctcctgggttcaaacgattctcctgcctcagcctcctgagtagctgagattacaggcatccaccaccatgcctagctaatttttgtatttttagtagagattgagtttcactgttttggccaggctggtctcgaactcctgacctcagatgatccacctgccttggcctcccaaagtgctgggattacaagcgtgagctgccgcagccagcctaaatatagctatttttgtatgtgtggtttagtattgtcaacctaataatataatgaatttattggggaataagcaaaaaagattataatctgggatgcacagctatggcaagccacagatgcacctgcagaggagagggtaaggggaagcttttattggcagaaaggagaagttcacataagctacttggaaacagagttcattggttctgggagctcaaagccagagtttgtgtcagttcattggtggagatgctgttactgggcaactgttcttttgagagcatcttatctgaattactgcagtcctaaagaggggatctcttgtagggttattttagaaagcccttgagacagtccttatctcagacacacatccaggagctctctctttttgtgctttcctggcttcagtttgtttgggtctgacaaacaaggtgatttcatcctggtatctgcaactgtcacagtatgtgtacgtatatttcatggaacagtgataccccagtaacagtgagcgcctctggagcccggacctttgttcctaaacaccattcctcagcaaaagggaccagaacctcttggggaagtagttgattcaaggactagggagtgaaaatacaagatgagccagaaatacttgggatgccagaaggtaagtacatctttccaaaaggccatgtcaaaagaacatatcaaaacgcatcttttgacctatcaaaagaacaagggagccatcctgaaggagctcccaatggccaaagctggaacaattggagcaacaaaataaataatgatagtagtggattatgatccatcgaataaagactctgtacagtcatattgctacaaataaataattgaatagttttcttaaatggaagagatgaaacagatcttgcttatagataaatttcaattaataaatgtagaaggaagggaggaaatggaaagccctcactagaataccacagtaataattgctgtaggcaagatccaccaatgagaactaagattactatgagaaaatttaaggagaaacaggatatttgcatttttttttttttttgagacagggtctggcttcactgcccaggctggagtgcagtggcacaatcacaactcactgtagccctgacctcccagcctcaagtgatcatcctgtctccgcctcatgagtaactgggaccacagatgtgtgccaccatgcctggcatatatatatatatgtgtgtgtgtgtgtgtgtgtgtgtgtgtgtgtgtgtgtgtatataaaatgtgtgtgtgtgtatacgtatctctacaaaacaaactatatatgtacaagtatatatatgtgtgtatatacatctatacgtatatatatgtgtatatacatctatatgtatatatatgtgtatatacatctatacgtatatatatgtgtatatacatctatacgtatatatgtgtatatacatctatacgtatatatatgtgtatatacatctatacgtatatatgtgtatatacatctatacgtatatatatgtgtatatacatctatacgtgtatatgtatatatacgtgtgtgtgtatgtatacatatagtttgttttgtagagatgggggtctccctatgttgcccaggagggtctccaactcctgggctcaagcagtctgcccccctcagtctctcaaagtattaggattacaggcttaagccaccgcacctggctgatattggcatattggtatctcccttcaaatttttactaactataaaagggaaatgatggcttcatagtggagaaacccagcacaaactactttatgcaagtgatcaaggttggcatcaccaggaataagacacatcgagttttcctgtgccctctgactgatgtggacatatcacttctggatattcttgccaaaaaaggataacctcaatgtaatcatgagaaaatatcagagaaacccaaatttgagagacattctacaaaatagctggccagcactcttcaaagtcatgaaaatcaaggaaagactgaaacattattgcaaagtaggggaggcaaaggagacatcacaactaaatgcaacatgggatcccacactggatcctgaaatagcaaaaggatgtcaggggagaattgatgagacttgaataaagtctgtggtttagttcatagtgtcgtgccaatgtgatttcccagttttgatcatcgtcttacagttacgtacattttcgagaagtcttgaggtagagcaacctatataactttgagaaaaacaaaaacaaaacattctcctacataactacaatatggttatcccatccagaaaatttaacattgatataataaaattatcgaatatactgaccctgttcaggttttcttaacattcccaatgtcctttatggatttgttagtttggttagttgttgctattgttttatgtgtttcccttgtatcgttttatttgtttgctttggttgtcccatctccttaatctccattaatggaagacaggtaccctgccttttctgtctcacatgacactgacatttttgaagggccctgagaactggctgtcttccataggatgcagttttcaacaggggtagaagaccattgctataaactcctatttccacagattagttattaagtctcagctctgagttgatgggctctgaacactgtgtgtctgtgagtggctctccaggtggggaccaagcagttgttgcatgattacactttcttggccatgtggtggacactggtcccaacttttctccttccttcatgcccattcatagctgtgggttgtgctctctctcctcactttgaacttctcattccttttttctacccctctgcacattgctgagttatccctcagaggtctgtgctgtttgcaaagtcaaaaccagcttcatagtccctcttgcacaaaccagcacacagagtttgcaaacttcagtggggactgaccagcaagagctacagagataaaagtattacattggcttcctcccacccagaagaccggagtttggcaccttgggaatatttcctggggcatccgtcagagccagttaaactcagcatctaatcagagctagggaatttttttttttttttgctttatagttactgacttggtcaagagagaaaagcccaccaggtatgtgctagaagccagtgagtcactgaaaatactggaaacttctttttttttttttaaagattcttaaacagcattaatatttatagcaaacagcattaatatttatagaaatctttcacattgtctgtgtcagattccaccccacagaggaaaattggcaatacatgatttcatggtacaaagtattgctaataatcacaggctaccctaaaccaagattacagcaagatccaccctcactctgcactgtttctgcaggaatatgggaggcagcatggccacacaggggaagcccttgagctctggagtcagcagacctgaactgaaatttcagctgggctgcttacaggctggtgaacttgggagagagtacttaacttctgtaagcctcagtttcttcatctataaaatgggttggtaatattttctgcatagagcaagtgccagagaaaaatgagaagatgcatgaacagtgcttagcattgggcctggtgtagggcaggggcttagtaagcagtgctggtgttcctgccatggttgctattggcctggtgcctctgcagtctgcaccaggcattcctggaagaagtggctctggtgagggtggttgctttgcccaccatcttcatagcattggtagcatatgcaaagcagcaggtgctgagcctcccagctgatgatatccccagccaccctactggcactggcgtcctggccatgcaccctgcacttgccctcagccatccatactgggaagccaagaaaacacaattgtttcccaatggcaaagcactgagtccctggctagctagaaagcaagtccaaaaatacacagtgcaaggaaggaaaagatttctcttttgttccttttcttgccagcttctcgcctggttttctaaagcgccccctgcacctagagtcagcaggccatgtgctttccatatggttaggcttcagggtaacagcaggagtctcacctcatagagtgtcctgagtcatacggagatgccgctgtttgagggtgagggtccagggctagacttcagggctattaacttcctgcatcttgctcctgcctcttcacctacacccttcagggaggtctagagaatgaccctaaccccaaggtctccattcacctttattctccccttgcaggcatcccctgctattcacaagacattgactcaaaggctctctattgccgcttaaactttcctgtgctccaaagtgtcctccccagcaagccctggacattatcagctctgaaggtgcaaatgggaagcaccccacatttcaggacatgcctctcgctctccctgcactgcataaattcaatgcccctgaaacctcaaatcatttgcaaaggaataggaataatcattcctgtttgttttggaatcccaagctggttgtcaaacaacaagactacatactgccaggcagctttctcttctcagccacggagggaagggagcatgttctaactgcatgcaaatagccaaggttttctcacgagccctgaaaactccccctttagtttgcattaggcgtgcagttcaatcactctccctgaaggaagaggaggagcaggtggtgttggtgttcagctttgaacttgggccacatgccccaaggataagtgaaggtatagatccgtctaaacaagggggcagtgggggagaaagcccccttctgtatgttttgcattggccaggagccaggcagagagcaaagtgacagagactgcagtcgaagcctattgagagcgtatgttattcagcggcaaagcattcagctcctaagattgtgcccagaagattgttttgcgggtagaaaagaaaggagccctttcaacctttctcatttggcctccactgccgttttgctgagcagccgttttggagtttcctcttggagtggtcggtttatgctgtccagatgtgcacaatgcgatggttttgctttttggctttccagatgtgcacggaaaatggacaggaaaatgagctttggcaaaggcagaggcctgtctctgcaacccctggaatctagagaacccacaataccctcgttgtttagggatcacaaaacgtaggatctggaaaagaacttacgggtcgcccaatttaacctccttattttacagctgaagacaccgaggcccagagaattgtgacatgctccctgctgattgattacacgcagctgggagcagacatcagacctgctagaactcttagacgtgcatctgcacacatgtctgtttcattgctgtatgcacctggcatttgtctatgtgcttgggataaatcagtgaacagagaatcctagcttgtttgagtgtgaggtcaggtgtgggagaaagaacagataataaacataaacaattaataccttatatatagtaggttaggagataataaatgctatcaaaaggaagagagagaaaagaaagagaaagaaagaaaaagaaagagaaagactaggttttagaaaaaaggtagatttcattgagaaggtgactgtattagttacttattgctgcgtaacggaatacctcaaaacttggttgggtgtggtggctcacacctttaatcccaacactttgggagctgaggtaggagaatcacttgggcccaggaattcaagacaagccggggaaatatagtgagacccccatctctataaaagtaatttttaaaaaattagctgggcctggtagcacatgccttggtcttcagaggctgagatgggaggatagctttaacctgagaggtcaaggctgcagtgagccatgatcatgccactgcactccagcctgggcaacagcaagaccctgtctcaaaaaaaaaaaaaaaaaaaaaaaacacctcaaaacttggtggcttaaaccaacaaagattatctcaattttttcatgggttaagaatctgagagtggttttgctgagtggtcctggctcagggtctctcatgaggtggcaatcaagagaggtcagctggggctgcagtcacctgaagtcttgactggggctgaaggatccatttccaagatggcgcactcccatggctgttggcaggaagtctcagttcctcatcatgtaggcacctccacatggctgcttgaatattctcacagtatggcaactggcttcccccagagctagtagtccagagagagagaagagagaaagaagctacaagccttttatgatctggccttgggaaggtcctgtggccttgccttcaaagagttgaagaaatgagccactgataactgagaaggaatgttccagtgaaaatgccccaaggtagaagtaaccaggcattctggaggaacagcaaggagaccagatggctggtgtagctggagctaggaagagatcaatagaagaagaaatcagaagagaagaagagaatggagggagaaaagaatggagagaagagagaatggagagaagataaatcagaagagaagaagagaacggagggcacgaatgtgtaagtcattacaggccagcaggggatgtgggccctggccctgagtggaatggggagccactgcagtgtcttcaacacaggagcagcataatcagacttagcaaatttgcagagaatagagtttataggggcaaaggtggaagcagggagactggttaggaggctgttactgtagcccaggaaggacatgatggaggcttgcaccttagtatagccatggaagaggggagaagtggctggattctcatcagatctaaaggtagatccccgcctctggtttccctggcaaattgcatataaggtgtgacagagagtagccaagaatggcaccacggtttatggtctcctcttccccaaagctgccactgaccactttccctccctgccttctgcagttttatgtggagcaatgaggtatggaagagggcttggcatccagcatcctttccctcactgcagggacccacggcgtgtccttcagtccatggcttaccctttgtggaccttggttactacatctacaaaatagaaaatggacctcctctgtcatagaaataataactgtttataaaggcacttaaagctccttagaagaaagcactaaggatgtgagggcaatctggctgtgacatctgtcactccattgattgccagggttgattcggctgatctggctggctaggcgggtgtccctttcctccctcaccgctccatgtgcgtccctcccgaagctgtgcgcttggttgaagaggacgaccatccccaatagaggaggaccggtcttcggtcaagggtatacaagtagctgcgctcccctgctagaacctccaaacaagctctcaagaagaaagcactaaaattctggaaacattgttagtggtttgcgatagtattttgagagctggggaactaaatgttttggttgcatctcctcccctgatgtgtttgctgcagatggagaggctgaagccctccgtgaataagaaactggagtgagagatgcttcgcgggacagacgttcatatcctgaggcaataccccacacggatgtccaaactcatgatctaaggagactgtccacatgccaggtccgcaggaaatgagactgaggccctcatcattcagacccccaggcgatcctcttctggggccttgcactgctgcctcaactatctatataaagttcaaaatcacatataactaggctctgctgttagaagtgaggatagtgattctccttcaggagaggcccatgaggagcaggagcccaggattgagggggtctcagggtgctggtgatgttccgtttcttgatcgggatgtgggtttcatgggtttgcttagtttctgaaacgttatcctgtacaacgcaggcggatctgctcttttctgcacatacattcaactgcagtaaaatatctttttaaaaaggtaatgggaagatactcttttcccaaaaatatgactcctccctaggaactgaaatcctacctttagagagttgtcggtttctgctcaaacgtgttgtttgtaaaatttcaaatatgttaaggagaattaacaaattaaactgccaatgggctaatggccattaaattagtagctaagaaggcatagcttggttgtgcctgtttggggactttgtgtaaataggactgtacaacacttactattttgtgtctagtttttctcactcagaattgtgtctgtgacgtggctccagactcacacagaggtataaacctttcattcttattgccacacagtattccattgtgtgaatagaacacaaggaataaaatgagtttattttactcattctgttgtagaggggcacttgcatggtttccagtttatgactattattgatagcactgccatgaataacagcactcccaggatgtgtgtgcctgtctttctttctctctttctctttctttctctctttcttctctttcttccctccttccttccttcctttcttttcttttccttcctttccttcctttttttcttttttctttctctctctctctttcttctctttcttccctccttccttttctttttcttttccttcttttccttcctttttcttttcttttttctttttctttctctctttctttctttctctctttcttctctttcttctctccttccttccttccttttctttccttttccttcctttctttcctttttcttttcttttcttttttcttttctttctttctctttctttctctttcttctctttcttccctccttccttccttttctttcttttcttttccttcctttccttcctttttcttttttttcttttctttctttttctttctttctctttctttttctttcttccctccttctttccttttctttcttttcttttccttcccttccttttctttcttttctctctctccctctctctttctttctttcctcttttctttcttcctttcctcttttctttcttcctttcttttctttctaaaaaaaggcctcattctgttggccagtccaggctggactgccatggctccatcatagtactacagcctcaaactcctgggctcaggcagtcctcccacccatctcctgagttgctgggattacaggcgcgaaccactgcgcccagtttaagatgtgtcttttgatggctacagaggcacattgctctcagatgtgtgcccccaccacattgtatgaggcagcctcatacttggctagcccataggattggtttgctttgctgggacacttagcaggtgaaggtcttcagagcattcctctgggagtcagtgatcccatagaaatgtgggcggtttgtctacacttctgcagggagaagtgcacagtggtggcctgaatcaccctcagccaccaccctgccttccggctgacttccttgggctcttcctcaccccctcgaaggaaggcagcagactgtaagggaatggatgggtcatctcatctcgccagcctgcaccaagaagtttccgagaactgcaccaagagggtgggggaagatcccttgcgtgctaagccagctcctctgagcaggtagggccgggcagccctgcggggagtacccagccccttcccacctgcaggctcatcaaacacctcgacaggctgccctagtgggaagccggtgatgtcatctccaggcctgaacaatcaggcctttcacggcaagatgataacaatcaaaacagtatgtaagggcctgccacacaagaacacacacgctcatcgcacatgggaggatctgaaagccggggtgaagcagggcttgtcagggatatgccattctcctttcataatcaaccggccagggaatatagcctggagagcaaggctgcaggttgccgtcccttcgcttgccaattctcagagaaacccatgactctctccactacctctcctgagagcgtgcacctcgaaccccagaactacaccccaggctgagcagcaatctgcgctcaagcaggagtgtcccactgcacaactccagggggcgccatggtcagagaacacaaggtgaaaagtacccctggaattgtgcaacagtgagctttgagagtgaccactggctttggactaagggagctgaggcctggtggttctcaaaggtggttgctcagccccaaatctgtcgtgccatagctaagttccctagaagcctgcactccactgaggctagaaattctcaaatgagatgcgtgagatcaggtgttctccacactcagtctgagcagtttttgtcgtccagctatttgctaaggaagcaagctcatctaacatgtttactcaaggtcagtgggtctcaatcagggttggtcccctccccctccccggagacatttggccatgtctggagacgttttggttgtcacagctgagaggttgttgctggcatctagcagataggagccgaggatgctggtaagcatcctacactgcacagaaccaggcccccacaacaaggaactcacggtgtgaaatgtcagtagtggtgaggttgagaaatcccgctgtggatggcacgttccactccattaaaccctgcaggtctctggctcgaaaccccctgagtctggcctgccctccctgttgaccagaagaggccagaacctcagctcactagccaagtgggtgtcgggcagcgtccgcccctatctccatatggttcgatgggtctgcatgaggcccagaaaacccggtatgtgtacacagtagcagttaggaggccctgctctgtcacttcccagctccacaaccttcagggccagttatttaactccttgagcatcaatttctccatctgtaaaatgggaataatggtgaaagctgctcatgaggtggttgaggggcaaggcatgttgttacatgtaatatgcttacaagcacgcccagcacgtagtaatactcaataaataacagcagtggttatcgtcatttttattctagccggaggacctcgggctgcctctgatgggtgcggtaatgaaagacttgagctggtttcaaccgcaggcggttgcagtggggtctccagtgctgtgcacagctcctggcacatgctctgtgctgctgctgacacgagctggaagcatttcccaagctcaaggcctgagacattgaggtttgagtggagatggctaataaatgaatttcaagggaacacccctgagtaactcactcagcacaggcatctgcctcccaaagatagtatagggacccctggggtggtacttcgcactccggccttggaaaacacctgaggtatggctggggtgtttaacactcaggttttccctaaaaatccagcaggttcagctaagaaagaatcacagagggccagccatggtggctcaagcctgtaatcccaacactttgggagcctgaggcgggcagattgcctaaggtcaggagtttgagaccagcctggccaacatggtcaaaccctgtctctactaaaaatacaaaaaaataaaataaaataaaaattagccaggcatggtggtaggtgcctgtaatcccagctatttgggaggctgaggcaggagaattgcttgaacccgggaggcagaggttgcagtgacccaagatcgcgccactgcacttcagcctgggcaacagagcaagactctgtctccaaaaaaaaaaaaaaaaaaaaaaaaaagagtcacagaggacacgtgtaagagagataggccttggctcgaatgcatgttttatttttgtttgtatgttggcttggacttggagaaggggagagaaaggaagacctagctcaccccgccagatcatctcacatctttgctttctctgttccttctttctggatgaaatgcatttccccatctttatctattaaaattgtccccatccttcacagtccatcttggatgttgctttctccacaaaggtttcctggatcatctgtctccgccaaaatcatcctcgcccctaatgctctgtgctagatcttatggcctttagcaagtcccgtgctgtgctggagtcatttgcaggcaggtcttttgctgtgtatcagattataagttccttgaagacagggaccttccaaatgtctttcttcatatgtggcatgagctcttgcacatggccagggcttagcggttgactctggagtgactcctgagaagaggcttccaggtggccaagttgccactgcaggacatggttctgcccaggaggtcgtataattgagaaggctaaggcacaccctttgtagaagaaattggtgtgtggctgggaggtcaccagtctggggggaataggaggcttcagtgcccagctcatcaccgcctcattcagcagcctcgggcagttttaacagtggctgctatttaaagagcacccactctgggctccgagataagcctggcacttcacagtgatcatttgccatccacacaagagccctgtcggtgggggagttttatgcccatttttcagttaaaggaaaggctgagtgatctgtagcttgcactgggtcccacctgtgcacctggggtcccacccagatgtgtttgactcatatgtttgactggcactacacatcacagggcctccaaaggcattgtacttgtctgcatctcctttttctaccttaacaatcttaacaatcaaggcattgagccaggcgacctccaagggccctaacttttaacatgggtgatgggtggggggtagtaggaggaggatgctggagaagagaagtcagcccctggggcgaaacagggtcaggcctctaagaaaaagcagaaacaactgcccaccggggatgcctttcttcctgttgcccactgcttgggattagtgttccctgaagatacgaggagggaggcccttcttacctagcacccggatgggaccctggccattggccctcagcctctaccaggttggaagagcaaaggatgagagacctctggaaaagtacctcagactgtccgcctctgcccctgcatccagcccacggagaggccaagcccatgaatgggcacctttcccccgcctacactcccttggcaccccttgtgggcccagcccccctccatcttctaggattcattatttgtgctcaggcccagcgccttccccacttccttacaggtcacctctgggggtttcctaagcagcctgaattgtttctttatgtccctacccaagaaagcaaagtgtctgctgctgtccctacagggaggccatcccttctgcttctgccgtgcctgcccagttcctggatgccactcagggctgggctggagacagcagcccgcaaggacccacccagcatcaatggggctggtgagggtttcagggaagctggctctctagagggcagtagatccaaggggctaaaagcggtcaaaatttgcatcagaccattgcgagttttaggtagggctttttactttttcaaacatctgcttagcttgtaggattctgtatatatcccctgtggaaaattaaaattcttaccctagcttgcctctgccacctaccctgtttctgactacttctgagggtgaccaactcacatcagttatctggggactgtgccaggtttagcactgagtaagtcctatatcctgggaaacccctcagtccctggtgaaccggaatggttgggcaccctagttcctgtcccaaaagggacactgtattcagggaattctgacctcttaacatattggcctgtacattctaatgaggtaaaccattgctactcactcctgcccaaagtcagggcagtcaagtgatcttctgtagtcttccttcttgccattctctcttccatctctgctcctccttgatgtttatttttatttatttatttatcttttgtttgtttgtttgtttgttttgaggcagaatctcactctgttgcccagcctggagtgcggtggcgctatctcggctcactgtaacctctgcctcccgggttcaagcgattctcatgcctcagctcccctggtagctgggattacgggcacccaccaccatgcctggctaatttttgtatttttagtaaagacggagtttcaccgtgttgaccaggctggtcttgaactcctgacctcatgatctgcccacctctgcctcccaaagtgttgggattacaggcgtgagccaccgtgcctggcctatttatttatttttttgaggaatgattttgaaatatgcctgataattgtgttctttgctgttcttcttttttctcttttttatttatttttatttattatatacagacagggtcttgctatgttgcccaggctggtcaaactcctggcctcaagcagtcctcctgcctcagcctcccaaagtgccgggattacaggtgtgagccaccatgcccggccttcgatgtttaaaaaaaataataaaaataaacatataataggaaatgaactttaaaaataaaccctgattcccccaatgctggatgggaccccccttcctcgcggttctctggttttgtcccttcctagcaaattctgattcctaaggaaaaggaaaagagaagtctggatgccctgaggcaaactctgcctccatgaggcagcccctgcagacagacctccccgggagaggcctgtcagggctgctcttgtccttgctggtgcagcccaaccccaggagtcatcctcctccccaatgactccctgccctgtcgaccctcccttcccgcctcccccgtctccttccctttccacgctccctctctcctctcctgtcccactctacacacggatgcccctctcctggcccttctcgagagatctctgccttgttgctctcagtcaggctccggtgacaggttgccatgggacttggcttgtcacggaagggacaagggaccttgtcaggggacagcctgcggtttcttttctaaaagagcccttcatctccacttccctctccttcccattaatgtgtcgtggtccagactagtaatagtgtctttgtgctactgctggggaggaacagaacccagaagacagcagcttcactgtcttcagaagggcatgggtttgtattttccccgtggcttttgaatgctgttttgaattttcatggcccatcctggaaaggaaacctctcatctgacctttcccttcccagagcgtaaaggagggagggaatggcccaccaaccccacctgcccaggatcgtcagctcagagtgtttagttagactgaaggccttgcaggaatgcacagcagggctgcaggaggggagctggtgagcctggggcatcctccacgccaccagccccccgggaggctgcccttgttcttcttcacagtttcccatcctccagccagtctaggccccacagctcctaagtcagctcacggctcaccccctaccactgagagactatccctgccacggggtcctcaatattctctgtcacttctgttatgcatccatatccccgaataccacctgctttgctgctcctgccctcagttgctccagatctcctccaaagctccccagatcagatcttgtatatagtaagcaccccggttgcaggctcctgatgcattcagtagtggccacaggtgtcctcggctcccagactgtgttgggaattcgaatagcagggaaggggctcctgggagggaggcgggcttggcctccatcctcatcctcacctcctctgacacctgcttaggccagtggctctcaacgccctcgcacactcttaaaatctgcacacagggggcccaatgccacggcaataaaccgagatctccagggcagggccgaggcatcggcatttgccggtgctccctgtgactggcatgtgtcgtcaggtctgagagccgtggattcaaatcccactctggagctgatgcaggtgattgaagaagaggagagggctggaagggactgtgtcctccactgggccacccccaccagtgggcctctgaccaatgcccaacaagcagcggggcgagggaacttggatgggcctgtgcgtgtgcacgggtgtgtggaggagagcccagttaggcagtgttgtgcatgacaggtaggaaaggcagagaaactgtggtgccagcccctgctggggagcaaaggagcccaggagtgtcaggagggactctgaccgcccagcaatgcaatgccctgctgagaaaggcctggcaggatccagagggcatggcagctgtttgggctggcagccccgtgccagggctggggcaaggcagaggtaacgaggcttgccagggatggaagaatggggtttctgtgctgcttatcaggatggtggctcccagacaggatgtggaggaggctcccacagcccgccgggcgatggctgtagtcagcgctatgtcacggcgaggactttggatggggagccccacctctgatttgtcagtgacattgggctggtcactctgcggctaccttcgtgtgcctgcctgtgaatatgaggtgcaggcaatggcagcggactgagagccagccaccaagtgcctggcaaagcccaagatatcagaagccttggccttcctcattggaaagaaaccttgcacttcggactttgcaaaaggtcaaggaagctggttgtattcactcaaccattttgagggctacaaggagatgctgaacaaagtcgcagggaaggggcccccctgagggtctatctgggaaggcggggcaggggcttatgaaatattggcaagaatttatccttaagaatttgtcctcaacataaatatattcacatgtctccaactcctggaataggagctcagggtcagcttgcacatgaaattggtagcagaagctgcgagaacaggccgcatttctgcccagggctggttagaacacgcttgtcagcatcctataactgaagcaacgttcaacagtgtcttccaaagctagctttcgagtcctaggcctggggccccagagggaagaagtgaggccattaactccgatcctatacccaatgccagaagcggcacccatcaccctccctggcagagcagcagaagaggggagcctaggacctttcaaggtgaggaagagagctcctgacccttttgtcctgcccctatagactggctaggaagacatgttagggacccagaaaataaggaaaagcaagatggctaagcagggccacccgctcactccccatgccccacccttccgcacacacacgcacattttaaacacaagggaccagaatgacacctttttcctaaacatctgtagctagatttcctttttcatcctgtctcatttctccaaatccttctctcctgttgaactaggacagatcaagactatgtggaggatatgtaagctacagttgacttcctgcccagggcctcacctcctagaagcacttctcagggaagtgtaaaactgtccccagctgcccaggacaaaatcttcagaggtgacccccagggctcaattatccaatggagctttccatactttaaagtgcagcaggccgggtgaggtgactcacacctgtaatcccgcactttgggaggccgagtcgagcagattacctgaggtcaggagttcgagaccaccctggccaacatggtaaaaccccatctctactaaaaatacaaaaattagctgggcgtggtggtgggcacttgtaatcccagctactggggaggctgaggcaggagaatcgcttgaacccatgaggcggaggttgcagtgagctgagatcacgccactgcaccacttcagcctgggtgacagagcgagactccttctcaaaaaaaaaaaagaaaagaaaagaaaagaaaaaccaaaacaaaaaaaaagggtgcagtggctcatacctgtaatcccagcacttttcaaggctgaggcaggtggatcatctgaggtcaggagtttgagaccagcctggctaatattctgaaaccctgtctctgctaaaaatacaaaaaaaaaataggggggtgtggtggcacatgcctgtaatcccagctactcgggaggctgaagcaggagaatcgcttgaaccccagaggtgaaggctgcagtgagctgagatcgtgccagtgcactctagcctggatgacagagcgagactccatctcaaaaaaaaaaaagaaaaaaaaagcgtgcaacagaagagtcaagcccaccaggctcatcagaatgccccctactcccttccagcagctctcccctcctctgtgcccagggaagcgtccagcctccagacatttactggggctcaggggggtctggaggtgatagaaggaattcttctatatgtgccagcctaggagaagcaagaatccacatctcccgggagtttctgtacaacccaaacagaccaagcagtatataggaacacagtatctgaaatgccttcaggttgcacagtggttctcaccaaaatcttacaagtgatgtaaaaatctcacacaagtgtcaacaagagcaaatgagtgagtgccgatggaaactcaagcatagatgagccataagcaaaacagccaagccaggtctctttgaaacagagctttgcagaggaatgagttttggctttagggtagaaaatcttagtctctcttggaaagaggacgcatgagttcttggaaaagctttaagtccctgtctctgttatttcacgctgcaacctcagtgataacactcaccctcaccccaggacaggcattgattacgtgcttactgcatactagctcccgtgtgctaagggcttgagagggaccatcccaggtaatcatatcagcaacgctgtgaagtgagggtgggtattgttcttcaaattctgcagttggagaaatggaaagtagcacagctaacaaagcacagacccaggatttggacagaagaagtcagactgcaaagcccaaacttcaactaccacatgcatggccatgagaacataagaagagatagggtctgcaatgcccagggtctgtggtttcatcttgccagatctttctgcagccactgagctatcagggcaggggtcagcaaactgcagcccatgggccaaatctggccccccactcatttgtgtagataaagttttattggaacacagccacactcaatggtttatgtactgtccatagccacttttgcacctgcaatgtcagagttgagtggttgcaacagagactcagtggactgcaaaacctcaaatatttactatctggcccatgacagaaaaagtttgctgccccctagatccagggatgaagttggagcatgtttgagcccctctctaaggagtcaaaggagagcacaaacttgggtgatatagacagggatttgggtagactcatgggaaatgctgagtgatgcagcttttgtggacatgtcctgggctggtgtggtggggtgtcttcttgtctgtccactccacttcatgaacagttctgcctgcaggttggagagacaggctcaatgcttctgtcagtcccaagagaccataatatttcctttattaaggaactgatcagttttcggatgctatcacttttcagatgccccctggggaagctgctttgtccctcttcacagtttcccacccccagccagtctaggccccacagctcctaagtcagctcagggcttcttcccccaaccccaccctagggggaccatccctgccacggggtgctcactattctccatcacttctgttacatatccatgtcccctaatgccacctgttttgttactcctgtcctgtgttgctccggatctcctccagagctctccacatcagatcttgtatacagtaagcaccctgggctgcaggctcctgatgcattcagtagtggccacaggtgtcctcggctcccagcctgtgttgggaattgggatagcagggaaggggctcctgggaggggggtgggcttgactgctttcctcatcctcacctcccatgatgcctgcttaggccagtggctctcaacgctgttgcacacgggggcagattttaagctgatgggtagatgctgaggggctcattgtaatcttgtcaaaaagggatgggcactaattctatgaaccacatgtgagctaagtggtgacaggtatgagattctgttagggctggacttttcctaagagtctacttgactggcagactcgaggtgggggctacttcttcctgaggtatctggaactacgaacctcaatgaaacatgtgcaggagttgggggataaaggtaaaaaaaacagggtaaaggccaaaccctgaaacaaaatggaggtcagatgctaaactggggattcgccttggtgttctttgttagaggctggaacttgggcctcagccggatcaggcctgacaggaccttcagggccacgagtgtgtcccagtcccgggagcctggggcaggtcataggcaggggtcccagctaccagtctacaacactcccttgcagcaatgggtagattcctattggcagcaagatggatggacgtgagccagttgacctgaaagtcggtgatggtggagtttctcttctctatctaatctacccacaattccctcgggccacacaccagcattgcttgccgagtggcaccctcttctcacgccctttagatcattgttgatcagatggcccttcatggaggggctgcttcttggaactgtccggccaaggtagagtctcacgtgcaaaagggccttcctaaggcactcggactggccccatttccctcctctgcttccctcatgcctctgtttcctgtgcaagttgacttttggctgatttgctgtagtttgcagcatccacaataagggttcttcatgtacatgcctgtgttgtctccatggctaaatactaagccccctgaggccaggcatgtggtcacagattgcatttgtacgcatcccattttgcttctccctcctctcacactccaatgcctggtttgtgcagaaagcagcttctcaaagacaggcatctatcagcacagcctgtcactgtcctgcagaggcaggaggtgagaggatcactgtgagcaccactggggcccaaagaaatgcagcgatggtgccagacctgcagagcccacggagaagctgagcccagagccagatctgtggcaccatcagcgtctgcagctgcacttccttgtcccatttctgaagtggcctctgaataaaatgtgatatactcatttctgtgctgtaacagaatagaaaccaaaatgcattaagcacctctctatgctaggatgtgataggcattattgggtcactgggtcactcagcaatcctttatggtagatattgttgtccctaaattgtatacaagaaacagaggtgtaggctgggtgccgtggctcacgcccataatcccagcactttgggaggccaaggcaggcagatcacttgaggtcaggagttggagaccagcctggccaacatggtaaaaccccatctctactaaaaatacaaaaattagctggaaatcacttgaacccgggaggtggaggttgcagtgagccgagatcatgccactgcactccagcctggagtctccagagcgagactccatctcaaaaaaaaaaaaaaagaaaaagaaaaaaagaaaaagaaacagaggcgtagaaagtaaaatgaaaagtgcagttatacagccacgtggcagaactcagggcaccctgagagccagccagtgtgttctgtgctgtagcaaagcattgtaaggacagagcctgcccaggacccaggacagcatgatgggtagagggctcacgtcactccctcctgcagcccctgctctttacctagacacacgtcctgacctttctccttcctctcctactgcaggtcacaggtctcctcctggcttcctagcacccacggaggtcttggcctcggccagggactcccattgtgtgagcacctattccagacagcagccttcatgtgctttcttggtttttcaggaatttggccattggaatcgggatccagaatttccccgagggcctggctgtcagccttcccttgcgaggggcaggcttctccacctggagagctttctggtgagtgctgcccaagggcaaggccatgtcacagcatcctccatgtgggcttctttcaacaaaacagtgatgtgcttttgcactgccatgctcagatatgacgtagaatggcatgcatccatgtgctagggttgagccaacagtctgggcacgtggagtgtctgcttgcctccccctgcggtggtaaatgtctctgttctctccttaggtatgggcagctgagcggcatggtggagcccctggccggggtctttggtgcctttgccgtggtgctggctgagcccatcctgccctacgctctggcctttgctgccggtgccatggtctacgtggtcatggacgacatcatccccgaagcccagatcaggttggagaaccttccctccctgtctgtccctgtcccagtcccagctgggaccccagccttgggatatgctctttcttcatttgcctttcctttccttattccctccccctctctgccccttcccaagatcatccccactgcctcctcaactgtgctctctgaaactaaaagaaaagaagctaagggcatgtgggtcaagaaatgaggtgacaccaggcagtggcatacacacctgccccccgtcccttgatgcagtagactatcgtttttgtatattctctctcatcctgtctctcgattctcgggctggaatgaagggagaggtgagctctaaaatgtcagtgaaggtgatacatgcatgtcttcactggctagctataggccaggtgtcagaaggtgggagtaagggtttgctttgttccattttgttgttgttttgttttgttttgtttttcttttttttttttttttaatggcagagtctcgctctgtcacccaggctggagtgcagtggtgtgatctcggctcactgcaacctccgccccccaggttcaagtgattctcatgcctcagcctcccaagtagctgggactacaggcaaccaccactacgcccagctaatttttgtatttatagtagagacggggtttcgccatgttagccaggctggtctcaaactcctgacctcaggtgatctgcctgcctcggcctctcaaagtgctgggattacaggcttgagccactgctcccagcctattttggtttttatagaagaataactctgaggctagtttaaaaggccagattaagtaatatctttaagaaataatcacccctcttcattactcacacatggaccacagaacgatcataggtgaccttgggcaagtaacttctctttgcctcagtttccccaccagtaaaatgaggataattatgatactgacctcatgaggttgttgtttggggttccatggttcattagtttgcctggcacatagtaagccccagtaaatgttaccattattaatggtagtgtgctttctcttggaattggacattgcagaggatgccttcagcctagccgtggcctcagggatcattaaggtcttacttttcttcctgtccttctcttccagtggtaatgggaaactggcatcctgggcctccatcctgggatttgtagtgatgatgtcactggacgttggcctgggctagggctgagacgcttcggaccccgggaaaggccatacgaagaaacagcagtggttggcttctatgggacaacaagcttctttcttcacattaaaacttttttccttcctctcttcttcatctcattatcctgattgactctgattataatagaaccatttttactttgctttgagggagatttttgatttaatggggaattttaaggtgtcatggaaatacagattctttgttttggccactgaatggactctctcttcagtgggattatcaaggaacttcagatcagggaaatctccacttcgggaccttctatctgcctcccaactcctcaaggtcacctatagaagcgagctaccaaaagacgtctcctaagcattttggtggcctagtgactcagggcagagtggccagcacacctctcatccgcccctcctgctccatcactgctgagcctctccccatctagaatgttggaactggagcatcataaagatagcaagctaccttccaaggccgagccagcccagagaggagcatgtcttcctttacctccccctaaggagatactacatgggagggggacacagaaaaagggaaggaaattggctagtctggctttttttttttttttttttaaaggcaaagattgacattattgaaggaaaggggatgaggacaactgtgaactcacagtgagccctgtggaaagaagagacagacagagtgtgggtttgttcggaggcctctgctgtcaatggattccaggagcaaggccatttgtcgcgctttccaaatttcttaggcatttattttgataagtttatagccatcatgtttctaagagacttggagacaccagcaaactgctagaactcaaactcttcaattactcaaagaaggagccatttcagttaactcaagtgaatgaaagagttttggaatctgctgtgggtccttccctgttgaccatttggtaacttataatctgacaaaaactcttgagctgcaacaggccttgccagagggctcaggatgggaaaggaagaaggggataggaaaagaagaggtaattttacatttcccctttaaagtaaattttagccaactcatcattctgaaatgtccctataaagaatgagtcgaactagaccagaagccagcctactccttcttacatagcttctccaacaggggtagcaatgacctgtccacttcaaacacagataaggcctgccatcctcattggttaaaggcacacgtgagactttcagtgggctctgctgagaaggaaggcagcccaggagtcaggtatgcaggcattgcattgtcagtgtctgctctcagagtttacacattcaattgcttccaagggtgaatctcctgctctgtgaatgctatcagaccccaaaggccaaccttgggctgggtctatgtacgttcttccgaagcactgatgatcaaaattgaagacacattcagaggtttgattggttgagattaactggtgtggtggttggtgtatgtatgttttatttttatgtctttgtatgtagttctacataatgcaaattgtgctttctgatggacaagacctcataactgtgattaatatcaataaaaaggggatgttgtggatgacctgtgttacgttcagtacttctcaaagctgcttctttgcaaggatgatcataaaagagctaactaaagttggaactaacacctccctgatccaacactaggagaggcaaaggaaagagctcagatgggaagggctagtcagattcttggttgcaacaacagcatccaacagcagcttacttaaacagaaaaggaaatgagtggaagcctgttagggaattcacaggctctttcggagaatcgggcttgaaaatgggttggatccaagaaagccagaggtctggggccatgacccaatcacacctggagaacagcttggtttagatgccatggtccccagagctggtccctagatcctggacaccactaatgaaactgctgtaccttgatgccaccaccactgccgccacaagaacaaactctacactgagctggattctttgtgtcctggctccacattcgaagttctagatcagaacatccagctgccagagcttagatcctgtgcccatgaactagctgatcttgccccttcccaagactcgcaaaatagtggattttccaaatttgggaatgagttcatatggtgcagagccaaaatagaaaaaaaaaaaagggtctattaagttcattacagccttactcttttgctgttcaatatcaacatatactctaattcctctagttttacttaaagaaaaaactcttgcttaaaatatgtagctattcctcatacaatcaaaacttctttcattccctttccaacggggttaccccaatgtctttcaactcctgtactcaaggtctgtgagtaatggataccccacctccgtgggataacaagcccatctcattattctgtatctttgagctgaagtgtaaagttaaccataaccgttcatcccatatacaataaaacgaataacgggagaggaaagagaggcaatgagttaaaataggatacacacaacacaggaagtacaagtagaagctacagcacccatttcctgccctagagaagagaccctggatgatgtttaggtttcccgcttccagtttccattccaagtccatgctgtcttcagccagtaccttagatgactggggtgtgacctactagccgtgaccctattcctctttcctaagggcacagagaccaaggaggccctgcccatatgcatgatggtaacagtcttcccttaactcccaccgctggaggaggaggaggaggcggctcctgagagaaccacttgagtttcattcatagcctccaccctggcctgtctcccgtggtatagcagcattttcccaggactagtcactgcagccagccttgtcaacccacttttttgacctaatggcatgtgaaattccaggtggccagcccacatgtccagactattgctatatcactctttttctgttcaacatctatattcactctaattccccaaatttcacctttttaaaaaatgtctgctttaatggaaccatcactcatacaaacactttatatcccctttccaaagggagccaccccaacggtcagctgcctcaatggtgcaaccttcctttcctgggaataaaatcgctaattggtggaaaaaaagttgaagagagtgagagtcattaagtaagatggaagttgcaccgtgcctacttccccttcctccagacctgtttagtctggctgtgggagaaacggcaccacgtgatgttccctagttcagaacaaacaagcatcttaaaggacgatatttcaatctccttaggtatgatcgtctctcagtcctgaaatgaaatcttcaataaatcatgtcacagctgaatacagatgactgcttctgggtgacaggatccattgacaagggtatcacccactgctttccctctttcactgtaaagtgaattccgttgtcagaagcaattttgtagagcatgccatgatgatctacaggcagagaggtcaattccaaagtcagacatgagcctgtttcagtgaaaagaaatcactgccctttccataatggaagaggtccaaagtcatcagtctgcaactaagtagtccatggtgtccctggagtctggtcagttgcggcattcaggggtggtcactgataaccctgtgcacccaggggccaggtctgcattgataatggaaagcctaagtgattgaatccatcacagttcatgtgttgccagcaaagactcttctgctcatgaatcagttgaagcaatgatgtgcctggagaaagaaatcattacacataagcagatggcctggttcaattaattattattagcttttgctatagtgggtattttggatgatgttttactcaagaaacaaacattttcaaatttggcccattctgagaagtgaagccatgtatgtcttcccacacctctcctctgtcattaaacctccagtcattcttctttcaagtttgtgacctgttgaacagaaccccccatctacactgctcagaagttggtgtagcttcttgcatcaaattttctttgcttccaagcaaagtggacacagagttatgtgcttcaaattctcctccccaggaggttctccctctcacctgctatcctcactgaactataacatcacagtcacctatttagaaggtagggccgggtgcagtggctcacgcctatgatcccagcacttagggaggccgaagtgggcggatcatgaggccagaagataaagaccatcctggctaacacagtgaaaccccgtctcaactaaaaataccaaaaattagctgggcgtggtggcacccacctgcattcccaactactcgggaggctgaggcaggagaactgctggaacccgggaggcaggggttgcagggagctgagatcgcaccactgaactccagcctgggcgacagaacgagacttcgtctcaaaaaaaaaaaaaaaaggtaggcaagcatatggtgtgaagctatctgtaaatgaggatcagtggtttttcctctcttagtcactagctcttgggaaacccctttgaggccggtgttagattgatgaaagggtcaggggtaggcacacagggaatgatctacctatgcatataatgcacttgtgccttcagtacctggttaggagctagtcccacataaaccatttccagttggtaatgggattttatgagtgtgtcagatggcccagtacatgacggacagcttgggttgcaaatgacatgtaatacattagggataatcacttggcgtccagtggtcagtccagctcagaagtcactcccagcttctcctgctagcacagtcaatccagaatctctgcaatgtatatcaacaacatcagaccagtgtaaaatgatacctttccacccatttattaagcacccttagttaggaaaatcccaaaatcatgttggtttctaatcttgatcctcgctggtttgagcttgccattgtccttctttctgaagtgctgggatctaactgtccattctggagacagtcgagggtaatgcatgagaactggcttgctcttgcagtgagactgcaaaggatgcaaagaaatggcagtgtcgttacgaagtgtgtcagaagactggagaagagggtttccgctgacgaaggaggctctttgaggactgggtgattcagagaacttcaggttttccaaatcctctcatttgtctccatttggattctctgggtcttatcccttcctgatcaatgcttcagcaaggccatgattttaccagtgtagaaatgtggccagtcctgtggatcaaattttacctttggttttccctttttgttgttgttttttctttttgagacagaggctcgctctgtcacccaggctggagtgcnnnnnnnnnnnnnnnnnnnnnnnnnnnnnnnnnnnnnnnnnnnnnnnnnnnnnnnnnnnnnnnnnnnnnnnnnnnnnnnnnnnnnnnnnnnnnnnnnnnnnnnnnnnnnnnnnnnnnnnnnnnnnnnnnnnnnnnnnnnnnnnnnnnnnnnnnnnnnnnnnnnnnnnnnnnnnnnnnnnnnnnnnnnnnnnnnnnnnnnnnnnnnnnnnnnnnnnnnnnnnnnnnnnnnnnnnnnnnnnnnnnnnnnnnnnnnnnnnnnnnnnnnnnnnnnnnnnnnnnnnnnnnnnnnnnnnnnnnnnnnnnnnnnnnnnnnnnnnnnnnnnnnnnnnnnnnnnnnnnnnnnnaactgtcataggcagccccggggatgggtttaagtctcttccttcagctggtaacttcgggacttgagctcgccagtgtctttttttaagctgtgtggcatggcttaacaggactgcctggccggcgcatctgtaatcccagcacgttgggaggccgaggcgggcggatcacgatgtcagtggatcgagaccatcctggccaacatggtgaaaccccgtctctactaaaaatacaaaaattagccggcgtggtggcgtgcatctgtaatcccagctactcgggaggctgaggcaggagaatcactttaacccgggaggtggaggttgcagtgagccgagatcacgccactgtactccagcctggcgacagagtgagactctgtcacaaaaaaaacaggactgcctattgggcctcatatgcttgactgtttgatggcagaaacaactcattggctacaggctttgctttgaatggacccttcttccaggtgaccggtatgatgagaagtagagaggtaggggcaggtgtcagcgtctggatcttctctgggatcccaacagaagacattttcgtcctgctgtgctgaagacgggaccggaaggccattgctcaggtattcactctaccagacggggctttacgctcccaccacttcctcgaatcccccgtgaggtagatattattatcctgactttacctgtgaggacaggaacgcagtggcggggtgggttctcactgtgcgtggaggcagcaggacgcagaaatcgacctcccccacgcgcctcgccagcagctttcagtttcgtggcccaacgccctgcactgcacgcctctcctctgggataattgatagttgaatctgtgtaagctggaagcaaatgagagcccagcggctgttctttcccattccttttagattgaggcaaagggacaaatctgcgatgtgaataatacagctccaggaatttttatcagcgcgccccacgcccggccctgcctgagggtctttctaagccacaggcgtcccttcccaggtcttgtctcttcccttccgcgaatgccctcggctcacccagcaggcaggtgtgatccggctccgcgctggggccaggtgaggccgggctgcctgccccggtgcacgttcccagggcgcggcgcccagtcggcggggcctgcgggctgggcctccccggggcgccgggcgtggcgccgggggcaggtccccgggctgccctgcagggcggccggccggcggccagcggctgtttacctgtgcagggcgaggcgagactcgtggcggtgccggggctttgcacgcaaggggcgatgcgccccggagggggagggacgcaaggggcgactactgttacctcgcttggagataccaaggccggtcggaccccccgctggccgaatgtgggtaggctgcccccagtttgtcccttcccagggtggatccagatttgggggccggaagtgtatacaacgtggggagcgccctttgggaaaaataatacagaagtcccagtacaagcttaggtgcagggcttttttggaagggggcctgtgagtgagggtccccgaagcccaggcttccttggcttttaggtaacctcacctctgaatcagggcagggaagcctgaggtgctcgggggtttagaggctttccagacactgcaggaaccctatttagttaattcacttttccttcatcttccacacaccccagcccagcacctgggagaagggatggcgctgtgttcagaggcaggaggaacccagcccacaattgtgcttctctctcctgccctgggaagaactaaacccatcttcctcctccttccagtagaatgcgggaggctgggcctggccatccagggctgagcaaaacagtaaccctgaacctacctctggattctctcccgctctctgaccttctagctctcaacccagtgaaagtgtctggactctgccagtggcttaatagggaaagcgtcctggggagccaccgtctgtccccagggactgtcactgacccctcagaggtccccgatggggcttctgatggagctgctcggaccccagaccttcaagaatcctcagggtacgaggctactgccctctgccccaagacagggaagatgtgtgtgggtggaagagctggaagtgtcagaggcatgtgaaccagaacaactccatcttaaataggagctgggtaaaatgaggctgaaacttactggactgcctatccaggcagttaaggcattctaagtcacaggatgagataggaggtcagcacaaaaatatgggtcataaagaccttgctgataaaacaggttgcagtaaaggagctggccaaaacccaccaaaactaaaatggtcacgagagtgacctctggtcatcctcactgctacactcccaccagcaccatgacagtttacaaatgccactgcaatgtcaggaagttaccctatatggtctagaaaggagaggcatgaataatccaccccttgtttagcatatcttcaagaaataaccataaaaataggcaaccagcagcccttggggctgctctgtctacagagtagccattcttttattcctttactttcttaataaccttgctttcactttgcactttggactcaccttgaattcttgcgggagatccaagaaccctctcttggggactggatcaggacccttttcctgtaacagaagagcaactgctttgtgtggcccaaggaaagatgtgtgattctttgtagagggtgaacctatggacctgtatcccagcatccccacagcccgtgatcctcccccagattaaaagatcagcttggaaatcatgcggggtcttttctgatatagtctccattctctggtgcactatgagccacaatgatacatttctcattggcctccctcctcctggcagggagcgagcagatccagcctgtttggacgtggtgaggacccagccgtggggtttaaggccaagttagcctctcccttcactgattacaagagccattgttacaggtgagtctttgtccttaaagctcccaagatggtggcgagccgctcccatgatggggcaggcagctcccgagatggcggcaagccttttgttctccgacctgaggttcttggcgtcaccgattccaaggaatggaacgttgggccatgcggtgagtgttatagctctattagaagccgtgggtcatggaagagaaccatggaacccagtgactagtgttcagctcgattaggacgaacccggacacttagccacgcaggaacagtggtaagcctctagcccgaacgggagtggcaatgggcgcctcactggatcaggagcacagcggacaccctgctggatctggaggggtggaagtcagcagtgggtctacgacagtggcaaacagcagtggtggacggcgagtgaaagctcaactcgagccgtaacaaacacagaccagaagagtgtgcagttgcaagatttaatagcatgaaaacagagctcccatacaagggaggggacccaaagggggttgcctctccctgctcgaatgcctgggtttatatccctatcatcgtccctcccccggtgctctcaggcaatatatgatttgagtatttctttacctcctgcttttagcctaatttgtattttagtgagccctctttactacctgattggtcgggtgtgagctgagttacaagccccatgtttaaaggtgggtgcggtcaccttccccagctaggtttaggaattcttagtcggcctaggaagtccagctagtcctgtctctcaccatgacctccaagaagcccaggatgcatcagggaaaagtggaaacgtggggcaagcctggggagcacgcaaagaggggaggcccttagccaaagcttgggttccactttgtagttgtgcaggaaggaggtcagaggtgtaccctttctctgacctttgccttttagggtcgggttcaatgtgcacttgggtttgcagactgcattggtcaccaccatgccctggagtgtgtcccatggaaaacaacaatgaactgatttaagattagtaaaatttaaatcttttcaaagtttgtcttcaattagaaccagctccctttctgctgtttcaatgaaaatgcttactgaacttattatgtgaaagtatagaaatgtaaatttttggccaggagtggtggctcacgcctataatcacagcactttggaaggccaaggtgggtggatctcatgaggtcagaagctcctgatcagcctggccaacatggtgaaaccccatctctactaaaaacacaaaaaatcagccgggtgtggtgttgcgcacctgtagtcccagctacttgggaggctagagtgagaggcaggagaatcacttgaacctgggaggcagaggttgcagtgagccaagattacaccagagtaccccagcctgggcaacacagtgagactgtctcaaaaaaaaaaaatgtaatttttttcagttcctaacaagcctgtaacacggttaaaaaacaaaggactgcacttgaatagatgatgtatgagtctgtacatttcttccatgtgaacatttatcatatttggtaagttggtgggagacggtcgttgtattcattttctatttgtgtgtgacaaactaccacgaatctagcagattaaaacaacacgtgattatttcagtttctctcggttagaaatctggacacagttttaactgggcgtctgttcagggtctcacaagc

SEQ ID NO: 3044 - DNA, 2476 bp, Homo sapiens
atgaggctttggggtcagcagaaatgtggctacaaagggcccttagcactgtgcggtgcacgtagtagacgtggaattaataccctcacattgactactgcctctttcatcccgactatcagctctgaaatcaacattgacattgacgagtgcttctgggcccctcaggaaagatgtatttcccctccatgtagttatgatcagcccagagacatgaaaatcagcccccaaaccaagaagagaggccaggctgtccattataccagcacaccattattcacgtacatttccatggaccacatcaccagtgagaagacaagtcaagcagagaccgtggaagccatagatgcaaagatcctgggaggatgggttggagtctatattagggaaggaaagactttccaggaaacccttaactgcggtatcactggcctgaactatgacaatgggctacctcctgccacaagaaagatggggaaactgaatatttttatccaggcacatttcaataccgaacaaaatgagaattctgttaaaacggagggtctcgctgttggagttggatttggggctatagaaaagacggcatctgctacctttgagagtgccaggggtgctctgggtgtgcgtgtcacctggggttccctgtcaccgctgtacccagttgaccaagccaaccctgccgtcactctcaatgccgcgttttccctcaccttccatacagaagcactgggccttgtaaattctttgctcttctacctgcctggaaataaacagggcatagtggtgtggggctgctgcctccccctggaaactctcccatctacaccctggctgggagtgcaggaggagctcctgctttgtaagatgcgggcccactatcaaggtgaccaagggcctttgtggatggagaaacagggagatgctgctgctcacctgtgcttggctcccacctcccaccaccctgccttccggctgacttccttgggctcttcctcaccccctcgaaggaaggcagcagactgtaagggaatggatgggtcatctcatctcgccagcctgcaccaagaagtttccgagaactgcaccaagagggtgggggaagatcccttgcgtgctaagccagctcctctgagcagggaggccatcccttctgcttctgccgtgcctgcccagttcctggatgccactcagggctgggctggagacagcagcccgcaaggacccacccagcatcaatggggctgggggcccaatgccacggcaataaaccgagatctccagggcagggccgaggcatcggcatttgccggtgctccctgtgactggcatgtgtcgtcaggtctgagagccgtggattcaaatcccactctggagctgatgcaggtgattgaagaagaggagagggctggaagggactgtgtcctccactgggccacccccaccagtgggcctctgaccaatgcccaacaagcagcggggcgagggaacttggatgggcctgtgcgtgtgcacgggaatttggccattggaatcgggatccagaatttccccgagggcctggctgtcagccttcccttgcgaggggcaggcttctccacctggagagctttctggtatgggcagctgagcggcatggtggagcccctggccggggtctttggtgcctttgccgtggtgctggctgagcccatcctgccctacgctctggcctttgctgccggtgccatggtctacgtggtcatggacgacatcatccccgaagcccagatcagtggtaatgggaaactggcatcctgggcctccatcctgggatttgtagtgatgatgtcactggacgttggcctgggctagggctgagacgcttcggaccccgggaaaggccatacgaagaaacagcagtggttggcttctatgggacaacaagcttctttcttcacattaaaacttttttccttcctctcttcttcatctcattatcctgattgactctgattataatagaaccatttttactttgctttgagggagatttttgatttaatggggaattttaaggtgtcatggaaatacagattctttgttttggccactgaatggactctctcttcagtgggattatcaaggaacttcagatcagggaaatctccacttcgggaccttctatctgcctcccaactcctcaaggtcacctatagaagcgagctaccaaaagacgtctcctaagcattttggtggcctagtgactcagggcagagtggccagcacacctctcatccgcccctcctgctccatcactgctgagcctctccccatctagaatgttggaactggagcatcataaagatagcaagctaccttccaaggccgagccagcccagagaggagcatgtcttcctttacctccccctaaggagatactacatgggagggggacacagaaaaagggaaggaaattggctagtctggctttttt

SEQ ID NO: 3045 - protein, 611 aa, Homo sapiens
MRLWGQQKCGYKGPLALCGARSRRGINTLTLTTASFIPTISSEINIDIDECFWAPQERCISPPCSYDQPRDMKISPQTKKRGQAVHYTSTPLFTYISMDHITSEKTSQAETVEAIDAKILGGWVGVYIREGKTFQETLNCGITQYDNGLPPATRKMGKLNIFIQAHFNTEQNENSVKTEGLAVGVGFGAIEKTASATFESRALGVRVTWGSLSPLYPVDQANPAVTLNAAFSLTFHTEALGLVNSLLFYLPGNKQGIVVWGCCLPLETLPSTPWLGVQEELLLCKMRAHYQGDQGPLWMEKQGDAAAHLCLAPTSHHPAFRLTSLGSSSPPRRKAADCKGMDGSSHLASLHQEVSENCTKRVGEDPLRAKPAPLSREAIPSASAVPAQFLDATQGWAGDSSPQGPTQHQWGWGPNATAINRDLQGRAEASAFAGAPCDWHVSSGLRAVDSNPTLELMQVIEEEERAGRDCVLHWATPTSGPLTNAQQAAGRGNLDGPVRVHGNLAIGIGIQNFPEGLAVSLPLRGAGFSTWRAFWYGQLSGMVEPLAGVFGAFAVVLAEPILPYAFAAGAMVYVVMDDIIPEAQISGNGKLASWASILGFVVMMSLDVGLG

SEQ ID NO: 3046 - DNA, 185203 bp, Mus musculus
  misc_difference (1)...(185203): n = A, C, G, or T/U
cttgacatccagtctggcctcggagatgggctctaaccactacacagtgctgcccttctcagtcttcatgctcaggtggcacctgcctttagtagctcagcaggaaggctacatgcctctgtggccttgggaatcatggcccttccacctaagtggcaacactgagagcttgccaatgctagccaacaggaaatgaccttttgtgaccttgtcatcttttggcaagaggagggcccccaggcactgggaattttggcaggtaataagaaacggtgggatggcagatggtggacctccgtgcttgagggcttgccagactggggcaaagggtctcttgtggtgtgcctagaaccagggagtaaaccctgggctaagcagcaccaagaaggactccagaaggagaatggctaggactgtacagactgttggttcagaatgttccaaaagctctactttgggggtttctcagaacagcccttggaaaacctcagctcacatccatctctatggaagtataggtgacacaaagtacgcctattttaggtatgcagtttgataacgtggagagtcagccacaaaatttctcactgcaggtgagaatgagcacacagacccttcctcgtgtctttcacagccccttcccgtaacccttccctgtccctgggtcactgtagatttgcctgtgttttgtgaagttttatatgactgtaacaatatagcatgtgcccctttacctatctttttccatctgacatattttactcagtgccaccgttctgatgtgtgcccatgtcaaatctcttgatgtttacacataacatccattcatgtcacatgcgtcaaaagcccattacactgtatagacaaaccgtggtctctgtttatccattcatctgttgatggatgtctgtgttgttcccacctagcttctgttttcacaaataaagctgctacgaacctttgtgcatcgggacttgatcttggttgactgtatgagccctgagagagaaaacctgggttgcacggcaggttcttacttaagttttcagaaactgccctgtggggctgagaggtgactaacagcaggtactgctcttgcagagaacctgacttcggttcccagcagctcgcggccacctgccactccacttgcaggagatctgaggcctcctttttgcctttgtaggtactcagacatccatggcatattctcacagagatacactcacataaatatgtttttaaaaatcttaaaaagaacaataaaaatgaaactgcctcgtgtttccaaagaggttgtaccagttaaattcccactaaccgatgtaaaagttccaggctttcctactctgatgtgtactggatattttctggagttgtttgtttttagtttgttttcatcccagctggagacaagtgttcactctgagattcaattttgtattctcgccatgacagatgctcaataaatgcacatttgctgactgtatgtcttttaaccccttattttctttttgagacagggtctcactatataatcctgcctggctttgaacttgagatataaaccagactggtttcgagcttgctatgatcctcttgcttctgcctcccaggtgctgagattacaggtgtgcatcaccatgcctggtgaaagcctattattattattattattattattattaacaatagggtttcattgtgtagctttgtctgtcttggaacttgctctgtagatcaggctggcctcaaactctgcctcttgagtgctggaataaaaggtgtatgtcatcatctcctggtcaattattctcttttaaaaatatatgttgtatacctgtaatctcagaagtttggaggtagaggaaaaaaattaggaatttgtaggtatccttggctacatagtgagttcaaggttgagtccttgtctcaaaaaaccctctttttagtgtctggagagatggctcagttgatcaagtacttgccatacaagcagggcttgggttcagatccctagcccttctgtaaaaaatgctgtccacaatattgtgtccctgtaatcccagatccatggggtttggtggccagtgaatgtagccaaactaggaggcttcaggtttcagtgagagagcttgtctcaaaaactaaggcaaagagcggctggggagataagtcagttggtaaagtgcccactgtgcacgcaggagagtgtgagtgtggcttctcagagttgtcctaaaacaagggtgtggggctgtgcatccataactattgtgctagatgaggggggctgagacaggaggatccctagtgctcactggccagacagtgagctcggggttcattgagaaaccctgtctcacagaagaataaggtgcaaagcagtagaggaaggtaaaggatgttaatcttcctcttccacatgcgcacagatgcatgtacaaccatgtgcacatgtttacacacacatgcatacacacaataaaatagagcacaacagaggaggattttacatcaacctctggccttcatgtgtgtatgtatgcacacacacacacacacacacacacacacacacaaaatcactccccctccctccattgtgggtatggtactgagaaccggtgcatgcttagctgtcacagggataaccaaggcagtcagggaaaggaggtatggcactggcaattgtgatgatgctaatactagccaacagtgccccccgtccccgcagcccccgtcccatcactgtggcaggcaatttactggttcaatactactgatgggaaaaaaaaaaccttaattatatggggctggcaaaaatgcccagcaagaaaccacaaattcatttaactcttaagtgtgtgtacatatagacaggcagacagatatacatttatacacttgatgaaagaagcagaaccccaaaagccacaggtatgcatttggtggatggggcagagccccaacagccacattttatttcatctctctgccaattcataccttcttagacaaaagttcttataaagttaccttatagataaaatgttacacaaagggggagttacagaagaatgttaacagtaaattcaaaacaatgtttcattctataagctcaaagcaacagtctcacctggccttgctttatcatagtgcacacctgtggcctcatccttggagtgattgttttttttttttttttttatcacgaatctgtcccaagcctatttttcttcttagtgcattttatgaaagctcattgttttccttattatgcagcctttgcttgctattctatgaggagggaacacatttcattcttgattctaactttactatatctttctggcaaaacaactaaaaccatctccttaaactttcttcttaaaattatttgaatcaaatcatgaatgctataaagtaattaattcatttaaacagcattaattaatgaaagttcatcttcatgtcgatctgcaggaaattctcccagtagggtgggctgatgcccaggaatccttaggctatgtagtaatgacaggaaaggtagcagagagaaacaatcctgagatgaagtctctggggtgcacctctccagagtacatctatcacagccatgaaaagtggtgagctatctctaggaaactcacttgtttgctacagcctttcctagatggcttctgtcacttagcaagtctattgtgctagcagcttatccacatatgagttatatctaccattttgaaaaaggattttcatataattgcttgtattttgaaacattgttaaatctactaagttttggttgctttgtattttgatgagagtgtgtgtctgtattttctttttccttccttccttcctccctctctcctttcttccttcctttctttccttccttccttccttttcttttgattttttgggacagggtttctttctgtagtctttgctggcctggaactcaatatgtagaccaggctagcctcaaatttatagatctctgttcacacacacacacacacacacacacatgtattactattttattgggttcttaaatcacccttcttttcaactcttattccaccctaatccctttcaacttcccaacactaggtaggagagaaagaaggtttgaagggtaaggggatatagacctctttttattactttctgctaattaaggggcattgagtttcttggggccagtctaatctttgtcttcaggatatctccacctttttgtcaaaccacaacaacagcaaccaggaacagcagagggaagcagcagcagcctccaccacctnnnnnnnnnnnnnnnnnnnnccaccacctccactacctccacttcctcctcctcctcctctgtctcctctttctcctcctcttccatctcctcttttgttttttgtttaataagaagactaaatcttttattgacatcagcagctggcaaccctagctttcatcccatgccctttaaatggatgtgcaagctggccttaccattgtcgagttctatcatttatggtaccaatgtaatccatctccaccagtcagatgccaccagtcaatcctaagtactgggacctaagtactcgctttcagagcagctttgtacttccctgttatctcccatctcctcctcttcctcctcccccatctccatctcttctccttctctttcttcttcctcctccccctcttcctttttcagagtgcctctgcctcttttgggcgctggcatttatacccactccagagtcccccagaattaaactttctgcagctggcaaagatcatgcccctcctagagcaggacacaatctgtggacaaactgaagcagcccatatcccacacctgggattaaaacagaaacatattcacataactggttttttaaaattgttttttatttttaaattcatgtcttttttttcaaagattatttatattatatggaagtacactgtagctgtcttcagacataccagaagagggtgtcagatctcattatggatggttgtgagccaccatgtggttgttgggatttgaagtcaggaccttcagaagaacagtcagtgctcttaactgcagagccatctctccagccctataactgggtttgaaaagaaatcacaattctcattgcagagatctgcttgcctctgcctcttgagttctaagattaaaggcattgtcagcacacctgggtgtattcgtcttcttatagggcttctagtcctgactattttgacctcacatttatgccatttaaccctaatttcttcctaaggcattatgtccagactgaccttgaattcaaatcctccacccctgcctcagcctcccaaatgctgaaagccttatttctgaaaacagtcaccttcaacacataaattttaggatgaagacataattaagaccttatcaggctgtaagtgaagcttcatctatttctctgtacagttccagcagtcttatttttgtgtatttgaagctctgttgcagagttataagaatttataacagagttataagagtatcacagaggatggtgtcccatacctgtaatccttgcatcttgagtcagaggcaggagttcaaagtcaggctgggatacaagctaaaactctaaacaacaataacaacaatgtatcccctcccaccaggactagcagattctgtttattacttgatcatatttccagtatgaaacaatttcctttgtattgatggtagtctttgctctgctgtaagtgttgtctggcataaatttctgctcatttttctttttatatttgtcctttgactattgtgagcagatgtatacattctctatccttttagtgtatttctgtttttgtgtataactgatttatgtgaacataacttactttttaaaaaggtttaaaaattttatgtgtatgagtgtttatttgcatgtgtgtgtgtgtgtgtgtgtgtgtgtgtgtgtgtgtgatgtgcatgcagtgctcacaaaggccagaaaagggcattggagccccaggaactaaagttaccaatgattgtgagctactgtgtttgtgctaggacctataccagatctttttcaagagcagcaggtactcttaattggtgagccatctctccagcctatagctgggtcttgctttgttgttccaatctgtttatctctgtctttgactctctgtctgtctctgtcccccaccccttgtgtgtgtgtatgtgtgtattgaacttgggactcatacagactaggcaagcactccacccctgaggtagttctagcccaatctctgtcatttaactatagcatttgtttctgaccctttgccctttgtgtttattgggtttgggtttggttctgccaccttaatatttgttatttgttttactttttttttttttggtccctttaatcacttgtagtggtttgaataaggatggctgctgcaggctcagtatttgaatgcttagtcactgtgcttagggaatgaattgtttgaaaagattaggagtttgaagtttcaaaagcccatgccaggttcagtctgcctctctctctctctctctctctctctctctctctctctctctctctctctcttgccctgtggatcaggatgtagctctcagcttcctctccagcaccgcatcccaccaggttccccaccgcaaacatgaaggacaaaagttctgactgtgtaagcaagccccctattaaatgctttggtcatggtgtctcttcttttgggtaaactgcttcatgattccacttgtattttcagttggttcactacagtttgctgtgttcttggtggtcactaaagctgtcctggggccacgaatgtcgtggcctctcctcttgttgctcaggtgaatgaatggcaggaggactggccgaccttcttcactcgacaccggctccaagctcagttggatctcattgaaaaggactatgctgaccgagagacacaagagctgtggtcaaggctacaggtgagcacaacgtttatttctctgggaagaggctgtcccttaggagcccataatatgcatgtgggggcctcttaggactgagtcagaataggaaaaaatgatggtagagagggctggtcaagttgtgggtatttcagccaccaccttcttatcctgtaggtggaggggggaggatgggacagatccctgcttgaggtcttcaatcatttcacttgtccactcttttttgttttgttttgttttgcttttcaagacagggtttctctgtatagccctggctgtcctggaactcactctgtagaccaggctggcctcgaattcagaaatctgcctgcctcagcctcccaagtgctgggattaaaggcgtgtgccaccactgcctgactctcacttgtccactcttgtcctcattttttgtccctctgccaaagaccccagtgtgtcacccttaatgaaggtgtgtgttcttgcatcacttgtttcaaaacagaactccaaaatattagaaacacaattcatctatcagtctagggtagtgtttctcaacctgtgtgttgtggtcccttggtggtggggaggtcaagagaccccttcacaggagacaaatatcagatcttctgcatatcagatatttacattacaattcataacagtaccaaaattacagttatgaagcagcagcaaaataattttatggttggagaccaccagagcatgaggagctgtattgaagggtcaaagcattagcaaggttggagaccctggtctagggtgaacatgcatcaaagatttgttatttaatagaagagatgcaggtacatatgtgtaataacataaaaataccatttagagggtaggtaccaaactacatattctacagcataaagcccaaacaactctgaggttttctctaaagcttttggactcatttggtagtggccagagtgctagacaacgttacagtcaggagtcaggtgggcttcttccctgggcctggtagattattcggttggcctctggatgcctccatggctctctgctttatttccaagcactggataatgggcccctgggtcttcgagtcccatgtaataatttctcttctaggtgaagatcccggatctgtttgcgggtatagagattgtccctgccctgctccatggagacctctggtctggaaatgtggctgaggatgaccagggacccgtaatttatgatccagcctccttctatggccattctgagtttgaactggccattgcatcgatgtttggggggttccccagatccttcttcactgcctaccatcggaagatcccaaaggctccagggttcgacaagcgcctgctgctgtaccagctctttaactacctaaaccactggaaccactttggacgggagtacagaagcccgtccctgggggtgatgaggaagctgctcaggtagcagagggctggacctaataaaatgtcaaactagatccctaactgggctacttttgagtcggcctacaacgcattcatccagaggctgaggttatggcagcgcagcagtttccagggagctccgtatgtagctcaggctgacaccacagcagcactgttgcgggcaagctcccacctcagcggctgaagccccaggtaccgcaggcgaatagggaaggaagccaccatgctagcccgtttggctccggtccttcagttacaatcactgccagacactctctagcacctcactgttttctatttttttagattttattttgcgtactcatgtgctgaaatatgtgtgtataggtcagagtacaacttgtggttctcttcttcttccactatgtgaggaccaaacttgttaccccacaacatatctgagaagactgctaggatctatatttaagccaatagaaagtctttattagcaggccagtgactaccctgggtattctggatcccagcaaaacagtgatccttctcatgaacttttaaccacacacacacacacacacacacacacacacacacacacaaatatgttctaggttgacatacttcagttatcaacaatagtgagcgagaagtagaactagagaagccaaaaagcaaagttagcacattcagaaacttttcaggacctacggactttgaaggatcaagtctttgttttttagtttgccccgtgggtgctgtcgaatgagttttacagcctgaatggcactttaatcatggagtaggatgtgctaaggtttgggggcctactgttacacattcaactcccgaggcttagtgaaggagactttgcacactaaactatctaaccactccagtcttctacttcccagtgaggtctgttctggtgaatgcagggccagcagcgtatagctcacgtcttttctcaggactgctttgggtggtcatgatggtgctgtttgaggtcacggcaaaagccttcatcctggagcaataccccattgtctcctacacccttaaagcacccccccgcgccccactcctgcaggtgctcagacatcattgccccattcttgcccccacactcaaaacccattcctcccctgcgttcatacaccacccgtcctattctggctctttctactagttcagctttcctgcgctgtccacactagctcaaaaccttccatgttcctgcccccaatttcaaacccagttatttccttaaccttacacacactcaagctccagaaggcttccaacactagagttcattccctgtaaagatcgtaccggcccactgctccggccacaccctccttagccccacctcttttgggctccacccactccctgttgaggctgtagacattggaggcttagtttttctggtgcttcccttcactcacgcaagcatcattttgcgcgctgagccgacttcgcgtgagctgttttgttggcttgcgcgccccgtagttgggggtcgaaggtctcagggcggggctggcagttctcgtgctgtatctcttttcttcccggttgccggtagggttcttacggaagctgctggcaggatggtactgagcaatgagccggctgcgagcgccgccgaggaggaggtggaggatgatgcgcttgttcgcgcctccgccctggaagcgttcggcgagagtgcggagacccgcgcgctgctccgcagcttgccggcggtgcacagagagcgcgcgtcccgggaggtggcggaggagcggttccgcggtgcgggcggggccccgagtctctatcttgaggtccttgcatctgggaggaagggacctggggagccatacctcctgccttccctgccatgtccaggaactgagcaaagcatgcttgagacctctctgtggatagggagggaaccagcagaattgttggatgaacctgcctcctacgagagcgctcatggcaagcaaagaggagcggtctggcacggcgctcctatggggctgcgctatgaggccaggattctgcaaactcagagctccacgtttatctgggatctccgttccaggcagagcaggagagtggacagtgccattagattcctttggtggttctaaatcccccaagtttaggtaggcctttacagtcgtttgtaatggatactgtccgtcatagtttttgtcaaccttacacaaacctagacatacctcggaagaaatctcaagtgagtaattgccaccaccagattggcttgtgggcatgtctttgcgatatttctttaattactaattgataaaggacggcccagcccaccgtgagatgtaccatccctggcctgtggctctgagctgtataagaaagacagctgaacttgagcctaggagcaagcacgcaagactcctccgtagtttctgcttctatttgctttgattcatccctacacttttctcagtgatgggctgtgaaagccaaataaaccctttcttcctcaagttgatttttggccagtttcatcacagcaacagaaaacaaagacaatgtccaaatgagccctttgataattagagttttgtacttgaacaaaatcatctttgtgtattccttagctaaaaacattctctccataatgtctttttttttttttttttttttttggatggggctctagtttttgggtaagacagagtggtgggctttgtctgaagtggcaggtgagaactgcagaggcagagaaaccattggattgggtagaaacattaatttgctggtaggggttggaaagcaggtgaccagggttggggaggttgtacagttattggtttgaacattgttggaaatgaaaggcatcgtgctaggcaggggagggctcaagaagtgaagagggtctgactagcaggggaaggtggagttgtagagagttggagcaccagcatatgtgtgagaagagatcggagggcaagatgtgcagagcaaaagaagagcaggaggtgtggtcacactggtcctcaagagcctgacagatgttgggcagctgtgagcatctgtcagcaagaagccaggtgtgtccctgggcgttacaaggactaggaagaccctagctgttccattagagttactgagagacgtgaatttccaaggctcacctgatttgattttcatgttattttccttttagtaattatggacaaataccaggagcagccccacctcctggatccacaccttggtaagcatagattttggtggttcaatatcagatgatcgggaaggcttatgtgtatagctggcacctgtgtgctatcagcagaaggtgtcagatgaaatgtccctagagctctgtctttttttttttttttttttgtctgctggatggttttatagacctgtgataatgaatagcttcgagttcagataccgatcttgattgtgtgcaggtgtgtctaagctactttctgcttgttcctattgaaagaacacatcttttcttatatgtgttttagtcagttatgtgtgaatagctgttatcttcctggtaattgttttgcagggtcatatgctttataaaggtcccattttacctgcacagcagttgatgaggtcatctgtcatctccattatgtagagagacactaaggttgttatcaggacattagtacaagagtgttgtgcaggactatcctccaagctgaacagctaccatctgtggagctcagctgtgtgccctgattatcccagttggacttgttgactatttacattccatcacatggaggcaagaaggatcacagaccctcacctgagtacccacggctctctactacctgttgtatgcaactgtgccctaattgcaggtggccttgggaacagcctagattcttggtttcaatctgtaggttgtaacccccataggggtcacatgagatatcctgcatatcagatatttatgttatgatttataatagtagtaaaatcagagttatgaagtggccacgaaataattttatgggggaggcataaccacaacttgaggaattgcattaagggtcacagcattaggaagattgagcctccctaccccccactcctccgtgtgtgtgtgtgtgtgtgtgtgtgtgtgtatgtatatgtgtatatatatcagacaagattagggggggggagaatcccatctatgttagtgtcatttttataagtgtgttgacatttttctcttaacccagctggctctcaaactgagacagaactattttatttatttaccagctttaaggcacagcaactgagcagtattaatctatttttaatcttcttagctaatcctagggtgcttacatttacctctaggaagaaattttagcagcagagagtgacttttgtttgcttttcattgctgttgttatatttgaacctatttcatattaattacatttttgtttggcttttctcttttttgttttgagaaagagtcttgcaatgtagccctggctgaccttgaatttatggaagttctccagcctcaacctcccgagtgctgggattacaggcgtgaaccacaactcctggcttgtttttttctttttgaggtagggtcttgctaggtagcccaggctggcttcaagtactcttggtaatttttttagtcttgttctgagctttttttttttcccctttttttcttctttcttttttttccttttttttttctgggaggacccaactgttttaatcattgttgtaacctcacagtctctgtgtaagctctgtcattgtaagctacacaatacaaacggggaaactggagtacaagtctgaaaggttaagtaaattgtttcatgccacacagttggtgagattgcaggcagaatttatgcatctcctccttccctttgcctctcaaagatgggtcttcagcggggccagttgcaggcaagtggctgatgtcaggctgaagggctggctatgctgagggtggcagaccagtaggtgccctgggcctcatctgatagttttggattcctggttgtccccatgtaacagatgtaggtactgtccaagaagtgtaaggtgctgtttgacctcttcaggtgacagctttgacctgccctcactgccagaacctctctgcttactgtgttccatccagtgcttagtaatggtgactgttcattatcttccgggaaatagaaataggtcccgttctgaaaaagatgatgcttgctggtgctgatccttttctgtgtgtgacacattttatgcttccgcttttgcctttcaggtttatgtgtggtgtgttagccattgaggtttaatatatttgagtttgaatgttatcaatctcttccttttctttgtttctgagacagggttttactatatagtccagattggtgttgaattgtcagttttgcctgcatcagccttgtgtgaagtcttctttgtgtcactcttctttgtgtttgatttttgatagcaaacccagagtctaattcttgtttgtttgtttgttttttcgagacagggtttctctgtatagccctggctatcctggaactcactttgtagaccaggctggcttcgaactcagaaatccgcctgcctctgcctcccgagtgccgggattaaaggtgttcgtgcatcaacacgcccggcaccagagtctaattcttaattgattatgtaaggcttatttattaactgagtgatctagtaacccttctccctgtttgaaatatatattttaaaaatgtaatttctattattatgtatatgtgcatgtgtcagaattcttggagttgcaggcagttgttagctattcaacatgggttctgggaaacaaacttaggtcctctgcaagagcacaaacactcttagccactgaggcagctctccagccctgaaataccattttatgtctgtaatttggtacttatatagcttatataaaagcttttagatctcaagttctgtttcatttgtcccttgttagctgctttatggtatattctctctagcaccacagctgtttattttgctattttctagtcctttcattagtgtagataaacttcattgtattttttactctccagaactgacggatctcctcggagctttgttcggtagacagattcatatagtggagatgtttttataagattctaatttggctattaggaataatactgctttaaacctgcatgtaccatctttgtgtggatatgttttagtttttcttaggtgactatcttatgactggggtttatgggttgtgtagtaaatgtgtatcttgtaatagaatgtcacactgttctgtaaaagttgagtccttatgcatcctcaccaaccatgtatgaggatctctgtttctttgtagcctctctaggcagtgtttcccttattactttgtagcctcactagacagtgtttcccgttactttgtagcctctctaggcagtgttttctctgttactttgtagcctctctaggcagtgttttctctgttactttgtagcctctctaggcagtgtttctgattttagtgagtacttaatcttacccgactgtggtctcactttgcatctgtgaggttcagattatactctttttctattgagaccagtgacacagcacaggtttgtctggctgaggcttccatgcatgtttgaatgagtctgttggaataaggtggatgatcgtgctgttggtgaccttactgattttctgtttacttggtcctgttcctgctttcagtttttgctttctttgctttggggttctggcatttgttgtatcagtaactaaattgtttaatcttcacaatgaattggttgttctaattagaaatgtcctctaggttttgcaacattttctcctaagtctctcatgatagcaaacactctgtgtttgtctcctttttgtctggattcagcctgtcagccctagtcttttaatagctaagagggtattttcatttagtaatgctgtcagcgtagctaggtttaatcaactctattgggacttgctttttctttatcctgtttcctttttggtttcttcctttatttttttaaacctcattgttttatattagtttgatagtttttggtgtttgtttgtttattttgagagagtgtcttactatgtagtcctggcttgtttggaacgtgtgtaggccaggctggctttaaactcacagagattcatttgcctctgcctccgagtgctgggattaaaagacatctgttgcaggcatggtattctattttatcttcactatatgctcagtaggtttttttcccctccaggatttatatgtgccctaaactcacaacagtccaccctcagataatgtgcatttcatgcgtggtgaggaagctttgagagaagaaccgtttgtttctccctcctgctttctgtgccaccttacacctttgtcacagaactcagtttcatatttgttacaaattttaccttagacacacacttttaaaataaaagatttattttatgtgtatgggagttttgtttatgtctgtgtaccacgtgtgcagtgcctgcagcagccagaagagggcattacagcccttgcaattggagtaacagatgctgtgagccaccatgctggtgctgggaatcaaaccccgatcctttggaagagcatcaggctgttctctctttaaactgctgactcatctcttcagcacctcttttttttttttggaaaattttatttttaattttgtgtatgtatgtgtagataatgtgcaggtccttgtcggggcttgaagcctggagctgttgttgcagaggaacccaaccctggtcttgagcatgagcaataagtgctctcaactgctgagctgtctctcaagctgatactcaaatggtcaaatggtttttttaaagaaataaaaattgaggccgggcatagtggtgcactcctttagtccaagcatgtgggaggcagaggcaggcagatctctgagttcaaggccagtgtgatctacacagggaatttaaggtcagtcagagttatatggtgagatcatgtttcaaaaaacaaaacaaaacaaaaaaaaaaccctaaccaaacaaccaacaaccaaaacgaaaaaaaaaaaaaaaaaaaaaaaacccaaatcaaaccaaaacctgcaaagcaaaacaaaaagaaataaaaaatgaggaactctataatctttgtgtatttatccttcaaaaaaagtcctttatagagcaaagagtatgtcttataactcggggtgactgtgctagctccccaataccacctcaggtccatggtgccctgggaaggcttacaggacacagcagagtcttgtttgtggtggggatgtggttgatggtatgtaagtgtctcttgggcattgggttggtggggaggcagtaggatagtcagtgggttgtggctggagctttgtattgcatggctaacggccttgtggaactgtctctctccccctctctgtgttcctttgatctctccctgtactgggctctgaacattgccttgggatggacaggagaaagcagtgccctgcatgaccctctttatcctgtctcactgcattagttaacctagcctgtcggtaaatcagaccgattttaacaggcatcatctgtaaaaacttggtgtcagataccaattttagataatttccctgtattaaaaatgggagagggctggagagatggctcagtgggtaagagcactgactgctcttccagaggtcctgagttcaattcccagccaccacatggtggctcacaaccatctgtaatgggatctgatgccctcttctggtgtgtctgacagcaacaatgtattcatataaataaaataaatgaacttttaaaaaaaatgagaccatgtgttaaggtgaatatatttttttcagagatggctttcatatctgtttttccctagagtggatgatgaactcactgttggacctggtacaggatgagacatctctgcccgaccttgtccatctggcttttaagtttctttatatcatcaccaaggtaacgctagtatggtgctgtagcgtggacacacactttcctcatccgattgctctagaagtgttggttcttggggaacatggttcttcaacacaagttatgggttttcattttctttttagcctgtgttgggtctcaggtcttagtgatcttggggtccttagttagaacaaaaggtttcttacaaggaagaagcaaaaggccttggtggaagtggaagtgttgctgttgctgttgctgttgctgctgctgcttcttcttcttttttttttttgttctttttcctaaatggggtttcactctctacctctgactgtcctggaacacactctgtagagcaggctggccttgaactcacagagattaacctgcctctgcctactgagtgctgggattaaaggcatgagccaccacagccagcaatagaagtattcttaagctatagtgtgaggatgaatttattggggaatcttttacttcccctcggaggaagaacatctggggctcatggcctgctttctccagacttagagatgcgggagtgactctgtgtaaggttcgtgagtctcagggaacatgttttagcattcttactgtgtagcagcagggtgaggcttttggctgttgatagaatgcagcttgttttataaaagtgttagtggggccatttgaggtgcatagggatttcgttttcataaatgtcagagtaattgttggacagaatagaagcagaagttttcagtttgtagcatactgatatctctggtgtacacagtgtgacctgttggccaaataggaacatagaggatgggttttgatgactgtatcaaggcagctttgctgctcgttctgtaatctgtatatagcgtactccacattctgtaaatcccaatgtctttttatttggcaggttcgtggatataaagtgtttctgcgtctgtttcctcacgaagtggctaatgttcagcctgtgttagatatgttcacaggtcagaaccctaaagaccatgaggtaagtctttcccaaacttccctgcaggctccccgggcactggcaacttcgtcttccaactttctttggttttatcttagatttttttttttaaatttccttctgctgctgctttagcatctacacatattactttaagtcattctcttttagaacctatctgttacagcaaagagtatgctttttaattcagtgtgactgtgctaggtctccaagaccgtggcaggtccgtggtgccctagaaaggcttacagggcacagcacagagctgcgcttattgtaacagtgggcttagtgacgtcttcgggcctatggtaggcactgggttggtgggaaggccacttgggtggcaggggagtatggttggatctctctttaattattacttgggatgggttcttgttatgtagtccagactaacttggatcttactatgtggtatagactggctttgaacttgagatcctcattcctcagcttcctgaatgttgggaggacaagggaatgagtggatgccaaaacgcttggctgctttttccttcccttccccttcccttcccctttccctccctcccttnnnnnnnnnnnnnnnnnnnnnnnnnnnnnnnnnnnnnnnnnnnnnnnnnnnnnnnntccctccctccctccctcccttccagatcaggttttactatgttgccctggctggcctggaacctcaggctggcttggaacgatctacctgcctggccttttgagagcaaggattcagggcgtgcaccaccatacgcagcagctcccttttctattgggttcattctgactgtgatttaactccttagacgtgggaaacacgctacatgcttctactgtggctctctgtgacctgcttgatcccttttgatttttcacgccttgatgggaacctgtctactcaaactggagaaacacgagtacccaccatggaccgaattctgcaaatagcagaggtaacgatgggcacacaaacctttttcagttagttgtgcacttgtcttgagatgagagtttagttatatttgtttcactgacatttccgctttcagtgataccccagctttgaaactgtgatgttatgtagaggtcagatggattgctttagcaaatctcatttctttacagataatacaaatgtttgttaaacataatggtaatatgtaaggggtttgggggcaagagatggttagagaaactattcattttacatttaattttgaatattgtgtaaataatacataattgtaggaaatctagaaagtgaagataaaaatgctaaattgaaacctgtcaaattcttgcagtcttacttggtggtcagtgacaaggcgcgagatgcagctgctgtccttgtgtccaagtaagttttgttggctgtgcaggactgttgactgagatgtgactgcccattataagcctgtttgttttacatactggtgtgtgtgtgtatgtgtgtgtgtgtgtgtgtgtgtgtagatctctcccatctgtggctgagccctccattgacacttctttgatcagtagtgagtttctatattaactactgtgcattgcatagagacctctctgatgaggtctaagaactgtgcgatctatgggtagagatgtgaatctagaggacaggctggtagtccagttagcagggtcatccctgggccctgtgagctccctagccatgagttcttgaccaggtttccagtactaggcatgtttcctcttgtggatcagtccttaaatcccactcagaaagcagttggttctacccgtaattcatgtcactattgtacctatgtgcatagcatggtcagtgttgtagttcacagggttcaagactgcatgagattgttgatggtgctcccaccaatccccagcaacctacacagtaacttctagtgctgtagaagctggccctcatgaagggttggtagatttttacctcctcagccattttaccagccttattgtctaccctgtatttgctgtttgattttgtcacatactagtggtgacagatgtatgccaaactttactccatagaatgcctacaggccacggaaggtaaaactcaacatctttgttcaattcttaggatcctacagaaaaagccataacctggagcaccacagagcctcagtgccattttgtgttgaggtgcacagaataagtgtttcacttggtgtagcctggaggggctattgccagacttgtagactgcaggagcagtgcagtcactggcctgagcttgtgtgatgtgagcgagtgagtacccagggtgtttgagtaggcagacgtggtcactgaaaatggctccagaggtgctcagtgtacttggttcggagtcacctgtattccatcgccatctttttggtggggtaaagagtggcctatctgcagtggctggctgttcctcgtggaaacgctgtctgcctcactacactaattgctggcagcgtcttgtgctcttctctgcctgtggttctggaaccacatgcacttcctttatcagctgtaactttaagttcctgagacagttttgctcattagctgaggtttgtttcaaacatgtgtacaatcctcttgcctcagtctcccggttgctggaattacaagtgtgagcttccataccacacttttcctataactttttgtttttcctaattatttaactttaaatttttatttttacttttattttaaaattattaatcattaaaaattatttaatactatttggaaattccatacaagaacacaatgtatttatttagatgatatctactatgaccacatttccaccgtcagcttctctgggaaacgctccactgcccaatcaattcccttcccaacttcatctgtttgtttgttcttttgtttgtttttgtcccccaccttccgagtccagttagtgtggcctgtgtctggagcatgagtgacctgcctgggccacgctgctgagagcactaacaccttcatctccatcaactgtgcaagggtccttggctaagggtgggaccacgtgagcccccttctcctcagtgctccagtgtttactggtgtttgttaggtttttggctgacgagcacatgagtgcatagccttgtcgtgtccagaggacttttttattttttattttttatttttgagacaagatttctctgtgtagccctggctgtcttgaaactctgtagaccagactggccttgaattcagagacctgcctgcttctgcctctagcactgggtttattagttataggtgactgtcacctgggaaatgcatctcacagatgctgttgatgctaacggagaacagacagctccaagagtcccacaagtgtaaggataagcagtcatgttacagagagtaagtgtatggtagttaaaagagaaacaggggaagcagaagcaattgttttttattttttatttatttattttatttatttttcaagacagggtttctctgtgtagccttgcctgtcctggaactcactctgtagaccaggctggcctcgaactcagaaatccacctgcctctgcctcccaagtgctgggattaaaggcgtgcgccaccaccgcccagcctattttttattttttatttttctatgatttgaatgtgaaatgtctccctcatgttgatgtcttgaatgcttgttcccaggctgataattaaaggtgtgcaccaccactgcccggcagtttgcattctttccagacctctggctctttggatttttctgtcccaacttctgtgatgtttgctgaacatttcagggagttggagtgggtgtgctacagacccccatggcaggctgagcactccatagtcatttgttccctctgaccagttgtgagcctctaataactgccaccctttgtgtaaagaccttctctgataagggtgagagtcacactggtctgtgggtataaggataagtatttgtaaggcaatttgatttctgtgttcctttggcaaaattactagtagggcctatgatctccctagcatggtttactgaatagtagtcactactagatatgaatcccttcttgtggattgggccttaaattcatttagaaagctgtgattcatgccactgttgtaccaatgggtctatcttgccaggccagtcatgattgtagaagcttccaggtcaatacggtttgctttctgtatgtcctgtgattaaagtgtgtgctgtctttagcaatagagttttattatccagctctggtaagtatctaagagcagtgacaagagcctgtattgtttggtggaggtctctgggacccactccttatagctcttagtgtcattacattgttacaaagtgatttagattgaacatatggggaaatataggaattttgttatagaaagataaggaagccaggcatatgatgactcatgaatctaatcctagcgcccagaaggcagaggcagagaaatctctgtgagttcaaggccagcctgattgatatagtgagttatgggctaaccagagctacactgttaaactctgtcttgaataacagacaaccaaccacaacagaaaggaagatgaggatagagcttgactcttgaaatttttttcataagttgtctttctctctctctctttctttctctctctctttctttctctctctctctctctctctctctctctctctctctctctctctctctgtgtgtgtgtgtgtgtgtgtgtgtcttttgtcttttgtctgtctgtgcaccatattcatgaagtgcccttgtaggcccagaagaggccgctggaccccttgggactggagttacaaatggttgttagctaccatgtgggtgcatgggtcctctggaagaacagccagcatgcttaatcattgagccaattcctagctttgctcttgatggcatcagcttgaaatagtagcttctgtgttctgcctatgtacactgggcatggtggcatgcccctgtagtgtccgtgcttgaaggtaaagcagaccaatcacatgagctttggagaccactgttgacatatacacataatgatgccctctctaaagagaaaaacagacgaaagtaaaagataaagcacggggtatttcatgaagaaaaaaaatttggaacagaaagttggaagcatcctctgtatgaattctagtgacacatactgtgtttctgactttctcagtgctattaacacatgcaacagtctcacaaggtaagaaagaaagcattccacttttctgttcattttgtaaccactggctgactttgtgtaagccgtgtgtcagacctgtggttgtctgtgtcatctatgtgattacaagagcatgatgatagccagttttttgatctcaattgttttctgtgggtaaaaccctaagaggtggagatcctgggctccagggctctactgtgcagtgcctctgttgggccctaggggtggcagacagcctggaaaataccctgctttgagctggaccaagtatatgttcttcatttaaaatacttaattggtatctgtattagttacatttgcattgctgtgaccaaaatacttgacaagaaaactcattgcagagaatcctgagtagctcaattcattgtgatggaaacattcattgggaaggttgtgtctatgtggtgagagcatcctgaactagagtccaggttataacttcaaggtctgctcctctgtcctgagcggcctgtttctgtcggctaggcctcttaagtgctctagagcagctttccctgggagtgccatcagcttgggaacaagcattcggaatgtcagcatgaaggagacgtttcagattcaaagcataaacacaaccgcttctgcttcccaatgctctcttgtcttgactaccatatgttctctgtaacatgactgtgatctccacttgtgggattcttggagctgtctgttctccattagtgcctgtgggatgcatttctcaggtgatttttttggccttttattctttggactaacgtgttctcctctacttccatttccccctaccccgtcctttcttcctccagtctttggaatctttcctttccccactgtttttgtttcttgttccttcagggtcttcttctgtagctcaggctggacctgaactttctaggttgttcagcctggtgttaaactcataatcctggtccatctcctctgctccgggatgtataggtgtgagccaccgtgctcagctgaactttctctctctctctctctctctctctctctctctctctctctctctctctctctctctcttctttcctccctccttccctcctttctttctttctttctttctttctttctttctttcttccttccttccttccttccttccttccttccttccttcctttcttcctttcttcctttctaagatttgtttagtttaattttatgttttgcctgaatgtgtgtctgtacaccctaagtgtgcataatggccatggaggccagaaggaggattagatcctctggagtggttgtgagctgcccccatgggtgctgggacttgaacctcaggccctctggaagagcagtcactgttcttaaccaccaagccatttctccgttctaaactaaagtttttaactctatttttaattattttatgtttcctttttaatttccccctatattaaacatagattattttatcatacaatatatcctggttacaagtttcccttcctgctaatctttccctcttaatcttcccagttcctgcccatccagatccactccctttctgtctctaagagataataacaaaatataataaaacaaaaaagcagtaagatagaacaaaacccaactcatcaacgttggaacaaggaaaaccaacagaaggagaagagctccaagagaaggcactctccaagcagacacccatgggcttagctgttaaaggctaggctctcaaccaaaataagttcacttcctaacacccatggctgtctcttcagccacaaaacaaaaaaaagtgaccccaccccccaaagacccagagacccatttgttcatacactcaggagtcccataaagcacgaggtagaaagccgtagtgtatgtgcagaggacctggtgcaggttctgtctctgtgagttcatgtgaactttgatcannnnnnnnnnnnnnnnnnnnnnnnnnnnnngagaacaaggagctcagtcagaggagttctcctggctcctccagccctccgtcttatactcttgctacctcctcttcctgttgcgggaaatattaaaaggaatggcaagttcctgcactacggtggtgcaggactcaggtattctcatctcaacagactctctggcctgggactcctgacttgataatttccttggcaggtctttgccatgccagctccatgtaatgactgcccacctcgcagttagatatcacaatacccagtaaccccttaaaatcgtaactcttgaagcttataattaaccaatcagatttatataacaataaattctcagttcgcaagattcccacataataatttcagagccaattgataatggtacaagctgcccacctagattagacaagttaccccaattattctgcacctatatgatattatatctacctgtggctatttaaaactatgctaagtctgaatcatcctggtctccctccatattgcttcctttctgctccagtctcctctctgtctctgcagctcttagctctaccctctttccccgtccaatcataaacctcctgctgcactagtatttaaattaattggacagggaaaatcctgccacatcttcctcagggttctgtgaggggagagatttaatgaacatatcccatttggagctgtgtgttccaaatttctgcataatatctggctatgtgtctctgttctcactctgctataagaggaagcttctctgatgatggccgagtaaggcactgactaatgagtatagcagaatatcattgggtcattttattgatttttttctctctctctctttttttttaagaccagtagtatttggttttactataggtccctgagctatttagtcgctggctcttggtcaccaaagcaatgtcaggtatgggttctatctcgtggaaccttaaatgggacttggtcatgtccacaagctttgtgtcaccattgctttgtccgttggtcacacccacaagctttgtgtcccattgctccagcataccttgcagatgggacagattgtgttggggttggtgtttatgtttttcctttggtagcctacaaagtacttttgcataccatagacacagaatgacggggtgaaggttaatgtaggcatcagagcaacctctccatgttcagtgattgtgtgtgtgttgtcttcagcagtggggcctggccgtcagtttgtggagagcaacctattgccttggcaacattctgggttcggtgatttctgtgggagccctttggccaacagaacaattggttacagcagtaacccagtcttggtgccggaagctttgtttgatgacgagagatggccagttgggactctgtttccctcattaattggagacttcgtttggagtgctttcatgtattgtaggagattgccattgcactaggtttccacactccctctcagctgcctcttgattctgcctcttcctccctcaaccctgtctctcctcccacctgatcatcccattcccatcctctctctccctgcccccagtctacctgtataatctatttcctcttcctagagacgtccatgtatcccttcctagtcccttctgtacacatcttcccagaatctacagattgtagtttagttatcacttattgaatagctaatatccacttataagtgaatacataccatgtttatttttctgggtctggggtacctcatttagaatgtttttttttttttgttcacggtctatccatttgcctgcaaatttcatgatattttatttctaacagctgagtaatatttcattgtataagtgtaccacatttgctttatctattcttctgttttcttactgctccggctaagagttcagctactttattgaacaggtttggagtggacagccttgtcttgttcctgattttagcgggattgctttgagttactcttcgcttaggttgatgttgggcttgctgtgaactgcctttattatgtttaggtatgtcccttgtttcgagaatctctctgggtcttttatcataaaggggtatgggttttgtcaaaggccttttctgcatataatgagagatgatcatgtggttttcccctcctttcggtgtgtttatatggtaggtgatacttactgatgttcatatattgagctctccctgcgtctctgagacacagcctatttgatcacggtggatgatatttttaatgtgctctaggatttggtttgaagtttttattgaatgtagtttctatttttttttaaagatttatttatttatttatttatttatttaaagtacactgtagctgtcctcagacactccagaagagggagtcagatctcgttatggatggttgtgagccaccacgtggttgctgggatttgaactcctgaccttcggaagagcagtcgggtgctcttacccactgagccatctcaccagcccctgtagtttctattttgtggaataatttgaggcatattggtattaactcttctttacaagtcttgtctaattctgtgctaaaaccatctagccctgggctttttctggttaggagacttttttccccccacttctgttttcatgacaggatttctctgtgtagccctggctgtcctggaactcactctgtagaccaggctggccttaaactcaagagatccacctgcttctgtctcccaagtgctggctttaaaggtgtgcgccaccactgctcagcttggttgggagatttttaatgactgcttctacttcactagggattataagtctgtttaagttgttcatctgatcttgatttaactttgctaagtggtatgcatggaggaatgagtccagggatggcagccctctgctcctgggagctgacagcagggaactggacagagggaagttctttatataggatttcttaggggggggggcggagctttttcagggcagggatttccagagtgatgattggtggaattttaagtcctgagcttggggacctcagggattggtgggtttcctgctcaggaattggtgacttttttcacccccttttcctgtgttgggcctttgggttagggtgggaagtccttctcgcttgtagccagcttttgctgaggcaccatttctgtagggctgctggggggagactagagagaaggtgctgccactgttgacagctcctatgggacagctcctgtggggacgctcctgtgggggcagcgcctgtggggacgctcctgtgggacagctcctgtggggacgctcctgtgggacagctcctctggagcagctcctgtggtgtttcaccaaggctgtaggatgaggcaggaaaagaaggcgttgccaccatggacagctcttgaagggcagctcatgctgaggtgggaaaggtggtgtgccatcgtgtacagctcctgtgatggctgcaggctgaggagatgtggtggtgtagccattttgacagagctgtcatgtcagctcctgctgaggcatcttacagtgacaggaagaaggacgggcttctgctacctgtcccacatggaacatcaagatatgttcttagtgacagaaggtgagatgctcaacagcacagtatcattcagaatgcagcacacaaggccccgaagtccatgggcttctttcttccctagcaatgcatctatgcatctatcgtctggttctttgtggtttctctatgtagccctggctggcctgtgaccaggatgacctcagacagttcttctcctagtttccccaattctagcatctgtaaactgtaacacctgacctagactgtctgcttagctcaggttctcctgactcagctgtcaccaactgtcttctcactctgctagcccccttctctcagcctcagctggctttttcctgttctcagaaatccaagagctcaccaacactgaaggtcatagggtcaagcagttctaacagctaagaattcttaaagggccagttgactagcagttggtgatcctttaaagggccaggttcacaagatctctgtctgtctgtctgtctgaactcccacctcctatttcctgcctcagctccattagccataggcttctttattggcaaatgaatgcttttacaacacaagaaattttctctacagccaccctcgctatgatgataatggactaaacctctgaaactgcaagctagccctaattaaatgttttcctttataagaattgctgtggttatggtatcttgtcacagcaataaaaccctacctgagacaatctgataggtgtggccactgggggtggggttccaggtaaaatgtgtttgtgggtattgggaactggcacttaggctaggggtctgaaggggtccccaagagggaggatctgcttatcttgtctccttggaatggggtaggtaatgaagaaaggtcacccgaggaggtctacaacagagctggggatgagagggaggttgaatcaggaggaacaggtggagagggacgatctacagacagcctacctggttccctggttggagtgctctgtgggttatagcaggggtgcctgttggtgttgggggcttggataaagcaatgatttggggaacacggggtaagatccatggggttcacaggagatggggggagggggcagggaaggctgcagcaggtgttctgttgcagagctgggggtgagcctgggggattgggtctggaggaatagagggagaagttaaaacctatagtacagtttttaactttaatgtcaaacatcttttttttttaaactggttatttttactgttgaagctaattttaacttaagagatttaacaagtagtcatttatgttcttttatttttgtcattgttgtaacacagaattaatttcacctcaaatttcttttggtatagggcagaggttctcaagctgtgggttgtgacccctgtggggattgtacaactccttcataggggttgaatagcaaatatcccaaatgtcagatattaacattgtaatttataacagtagcaaaattacagttatgaaataacaaagaaaataattttatggttgggtcaccacaacatgaggactgtattcaaggttcaaggcttcaggaaggtagagaaccactggtatagagtttgcatcaggaagggtttctcctccaatagctagctaccagttctagaataattttgtagatatttcatatttccgctgatctttattagtttgtattagtttgaagtatacatgatttttgcctagtggggattgtatttcccgtttgctgcttcactctgaggccgtgtcccaggcagtgcaaccaccagggttcctagtgtagctggctggggatcccttagctcttcttaggtagaattcacaggtaggcaatgaaaaacctcacgactggtcttggtatcttttgactaccttagcatgtggtagcatcaaactgcaggattaaacaggcagaagcagcaagaggtggtgtcctcttgtgcaagcttctgataacagtgccattagttctacaggtgttacagttcctgagaaagccagaggtaggagacccttagttttatgagtatcggcgcatcctcattccttggcagcagctggtgtgcaggtgtgggtattgggattcctaagagcttagtaatgttcagtgctaaagctttctggcctgggtagcttgagactctaggactgaagctgtgatggttctcaggaacactagaacctgtagtttttcatttctgtctctaaatagcctctgtctgggagtctcagtttcccgctcttgtcttctctcttcttttgctgccattcttgcaccagccgtgtgcatggcctgttccgctgcctgttattgtgtgatggcacagttagttcaaaggcaccgtcctttgtagatctagtgcctgttgctggaacgtaagtcgccagtcttacggctctacctctttcatagttgacagtaaatctggatgccctgctgctttttacagcttggcctaccgatggctccgtgttgctttttctttagctgtcaaattggtaggtcatagtaaagcaagtgtgcttacgtttttctagtgttgctatgggaataaatctgtgcatatgaggcctggcagcatgaaggtagatgcagatactagactgtgtaggtgctgcctagggaaaggatttggtcagctcccactggagtgaacaggtgacactgaggtcaggcaagaattggaccatgttgtatggaaatagggctggagagatggctcagcgggtaagagcactgactgctcttccaaaggtcctgagttcaattcccagcaaccacattatggctcacagccatttgtaatgggatctgataccctcttctggtgtgtctgaagacagctacagtatactcatacagtaaataaataaatgaatgaatgaatgaatgaatgaatgaataaataaataaataaataaaaaggaaataggggatttaaacccttgagcatgtcttatgaggtgtgacccacaggagttgagtctttaactcataggatggcgaagggcgccagctgtccacatgtgcttggctgtacatattctgggaggggctggagcatcgtatgctagtaccaaccagtatgtgctgagagggtttgtttgtgcagagagtggatgtagctctaactgccttctggacgactaggtttaggttccagtgtagatggtcagggcactagagggcgagtggatgtcagaatcccagtgctgactctcctgtgcctggtgcttcgtatgactccctaatgggtattgcatgtggaataccctaaagtgaacccctctgttcccaggactcatagcctcccttctgggcatacagttctactactcagaaggaactaccttctggctacctgctggcacagccttgtccatgctcctacatgagactagccaggacagtcataaacctgctacttgcctgcttgggtcctttggttcctggtccctgtacttatccctgcacatttcctgtcagctcccccctccccctccccgacacagatctttcccactggctgtgctgtgtctcttcttgttcagcttctcctgggcaaggccccttgagattgtccttgagctgcctttggggacgcagcaccttcccttcctcccttccttctcctttccccctcttttcctccttcttccccttactcttcttcccctctccttcccttcctttgtgtgtttcctcccttataggatctgtctagagtcactgagtcagaggtctgggttcacattgtcagccagatgttgggtggaaggaaacaggcttgtgcaacatgaggttgtggtagaggaaggtccttgggtcggggttggttgttggattaggttgtggaggatatatcttgagattaagggagatacttggaaggagtcagagctgagaagcatgtagatgttccctggctgtggtgggttaacgatgcccatctatttgtaaagctggtggttagttggggcccaggagggaaggaggtagggtggtgaggcctctgagtaactttttgagagatcctgatgggcaatcagctgctgggccatggtggtcagggatttggtttctgagagagagagagagagagagagagagagagagagagagagagagagagagagagagagagagagagagagagagagatgcaggcatctgacctaacctgttcagggatctaagatgactgggaggaaatgtgtgtggtgtgtggtgtgtggtgggatgtgggtgagctttcagcattggagtcttactgagcatctcctgtgtgtttgcgttcccctgtagatttatcacacgtcccgatgtcaagcagagaaagatggccagctttctggactggagcctttgcaccttggcccactcttccttccagaccatcgagggtgtcattaccatggatgggatgctgcaggccctggtgagccctgccccgggacagcatgtggagctccagcactgtgcccaaactgttggttccattcactctgtgtttgaattacgagaacctggtaggattaatttgcattacagggttgtggtttcattttccactgctgtgtgcttagtgtgtaaggctggactggagtggtggcttccaggagaaagctgaagaactgtgcttcaccactagagggcagcggcgcctgcagaactgcagcctttagtttttttgtcgtaaagcagtgaaaccagcccaagtgaaagaaggcagagggcttgaaacctgtttgcttacgtgggttacaaaatttctagttcccgagtttaaatacagacactggggcccgtctggagatgcccactgtgcccatccttcctattgctggtcttctctgcttgtctgttgtatggctttttagtactgacaaggagaaccactctggtgtgaaatctcagaggacatggccctattaacaaggctaggaagctcctggaccagtattccggaggtcacagatggaccccctaaggctttgtttggttttgatggtcagcattaagaaggtcatggtgcctctccaagtctgtctctagggttaatgtttacaaggttacagagactctctgaggccatggtattaagagtcagtattttggacgaaggcatggatagctgtataaggccctggtttctagggtttggcattctggagggtgcagatagccttctgaaactgtgcggctccagggtcagaaacctcttccttgtttttctttgattacactggatgcgatttgacagtagttcttgtccttgtcttgaaggcaaagggagctgacatgtcacttagaagtaggatcctttggagaagtctgaaggcaaccagtcatactgagtttggctttttgtactactccttaatacaggtcctgatgcagggtgggaggtatcagggcaggtgccaacagccctgggaaggggacatgcaacctgggacgggaaggcaagtcgaggctctctggacctactccatgtgcctctgcagctgaatgtgtatcctggttgtggggatgagaaacggctggtgtctctttattttcagtgatattgccattgcctttcagaggcctgccattcaaaacatgcaagagggaggcctgggaaaataaaatgtttcttaagacctgagcttctgctctgctgctctctctgaagacttggcggctccagatgggcgttagttcattttgttaggtctacagagttgtatagccaccgttgtctcttctcagtatgccattccgcatacacactgcatcatactccacaggccagtggcactgagctcacctgtctgggaggtgacttttatgtaggataggctcttttccctgagcacagcgtctgtagggtctgcccaccctgtggcaggcacgcgtcagttcttcactactttttcgcaggccgaaactgtttcattatgtgactgtttttgactgttgtgattaatgctactggggaacataaaataggtttttaaaaatttataattattttgggtatgtatcagtaggtgtttctctatttgtgtatagtaatagattgttttcctcagcacatagaacaaccccccccccttttctttttggtagtgctggggtgtcaagccaagacccttaaacatgacaggcaagtactgaactatctatccttacccagcccctgagagttgttttttttccctttgtttaactatagtattttgtttttgaagttctttttgtttttgttttgtttttttaattatagttgtggggcccaagagatggctcacttgctgcttttccagaggaccctagttcagttccccgcacccaagttaggaggtacatacagaacaccctgtaactagttctgggcgatctggatgtcatctttcggcttctgagagcacttacacacacatgtgcgtatacacccagatgcacatacatatatccataaatagaaataaaaaagtaaaatagataaataaaataaaaattagaaataaagaaaaattatggttgcccccacttatcagttgtggtacgcacatgagcacatacacaaactaagttattgatgagatgtgaggttctgcctatggtagatatctttggggtttgcagattcagctgtacagcccataccttgggaggcctttgttctagctgtggggagaggcaactacagaggttttattgtgatttccattttgattgtagcagtagaggttagtgcaagttgtggcttaccctgaaaggtagtgtgaggaaggaagaggaaagagtggggcagaggtcacagttgatttataaatcgtggtaggtgttgtacatttgtgttttaggtaattctgatgaataggtagatagaaatagtttatttgaaagatttgggtgtaagtaggttcttaatatttttggcatgaatctttaaaattttttttttctttttatatttgcttattgcctgtgtggagaccaaaatgctcttaattgttgagccatcttttgagcccagcagcagcaacaacaataaagagttcgaaacaacttattgaacgttttctgtgtccctcattcggttccagggattgaactcagtctaaacttgaccaactgatctatctctgcctccctgcccgacctgctgtcttctctccacccatccatcccacacccacccagttcccactccatttgtttgtttgtttgtttgagacagggtttctctatgtagctgtgactgtcctagaactcttgtagaccaggctgggcttgaactcagagctctatccacctgtacctccagagggcttgaattaaaggtttgtgtcacaatacctggctttctacctacttactgtgcagccttggtttacctgggacttgtagcccaggatggccttgaacttgtgttaatattcctgcttcttcctcctgagtgctggatctcaggtgtgagccaacacccccggcttggcctgagtcttgttgaaagttttcacatcaagagaatacaggaaggtctgacaaaccgtagctagagtctgttactgcatggtggtgcttgagggaagggtgttagacctgtctagcgtgtatatgggacacatgggaggacaggcacaattaatctcaggggattgattttagatggcttttgttcggctgtttgcattctttcttgggttagggactgtgagagggatcttgctttatagctcaggctagcttctgttagcaagggttatgggtgtgtcccactggacctagctcagtctgcagttttgagctacctgccagcctggcccaggagtttttctgctctacacttcttcctgcccatggcaatagagattgtggctggcagggtagacaggcttcctgcttaggtgaagcaggctcctgtgggaggtggtgataacttgtgggccttaactgaggtcctggccaacgtgcctggagcattccgcagtgactgctttctgtctcgttttacattctttgcctttttgttctttttgatcacctgagtctctgtgtagttcccaagatttctgtttcttcttacttaggaggtgcatggggcataggttgtgctcagacactgtagggcagttgctgttccattccttgccagttttgccagtgggttgagattccttttagtgacttaaaccagccagacatgtgtgccttttatttggacatctttaaattccagtgttgaggagagaaattctctttttgcttcctcctgaggtgtaaaaagggttcccagaggcttagaaagttgagtctcctacactcctccctccccccccaccccccccagctgggtgtgttggcaagggaggggaagatgagacccagctctctgccgttggggcagagtactttggtggtttggcaacagcacctctgctctatctagagagacttgccccgaggatggtgagcacttgtctgacgcagacaactgaaatcctgggaagtggctgaatgaaactgctgtagaccaacagctacggtggtctcatctcctagggctcgaggtgcctggcttgccaccgcccttcccccacccctcaagcctccgctctggggcagcgttgtctcctcagtctccctcttggcttctttttctctcttagagggtcacttgggtctgatctggctccagggcaggaggaagttacgctcagtgggtggagcagtttcaccatgggcttgtcagacctgaaggcagagggctggtgtcttgtgcgtgatgaaacttgcaggtgtattgtgcttcaggattgcatgtttcctttgatgcacttggcttcatttttatccacctgttcattagtgtgggttaggcgaaacaggtgaactctgaacaagtcacatcgaaactaggattgattttatttccctcgaagcatagccctctcgcggcattgattcttaactcttgtgggaaggaaacaagtgtttggcaacttcgtttctctggaaggcccctttgctcatgagtgttagtattaatgcaaatggaggaaatttgagggcagaaaacatattttaaaataaaacattgtctcttaaatgtattttaccttttcttattggttgatggttgtgtggtcatggttttccttcagattagaagcttctgaccatggcggcttctctgggtttccttcagtggttatgatggtgagggaacttttggttccaaagacaggctgctggtagggaaggtactgcctgtgttgattggtggcaggggatattcttttgtttactaccagctgacatagcatctcctcttcacagttaggtggggttttttgtttgtttgtttgtttgtttgtttttaatttttcctatttttaacatttcaaaatttgccaggcatggtggcgcacgcctttaatcccagcacttgggaagcagaggcaggcggatctctgagttcgaggccagcctggtctacatggagagttccaggatagcctgggctacatagagaaactgcccccaaaccataaacaaacaaaattcaaaatccagactttattttatctattgttgactaaaggtagaattcttactgaacttatagtttgggggtatagctcagtaccagagaccacttctgtagcattcttgtagccctgggttacctagcacggagagaaacaaaaagccacaaagttgcagcaaaacccagaaacctcacaggcaacagtattaacactgaagagagagagctaaggtaccaggatccacaggcccatcccaggggctgcatggcaatctgacccacgaggcatgtgttggagcgtctctcttccttgcgtgtggtttaaaggataggggtcgggtgcctgggtacaagtgactgttgactagattacctgtatgggtaagcacgaggaaccagtatcctagacttggctctgtctgggccttcagctgcctgaccagactgtcctggccttggcctctgaataggctttagctatacttggatttcatctctcctggtggcccgaggcataggtgtggtaccttgctctatctggaagagaagtgacaaacctctcttgcctcagagtgtgtggagactagctaatcagccctggtcatgctcttcagcttagcctgtcatggtcttgtggactttggcctctttgtttgtgggcttctgtggagcctggtttctagagaagccctggctcagcatcctagggcagaatgtctgggggcttgtgccttagtgctcagggcaactttgcttttcactttacttgtttatatatattttcgggtatagtgtgatgtgtgtaccagagcattcatgtggggacagcttgcagaagtaactctcacctttcaccgtatgattgaatgcaggcttggcagcagcaagcgcctctccccagagccatctttctatcccgaagaggaaggttttgggtggagaaagcgcgtgacggataggatggagatgaggcactgtctatagagagtgctgtctccatagactcagggttcctgtgccaggcattgagtaggctctgagtaggctctggctgtttgtagtttcacgcagctcagcactttacctaggtgagccctgtaggaacgcgtatgtacatgtgcatggcctcatcctccccgtccctgcccacctgcgcgtgtgagctgcgttagtaatggagacccaggaggccagtggggagccccctccacctttagcctggctcgtggcttttgctgcgggccatttgaacacctcacgctccacctcctcctcctctcacctggcccacgggcaggtgctgatacctggctgccctgatactttccttggccttccttctcacatgcttccctcaggccttggctgttgacatctcatctctgatttgcccttgatctttgtttcctgctctctgtccttgttctagagccctcattctgtgggccgtgggtacacttgtgacacctgaagtcacaaccttaacctcattcctgttgtcctacagcttgtcctccttagccttgtgactgtagaagcctgacagagatagaggcagagagagacacagagacgtgtgtgtgtgtatgcgtgtgtgtgtgtgtgtgtgtgtgtgagagagagagagagagagagagagagggaaatagacatagacagagaggcagagagatggagacagagactgcatatgtgagagacacagagacaatgtgtgtgtatgtgtgtaagagagagacagagacagacagagacagagagactgcatatgtgagagaaacacagagacagtgtgtgtgtgtgtgggtgtgtgtgtgtgagagagagagacagacagacacagagacagacagacacagagagaagcagacagactgagacttcgagcctgaggctgtctctgctggtatcctccatgcctgctagttgtttggttctcacatctccttgtcttacccagagcttcagctggctttccagcgatccctccatgatacctttttcccattccacaagtcttcaccctgtagtgtggttccttagtctttttgccctcactcacgcacatctgctgtgcttggtcttcatcttcttctgaagggtgacaggtcatccttctctgaagtacctccgtggagaccttcctatcgtcctcgtctgtttggttccttgtagttgtgcgctgttccatggtcaagagggaacaaggattgagaagcatcagaggggagacccgccaagggcagttggggcgtcttcctgccctctgagccccgaggatggcagtgtgtaattagtaggccacgttttccaagctgggcatctggcactgtctttatgcttgtacgtgggctaggaaactgaactgatgaagctttgaacatctgtgtggctggtgaccaatgtctggtcattggagaatctggccagcggggtggccacctatacctcctataggcagtgggttggtcagccctctgtggctgagtcattctatcactgtgggacaacaaaatgcctgtatcggctccctgaaatagtccccactctgtttttcaaaatatttgggcagttgacattttgttctaacagttcgttcttttcactgatcctgtaaactctgtggtttatgtgtgcggatcagctaaccttaagattaggtcattctgctatgtcttctgccctgccaggagacacctcagtcccaatcccttcctgctggtttgtgttatgaccaagggtctggaacctgtgcgttctgtgaagtatcctgagtcactggaagacctttgcactacacacacacagacacacacacacacacacacacacacacacacacacacacaccccatagggttcttgtgcaatccaggcttgttttgtactaacccatcttcctatcttcagtgctggggtgatggcattatagacaggtaccacagtgcccttcttgctctgtctcacgtttctcagccagagctcctgagttggctttatgggcactgtgtgttccactgcccctgcttccacgttggtcctgtgctgaagacatggtgtttgggacggcctcaaccttttcctggcctgtgtttccgtttgtctccctcacttccctcacttcacctggggcagtgctgaccttgactgtattggggagtttgaggttttgtctctgacttcaggttcctcagccatactgggcgttcctccatgggctgaggtatttggctctgtatgcatggctcctgttgttgggataccctcaatcctgggctctcagtaggaggagtgttaccatacctttttacatttaccagttgatcgagatatggttatctttacttaagaagcacaagaaattgaaataagtagtcataatacaaacttgaggggctggagttatctgccttcaacatctatccttttccctattgtctttgctattggtgagttttctctttacatcatgaaggctgcagtgagtgaatgtgtttttgatgttaggaaggatcgactctcttgagctggctgtgctggtacatgcttgccctcaaaggtaggaggaacttgagtttgagggctgtatagggagatcctgtttcatataaatgaaaacaaacctgaacttggttttttaggtttccagtgtaagaaatgcttcagttaacggtgggtgtcatttctttctttgtgtagtgggagagggtcttgctttgtttttctagtaaggaagaaaacaccctctttcctagaaatcttgcctctggcacatgggtcaaacctgaaactgcccagtgggtggtttgtagcctgagaatttgccctgatccaagagtttagaagtgacccacaggtagccatctgcggaactattcacactagaagtgttcagtgctgcttgtggtcggccatagctgctcccagaactggggctgtgagggaagcattgataactgatttcagctgtctgctattgggcaggcaatgtctggcctggatgccatcgtggggctgggtcctgccctgtatctaagcactcctttccagtgtcagcttactgctctacttgggacagtgggttcctcaggatgtctctcactattattctttataagtcagtagaggtgctagacctcagttttctaggctctgttctctggagagagtttcttccccacagtgctggaggaagggcgttcaggaatgagctgttgtggctgcctttgcattggtgaaggcagcaagtgaaggtagttcctctgtcctaggtgagagcctggctttgtttgggtgcccagcctagctagggtggttgtgtgagttttggccatcttttcctgcctgggttttgatctcctgtatgacatatttaaaagtgccttacaattccactaccagtggtttgctaagccttttatgatggggaattttttttagtgttaagacaaagtcaagggctggagagatggctcagtggttaagatcactgactgttcttccagaggttcaattcccagcaaccacatgatggctcacaaccatctgtaatgggatccaatgccctcttctggtgtgtctgaagacagctacagtgtacgcatataggtaaaatcaatcaatcaatcaatcaatcaatcttaaaaaaaaaaaaaagaaaaagacaaagtcaaggagaattgtcgtttgccacgtcccattgtgaggtggcctgggtacaacagtgtgttcctgagaggccagagcaggatctgtaaccaagtgctctggtaacctgccattttaacgcggtggtttctgagtttggtctcgtgctggtcagtgctcccaaggcttcagactgcggagcttcttggagcctttgcatttcagtgacagccacacctgggctctagtgcagggacctttctccaagggcctggggtggagttgcttttcttggctcgaatctggcagtgccttcagggagcctcaaaccagcacctcttgcttggcagcagggtgaacttgcttctgtgtggctcttgagcctgtgatttgcggggcttggagagcatgccccagggaggggaagccagcttgggtggggagactggaaaggtgtggtatagtttaggatgattactgggaaactcgttttgtttgcaccttgcgctgggctagtttctagaacaacagaaacagacggggttgctcctcctgtgccgagaggtgtttttcccaaactgtcggtgctgtaattgccttggtgctgcctgtgctttctcagaaatgcaggtggctttaggttggttcctgtttcatgcgtccaccgaggtggggtgtgtgtgtgtgtgtatgaatcagcgtgaacgttcaagttcctctgaagctgagagatgctctcactgatcagcactgggaaggggaagtgctaagaagaaagatttttaaaatgaattatagaccatgctggcaataaacttgtggtcctccacaggttgttgtgctccagcctcctgagtgttgtgaagatgccttttatgtgaaaaatcaaaagcctatattcatctttttttccccaggggaagggttccctttcttcatacttttttcctgtgtgcttcatggagagttgctgtcttcctgattttctctgagagtgtgctcagaacctgtattgccttggaaatcaagcctgaaactcctagaatgggtcagagtggacagaattggtgctgtactcatgacgatacagattgtcatccgggccatgctggttgtttggtttgtggtggggtggtggggttaggggacagtgggacgcagactggacatttgcaggtgtgggagcctgctacatgactgggtgcctagtgccagggcgtcatctaacctctgtgtccacttggcctgtcttgcacattgctcccccccatccccaccccaagatggggtgctgtagtagggcaagctacgtttatgtctgaggtcttgtttctctttgggcatggtctgtgtctcacacatggtgagactgccctcatttacccactggtttaggacctggttgtgttttgacactttctgacccctaccagtatgctccagatttctgcttcagagatgttggtagtttaaatgtgtgacttatatggaaaatatatgatgtttggtgtgttccctacctacccaactttatgttctctttttcaaaacaaaaccaaaaacttccataaaaacacaaaagtggaaaccattgcaaacaacaagcaaaagaccagtaagacagggaatccccaaacaaagtgggacgaaaagctcacacaaatcagccaaacccattgagtttgttttgtgttggtcaacacgatgggcgtgggggcctgccctggactgctgttgatgtgcccagtgatacctcacggagaaactaagtttttctttgtcagagtatcatttgcaaatagcctcttggttagggctggaaccacatgtccacttcccctctcagcgatgggatcttatttggattgaacctgtgcaggccctgcatgtactgccacagtctctgtgcattcatatgtgcgtcagccccgtggtgcctggaagacactgacatcacttctggctcttacggtctttccacatcttcttccacattgatcctcgagtctcgagggggaggcatttggtaaagacatcccatttaggatcaactactccaaagtctctctgcacattgtccagttgtgggcctctctgttcattcccatccactgcaaggtgctattctgatgtgatgagcaaggcacagatgagtgttagagcccactgtggccctagggaacaattcctaattagatcttgcacagagaatgtgtgttggtattcacatggtagggagcattataatccagatctgcgttttattctctggggaatatgtttgaaaataagggagctgtgttttagaaaggctcagtgtggtgggcaccgctatcgtccattcttcatagatcgagggaagggagatgaggtctgatcctaactgctgtggcagtctatccagcatatagatggagaatgaggaagcttacgtagtcttctttatttgtgtgtgtgttttctgggaatgaattcaggactttgcacgtggtaggtaatcattaccactaacacatacatttttttttttttttttaagatgctttaaagctggggatggtatgactgatgcctgtaattccagcattctgaaggttgaggcaggagcagtgttagagatttctggctagcctggccagtagagtgagatcctgtctgaaaaaaataaaaacaaaaccaaaaattagaaaaagacaaaaccaggcaacattttactacttatgccctggttgaaaggtcgagctctctctggtgtgactgacctcctcagggccggggtgctgccttccggctttgctccccagctggctagtgtgctgcccttgtgctggctgggtctgcttcttcacacttctctgccatgcagtaagttgactttgatcttatgattccccagttggaatctgtggccttgcttagcaacacctttgtctctggattcctgcaagagggacctggaacttttgtttttcctgtcacctgcccttacccacttattctgccttaccatgatgttgcacactgtggttggtaatgtatgttttcgtttaccttttcagttaggtggtcagatagtcttgagtgtaactggccttcctttagaccctcagtatctgttattgtgaataaggccaaggtctggctctgctctgccatccccaagtgactggagagttttttgcctttaagtttacttccagcattttcattatgatcatcctgttggatctgagccgtggcgtgtgcttgtctttcgttcttccttagcccctagcataggctatgggtatatttcccctctgaaacttgtgcttctccacctgagctcctgctatgtctgggcaggtccttgtacacctttgttatatgctgtctgtttccaaaagctagggaggctttttggagttagacttggggataatagtggcttctggaggtgacagtcatgccaggagttggtatcccagttcaatgttttattttataatatttttaaccttagtaaactagtttaattagcagactatacaagttgtcacagagtgttccaagtagatatgtaataatcagtgtagatatcagacttattctaccctaacaagtcagaaaagaaacagagtgtctcccaacataatgtttttattaattatttggaaatttcatataatgcaccctgaacactcttgcttcccattcctgtcaggtctgcattcccatccttgcactcccacctctccaaacaaaccaaaccaccaagtccaatttgtgttgcccacatacacattggagcatggtcaaactcccagtggccagccccttagagaaaaccagggtccacctcccagaagccatcgactgtgaagagctactcgtcagcatttctgtcttttcaatagcttcctgtctagactgcttctttttttgtggaggtggaaggaggttgtcacaaatccttcagtgtctctcctgctcagttctgagtctgctgtcatttataccactgcagaagaaccctccttgtccacagcggctggaggcagcacacatcatggacactgacatgatctctgttgtcagcactcatcaggggaatcagcgtggcctctggctgcagcacggatcacagaagtcttttgaggagacttaatccagaaaatgaaccattcccatctctcttattttaaaattattaaattatgtgtatatgtgtatgtctttgtttgttgtcatgtatcgtgcctgtggaggccagaaaaggagttggatcccctggaggtacaggtgtgagtcacctgatgtggctgttggaaacttaacccagtggttaagtgaccgtccctccagcttccctagctgccttttataagggtcagaatgagaaggctttttttttcttttgaacaatttgactttcatcagaaaaatgatcgtgtgttcttatttattgttatgttaatctgacacatcatattaatggattattggattctaagccagtcttagattctttgcagatggggaataagcctcattttctggtgtaatttgttgttggagtcggttttgatacccatagatgctggttgtaattttttgttacaagcttggctatgtattggggacagtcatttggcaagcatttctcagagtttgggtacagtgttattttttttttttctcccttggatgttagctaaaattcagcagtgaaatcactagtttttctactaggatttgcttggtgggaggattctaaataacaattccatttttttccatgatacacttctattcagttctactcatttctttagaaacattgtttatgtgtgtgtgtttgcctgtgtatgtgtctgtatgtgtgccacatgcatggagttcccgtggaggtctgaagagggcaatggagcctctggaacttgaattttagttggctgtaagcagccatgtgggtgctgagacctgaacatgggtccttcgcaagagcagcaagtgctcttaactgccgagccctccttcgtccccaaaggttcctatttcttggcctatgctaatttcttttgaggggtttgatctgttgccctaaaggtcataaaacttaaaacttctactgtccgtaagtcactgttctctgacattctcatgctctgattttggaagtttatctccctgtacgctgctcttttttttttttttttttttctttgctgtttgttttttgagacagggtttctctgtagtcctggctgttctggaactctctctgtagaccaggctggccttgaatttagagatctgccttcctctgcctccagagttctgggactaaagatgtgtgcccatggttgctccttggattttgtcctgccttgcttttctagccagggtttactttgcagggactatgtggtccctagagcctgtgggggcagggttctgtggacttaaaggatacagggcagtttagagatgaaaggtgattatgcatgtgaagtttgaccttagttttttttaacttaatgtttttattgattatttggaaatttcacataatgcaccccagtctcattcacttcccagtcctcccaggtcccctagtcctcccaggttcccccagtcctcccaggttccccagtcctcccaccccttacaactccccagtcctcccaggtccctcccccagcctcccaccccttacaatttccccttaaacaaagtggaaaaaaagaataccaagtccagtttgtgctgcccgtacactcactggagcttgttgactgaactttttaaaagtgaaaagtatctaacttctgtattttcacccatgagcttatgatctgagtctgaactaattgagttcacagtttgcgaacctggactggcttggggctacccagcctctgtcccagagggtcaggttagccaccaggccatgctctcctttcttaccctggtgccaggccagctccggttacagtgtgtagtattctggttgtggtggattgtgtgtgtgtgtgtgtgtgtgtgtgtgtgtgtgagtgtgtgagagtcctcccttctgctcagctgcttctcttccctggcagctcagtggggtaggtctaatgagtgggaaggtgcagagcctgaggacacactgatggggtccttatggcctgcccaaaccaaagcttcacttggtggcacctctcggagacctctccaggtttataagggagcagtgatggggttcagagaattctctttctataaacccaagttcactgatcattttgggaatgactttccaaactatgacatgtgttttccaaagggaggacagtgttctagtggaagtggaagagaactacaaacaaacaaacaaacaaacaaacatacacatatttaacttatatataaatatgtaaccatatatatgtatttatttgtgtgtatatggtgtgtatgtatgtgaatatgggtgaatgctagtcacagtgcgtgtgtggatgtcaagatcaaattccaggagttgagagaagcattgttataattgaaggaaggccagtgttctatcgaggaccagtgttttagtatgctcgtgagagagaattagttctagtgaagatctgatagtttttttggctgctgccctccaaatgcattcatagtactgtgtacagagactgcatggtgtgcagccaccatcacagtgagggagagcttgggagggaccagatgcagtggtaaagtgtggcagagtgtggaagtcggttctgtgagaccctcctcctgggtggattaaggtagtgggcgagaaggaaagacttttgtggcttctcggttttgtgtggatcctttgatctgcagctcttgatgagacttcccacccctctccagttcagtttgcactctacaggttagggtctaagctcctcagaggtcagactccattggtgtactcttgctatgaagggacctgagagaagatccctttcctagactctcctctgttgtgaactgaatctttcacctgtgtgttggtgtatgcgcagcaaaattctggaagaagcaatgagtttgttctgataatgtgtgtgtgtgtgttttaaagttagaaatgtatttaaaacatgctattttttttttcaggctcaaatatttaagcatggaaaacgtgaagactgccttccctatggtaagattaatttggaggagagtgtttgcccagtgagtttgtgcgtacatagtcaagtgtgctgctctcacgtttaactcaagcatgtaggaacctgtagccttgtgtatttggatactgtcgtagttctttgactttctgctttgtgttctttaatataactttgatagactagtctacctatatgagatacagaaaatttctgggatctgggttctgcagtgctccaggtgccctgacttaatcctggagggacctggaaacagtgagcatggccctaggtcacccaggagcccacagaagccttgttttcctggtgcttcactcctccacgtcatcctgtctcctctcaccccttcattctctttcattccccttcttacctcatccccttaacccgtcacctcatttcctccccatcatctccttccctctgattaccacatcccttgcagtgcttcaccttcctccccaccgcctcaccctcctcccactgcctctccttcctcctccatcactttatatccccttctcattacttcattctccctttatagcgggatttcttggacctgccagaggaagaataatgaataagagaataggtctagcttaggctatcacctagctaactcatctaaattaacccaactatcctagtccatgtcccatctgagatctagccctatgctcccatcctaggtttttgttgtctccagaatgtcattattattctcttctgccccactttaatcccctgaatggcctttgtagcccagggtctcatccaagagatatcattatgctcccctgggctcagtctcctgtcccagcattgcctccattccagctcagtgctgacggagcagtccatgagtaaagcacactccagaagccctgtgcctctcaaggcttgcagcaagatggcttcccctatgctctgggccttttctgctttctgctgcatggtgaagacagtaagtaggcttcactgtagctcttcttggatgataacctggggagaaaaggggtcatgtggccagggctcagagagtcagtgtggtttatctgccacctacctgaggcccgtgggatcgtatgttcagggatgcgtgccacctcctgccacgccaagtctcgtgttctcctccacagccaacactgtgctccagtgcctcgacggctgcagactccccgagagcagtcatacctcgctgcggaagcttggtgtgaagcttgtccagaggctggggctgactttcctgaagccaaaggtggccacgtggaggtaagttaggcatggggcttgcatttttctcaggaggagggggcaatgcggactgaacagcaaacattttcttccgttttcatttttcctttgctgtctgagtatttctggtttcaaagggagtggttttcccattggctattttctggctcagtatcctcagttagagtagctgaagacagtggagatggagaagcttgctctgcctctccctaaggtgctgctcatgcacctgcaagtggttggttctggctcttgagggaaaagctttctgttcagttgtctctcagagaaaacatggttcagtgttgaaggtttattctgaaacagaagtgtcttttcgagccgggagtggtggtgcacgcctttaatcccagcactcgggaggcagaggcaggcagatttctgagttcgaggccagcctggcctagagtgagttccaggacagtcaggactatacagagaaaccctgtctcgaaaacaaaaaacaaaaaagaagtatcttttcttgctggtggactcagactcttctaatatcctcgcagtacagttgttttgttttgtttttttgttttttgcttttccttttgagacagagccttgctgtgtagcccagggtagccttgggtttacactcctcctgcctcagtcttagtgctgagattccaggcatgtgccatcatgtctggaagctgctgctgctgctgctgctgttattgctattactgttattcttgtggtaccgtagcttaaacccagggctttatgcaagtgttgtactactgagatgcattcaattatcaatgtatgtgatttgggaagaattatttaagtttagttaaaatgttgtccagtgtgtagtgaactccaaagaagtgtgctatgatttagagatgtcttactgaagtatccctcacatgcacacttcagtcaaggtggttctgtaggcgacattctagtgatctgttctcaaaacatcatggaaattttccaaagaaacgaaaccgacaggatgtggacagtgcagatggaagccggtgaaacccaagacctggagggtgcaaggcagtctggagactcaggagactgctctggtcagaggctggcaggtgggaggggcagccttatgttttgcccaggctatcggctgattggacaagacttgcctgtatgtgttcagaggtaaactcagagacgtaccagatgtgctcagttaatgctcgcaggtactaggaaccttaatttaagaaggaaaaataatttagtctgtattttttaatcacatacagtaatgtaattattaacagaattaggttttgaaggcatgctgactcacactctgggaggcaggaggaaagttcaaggctggcctcatcttcatgatgaattctaggcctactacggctacataggaagactctgttgatcaaaaaaatcaatccaaaccaaaacatgactgaatttttgttttgttttgtttgagacagttcctctatgtagccctggctatcctggaacctgctttgtagagtaggctagccttgaactcacaaagtttcccctgtctctgccttccaagtgctgggatcaaagggatgagcatggctggctaatgattgaattttaattcaccctcttcctatttgttttctcttccttcccccgcccccctttctttccctcccctcttaagggaatgggtctcatttatgtaacccagactgaccttgaatttgctgttcagatgaccttgaactcctgattctcctgcctgcatctgaagtgctgggatgatgggcatgcattaccatgcccagttccccttcttatctcttttatttttaggttcttgttagatctcctaggctactttctacaggttttccccattgcaggtggtgcagtttggtcctcataggctgtgagtgctgggtgcatccactttcctgtctgctcttagttttgttagtcagttaatctcagttctttctctggggtgcagccgtcttctgtagcacaggttttgcttctcatgtggatcttcttaagtgcgagctggagcttttgatcttctgctggtcccacttgccagtggccccgacatcccctgagctctgagttctccatgcagcttccccttcattgtcctgggtcttttcctgtactttctcattgtggggcttactcaggtgcgagggagaccatgtgtgagttctgtgctctttcttagtagctgctgcctcgctagtgacgtgtgtgtgtgtgtgtgtgtatgtgtgtgtgtgtgtggtgtgtgtgtgtgtgtgtgtgtgtgtgtatgtgtgtgtgtgtgtggtgtgtgtggtgtgtgtatgtgtgtgtgtgtgtgtggtgtgtgtggtgtgtgtgggtgtgtgtgtgtgtgtgtgtgtgtgtatagcacttcccggtgtggctgcttgcattttggtgctgttcttttgcagcagtcttgacagtgcctatggggcagtggtgaagggagttcacatgactttctattggggagggaagcaccttgtatcggtcctcacggggctcgccgcagggtagagagccaggcagaagctacctgcctcttttgaattccctttggaggtaagctttggttactgtggcataatgactcttaggagcgagttgcttggtcaaggctagtggtcaaggcttggctccaggtggtggtgcagtggtgaccatgagccacattttcattggctattcttttcttgttcccaggcaagtgggagatcccttttgcctgggctgaggccaaaaagccaagcaggtggagaaggcagccacttgcttgtgaacaagggtgaggccctggtgtctttcatgtgcacgtataggtgttgccattgccttctgttatgaagctttgctgtagaaggctcttcagaatcagggcctgcatctgacctaggttggctttcttttgaggtttgtatgaattgagatttccgctggcatcatgtatgattattctgagggatgctaagttgatgacatcagttaccaaaaattttattttcagggccaggctgaacctaccaacttgagatggttttgttgtgcataggtatcagcgtggctgtcggtctttggctgctaacctgaagctctgtgccccgggtaagagtgaccagaagctgctgtctgatagtttgacctctgatggtgatgaagactatgatgtcccagagggggtagaaactgtgataggtaagtggagcctacagcagatctgtgcatgcctctctctgcagtacagtctgggctttctctctgtttaccctcccttttttcctctcctggttaccttctgctacctcacctagcatgtggtcagtgactgacgtcatggactcttggtccagcagtaccacctctccactgtctcttcaccccgccctctagcctatcggacacctgaccttaagtttctctctctgggtgtcctcaggtacatggacttgaaccatgggaccatggttctctgcctcctccatattcttgtcttgtccaagcatgctttccttgggcatcatctcagaccactttaggtgtccatactgatgaggaatcttgacccagtgtctgttcccagcagtcctttactgtgcccaccctcaggttccctccctcttcctgctttcttgcctcgtgctggatgaagtgtgatcccgactgggaggcacaaagccagcggccatgtctcttgctgcgttcagtccactcatgctttccccgcagacttgtctgtacctgctgtctccacaatctccttgaccacagtgctgttgcttatgtgcccagtgctccccatacatttggtcttttctttgagccttcctgggattctcttccttggctgctgtgtgctgcatgcatcctgagtggctctaagccaccttgcattccatgggcctaggcttagttctctgctccttttctcttgtcacctacttgcttaggcctgttgctttacactcaagggtctgctgacttgtctcttcccaccccaaccgtgttagctatttatccttgtcagttcttctggggtttgctctctggccagcgttggtaccatcctgggcttgcagggatgtgtgactcgggataaccttctgactatctctgtgctggtctccctaattctcatttttctctgtggaggcctcctcagatgtttgtttcctttgacctccccttctattggctcacagaggcctttacctggggaggcatctgttccctgctgattgtcgtattgggttggctccacttgttagaaagtggcagaaatgcccttttctgtgattaaaaacagtcattgtaaataaatttaaggtctaagattgaagagatagctcagctgtttagaacccttgctggtttggttcccagcacctataaaatagctcacagtcatctgtaactcaggttccaggggatccgacccctattttgactgctgcaggtaccagtcatgcacaggtacatatacatacatgcaggcagtatgctcatacacgtggggttaacatttaaaacacaagtaagacctcttgggaatgcaagatggctcagagggtaaagggaccaaacttgacaactcaggcttctttcctgggatttacatggtagcaggggagagccatttcctagaagttgtcctcttgtctccacattcatgcagtcgcatacacacatcatacccattcctccactaatgtgaaaaacaatacaataaagactcttattttaaagggtctcactgtatagctctggctggcctggaactctctgtagatcaggctggcctcgaactcaattgaaatctgcttgcctttgcctcctgagtgctgggattcccaaagtgcctttgaggaagtcctcctgcctcagcttctcaggcactgaggttacaggcatgtgtaacctatggctggctaaaattaagatttcttagcacagtgtattctttgtaatccatagaatacatgattccaagtgtattcctacatagtgaagtgtaggattgttgggatagtttatatataagcaagaggattaagattttatataggctgatggttcttgtgttctggttcttgcagagcagctactggttgggttgaaggacaaggacactgtggtgcggtggtctgcagcgaaagggtacgtatggacccctacatgctgagtgctagaggcaacgggcaggtgtgtctcagtcagtgttgattccttaaaaagtcttcattccataaaaaaactttacgtggggtttgatagttgtaaataccatgtagatcttcaaatgatagaactattgttttatataatgtccatttaaagataactattggctgggtacatgcctttaatcccagcacttgggaggcagaggtagacggattaatgtgagttcaagaccagctggatctatgtaggaagttccaggccagcagagctacatggtgggatcctgcctcaaaaaacccaaaattaaaaaaaaaaaaattactgaggttaaattttaggcttcctaaagtggtatgaggccaattattagtagaagttgattaatacaaattagatgttgaggttgttgaagagactctgtgggagctgtgaagtaaggcagtgcagtttcttgctcacagttgccctggcatcatgatgtaaagctccccagaagctgaagagagctgccacggggacttgtatttatgccaaccaagtctgtcctgccgggagggatagattgacacatgcacagtgagacaggcctgacttcaggcctctggcttccccctgtgcagagcctgggctatcctttgtggaaatgggacagtctagttaggtaggggccaaggttggagattgcagcatctatctagaagtactcgtgggccgttaacactgatgggctcagtgtccacgtcacgttactgtgcagaaaggtgaccatgtaccctgttcacatgtccaaggagtcccctgccccgtcctggacacttggttggcagtattcgaggcttgccctattctgggttaataggaaacttactcaaggtaatgtgcagttgatggagtattgcttctctttttcagaattggtaggatggctggaaggcttcccagagagctggccgatgatgtggtggggtctgtgttggactgtttcaggtgggttatcactctcaaaggcaaacctgcagctttgtgttcttctgtattattatatatgctttcaattgagatatttattagaaccctaaagcctaatttttccttgttacgttaaacttgataattgcagtgatgttgtttcaacatcattatatatctaaaacctttagacagagatgaagcctttgcaaatgtaggtcttcatcttcaagtgaaggctttgggcctgaactgtgagtgggcagagcttcttaaaatgagggaattttctggatgcatgcctcatattgctactagccccagtggctactgagactcttgagtgactgaggcctgaatttggagttgtattgtaatgaactgaagtttcttgacattctgagtgtatggggcaaatggcgtgtggtgtgtgtatgatggcatgtgggtaggtgtggtcctggggccatagactgatattgtagactcatagacaggaaccttggtcttgtttccttcccagtgattgttcctctgggagtaatggtttcttagagggttgaggagggcatatcccttatcccacagtcaggttgcatggccatttattggctgtgctgttctgagcctgctattctgtgtgggcctgctattctgtgtggctgtgactgtctggcaggaagtctgctatcagtactttgagccctccagcacttgtccttgtgactttagagatggtccaccaacaatccaaagtacacttccttctgaactgggcctttcattttgcctcaggctgcttagtgacagtttgcagtttagaggagatagtgtgccagagactgttttccaatggtggcaatatatagtagaagtactagcagaaaacatccttattgggactgctttgtggagtgtgacgagaagacaccgtgtatagctgcttttctcaaggttctgcagatttgtttcaggccttgtccctgggctccccctggagccatgggatggataggttgctgctctccctgggctttgtgctgccagatttaggaagagctgggattccatcattgtcagccttccctgagggtcaagcactgtttttcccatcccccatagggcatttctgcacattccctctggtcacttagaacttttttccaggtgccccctctcccaacttttttctacattttctttcctccagtttctctggcatcctgagcccattctctttggagtgttgttgggtttctagtgtatacagcttctccagactgtgttttttctcctggcttgtagtcttggtttaatgttggaccctggctcattcaaccttcttatgggcctgctgttttaatagatggcagatactaaagtgtgtcctgtttttgtgcctgtgttctggagagaggaaaaggcccagcatggagcaagcatgctgatgggaggaagggtcagggcgttgggtctgtgtggaggcctgagtctcgaaacctcttctgcagcccaatgatgtcatctccagcattctgtgctttttctctctggattcctaagcttgggagcctaggcttagatgtgagataatggcttgctcttagcacttggccacagtttcttactatgcccctgttgtatcgaaggctgggctttatcagacatgagtctggagtggatgatagcagcttttcaggcctgcctgcctgaagccatagtgcacttttgtagtttagaagtgatatatttgagttaacattatgttgatactgtatcaagttcactatgacgatgaatcttcatgaaaagtatgaggaagcatctctctctccatttgaaaccctgaaagacataaagatttagaagtggaaaaagagaatatttggaactggaaccagataccagcatttgagcagtagaggtaggaggatcatagttcaaggccagtcaaggctacatagtgagcgtagtgagcttgaggccagcctgggctacaggagactctctcttaactaataaaacaaaccctccaagatttgaagtgatcacatagcctctgagcagacacctgctaagacatctggcactttcaaaaattgtaattatgagtgagtcatacgaattgtggtgagtgggaggacagctgtatctgacacgaaggcccatgctgtccatcttgaatacattagtgacttcttttctcttaatagtttgtgtgctgttggctgtacagtttagtgttgattttcctacacatttctttactgttaaatgaactcagccagaataggtaaaagcctgtcatttgattttgcttttctgtgatgtgcatttccatgtttatgttggcaacaaaatacagaaacctcagagcagctctgaccagtctgagaacagtcactcacattgtaataaccataggccacaccctgaagagaacttttgagtacacaggcacattgatttcaaatataaaatgttacttgtgagacccaatttagttgggtgcaaaatcggttttttgtagtcttggttacttggaaggattacttgagcctgcaagtttacaatcagcctgggaacatagccaaacctgacacctccatgcctttgaaaatctctctctctctctctctctctctctctctnnnnnnnnnnnnnnnnnnnnctccctccctccctctctctctctctctctctctctctctctttctttctttctttctttctttctttaattccttccttccttccttccttccttccttccttccttcctttctctctttctttcaatgagatctcatgtgtcttagcagtctaggcttaaatttcttcccttcctgtcttttcttcccaggggattagaggcacatggcacagtggccatcttattttatcagttttgtaatcttgaatgttgagcattcaagtaacagtgggtgccatttaaaggcatccacctgtttcttttctattaatgtcctctgagtggggtggaatctttgttgagtctctgctgtctgatgagagtaggctgaggttgcagcattgtggtcatggtggcaggacaccatctcaggccggtgacttggtttgatgttgtagatggttgaatgtctctgggctggtcttttaaaattgtttttacacattcactttacatcccactcactcccctctcccagttaccccccacccccaatccttccccatcccctcttcccttctcctctgagcaggtgggggcttaccctgggttcctctcactcaggcactttcagtctctgtgagactaggtgcatcctctcccactgaggccagacaaggcagcccggctagaagaacgtatcctctggactggttttgcattgatccaagtcttttcactattattaggtgttgtaatgagtagtattggtgtggcagttatgttcaattaggttagagtgtcttatttgtctagccaagaagtaatgtagttttagcaaggcttttgggcccagaatatggaccaacttgtgtttcttacaaaattttgggctctaaacttggagttgactttagaactctggtttcagttttcaggagacggataaggcatggcatggtggatgtctggcattggcagagctgggtagacgaggcctgttgctaccatccagactctcagagggtaagtaaccaaactgcatgaatctgcatccttagggctgctgagacttggtggggttcctcagtgtggctagccatggacaccagtgcttctatggaagggcatgccatatgcatatttctcaggcatctttctcatgccagcctttataatgtactaattatctcttcagcctgttgtagctgcatgctgtataaaccatgtgtgctggatttggagggtcatggacaatggtaatatttgattttcttgtatctagaaccgcctttcactcttgaggggtgcctagagctgtaggttgacatagctatggcagcagtggagctcagctttaggagagcgggtacagtgtagggcatatgcagaaagatcatgaacccaggctagctgttaggtcctggtgagggggagtcagaggatagtaagactgtggccatgtgccaccatctggttggtggacccgtccttgttggtggttgaaggtgccttatgagtggaaggaaaagaaatgtaacggcctgagtgtgctacagagattgtgcagggtgcagcttttgtctagagcagtggttctcatccttcctaatgctgcctaactttaatataattcttcatgttgtggtaacccccagccataaaataattttgttgctacttaaaaactatgattttgctactgttataaattataatgtaagtatctgatatgcaggatatctgatatgtgacccttgtgaaagggttgtccaacccccaaaagggatcatagtccacaggttgagaaccgctggtctagaatctggtggttgcatctcactaatgcccagctgtagtgtcagtattgggcactggaacacaagggacttctagagcagcattctatttagcctttctgcttttaaaaaagttttattacaataacttacataccgtatagtctacccacttacagtttatagtggtctctgacatatttggagttgtgcaacatcatgtaatttaacttcagaacattttctttgcctcaggctgaaattctgcactacagagcagccactcctaccctgctcccagccctaggcgctctggtcctctggttgctgtcctgttttgcccttttcagacatttcattaaacagactgctgtttgttcttttgtgtctgaactttgtgtggtttttctgatgatcgctgtgtggggctccattcctttgctgcggatggggtttctaccatatgcaaggaaacactgcttcttccttagtcttatcagtagaagtaaccattgtggttgcctccgccttttgactttttgagtaacgctgcagtggacatttgtttatgagtttctgtgtagatatgtgttaccatttgtcctgaatgttgatctaggagtagaaatgatggatcagttcaagaaacaggccaggctctttttttttttattcttctctcatacattatgtccgcaattttccctccctccactcttcccagtcactcttgctacttcccctctcacccaggtcaactgctcctctgtttcccttaaagaaaaagaaagaaggaaatagagaaagaaaagaaggaaggaaggaaggacggatggacggtcggatggaaggacaagcctcccagagatatccaccgaacatagcataatacagtataataagactgggcctagaccctcatatcatgactggatgtggcaacccagtaggaggaaaagagtcccacacacaggcaagagagtcccccacaggctagactcttgtaacctggctgccctgctctacattcccaccagctcttgggttcctcacatccccattggtttttatttttgtcttccctctttaaaaaagtagttaccatcgtatttgttgtgggatgtcagtcaccttaccatggcttggtttgtgtgttcccgatgaccaaggaggacgtctgaaactgctccaaagtcttgctagatggtgactgcttttatagctaggcctgcctccttggtcaggaattgcagccagtgtggcaaattcacactattttgtgaggtaggactgggcgtagcctttgggggagctgagaggacttcctagaacattaaggcccatgtgttggattagtcctttcctgaggtcagcagatcttttcagacagctcagctgtggaaacctcattagtgaggttctacaacatggctgtacatggaacctatactagtgctgcttctctttggtcttcttctatgggactagcgtgtatgaaatatagctgggacatatttcaggatcttagacatcattgatccatcagctggagtgaggacacgggtattactggtatcataactgagaagtgtcaagctgccatttaaaactgtaaaacatgatgtggattaagttagtccatgatctttctcttgggagttgtccttctgccctgcactgcctccatgtgaacggaacctcgttaaagcctctttttgtgccggggcatgctgtactgtgtcctgacgggggtagcatcatcacaagggtgacagagactctggaacacaggtgtgtgaagatggtaacagcaaccctgagcatcttaaggatggttttatatttttactttagacctcacaccattcctctgagagtggtcttatttgcttaaggtcatagctgagggtgcttcttttcatagccactgtgtactgacttttgctaaattgtcagaaaacaaaaacactacaatctcaacctttggaaattagaggcaagagacttagggattcaaggctattcttggttacagtgagtttgaggtcagcctcaacttcttcagagaccccgtttcttaagaaaagaaagagaaggaaaagcgcatgtgtgcagtgagaaacctggataagtgtggtctaggggaggataaaggtagaaagatgagcatgctgctagccagaacattcgcttttgtcccagaggacgtggggagcttcctgggtgcatgctgaagttggggagaaagtgacttgggggaggtcagatcggctttacacacagcagactagagtattgagctgagtctcaggaaggaacagcgtggtcatcttttaaagagttctgccaggttctcttcatgtatatatttccatatatatgtccccacatactgtgcctcagtttttattttgatctttgctttggtggataaggacgtaggccatcatcaaaggctacttagcctttgtttcaggccactcagatgctttattggtcctggttttagtccttttgtttctttggggacagggtttctctttgaaccctgtacactgtgaatattccatagggcatcatgattagcctgggaaggcttgtctagggttttggctatattttctctgtggttatattcgattggtgttaatattgtgaatagagtgtatacctgcgttcctaattttgtggttgattttttttacccctaagttttatgttttgaaattaaacatttttatctctttggatgcttggttaaaccgtttatctccttttctgctgtttttgttcagtggaggaccctgtgccttgtgagttgtgtgggctcctctttcttccagatttgggatatgcgctgccttcacttccgtaaatatcccagctgccatgctctccttctcactctgggatctgagttttcggtgtgtagctgtgctccatcctgtccctctggtctcttaggttctattccttttccttgagcatttttgtccctgctcctcatgctgggtgatttcagtttctgtgttcagtgattttgtcttttccttgtgcagatcagcccctgtattagttggtttagttggagttggtttgttttgatgcagtcggggaaggcttgccagcaggagtgcgaggcagccacagtcagcaagcagagaaagctgttggtgcttagctcactttctccttcttatgtagtctgggactcttgctcatggaattgtgcatcctacttttaggatgggttcctatcttagttaactcaatctagaaactcctcattgacacacccagagacttgtttcctaagtaattatggaccctgtcaagttgacagttatcacacccctctagagaacctgcatttcaactgttgacttttcaattttagaacttctgtctcttgggttgacattttgagtttgttcagataaggtctttggtttcctctgaacatttaaaaagtctttggtaattccgaatgtccggctgcttcagtggcgtcttttctcccgtgtttgtgttgtactttcctgttcctttcctcccttacaatttttgtttatgttgaaaacagaatattttgaatattttaataggagcctccagaagaaatccccctccacacatccaggcaagtgctcttaggatgtactgagtcccattgtgtcctctgtcccagtgactacaatctgtcctgtatctcagcatcagacatgatatgatagagtatctgtgagtgctgaaacaaagtagcttcctccctctagcattcttctggttgtcataaatgtttgattagtatccagagttctgcaaacattgatcctatcagttttggccagcttagcacttcagcccagaactcgtgtttgcctcactgcatgacttcatttaacaaggaactttcggatggtggtatggcatctatttgggtcctcttaagtagcaaatgccatatagaattaaacatacaacagttttgttaggagcatgcttgtgaaagagatgggggaggagacaggaaggctggagatctccactggctctgatgatacacacgtgggatgtctgacatttcatgtgccaggcgaacaggtccctgggaagggagggccatgttgaccaatgtctagaacaggtgggtggggccatcttgaccagtgctcagagctgcactgtttagttttagcatttgtgccattttgagctgccagacacccgagtttgtaagaaaatgaggactatattgtggcgtctctgactttgctactgggtgaattgtctgcctgttcttttttcctttgagggagtgtctgtgttttgtatctatctgtcatttcctgccctgtaaaaggtggtatgggaagaggacaaatcacagctgaccactgttgggattatttagaaagggtttttgatttttgttttaaaacataatttgagatatagtttacctacattacagttttctcatataaaatgtagttcagtggatttgggtatattacattttcattaaaaaaaaaaaccctcatgttaaaaatacgtaaacagggatttgttgctgccatttccaggcgtttgctcaatggctctaactccgttcatgctgttgggcaaccatctcatacccctgggtctaaatcatctgttgttccaaataacctgtttcccataccgcatgactccagtccacttctatcctatgttttttttttttttccatccttgggtcttcatgtaagtacaaagtgttacaatattttgccatttgtggctggcccatttcatagagtatggtgatctcaagacctgtcttggtgtagcacgtgcaagaatgtcctgctgtgtaagtgatgctgcagcgcgttcactctccccacggcccatctgctggctgccgtggagaggagacgagcatgtcttttgctttaagtctgtgtaatgtgtctggcactaggattactactaggtcatgtgttagttctgttgaactcatcttggaagcttgttttttgttttgttctgttttatctgtaatgtgaatgtagagaggtagtacttgggaaacaagaccctaggttggttttttttatttttttatttttaacgtagttgtagagattccttttgttttataggcagatagaatacctgctctagttgccgtgagtatgctgttgaaacttacccttggagcaactctccagggaggatgatatttttccatggtaggtctctgatctgaggcccatggtaccaatgtacagaccactttcctgcaggccgagcacacctcctatttggtagagtagattctcatggttcacccaggcatgggtggcacctggctaggttcttcttgtttgccatttaagatgacagaggcagtgggtgagttacccatcgtctatcagagcttcggggcctgagtggagggctgagttcttatgtgggttgagcatgccaggaggatttgcaagtgccagactttgggtcatgagcacgggctatagcgctccgttcaccgttcccctccttcaggcctttacttgttggggagtggaaggggtcatgctttggttgtttgccaaacatattggtgtatgtttggcaaacacacaaaaaaaatagtcaggctggaaagtaagataaattttgttgttttttgttttgttttgttttaatcataagagagtaagtttgggcttatatatgtggtggtttggatggacctaaaggcctttgctagctccttggatggaaaggtcttctcctgtcttgccaggtttaacagaggttttccctgcttctatgagtgggaaacctgttgcaccgttagaaatggtttgcagcactggccttatgtattccataactgttgttaaagaccccatctctctctctcatgttggtatttgaagttttatatgcatttaaccagttgcagagtgtttctctatttctaacatcatctgaaggtacaaagatagaaagaatatcggtcagcttctctgggcatgctctgttggggctggctgggagctgggaattgctggctgaacaaaaggggccgtgagttcctgcactcagtgcccaagtttgttctagcaagtagggtgaaaggtcgcctgtgtccagacatagtggaagggctgttgtggagtggaggagtggagctcctcccacgcatcgttagctgccagggctcctgatcttggcctccaggtactctgagactcaggactcctttgaaaagccccataggtgagggttactacatgcctggactctgtggctactaatttatttaccaatcccagaagcactttcatagtctcagtgctgcctcgactgtcggctccctcttcctgaatactaaggaagaagactctagagaataacatagagctgatattgatctttgttttatgtgttctcaaagttcacacatgagtttattgggaaattaacaggtacatcattttagggagtggaaagtgagcctaagtgagaaagtttgctttgacatcataagcaaatagaataaggtgatcaaaccttgaccagcaagcacttccctgatggaaataagttactctaaagtaacttaaagtcagcctctagatgtttgtggacggttcagttagaaataatcacaacacttcttacgtgtaacagttgatatttaaactgaagatgtttctggcatcaaaacacatagctatatttaatagtaacacaacaacacggtaaaagttttagttttgaaaaatagtacttgtttaaggtcctttctgtgagtctactcacattgctgagctagttctgtgtatttccctggtgtgtcacaaacatgaagtcccagtgtaagtcatccgtcttggagagtataagccactcagatttttttttttaacaaccagaagtagaaacaccttttaatatttatcttaatgtttacaaaaaaaactaaagattacagccttttgtcctttttgaggagagaagaaaaattgtatttataaaaactgacttgataaaaagtgaaggtaaactgtgggaacactggctggcccagcacttaggaggccaaggcaggaagatcacaagtttaacgccagcctgagcaacatggcaagacagtacctcctccaaaaagcaaaaaagtgaagttgctgcctggcacgtagtgtgaaaagcctctctctagccatagcactgagtgcacttgaggcctcaggatacccgggttcttctgcggagagtaagcactcttgggacggggtcattcagctttggctttttagttccttgctgggattttcctgtgtccctttgacttgtcctcttttgtcctttgggtctgaggtcacactgagcctccaggttctctgtagcactgagggtgggcacatcctgacgggtgggttcctggactgtgccttcctcatcggccactcggacgttccctgggctgtaggccgccagctgacagagagctacagctgccgtctgcttctgttcatcactgctgtcctccgtgtgcacgtctggggttgtcctgctgtgggccttgtcttgcggtgtctccacgcggcttgtcctatcttcagaaccctttgtctcagtctttggagtggcagcgggttctgcaccttggggtgggcctgggagggcgggccttggagcccaggcgttgcagagatccttcacggacagattgagtggcaggtcttgcagagtgtctgcctgggcgttgcttgcatacatgggtccatacgtggctgcagggtttgtctccagcttcttagagagattgaggggacctattctggagtggtcctctgggctggagggtggggcctctgtgatgaaagagttactgctccctgtctgggccggagggtcaccattcatggcctgaaggctagaagacatgaagagaaatcttaggaaaatgatcatgtaaagcatttggaacaagtgtgaactaacttggtgttgagcaaaaaaaaaaaactacattggagattttgaaaaagaaattctcttacctttttggagactctgttctgtttgcaggaggttgagagtgagggctttctgaacccctttggacaggtttgaaggcggtggggctctgctcagcttgctggagtcgctctagggttccggaggaggctgctttgtttgagaggtcacacaggccttcgaatgtttggcttgtttgggtgaagttggtggggcttggcctccccggggagcccgtggcagcgctccctgctcgggggctcattttggcttcttctgcatccctttgcccatctttagaaggatctttagcctcaggaactggacttcccttctcacactctgtgtgtttcctgtgggagcttgaaaggtttaactctgagggacttgaggctgggtaagccagggttgcatcttcaagcaagcgagagctctgatctcgggtgatgccagtgacagatgggagcctgagactgtaggagggaaatgcagactctggtctgtaaaacccataagggatcggcagattagagtggtactgctggaaaaatctgtagtggtcatatgttgatggggatgtgttcaagtgcttgggaattggcccagcaggagacaggaagtgtctttggtcttgggtcccatagacagacagcaaagtggtctcacactcaggcgtgttcccagtcaggaggtagggggagtagatggcagccagcccatgctctgcgtagaagggatgggggtactccgggattgcaggatgcatatagggggagatggcaccaaacccctttgtagaggagattttatgtggaaagtcaggagggaggaatggggagccagctttccaggggtaaccgggcgtgtggaatgcagacttggcatggaatgaggaggctttggtggtagagttggccagcacttcagtggcctctgtatcttctggccccctaagtctgtgttccccaactggaacaaatgctgaatgtctaaccccactgtcgaggcagggctgggtgctgagaatggcttctggtgccatttctttctgtagggctggtttctggggacctttgtgggctccccgagcctgcatttctaggttctctttggcatcctcctttgcagagccctgttgagactttggatcaaagctggagagtccatttaggagagatttggaagtggctggctttgaggtgggctctggctggtgagtctgcttaggatccagcgagctagatttgggacacttgggaatacgatcttgctctgacactaaagtaatggagtttttacagagaccgtacttcatgtgattgaaaagatgtgacttctcgttacatgtaaaaggacactggaagcatttgtacttgaagggctttcctgggggccgtggaatatagtgtggcttttttggtttccgttcctttaggagactcattatcctttgtgtttggactctggtctgctcggtgtgtggtcactgctgcctcctctttgaccagaatgtggtggctttggaggaggtgagtactgtcttctttcttgctgtgagtactctatttgaagccagctccatgtgctgagggcctaaccaggagagttccttccgtcaggcacctgcagctatgaggacagacagagactggtgtcaggtaaagggttagagggtcactgtctcactaaagacagactaggagcctggtgcctttagaaagcaggcgatatctgcatccctgatagtctgctctcctggctgccagcatcctgggatattttcttaagtctaacctgaaagacttgcctgggaccaagagagcagagtgtcagtagccagcctctgagttttggggatccatatcctgcaagcttgacttccccttggtccgtttgtttggggcttctgataggattctgtgaccagagcctcccctctgcatgctctgtgggagcggacacttagttcaatgtgctctggcgttgtttagctgagtgttccaaggtcctgcttagctatgctgctgctatattatgtgtgtgaatatttaaaataaaaaatatttaagacataggacttactctactgcttctaaaactacagaaaagcccattttatcagaaagtacagtgggtaaatgttacccactgaactacacccttagccctagtaagtagcatttatgatggcttaatacaaatgtgaatgctatatgtaggtcaactcagtttgcagttgttgttaggatgatttgcaagtcccggattggcttttatgtcttgccactcatcagtgtttgggaataactcatagatttgcccttcccttccttggatatataaaccttcttaagagaccagagcagcagtaaccaggtagagggaagaagccaccctgccccatgtgccccttgtacccagatcttacagtgtgcttcctaatccaaggctaagcacttagtgaagctgcctccctggacatctagggtgactctgggtggccttgggtagagggagaaggttgaggccaggctccttgatttgtacaggatatgtgaaaaggggaaggtctcctacttcgtatgctaaacacttaaaaataacattcagtggaaattgtttaagaaacgtgttttcagctacaaaactgagtttgtaaaaaaaaaaaacatgtaaagccacgccctcaaaacttagacacacacacacacacacacacacacacacttctgtaaaccatacctttagaaacataactacattcttatgattaagtcctcactcttgtctgtcttccctgttcccagtgtgtgtgtatggtgggcagtgggtgtagcagcttcagggactgactctttatctctacttatgtgcttcaagtttctgaggattctatcaggtttcatttggtttctcttctaatttacacacacacacacacacacacacacactattatatatataaaactatatctgccactgtggtagcagcaattccatcacttagggtagactaaggcagagggtctcaagttctcaagttcaaggcctgactgtgctgcttggcaagactttttcctcaaagcaagaagcagcctacaaagagctaaagttacccgatcatcagcatttagggctcttaagtagttgtctgggagagcagtggctcaggcggtcctgaaagtagtccactgtgagagtctgcatggcagtgagagtgaagcccccatgctaggaggaagctaggatcctaggctccttgcaggaggagtatgggagactgagctgtcaaagtgggtcctgcctggacttcacttttgctgtagaagctaaagtgaagacagaagtcctatgtcaaagctgatcatattaacacttagtaatagccttgtgacttttccttcttattaaaaggaaaaatgtaaagaaactctctgtgggcccagcgtatacctggagtgcattttccctgcctgcgtcagggagcccgagaagcctcccttgtctgactggctgatgagggcagctcgataagtcagtgggacctgtgctggcatgctcattacactcttgattctgaaggcgtgagaacctctgcaagtcaggttcccatggctgtataggatatgtcatggcacagatctgagagggatgatttcatcactagctgggagcatcatgatcagaatgatgacagttgcaaacattcgtcgagtatgagctgcttcccagttcctggggacagacgtgggacagtgccccgtgtgtcctgggcaggctagaagagcccctcaggacgtaaggaaataatgacgggccctcagagaagcagctgtagtaaacgttactgatggtttcgggcagcagtaagcgtgccactggggttaagtactgaacatctacggaggttaaataagtacattgtcatggtaagggtttcctgtcttataagaaagaggagtaactgaggaaataattattaccgagtgtgcgtgcatgcgtgtgtgagtgtgtgcgtgtgtcatgctatgtgaagttttggtttcagcctttgtcttttaatttttttggctgctgatccccaggacagtgagcaggctggctgggataggcagcagtggctcttgtgtaagggttctagagtgaggccatttcctgaggtttattaaaactgaaagggaatggatacagaagcaggctcggctgtaatcatttcagtaacttcggataaactgaccctcaggatttcacaattgctaattaaggcggagagctcactgcttggaggcaggtgtaaggcgggcgtaactcatctataaaactaccgtgttagagaagtaagtgggataaaattgatgcttttgtaagcttttgaatgatgatgtcagcctgtgagttctctgtcctaagcaagtgaggtttatgactatcaagaaataaacccacagccatgactgcagccaggcacatatgtctgtgggcatggaggcttacaataagtcctgtttggtcagtttatacctgctggactttgaactgtctggcagccgctggtgttaaatattcccaaaagcacacattgttgccaaaacaggaaagccaagaactttgactgtttacagtacttttgggtttatattcaaaggtgaagcttttcctaaaggcataagaagggtatgtggcttcccccccccccctttttttttttttaaggttgggcctgttactactttgggaatacatctctggaaggctatatgtgtagctatggctgtctgagaactgtagtgttagcatgtttgatactgaaacagtcccagaggaattttacttggcaccataccctcctcccttctacttcccatttgatggtcaggggggttcatgagggtgtcttcccacaggcactcagccctcatcaagggcttttggcagagagttgttctctgtcttccctggggaagccctgttctcaaacatgcctccccagacctcaccttggccccagacttccttctctgaatcatcttgcaatgcagcatacagtatgtacaataatacagtgacctagaaacatgtacagtatccagcttaagatctgtaagatgtgtcccaatttttttgctgacacacatcaggctgtatgacttgagacttcgatatctcttatattaaatgacttgactgcgttcagaaagggcccagggctgagagcaccttccacctgcccacagtgtgccatccgggatacctgcccacacacagagtgagcactgtgtagtttcgattggccacagggtcctgtttgtctttaaagcattaaacttcagcagtccctgagtgtggacatgtagtgtagttgctgctgtcaagacaacagtgagtggctggcatgtttttagaagtttctaaggggcttgcacttagaaatcagacaagagaaagaataatttaagagaaccctgataggatacaatagaggtaattacagctttgctttataggccagcgatgtgacgggccaggcagctatgtttgtcctgtgaattgacctgcaaatcaagacagtgcagtactattcctcctggtggtgtccagctgtctggcgcagagcctcgcaggtggaacgtcgtgaagggcatgctataattacagcactgtgatgtggcgttattgcaccactcaagggcacgccactgtcgtctacccactggggtgtcgcaagaacgagatttgtgagttttacttcatgtgggcttttgcagtagctggccgccgctccctcccaaactttctgttctttaagatgaaggtgaacttagggaggccatagtcttagaagaaagctgttttctagagtgtgtttggaaggaaggatctagaaaacaaatgggttgtgttgtgcaggctcacggcttcccgaccagcatggcaccggagctcgccttgcctgtgtttctgtaacacagcagtttaaaacatcagagagccttttctaatgcaaacactcagataggaaatgcaggcgtttctgcttaaaccaagtctgacttggtcagatttggccgattattcggtcgataattattttcatacagatttatccccccccccccatgtataatcttaacaaccaaaccaaaaacctaaacttagttggtttcttgtttttgaaaggttttgtcaaagcagcagttattttaaatttgaaaagctttagatgttaaactagaaatgaaaccaaacagttgtatctctctctatatatgtgagttttgcctcttttatgtcaaaatttattgtaatttctttgaaaagtagggaacaattaagcaatactataaatccatcttttgtttttaaaataaattttatagcagaaaggatggcttgatttctaaataagcttgctcatagtcttggaataacgtatcagccccattaggagttctgtaattgtggtctgcatccccgagatgcacctgccgggttctgagtaatccttagggaatagtgagagcaggaaagagcagacaacagcaaacaatttacccagacagattcctcaagacacattaaagagtagttttgaaagaaaacttgaagaaatagtaagcacttaccaaaggtgggcagtgctgggatgcggagtccttcttctgtgcaaggtgctgaggtctgaggagcaggatctgttctcacgctggctcgctggctcggtgaaactggagccggctgttccagtgggagggatttaagtgtaggagttgagccctcggggcgtagagatgcacctgatattcctccgcctgcagctacaattcaagtgtttgcacccactgagctccacgtagcctcactgagcagggatccagagagtcctgtgccactccaggtgccccacaggactctaggttcacggtgtgtggggtcctgggagggctgcccagttgcagaggaatcaggatatctggatgcagagtctagtgctgatgtacttgtatcacaagcacttgatgctcattaaagactcaggtgtagagcttcgcttgctcgcttcagtactccagcataggaacatagaagcagagaaatataactttgtcctgaaacacatgtcaccgatggaaacatgacaagtgtttttgctgtgatgcccagagaagcctctggccacctctgcgatttctacccttctctaggagttttgttgaggtcaccgggagaactagggtggcagagaggatgctaaccttgctgccttgtcacagggacctgccggaacatgcccagggcctgtactggttgtggagctgacatgtgctgtctgtcatttgggcgtcggcagtgtgttcaccttcacaccccctctttaagtaataacttagattttaaattttggagccattttaccatcccctacccccaccccccaccccacccccagtgtttacttgtttgctttgaggcttgtgcgggctgcagtggaggctggaatgtgatgtcagtttggggacagggaaaggacactgtgatagctggctaggctcttggtcatacctgaagctgctggcaagggccagcacgcatttaagactttagattttacttggcttcacctttatgtttaattctttaaaacctagtttagttactttgtctcattcctaggaagagtctaagccaaatgctcagtcttataagaacagcgagcagttccctagggtttctcacatctctagctgagtagcaagttaccttaagctctgctctgagacagtcaccagtttgttacagtttgttacatctgtctgggcggaggtggtctgtactggttccggttcccccaggcagtgcttctactctgtgggtgtttactgaggcttcccggtatggtgaagtcctctagctactctgccactttccgggactccacagtagagggtagcctttggacatctcaggacttgaagagagcaaaatggagaggcaaggctgagaattatctcagtgccgtttctgctgcacctctttctggagcagttggggcaggccagcttcttaggaaggctggcagggacttgctgaaagtcttaccctttcccctctgctctcactcaccttttgctgagagttttactccttgattctaatttgcaatctggacttcaggtgtttttaatggacccccttaactctttgcctcccacatcctcttgagggccatccctcctccctttgtgctgccctctcacttgggccagtcctatctttgctgtgtcatagcttctacatttccttccctcttcttttttgtatttcatagtcagtgagggcagtgctatactaatccctaaaccctccaacagacgtattggcctaatgccactttacagtgctttcttccaaggagagtcttcatgcagcaggagttctgatctgaagggtgacatttagtgagcatcccctgttttgaggcccagccttgccaccatgtccctacatggcctggcatctgtggcttgatgatatccacacgctctagatgttgatcaagggcaatctctagctttatgagagagagagagagagagagagagagagagagagagagagagagagagagagaaagagagagaaagagagaatatgaatgtttttcctcctcttctttttccttatattctcagtttcctttactatatcttctagtatttctatgaagcatattccacagtcaggatctctggtttctgggggggtttgagtagccctgctttgataccttgttctaactgctctgaatagttcagtgagtttcttgcaggataggagggcttggggactttatgtagggattcaactctgtctgctgcagagtggggtttctttattgctgctggttgacagaatgatcaagagttgatgatagccaagaccttgggcttttaataggttctgttgtgtaggtcagggactggcagtgcttcctctttggttccccactgaaggttcatgtgcttgtaacctcctagtggttctttctgttgctatgttccctgccctctttgacttctttgcttatgccttagaaagtgaaggatggggctggagagagagcttagcattaaaaacactgggtgctctatcagaggacctagattcaatttctagcacccacacagtggcttgaaactatagctactgtcccaggggatctgatgccctcttctggcctctgaaggcaccaggcatgcccatgcaggcaaaacacctacagataccaaaaagaaaaaaagaaaaaaaaggaaaaaaagaaaaaaaagaaaaaaaaaagaggaggcctttcttttgccactagtgaggtctgaacccttgtgtttggtctcactcctctgcatgacctaaatgtcttgatgaagtttctgagaagtaaaatcttagggggtaggactgggagtggcagttggcatttcctgagcatcttccatgtgggtccttggtgctgagtggtacttgcatcattccctgtagtcacaggagctgttgtgcacctgctttataggagttaaatgagcacagagcggttaagtaacttgacccaggtacctagtctggtaggtcacagtttcatcatgtgacatgggaggtaagatggggtatagagtgggtgtctggggcagctgccatctctggacagcagcatctcaatcgaatgcagacaggtgctgttgggtatagatagtgctgtgactctagtctgctgcatcagactcttttcctgggtccctgctggagccatctgtggcacacttccctgcagggtatggaaggcagagcagtgtgttgggttagcctaggtactcctccacagcacggcttggctctgagctcacttcctgtcccttcaacatctctttgcctgttcttgggctgtcccctgcagtgcaatgcagggctgcgtaatgtgggagagggtcagcacaggctttgccaggcctgttgagtcatttcacacagcagcctctctcacaaaacatttttgaagaaggaagggaagtcacttattttctgacctccttacaaatagtcacaagatgatttttcctgtaattttttgtgctccttttgtgaggaacatctggaaagtaaaaaggaaatgggaattgttgtagtgatgtcacaagtctggtttcagcttcccagtgccctgtgatgccccggggcagttggaggcagcaggcagctcacactggggctctctactctggtctccccagaacttgagttctgtgttggtgacatgattgggataggagtacagggtccttgggtggcagaggacaacagcagctccatcttgcccagttccagattcctggggcgtgcacatgcttctgcggtttgtgggagttgtgcactcctgagctttttaagaggaatagccgaaggcccagggcctgtcccaggttttaggagtctggctttgtttgaccttgccttcatggcttctttcccattgaagagggtatcttttaggggtttttaattggaattcctttcagttaggattgtaatagtaagagactatccagagaaacaaatgattttgccaagcccttaataacctggtcttgagctagctctgaggtgatggatggcccttcccatcatgccttattctgcttcccaagcctccctcctattccatttgtgttaaggtacatcccgactggactgtgaaaagctctgttcctagtggtctggacactttcctagacttgggttttggccctaggcactgctcttgttttgctcaaagccacaggacagacctggagctgtagcccagggggcaagtgttgctgttcagtagacagagctgctccgagcttctgtaggcccagcggggcatctggccaagatgggggatgatccaccctcctcctcctgtgctcctactgcctagaacctctccaggattggccagaggtgggctgtgatcatagattgctccactgaggcctgtgttccaaccccacagccttaggggtccacaaggcagaaggtggacatgttagtggagcccttagtgctgccgtacagactttaggactcaggtgtgtccaaccttttgacattggaacacaaaattcttgtctacagagttcatgctcaagaacctgcaattgaattaccaaaaacaaaacaaaataaaataccgaagaccacgccccctaaaaacaaaaacaaaaacaacaaaatcctctcaatgttttaagtagctttacagttttacgtggaggctagggctgcatttatcactctccctcaaagtgtgtgagaaagttttattgttcgcatgttctccagagagagggtggatgtagagcttagggaacctgacggctcagaggtgtgacaccgtcacttaggttttaatttcttgattaaggtgatgccactctaggcttttatagactggagatactttattttgttgagtacgcaagatactttttctacaaaggcccgcaagggtgagtggtgtctctgagtggtgccctgtggtgggaggcctggcagcaccagaatgtggcctgtgggcagcttgtgtagggcgcatgttctcctggctcttctgcctctgagctgtatggaaccaggttcctgtggctcttgaagagccttcagggtgaatgattgagggtgaaaggctttttgcttgtgtttgtgtaaacagtccctggttcttcccgtccctcctggtgttggttggcgccaatgctgtgtctaaagggaaacctgaaactctgtgcgctgcggctcgctttgtctttgattgggaaattcagtttgagtttgtgaacttgggccaagtcttgaggattcccacagttttcctcacctgtctgttctcccaggccagccgtgcagctctggggccttgttttctggccctgcttgggacttgttattcttctaggtgtagctcaagaattagatctcctgggcacatttgttctgctcacagctatacacagagggtagttaagctgaacagggccaggtaacgttaaaaagtgacgtgaagatgatttccttttctgtcctcatgctacacctgtaaccgtccctgtaagaaatagggtagtaatagcctcaacccttcttccctgactggtctttccagagtggagtatctgctgtctgttgggtcgtattgtttaccaagctttatcttcaaggttcctctttctgcttggctgtgtcctgaatccatcacattcagtttgttgcaatgagcgccttttagcctcttactgttttcaaagcattcactttgctctgttttctctcctcctttcgaatgccatgatcttcgttgctgcttttcttaactttgtagaccaggctggcctcaaactcacagagatccacctgcctcttgctcctgggtgctgggattgaaggtgtgtgccaccaagcctggcaatttcatcttttatttaagcatttcatatagtgttacaaaattgttcttttgtgtatgcacatatctgtgaatgcacacatgcacggacatttgtataaacactagtgtgaagagtctagagaacaatctcgggtgtcattccttggacacttttcacctttttcttaaagattttatttttaaattgtgtgtatgtatacaggtgcctgtagcagcccagaagagggtgttggatccccacctagcatgggtgctgggaccggaacttgagtcttgttcaagagtcataaatgttctaaacccctgagctagctcagctctctggccttccactgtcctttttgagacagtgtttctaattggccaggagcttctctagcaggctagcctgactgtccagtagtcccttagcattctggctgcctcatctcctcagcactgggactacagtacatatcactaggcctggccttttttttttttttaaacatggggttctggggattgaactcaggtcccctcactcttgcaaggcttttctttaccgacgggactgtcttgcggacccacggaatcagtggcatgtggggtgtgtagtgttgcacagacgttgcttctctctggctccatcccaatcagttgccatattttccccaacaccgaagaccgccagtttgctttctgtctctgagttagaacttttggatctggcttctgtcactgaatacaatgaatccaaagctcacccatgtttcagaacatcattcctttttaaagattgagtacagtgatgtctgggttgtttctgtctcttggctgtcataagtggttttgccgtggacctttctacagcagtattggtccagtgacagtgccctgcctatcaagctacttctcatggcacagtattatcttatgtctctagtagtggtgtaccacaattggttccttctggaaaaaggaagccaacctttatacccaatctggcgggtctgaaggagtatgttgatgtgattttggcttgcattttgcctcagtgacaatgatcttgagcatctatctctcacggatttgtggctgtgaatttgtttgggcaaatgtctttttttttttaaagatttatttatttatttatttatttatttatttatttatgtgagcacactatagctttacagatggttgtgagccttcatgtggttgttgggaattgatttttttttaaaggacctctgctcgctctggtcaactccacttgttcagtccctgcttgatccggcccaaagatttatttattattatacttaagtacactgtagctgacttcagatgcaccagaagagggcgtcagatctcatgggtagttgtgagccaccatttggtcactgggatttgaacttaggaccttcggaagaacagtcagtgctcttacctgctgagccatctagccagcccacaaatgtgttttcaatagatacatttcttttcagctgggtctaatagcatatatgttaccatctcagcactcaggagaacagcctggtttacctagtaagataatgtctccaaagaaacaaacaacaaaaaacctaaacaaaataaaacaaaaccatcagcccgtacctggtgtgtatgtgtgggtggaggtgatgttgagagacatttgttttttttgagagagagtatgtttctttttttttgggtttttttttttttgtttgttttgtttgttttgttttgttttttttctgagacaggatttctctgtatagcccttgctgtcctggaactcactttgtagatcaggctggcctcgaactcagaaatccgcctgcctctgcctcctgagtgctgggattaaaggcgtgcaccaccacacccggctgagtatgtttcttgaatgaccttgaatttgtgatctacctgccccagtctgctcagtgctagagttccaggtgtatatatattgtcatgcctggagagtgtatatagtatggatagaaaacccttactagatgtgtgctttgtagatattttatatcatcctgttgctcttctaataagaaaatacttcccttggcagtatctctgttaacatcaatatatatttaccattctctgtagtgtcctttgcttgggtggttttgtgtgtgtgtgtatgcgtgcatgtacagtatgtatatgatgtgtctaaatacatgcacacattcattaagaatgggtttttagttgggcaatggtgacacacacctttaatcccagtgctcagaaggtagaggcaggtggatctcttcagtttgagccagcctgtttttcagagttaattctaggacagccaaggctatacagagaaaccctgtctcaaaaagggggttgggggtggcttttaactgggcatgatggttctcacttttactcagagcaattgagagtgaatttctgtgagttcaaagtcagccagggttacatagtgagacctatttcaaaaataactaaacaactcccccaaacctttagaagtgtctttaatccttttgcttttatttggcaattatttagtcagattttgtattttgtgtgaactattattgatgtgttgtccagtaaaggaaagtgctagcatgtcaaggcagtgcgtggcccagttactgttgctcatgtgtctgtaggaaccatgtgtataacctccctacttgtgttacatggtttgttgtgtttgttttcgaaagtggaaatcagtttagggccagacctgcctgacctgtgatacttctgagcatgggtgatagtatcttggctttgcagtacactcagagtgcctctctacccacatctttctattattttaaacactgtgatggtgtttatgccatttgatgaaaaaaatttaaatcacatttatttttattttgtctttaatgcatgtcatatcacacatatggaggtcaaaggacaacttttgggtggagggtttctttccttgtatcatgtagatccctgggcagattgtcaggtttgagacaaatatctttacctaccgagccaacttgctggcccattgatgaaaaataacttgaagagaaatcttgctcccaagtcacaacctttcatttacggagcttgcattcacactgtctagtcctgtctggggtggttgtggtgatgtgtgacccactgagtttactggggagttgtggagctgattttgccggatgaagaacacaggttctagcagttcaggttagctgtgacagcaggacactgaaactgctgcacacagttcctgggccttgagtgctactgcacttgaaagccattcttcatgtgcctttgtgggagttccatgtgttttgttctctgttctcatttttatgcttgctgatctctgttgtgtgaagtgtcagttgtgaacagactgataatagttcctgatgcccagtgcctgctttactcagccatattgggcttatggggataaagggagggacttgagttacattgagccagtagataagagcagaacttggcttctccatgggaatccaggcttggtctttggtcttgagtctaggtgtaatgcactcacctgtggccccataaagtggcagtgtcttcggggctgtgtcttccatgttcctcagtcttttgttactgtgacaacgtatctgacagaatctaagaaaagatttattgtggctcagatttcagatctttcagtccaaggttggctggacccattcctttggctcaagatggcagaatgtcatggtggtgcaagtatatggagaaggaaggtatagcttgcttcatggtggccaggagggaggaggaaaggggggggggtcatttggctcctgaatatctaccccctcactgacttactttctctaaaagcttctacctcccaaagtttctcttcttcccaataatgccatcaaagtaaacatccatcaatagattagtccattaagtcagcacccctattatctggtcaactctcaatgattggctccaccagctgggaacctagccttcaacacataaccctttgcattcatagccatcctcctatagtgacttagttttccaaagaaaaatgagtgctgtgaaaaatgagcatcctgcctgtgagctgttcctgcagatggtaggcaccattttttttttttttaatttttaatccagcccctgtagtgaacacaagtaatgggggttagaattcgtaattgcagataccaacagagcatcctttggaattggtagtcaaggctggctgccaggcagtataatggtggaaagtctgagacttacttagtggggctctacctaccaggtcatgaccaggaaaggtagagacatgtggaatgatgacatcagaacctctccagttacttagttgggtgccaggcttgtgatgaaaccatgttagatgtgccctctgtgaccttgggctacttgcttctcctggagtcttgtgtatcttttgcattgttgccttgcccatctctgacactgcagtctcctgggatcttgctgtctatgaaatacctgtgatgttcccagaggctagagccggggtcaccatcttgggccactggtggcctgggccttagggctggggaccctggctgtaagtcaggtagaactggtctcgacttcctgggttagcctttaatcctccaggacgctctttttcttctttcatgctgctgtgcttgccactctgtcattagttgtgggtgtttctgtgccagcagcacagcatcagcagaggagcacacccttggtcctggaggcacctcctgcttcgtggttttgccatgccatgtcctccttctgtggtggcctgtggtgctggtggtagtaggcaggaactgacaggcccttgcctctgtgacagctggctagggtgataacaaaaggaacctatggcagagaaaaagggagccaacactaggtcttgttggaaatggtcactaggggattctaggagtgtttaactggcaaagaaccagtaggatcacttgaaaaatgactggtgtaatcctgagtattaatctggagggccttgacttggctggaaggcagcacctgagtggctttgaaaggcagcagatatactggctgactgatgatagagaaggtattgagtcttttttgtcagccttgtggtctttttgtgtgcctttgctgggtaccactaaactcctgtcaggagccctaaccacaccccagagaccatgtttgttgaggtacttgtgtgcttaggcaggtgtgaggagcatattcctctgccctatgttgaggagtctgtgttctgtttccctgggaggctgtgctgaccttgcttggctatcccaacttgattctgcttggctaatacaggatggggcacatgtgggtgttggcatgtttagtaatggagaacttagagaagcagaggtgcaactgtgtggactccctgctctgggcatgtgatatgaagcctgtggtgctgtgtgtatgtcctatcatgggcatatgaaatggggtctgtggtactgtgtatgtcatggactcgtagggtggggtttttgggggctgtgtgcatgctctgacacggggcaggtacaataataaaaagtttgtggggttgtatgcacattctgtgaagacaagtaagatggaacccaagggacaggatgtcttgggagactcacctatttgcctcttagtccagcatggaagggaaacccctcaggagcttattttgggagaggcctccagtcgtcttgtctaggccctaaattcaggcctcagttggccaatagtggtaaagtggggtttggtgggaaaggaattgggtgttcccatggacgtctggctttctcctctagcctcatctgtcatctcttgttggccagttgctgtcagagcatgtgacagcacttggacaccatatttcattagttgcagccgcagctcaattttctcctctaccaaaaaccttgtgatatggagcagcgactcgcatttgacgatgactctccattctggtgaaagggcggatagcatagacctgttgtgccgctttggtggcagctgctacttctagggtgtggaatatgggtgggaggtggctgtaaccttggactgagaggtaggcactgctgccttgggttagctggcttgtaagtaacccctccaggtagggtgggtgctccttctggagagacacacacaccctggggaaagtgcaggtgtcccccaagggacagaacacttgatttcccccttgtcttgaaaactttcatggtcaatcttcgtatcttctgccaactctctggaatacatggggacacagtgaactcttgctgcctgtcctgtcacccgaactgtgtgggctctcacacaagttgttttatttgtttgcttttgtttttttgtgtttttttaaagacagggttcattcactggctcagctaaaccagaactcataggaattgatctgcctcgtcttcctgagtgcaggaattacagtgtgagcttaagcctggcttcacatggaggttttgccttgcacgctgggacaaagctctgtggctgtattctttcagacatctttgaatgtagcctagtgggtgttttcttgttgtcctggatcccctaattgctcgccaatgccttctccatgtcttccccagtcacatttggagagggagggcctctggcctttccatccaggcaggtgctaggccatgctcagtcagtatggcttttcagagtcctgtgcttttcaggatatagtgtcagttctttggggctcttataacaaaccagctcatactggacagttaatttgtagacatgagaaatttactgtttgtacccactttggagctgggagtcccagatgaagcagctagcacattgtgagtctgacagtgtccctttactcacacttggtgtgtccttctgtgaggatgggctttagacctttattaggctaccttatcatacaccattccagtttttggtggggacttcataacctgaccctaggtcacattgtaccaacactttagtgatcatagttcaagacacgagctttagagggacacagctattctaagtacagaacactgtttcctcacgccacttgtacacaggtattctgtgggtactgaatgtgacatcgttgtcatacctgtacaaatgcagcctgtgctgggctcaaggcattgtttgtgtatacaggtgatactcaggctgctctttggcgcttcttaggtgaactaccatcttgtacaccccaggcttttgcttgggtctcagcttggtttgacttctgtgctagtcgttcttcattgctttgacaatttacctgaggaaagttaagagggaagggtttgctttggcttatgataccaaggtatcagaccgtgatcagttggtcccgtggtgtggtgcaaaccatcatggcaaagcaaactgttgtgctataccaggggccaggaggagaactcgggaaagagtcgaatatatatatgtacacacacacacacacacacacacacacatatataatcttttaaagcatttccctagtggctaacttcctccatttaggccccactggccgtgcattgtgaggtcatcagtatccattgataaagttagcacccctgtgatcgatcctttcatttcagtagtgccaccaagccttcagcaatctctgggcatatgcttcatctccaaactgtaacaccttcttctgctcttctttttatttttcattctgaagcacttaacaagtttataagagtacaaagaagtgttcaggaagacccggtggatctttcagaattacagtgttggtttgggcacaacacttgtagctagcagagattcccagatgagtgagtgagagtgtgtgtgtgtgtgtgtgtgtgtggctttatagtgtcaccataagacttgtgttccctcagtagctctcccctgtctccctctgttatctacttccagtcacaccaatcaggaatgttgcgtttataggtgccccatacttcttactacctgttatatggatttcatctcattctccagtttatagggatagaagtggatgtggtcatttcactgatgaaatgtcattgttcccaacagaatctgctgtaccacccaggaggctaatgtaggtggggtgggcttagaatttctgaagggtccttccctagtgagtcttaatttcaagtggaaatgtcttctcctgtgaatgaatttcttgggggtgggggaagcacgtttggaataaagggcactgccaaactggtaactgtgtacctgcttgttggagtttctcatgagatcttcaggacacctggctgggttgtatggacagatgaaccttggctcttgactgtatagttggagggtttctgggacccaggtgagtacagaacctttttctggattaagtgtgggcttaatgtaatgacctgcttggtaggtagaccccccccctgaagtgcctttggagggtacagagccagatgatatctgagaatgtgttccctgcagcactgggtgtgggctgagtcgtccctggcccttcaagggcaggccagatccacaaatctgcccttccttcccacacagttgggattccatggtcataggccagatgctgctactgctgctgctgctgtaggctagtgaggggcttctggaggcattcttacatggcctgtgggaaattaatccagatgttctgtagatcattcttcctatcttcagcacattcgaggggcatttttcctgagcaagttgaactacattcttaagaacagtacaatggctgttggtacaaggggcaggtcctgcagccacacctgatctcggaaactgggcccctgaggctcaggcttggtgggcaggcttctgggtctgagtgtggctccactcgtgggatgaggtgggtcaggatttgggcattgcttgggagacactgctgctccctgtggtatgtctgtctggccatggccagtattttacctgttgttggcctcctggactgcattagaatagttgattttttcatactctcttctcaggattgctcacaccactgtacacctccatctctgcaagttctttaccattgagtttgagttgggaaggtcgagcagagcctggggtttgcaccagacacacctcagaaacctgtacaatccacgattgcccaatgccttaacttgttttaaattagtatggccgagtggctgtcaggagatgtaaccgtgtggtggtttttatgggctgcttgtttctgcttacgcagatgatagctgaatctttgtgtccctggcttacaggctctacagaccctgcagtgaggaatgcggagctctgggggttaactcactgctctcacctggaggctgctgcttccttaggcagcctgtgttaaacaaacgacatgctgtctagagagaagggtgtttaaattaccttgctggactcccaagttgccaaaaggaagccctctggggtatgatatatatatttgacatgcatttgcagtgtgtaattggaaccatgagaaaggtttttgttcaaagctattgaacagtttccttattttaaacctgttgaatctggaaagagctgtttttgactttcagtctgataatgattatataaaggttgaaggcaaagagtttcttgttccaaatcaccatctccctcccctgagcccagctttgtgagtgcccttgtaaccatgaaagatattctgacttctgtttcccagatccctgaataccagagctggaaactcaatgtcttcctttcacatggcagaggctggacagcccaggaggtcaccccccccccccccaggagcagcagacctaggcccaacctgtctttgagtgccaggctgctactctcacaccttgggatgaatcggaggcaacagtctagcttccctatttttctgttacaggatcagccattgctgtctttcccacgttgtcctttctacaaatcagttcctttccagtgatccgtatcatagcatcctgcccttactaggccagcctccattcaggagccagtcgttggtggtcattgcctcatgccatattccttgttagctcctggtgtgtgctgtgcttctgtggaggatgcttttaagtatctcagcacaagaaaagccaggatgctgtccctgaagactgctgactgggctgtgggccagaataggggaggactgtcaggtctttgctggacagcattggcacctatgggtgcctgtggggcctgaggccctaacgagctttatttcctgcttttctagcttagagttgtggaaggacacaggcatgagagtctcagcatagtttgacatctgaaggtcctggctgtctggagacaggcaagatgtgagtgggttcttggagcctgcaactcctgtggtctctcagatggaatgggtagttagaaccatcaggtatcctcccaggcagttggtcctctgaacagtaaatggaattacactctgagaaagtccaccaagacatacttttagtggattcagacccatcacttgatttccttgcagctggctatgtcaacaagtccccgagaagggctagtttcccaaattatcttacttcagtttggggacagaaacctgggtgctgtggctgggctgggtattgtggtgtgggaggtctgtgtttgcctgttggggttgctcgtgggtggcaccagtttcctggcaaggtgtaggagagatgtgaagtggacatggagagtgctgacactgccacttgcagttgtctgtctggaaattgattttgtcctgtggagtgataagttgacacttagagaacacatccaggtttccctgaggccagaggcttgctggctggccttgcccagagcatctgggctctggtgcctactgagctccagggagtccagctggcagtgactctacgcatatggatgctgccctcccacaggtgccacagccaatcttcttgacattgtttgctccctagtgggcaacctgttaattaacagagttgtggattcgagctatatactagtaaactgggagtagttccgggtcagctgggcctgtttcaatgaacagaggaccttttcagcattgcagattggatatagttcaaattgagataactgtagatataatttctaatccgtagccctcaaggtggttgtcttttgctaggttgatatttaaccatcagctccatgtttggggggaacatcaagtgtttacaggagtaatgaatagtctgtcagataactgggttcagcttctggcttcctgctggtctgcttcctgctcctgagagtctgcctgtttcctggggtgcagagaagccttgtaggataagggagtctctgggacatagtctgcgatgggaattctggcagagtagggggactgtaaggctaggtgggaactggggaggagttgtagggatctcaagaatgctgtgaaggagctggcctttgtgatcacacacagagtgcctctggaaagcacgggaaatggggctgggccgagctgacagagtggaggagctgtttctgtggatggagctgactcagagattggctttgaagaggccaggaatagctggccctacactatgcccaagactccagtgtggccacttatatgtgaaactgctgggaatgtggactctatcttggacatctagaagctacactcacattcctaatgctgtgatatttgtcaggggataggccttatttgggggttctcagcaggaccagcttaggtgactcctcatcttcatgaggactcactacatcccacattgttcccttaggatgtccagggcctcgtgctctctctctcgcctgtgcacatttttacagcctctgtgaaataccacggctatgtgaaatagattccattgaacaattactatttatataggaaaatttagaagcagaaaggcagagatttggttttataacattaataatgacccttcagggcttttgtttgtttttggtttggtttggtttggtttggtttggtttggtttggtttggtttttctttttgccaatatatttctaggtgctattttctggtggataattgcacatgcaggagatgggcacctcacatgcacatagctaagtgctgcctctcttcacactgtttgtagacacaggcttggtattcatgcgtggtgaggatgtagacagagcacaggttctgagggtggcgtgcatgcagtcctagaagcagcatggttctgagggtggcgtgcatgcagtcctagaagcagcgtgctccatttatcttgcctttggagaccctggacactcacatgccctttgtgtctgctgccggtatttgactaaatccttgatttatctatcagctgtgaatcctcccttggtagccttcagtgtttgtgtcgagcttctgccagtaaggttaatcattgaaccccaaattgctttgaaacccccgtcttttctttttctttctttctttctttttttttttttttttttttttttttttggtttttcaagacagggtttctctgtgtaccctggctgttctggagctcactttgtagaccaggctggcctcgaactcagaaatcctcctgcctctgcctcccaagtgctgggattaaaggagtgcgccaccacgccctgcccccttcttttcaaggaacacatagctacagacactgtctgagctatgatgccagcaggaggctcctctgtctctgtaggtatgacactggacattgaccccagggccacacacatgcaatgcacctaggttctgtaccagtgaaccatattcctagtcctcaaattatgttttaaacacattttaaagataccagtgagagctgcccagtgttccttactacagcacggttgtctaactgggatcaagaaattgagactttcagcatgctcttttagaaaagtctacttagtgtgactttaaaagaatagcctatctttgcattgtaaaaatcaagtttttttcttaagtttttctctgttgctattttccattactactttttagaggcttttaaaaattaacaattgaagctgggcggtggtggcgcaagcctttgatcccagcacttgggaggtagaggcaggtggatttctgagttcgaggtcagcctggtctacagagtgagttccaggacagccagggctatacagagaaaccctgtctcgaaaaacaaaaaaaaaaaaaaaaccaaaaaacaaaaaaaaattaacaattgattttcttataaaattaaattctagactgtcgagatggctcagataaggccacttgctaccaactctgacaacctgagttggctgcttggatctcatatggtggaaggagagaattaattcctgaaggctgtcctctgacctctatgcctgtgccacctgtacatgcatccaccacgccccccctcccccacatagtagatacattaaattcctttatgtggttcagaagtgtaatggttcggctttaagacgtgtatacatcttaataagcagctctttacaaagaaatgaatatacagaacagaatatacagtaacatttgtttttcctttttctgtggtatatgtgtatgtgtgcacaggtgtgcacatacacatgtgtatttgtggaggccagggtgcaattttgggtgtcttctatctctttctactttatttctaatataaggttattcactgaatctagagttgcacctatttggtgagattagtcgtccagcaagccacggggctcctcttacatctctctgtccagagttggagtgtgcagcactatcctggatttttctgtgtgtgctgcagatgtaaacttaggtcctcgagcttacgtggcaggcactttaccaatggagccatttcctcagccctgattgcaccttttgttggcgcacagctatagagtatacagtactggatgtcaaaaggacattttcataaaagtgcataatatacttttactgagttcctcgccatatccccctccttttccctccttttagctcccttctgttttcccaaatggtttgcttctgctttcatgtcatgtgtatacatgatttttgcataaaatctaggatgtacaaatgagagagaaatgtgatatttatctgagcgagctaatttgtttgatgtgataatctctagttacagccattttcctgtaaatagcatgatttcatttgtgtttgttttgtatgtagagtgtatgtgtgtgtgagagagagtgtgcgtgtgtgtgcatacacatgtgggagtcagaagtcaatgtcagatatcttctgttgatgtccatcttattttttgacagattctttcactgatcctggaactcatagatttatttggctatgctggttgtccaatgagctccagagatccccttgtctccttgtttaccaagagctggggtcacacaccctggcatgctcggcttttatataggtgccagagagcccatgcagctcttcatgtttgcagtacagatactttattgacagagccccctgatttgttttcacttatggtggaagaaaacctagttgtttagatgtactatatttcctttatccattcttctcttgatggatacctgggttggtcctataatttagccatttgaacagtgctgcagataaaccctgatgagtgtgttgggcatggaggcacacagctttactccctgcacttgggaagctgaggcaggcagaggtcgagggtagcctagcctgatttacatagctaatttgaggccaaccaactagagctgcatggtgagacactgccttaaacaaataaaacaaaaagcattggtgagcaagtctgtctgtgatgtgatgacttaagaacccttcaagtaaatactcaggagtgctatgaatacaggaataacttaatgttccagtattcttgcatacatcgcctctttgtatcaactgctgtgtgtgtgtgtgtgtgtgtgtgtgtgtgtgtgtgtatgcgtgtctgtgtttgtgtgtgtgtctgtctgtctctgtgcatgcatatatgtcaattgcctggttgtatatttttactagaaccaaagaggaattcatatgactttatctcttggttactatagacactttctatggtcaaacaagcagacagtcctgtacatacaaggcaacctaggactggctttccagacacatgggtgtctgtggaggttccctctctggtctaggtctggtgccttcttctctctctgaggttgttgaagtctgtgataagaagatttggatggtgtcctatggtttcacatccattcgcctcacttgtgggtgtcaccagtgctccccataaacacacggcccttcctatcctgctgtgggcttctaagttttgtactctgttggtgtggccacagatttggcagcctagctatggttattgttctgaagaactgtcatttctttatgtgattcttgggaaacccaaatttcctttgtacctttgagctgatgggcttgcttccctttcagggttttttgtttgttttgttttgtttttcctgagcaggttttgactcctgtctgtgattctgcctcatggtttgccatcaactgctctttgtttttgtttcctgccagttgtcacggtgatcctgaaggcccttacctacgatgagaagcggggtgcctgcagcgttggggccaatgtcagggatgctgcctgttatgtgtgctgggcttttgcacgtgcctatgaacctcaggagttgacaccttttgtgactgccatttcaaggtaatgcctcttggttgcgttcaagagtgattgtgtcatgtggcagacgtgcctcagataaacataccatctgcctgtaacctgttggctttaggtaagccattctctacaactagctgccaatatcagcatccttgtgccctgcccctcctctctaagagatgggcaagagaggaaaagactaccttatcttgtggaacgggacaggatctgctatgtggggagatagggttccaaacatggctgtccagggaagcaaatgggtcccaggttccacttcagacctttccaaatgttcagaagagattacatgcatgggaacagagtaaagtccagtcacttgaatactctggagccatcccatagtgtgctgaggacagagcagattattggtgttgccctaatgagcatgagaagactcagtcggagagcacccgttgcaccatccacaccagatggacagacaccctgaactgcgtggtgccctcctttggctcctcagaaacagaatgaagcttgaactcgaaaggttactgnnnnnnnnnnnnnnnnnnnnnnnnnnnnnnnnnnnnnnnnnnnnnnnnnnnnnnnnnnnnnnnnnnnnnnnnnnnnnnnnnnnnnnnnnnnnnnnnnnnnnnnnnnnnnnnnnnnnnnnnnnnnnnnnnnnnnnnnnnnnnnnnnnnnnnnnnnnnnnnnnnnnnnnnnnnnnnnnnnnnnnnnnnnnnnnnnnnnnnnnnnnnnnnnnnnnnnnnnnnnnnnnnnnnnnnnnnnnnnnnnnnnnnnnnnnnnnnnnnnnnnnnnnnnnnnnnnnnnnnnnnnnnnnnnnnnnnnnnnnnnnnnnnnnnnnnnnnnnnnnnnncctgaaagtctgagccagctgctaaatttccaggaccccctagaacatccttatggtgctacttgcccctcacctcatttcaagactcagctccagacattccccctccacccccctcctccctccacccccgttacccccctccctgacatctgactgtggggtctttcagaagggagctgtcctggacctgtctcattcaatggagcataaacatatactgatgaggcacaactcatggggacctgacatatgcacagttaccaggaagctgtgctgttggttgtagacttggttctgggtgggaaggagcaagagcccagctgcccagggccttctgctgatcctcaggcctggtccatagctgtgacctccctgcgtcccattctgttgccatgcaggtgcatcctctgtttgctgtttatgtggctgtgagggaggttcttgcaactgtttcttgtcctcatcttcaacttgcataagtagtgaacaggtctttctcttgctcacacctgccccagagcagcaaagctcctttacacgacagggtctggttcagttcacaggctctgtcaggtgggtagctgcagtcaggcttccagtttcctcccctgaagatgaaaagtgttgagtaggagttaggcatagagccagatgtgaccctgacgtgaccctgacttggtaccagtgacctgccaggagatggtgaaggatggtaggaccttggctctgatgtgcatttgcttcctgtttcaaaataaaaacagtcctgacagactgtgttcggtctcacagttttgttcagagagcagctacccccacccccaggatgccatggctcgtccttctccctcttctgatccagaatggaggaaggtggatggcctgagggagggaatcatagagtaaagggaacaggagttgacctgctggcccgggagcatgtggccatgttagagggggcattaggttagctctctcatgcttcatttttgttgggtgtggggtctcaaggccattctgccacttcggaaggcaggaggtacagaggagaggtccctgtagggcacctggtcctgagggaaaagtcggggctacacagttcccaccagagtgtctgtcttcactctgtgctgtagaactcacatcacagcaatgatggatccctgggtggattcagtaaaggaaatggacagtctgtgaaaagcttggctctgaagttggctgctgtgtcttggtgctatggctgtaggtgggtctttgggctctgctctgtcttctccagctccagctttccctacgcttagaacagtatggtgaggagcttccatggctgctgaaggaacatggtaccttcttcttcagagtcaccatttaccactcagagaagaaaaggcaactgcacagcagagccaagtcccatcagtggtgacttctcaggctcctggcagtcatcactgctctgtcagggtcatggtcatacctggctccatgccgacctcctactcagcactctgttctctttccatagtgggggagggggtggggagcacaaaaaggctctctgctctggccctgcacaagctcttagccacgaggttactgtctgaggactgtagaaggcggccctgactgagcctggcactgtcttcccagaacttaagtgaacttgcttgctctgagttaggtgtgctgtggggagatacgaggccctcttcatgttgggtgtggtgtggagagtgcggcttctgttgagacttagtgggtgaacacagaagtgcccttcacttcacatacagctcagtctctggaatgaccctgaatttcctggccaaggagaagttgttgtacagccatctctacttctagtctgtagaaactcttgtgggtccacgtgtttctttgggcttggggagtctagacttgctggcttatgggacaagcctgaggggttgctggggaactcatgtctgcatgttgtgcgtggaaactgtagctgtctggttgcagggctgccagcctctgcttcacagccatctgattctaagctggcagccagcagatgggcagcagtgccctttggagctgagccgctgcagatttctagccggttagacaggttctgatgaacctgtgcctggcccttcctggcccatctgactccaggcatcagcgggggagggcatgtggtgagtcaggtgcgccagtgagcttggggcatgtactacctcctgcctgaagctctgtgcgtctgagtatcggtcgggtgtgccctgcagacctgcttgtgaggttcgtcatgagtgaccatgctctttaattatcaggttttaagcccattatttctagccgatgataaaatcttggtatctttactttcataaactcctcagcgtatcctgtaccagtacagttgagatccaaatatagtttccagagtaaaatagagccagggaggcgctgtggggcgtcctgctgcacctcagtgcctgatgcagggaaagccactaaccttttctaattttgggttgaagaaactggattaactattcttaccctcacagtgttaactctgctttaggaattttaaaagattttcaaggcatatttctatctttttgaaattgttttgattgccttttgaaaccatctttctttgtctttgagcagacgggtggagccagaatttatgccactgttttgcggcactatctggcctcctgaaaagcctggtgcaaggcaggagtagtaagatgtggtgtggaaaggtgccggcctggttgtgtgttctgtaggtgattccttctaaccagaagtcaaaatctgatctacaggaaggaaaagaaagcaaactgtctgctgctgccagagcaccctgcctgtcaccttctagcgatttcctcacctgaaactcttttgtaagctgagctcctgttgacgttcactccgcccaggcacagacccgcctgtgccaggggcagctcctgactctcacctccactgtgcaaaccggcagggcagcgtgggctgcctgtgaacggcctgggattggctctgtaggatctcttccttcagggcaagattgtcctgaaaaaaaaaaaaataaggaaatagcaagcattgctcaaagctatgtcttattcttctcagcctctctgaatggcccaacttccagagagaagaaaactgtgttgaggagaaggccagcaattggagacagtcttggtctgccaggcccaactttgtactggcttggctgtgaccccaaagcacatggttctgcttatgacttagagaaattcagtaaaatgcagggtttatattttaatgtgacttgcaactgaaaaaaccatggagtttcacaatgagttattagtcttctctttaaaaaaattacttcagaatgcaaatgttgtcatttcccatgtagaggcaagtgtgcttgctttgaaacgctactcagtatcacacaaatgaaaaaaaaaaaagagtttggggtgaatgctgttctcactgtgtatgctgagccaaggtctaagactgtgggaaaggagaggggcaggctaaggcttgcctctcactttccctaggtttgtaccagaaagagaatcccttctgtgtggttaaatcctggtgagctgtcacagcttccctagagaaattaagcagctggacacacccacaaacacctctcctcagatggtggctttcactgtggtgccaggtgttgctctttaggttttctctgaagtgagagagaagagtagtgacttctgcatcgggtcttcctgctggggatgagcgaggcccaggtgaagggtagtaagcatgaacagtggcttaggagagcagtggcttaggaatagacttcccttttctgtttgactaatatcattaaacccctttgcattcaaaacttatttttatttctaaataagccagtcttgttctgaaagtaggaaattagttttaaggaatttagtccagagctagagagagggctcagtggctaagtgcactggctgttcttcctgggtttgttcagtgcagccctcaaagggcagctcacaactgtccagtcccagagactctaaagccccctccaggcacgttcagacttagcacacatgtgttacacacaaacacacacacatacaaataagtaaaaagttaaaaaaagaatttagcccaaattgaaagtctttaaaaacctgttatggttgggtggtggtggaacacacctgtaatcccagcactctggaagcagaggcagacagatctctgtaaattcaaggtcagcttggtctacagcttggtgagggtgctacacagagaatacacagagaaaccctgtttcaacagtcaaacattgttgtatcataagtacatgcagatttgttttaattaacttaaaagcttactgttacttaaaaagcagtgttttccaagtactgttacagttaccacagtgtaatttctgaagtttgatgaaacatgtaaatcctgatttgttcctgtaatcttagcacttgaggggctaagggaagagaattactgagttcaaggcagcctgagccacagaatgagttcctatcctgataccctgtgtagccctggctgtcttggaactcactctgtagaccaggctggcctcgaactcagaaatccgcctgcctctgccttctaagtgctgggattaaaggcgtgcgccaccacgctcggctctgataccctttcttaaaaaaagaaagaaaataattaatgaagcagtgacttttaaggcatttgcttaaggaaaagctaacttgatggagtgtatgaggctgctgcttctgtggtgacacctgttacatacagactttctctgtgctgacagccagtattggactctgacatcctgtcccactcctgacttaccgctcactttgcttactcataccttggagaggtctgcatggagcatcttgtgtatgttccatgtcagagaccaagagccgtcactggcaatctcactgctcagagaagaatggctgcagtgttcctaggatctgaggatcatggtagctggggcttttgggagcacacagaccagtgacagtggttgtgggaagggtggccccataagcaaggtaggtggctaaggcctgctgcatctgccttccgactgggcatggtccgcatctcggggcttcttgtgtcagtgctgagcataggagagatacctacagattcatgtgcgtggtactactcagccactcacatacctgagaaggatgagtagggttagaagtgtcccccccccccccaggagctaccctaatcccaccaccttatcaggtcttatccgcagctgtagaactgcctagtaataagtggaaagtgctttaggaaaaatgggcagagccccacccctcagagggaggaagtgaatgagtctcatgctgacatcagcttcttgaacagctatggctttatctccacaggctacattgcagttgggattctcctcatcccgtgcccagtgcctggatgggtagaatgtgtagagggctgtgaacaggcagctttattttctcaacggcctgactcctctagaatgaacacttggttgaaattggactttggtccgtttgcccgggcagagtaatattctttctgtacctatcttctagatgttccctgaaccttgagggtgtgtgtgtatgtgtgtgtgtggcttgtgggttgctaggagccctcagtcagctttatgatctgaagactgttcacaaaagctgctgtagtgtgctcaaggtagaaacaattttaaaatgttcatggtgaggtaggatgaaccctctcttgtttcaggtttctctgcttctcattgtggcaaagtataaatcccacaagccaggaaagttgtgcctccttccctctcccattttcctattggaattaaagacagttctttgtcacctctcttgttgcacaagttctctcctggagcacattacctgcttagcagcgttctgatgtttttaacattaaaattaaagtaagtgtgtgtgtgcgtgtgtgctcaagtgtgagcgcttgtgtttgaagacctgtgtgtggaggtcccaggacaacttgcaaagggttggttatctctcttaccatgtgctgcgacccagggatcagactcaggtcattgggcttggtggtatgctgagtcatcttgctggcctcagttcttgttcttgagggtttctgtttttgtttttgtttgtttgtttttactttctggaccccaaagaccttctgaccttccaatcatttctgtcctctggtgatccctggttgggatttggagtctgggagggtagccagtggtctcacagctctatctcctgtgcttgatgcgcagtgcccactgcatgcctggtaaagttgaaatgagattgaaaactagacatggctggcccgcggtccttgcaccttgctgtttgctgagaatgtccctggaatgtgggaaccaagaagagggatccctgacgaggaaatgcttccctgagaagggttccccttggagggtgggacccatagcagtaactggcggtggatgcaggagaggtgagaggcctgacatggagaggagcaaggagtttctagtttcgacagtaatgaagtttggtatatgtactggctagttttgtgtcaacttgacacagctgaagttatcacagagaaaggagcttcagttgaggaaatgcctccatgagatccaactgtaaagcattttctcaattagtgatcaagggggaaaggcccctcgtgggtgggaccatctctgggctcatagtcttggttctataagagagcaggctgagcaagccaggagaagcaagccatccctccatggcctctgcatcagctcctgcttcctgacctgcttgagttccagtcctgacttccttggtgatgaacagcagtatggaagtgtaagctgaataaaccctttcctccccaacttgcttcttggtcatgatgtttatgtaggagtagaaaccctgactaagacagtatataagaaaaagacataattaaagcctgtcgagtgtcttgggagataggaaaagtcgagatagtgtggcgttattgcttctggctgtaggaaggattgagacctagcagctgccttccatgtgctgtttccatggtgactgctctaactggctgcctgcctgttagcaggtttctcattactttatcaaatacttgcaggacaccactttataaagaaaatgcttattttgacctgtggtctgggtcctcctgggtcaagaggctgcatctagtagtgaccttcttgccaggagagttgtgagcactagtttcactttgaaaggggcagagagcagagtttatggcgtgtcttcttttgtgaaacccagaggatccagccttggtctctatcccgctgacctcatctagtcctcattatgtcccatatctctcaacccagatgtggacagggcattgccccatcatgtctcacactgggtcagacctgtgggaaatgttggaaaccatatgtttgggtgtttccaagggtcaggctgcctgcagggtatatggagctcctgctgctcagcgtagagctagctgtgatctaggcgtgttggtgtcagccacccagttgtgaccatctgcacacggccagttctcatcctctggaaccgtttatcatgatccctgcaggccaaaggcattgttctccaagccactagaggctcagcgtataccatccaaggacgtttgatagggctggggctatctataatgtttgatatcttcaaggttagttgtgaatcggttgtagcctgtagaaccttgagcttccctagagtctgtcaggctcatccgggtgaccagcaagtgaggaaatgagtgaacgatgtaacgatggcacacggtgtatgcctgtgctttgttacgtgtgcagaaaacaactttgggtatcgtcgtcaggaatccacctctgttgagacagggtctcctgttggcctggcattcagccattaggctagacttgttgggcagcagtcccagggaacctcctgtctacctcccagcaccgggcttacaagcatgcgccacctcaccaacgtttttatgagggaatcccatgcttgcaagacaagcagtttactgactgagctattttcccagccctcgcgcacttcattttaattaatagttttccttgtttttacagtgccctggtcattgctgctgtatttgaccgaaatgtgaactgcagaagagcagcctctgtaagtttcattttccccagtgcattcctttcctggaggtggggctgtcgtcgttgccagtggcctgtatgtgggcctctgtctctttggaaaacccataccccatggcagcagaggagagcagatgaaagaactgagtaaaacagtcaccatggtaacacttgtagggccttaactgtggggttcttgaggaggtcagggttgaataagcataggggaacaggtttctgttcaatagccagaccagttcagggtagctcaagctctgcagaggagaagaaatttattctgtgtttctaaccttcatgacacggcaggactggtccagggatgacaggatagggcactggaggctccgtgttccagggggagctgttaccaagctgtagttagctctgctttcccggccacactggagtggatacccctggttatgctttagctttgcagctgcctgtgggccttaccttccgaactcagttctccagttcccccccgagatccagcgtttgggatgggtttgcatagagggagcttgagtagctttggctgccaacagagatgttggttagagtccctgctccatctacctatggctttccacttctgggacagtaatgagactgagtctcgtgaattgcgaggggaagagacagtgaaatgtttccctagggtttcctgcatatgggggtgtgttgcagcagtggctgactctacgtaggtgactgctgtgatcagtgactgaggccaggtccatgggtgctttgggaggctggaccccagaggacctcagatgagaagtccaggcactgtcaggagtgctgtgatacctgagcagtctgcggctgtcttcccctcatagacaggccagcaggcgaacacattcagggatatcgggaaccgaggggaagtctctgagacaggtgcaggctgagacttgctctggctgtcagctatgaggagttgggaagacccatggtgtgagtataggggctccttctacatccttgtttcaactggtcatggagactgactgggcatgatatactattacatctgctttgagactgaggcaaaggtcaggagtggtgtttgttagtgccaacagatgtctaaaatatgaaggggatgcggttgagttggcaatgtcccagatgtattctgtgtggataggagccaggcctcaaagtaggatggagaggagactcctgaggtcaggtggaaccatggagctaggggaaagggaacactgtcctgacctgcgtgttgggcgttgttggtgggaacttcctggttagcaggctgaaaagttctttcctgtagctactttcattttgttcatgttttaaaactctgcacagttatttgattctgatgtaatgaagtggcctttgccttttgctctggtgatgtggttcattcttattctgacttccccttgagtatagtcccttctcttatgctggactcagtttgtcaacgttctcagagcagaatcggttcatgagggttattagtcttttgtctgcttttgaactgaaggtgagctagcatcatggagagagtggaagtatttctcttgtattttgttccatagtttttaagagattgatgtttttctactttaattatttggtagtattgtcttaacccattctagcaattttttttttgaaaaaatgtccactattttcgatagtttttacttaatatagatctgcccagctttcttatttctcaagtcatgcctttgtcctgtcttctgtgttgttaaatgaagtgatttgctgtcatcacaggcttcaactgatttcatcttttctctcactgtggcccctgtcttgtcccatcgcctgtcacaagtgatggagtttctgtcttgtaacttggctgctggcctctggctgcactttggcggctgtgtgctcaggtcctgtgtgccgagttcatgagccatgtacgtggcatggcagccagtgtattggattctcgtgtttgaagacctactgtggagggcttaggcagcccagctgttcccatgctgcaccataggctctcagccaaggggctgtgcctctggcattctggtcaggtgacttgtgaggttttgctggctcaggatgcctgtggtcttccatggctgctgttggctctctgcctgcatctgtactgagaagcaaccaggatgcaagcactccccagagtcctttaaaactgtctgtgtccccacagggactccattttgtctgcagtgttagtaggaacccattgatttcttgagaggtcttagcagtcttgccttcatagttaactgataaacagtaactgtaagactgatatataatacaattttataataaatctgtactaatatatttttatgtttcatttattgttttctgtaacctaagacatatttgtgggaagcaacaataaaataaagtcctatggctttgtgtggcctggtttgaagtgaaaaacaaataaaaaacttctgtaaatcaggtttttttaacttgaaattaaaaccctattaaactagcaagaaattctttgcgttccttttgagttcagcactctttacagaatagtctgtaggatttaaacagaggaaggtgagggatgcctctgagtgagactcatttgaaggcataagggttctcgtagtgacagaagagagtctcacgaagagttgcttctttaggcagactctccagtttcacattggggtgtgtgagatgtctggtcacctggccagcgtccaggaggttgagcagtggagcagtagagcatccacaagttcccagttctgtggccttagctttcatttgatgattttccatagcctgttccctggcttcttgtctggtggctacagtgcttctaaggtaatgaagccattgttttggatcctcattagaggtgtctttctggtggtcagcactcaggagctggatagtagagacctggcatggcttagtggaaagaattagttcatggttgctaaggactcgaggttttgcattctagacagtatctagcaggccagatatgctgactttgtgaaaaggcctgtttttgtttttaatttgcttttttgtcttatattttgacactattgagattttccccgaggagtaataagaatacgggaaagtctgagtctgcgttcccttgctctctattgggtaaccacacatgtctaagacaactcgggagtcctggttaggactctcagttgtatatgtcctgtgcacatggttagttctgtgaggctccatcccacacatatgtgagaatcgcctacaatctaggcacacagtattccttatcacagatgtccctacatgatccttttaactactaccaactatcagtctactttccaatcttgcaatgctgttacatcactaaagtgacagtccttgggactggaattctcactgtgtccagtatgttgggaagtcccaggccattaaattctcctgtgagcgggtctgttctctgagtgagccctggttctcctgtgagcagatctgttctctgagtgagccctggttctcctgtgagcagatctgttctctgttctctgagtgagccctgctgtgtcaagccacttacctgtaaaagggcctctgggttgtggcttgctcagggttactatgaacaccgtagtgagaattctggaatttttgtttctttagaaacagcagtattacggatggttgtgagccaccatgtggttgctgggatttgaactctggaccttcggaagagcagtcgggtgctcttacccactgagccatctcatctagcgccctcttctggagtgactgaagacagctacagtgtacttagatataataaataaataaatcttaaaaaaaaaaaaaagaaacagcagtattgtaagaatgttttcgatttaatcccaggtgtggggacatgggctactttgtagcagccggctatgattttccttgtgctctagcagacgcacgttttgccagatgcagatagtttctgtgaatatatgatgtttggaattctgagaaattttcagaggacatataagtgctagagccctgataggcggggttggtgattaatagtcattcaaggggggttgggttgtaatttgttagtagttgttctcaaagaagaaacaaagggaaagaaattagatctaggnnnnnnnnnnnnnnnnnnnnttcctcccccctccccctccccctccctcctcctttctttcctatctggtgataggaggagaaacagggtaggggtaaaaggttgggaaaaagaagaaccaacaaagtagctaagactagctatagaaccctttcatactggctttcctgtgagcatagtttctgtttcttaggttatatgcatagagtacagtttgtgggacccatcttttaggatgctgctagacagtgcctgtctctaggattctagctgttccccagggtggctgtactacttactatgtattctcccatctttgctaactaaggcatgtgtcacctaagatggggttgccagatttcttcctgggttactacactatttcatttttgctgataagtgtgtggtggttttcgttttctttcctgtgacaatgttgagtctgtttgggtgctcatttgctacctgtgtcctcctgagtaagatgcgttctttcaagtctcagtcattgtctagctggatggctcatttctgttgttgagtttcaagggttgtttatggaccctggatatctgtcttttatggatatgtgtattgcagatgcttagtacatctccatgacagctttcagtcttgtttctctgtttctttggtgagcgctttcagtgtgagggctacaaaccacttagccctgttctcagccttttcttttctctgctgtgctgatagcacattctgcagtgatgtctctgtggtctcccttcatattgtgttgggtgatcccctaacctcttagtttcaagattgtttcaacataaatcttgtattaggttttacttggaagatgatcctgcttgcaaatgttacattgtatttaagttgacattgtatttctttacatcacctttctttggtatctgtttctttaagaattggttgcaaaggccaggtgatggtggctcaggcctttaatcctagcacttgggaggcagaggcaggcagatctgagttctagtccagcctggtttataagccagggcatccagaattatagagaaacatcctgtcttgtaaaaacaaatagacagatgaacacacacacacacacacacacacacacacacagagagagagagagagagagagagagaatattgactgcaagaggcttgagtaatggctcagcggtgacgaacattggctgctcttcccgaggaccccgcttcagtactcagcacccacatgctaccatccataacagttctaaggcatccaacatcctcttctgacctgcgcatgcactaggcatgtgtgtcatatgcatacatacaggcagcatttacaaacaaaacaaaatgaaatataaatcttaaagggaggggttgcagaagttacaaaatggtaagaagcaaaaagtatcctgtttttccctcttgaaacttgttggtagtaccctgacccccactgtgaggctctgtgatttctggagatggcacacatttctgtgctggtgcttaccagtcctgtgggatccttgcacgtatgagtgctctcagccccctaacccatattgggatgtctacctaggtcaggggtgtttcttctgttacctctgccacctctgccttacgccctgtgcctgacccacctctgcttgccaggatggcgcactgtgcgaggctgtgtgttacttctctccatctccataagaagctggtgtcagcgcctgactctaatcccggttgggactcagccgtgtatgctttggggaaagttcaaaccccactgggcaataagccaggcataaggggccattgtcatgttggtcagacagtcctaggtcggacatcgtgagagacagggaaagtggtcaacaaagaaagaagagtcatccgtacaaggtttacctagaagtacttagttttctttacgttcagatgggccgctgtgagccccaacttgtttgttgcctggcatgtaggcctcaggtagctcagagagctggttggaaacaggtttgccctctaggaggcagcgctgatatgttgggaatggtgatgagttgtgatcatggggttcctaaaaatgggtgttttaggagttggtttctacttactgacctgtatagtttgttctcagagttaaattccgggatcttccttggggtgttagtgtgaaaatgtattcctagtgaaaggtcactgtcaggttccatctgatcttctaaatagaattcttaccctgtggctttaaagagcactaggacatagcaacagtgacaagccaccccagggctctggtcagccaacaaagagggcttttatttaaaaagtgaagccatgggtcatttacactgaactgtgtttgttttgaattatcttctggtgtttagcagaggcaaacctcactcacctgctgtgtttgttctctttgctcctcaggctgccttccaggagaacgtggggagacaggtatggccactttataaatctttatttctgaaacttcctgtaggcttagaggtaggaaccctggcagctttggtttcacatcttcttctactgttgggtgtgggtaatggatgaggcttacctcagagcaagctaataaacatggcagttctggtccaagactcaccataaggtgaccagggagcactgagtcccacgtgtctttcaggaaaccccgtgtgagagtgtttcaggcatgttctgattttgcctcacgtattgttgtgggctatacacgtgtcaggcaccaggtggcttggaggaggtggctgagcccctggatcctgtaggtccctgaccgtccctagcttgtgatttggaggctggctcctcctgctcttgatgttcagtagtactgtagctgtgctcggggttgcgtaaactgtgcccattacacagctgatacccattacagaccttgaaagaagggtttaaattcatccatgtataagattctgtataaagttggtctagcaggagactagagagggattagggcattggttcttaatctgtgggtggctgcccctttgtgggtggtctaatgactcttacacagaggttgcctacgactgtcagaaaacacgtatctacattatgattcataacaatatcaaaatcacacttatgaagtagcagtgaaaatagttttgtgactggggaatcactacaccacgcggagctgtatgaaaggttccaagcattaggaagggtgagagccatgggttagggtccgaaagcattaggaaggctgaggaccatgggttaggctctgaacaaggtgggcagctgccagcatgagtctggacagggaggaagagtccctgagagaaaacagctaagaatgactgatttagggttttatctcagttagggttttattgctgtgaagagataccgtgtccacagcaactcttataaagtaaagcatttcattggggctggcttacagtttagaggtttagtccattattgtcatggtgagaaaacatggtgctggagagacttctgtgtctgggtccacaggcaacatcaagagactgtgagccagtagatttggtttgagcttctgagatctcaaagcccaccccctagtgatgcacttcctccatcaaagccacacctactccaacaaggccacaacttaatagtgccactccctatgaccaagccttcaaacacaggatcctgtttgcaccatttctattcaaaccagtttcttgagtgcttgttaatgctacaagtgaggaaggcagaaggatagccctgcgctatgctgatgtgaagagtagacttgtgtgaaggctgatggggcttagagaggtcaatgccaagaggggtgtgctctaggtgagagaacctggagatggcttgggtcaagaatattgtgaggacagatagatgtgtctatagtagaggatgctgggcgtggtccaggaagtagtaggcctgcccagaggaatggactcctccactgggttggtctacttatgatgaaggtcttgacaccagcattaattagatcctggccaagatccctgagtggctagttgagcatgctctatagcagggatgtgtgtgtatgaatgtctgctaggttcccttgctatcgcctaggagtctttgcaggttatgattaaccagtgagtagttgccatgtctaggaccagcatgaggatgcatcatcctgtggctgcttagagtgttgctgggttacagctgtgtgctggtggtttgcccagaccccagacgaccctgtattcaagtgagaatgctagagtgtgagtgcttagtcccctttctgggaaggaaggacagctgtctggccaggccgagccttaggctgttgcttattctggttgagtgatatgggtactgctgagcacagttcagacctgtccttccttctcggccacagccaaacctgtgcttgcacttgcttgcccagtcatgtgctttggtcttcttgggaatccggctgcagtcatagtaactttacttaggctgtgggcttctctctcatatatgagagaatgagtctggggtctccttgataaataactatacaatccaaagcatttttgtaaagcaaaaggtttcacttatgcagaaaagtgcgaagctactcaatccagcaagcaagcacacccagtaggggtcctgctctgcttttaaccccagggtgagggattctgtgccctactctgggtggtttgagtggttggaactaggactcataaaacttaacaggctaattcaaaacggactagcattttgctagggagaatagaacttgaacatgtatcttgactttaagaatatactaatctgggggctagagagatggctcagcggttaagatcacttactgctcttcaaaaggtcctgagttcaaatcccagcaaccacatggtggctcacaaccatctttaatgaggtctgacaacctcttctggggtgtctgaagacagctacagtgtacttacatataataaatgaataaataaataaatctctctctttttttaaagactatactaatctggagatagtctaacttagtggtgtctttaccaatttctctaaacatggaactacttctgtcttctttcaattctgataaagacagtacatttcatttacattccccacaccaactgtgaggttggtttacacaggaagtggttagagcacccagagtgtgcactgtgcagatcaagcagcctctagcaatccccctccggctcaccccctggacggctttctggtacataagatacctcagttggttgttctcctcctgtgctgagggggagacagcttgtctttgagtagatcgatccctgtgtgaggtatgggatgtggcaggtaggtgctggtggtgtgtgcctggtgcttttcttggcttttgcctgttagacttgtgccagctttgtgcagagatagggagccttatctcctacagggatggagccacctctgggccaatagctataaagcttcctacatacttatatttgtcaagaaagttatttatatggtttctagattgtaatatttttttcaccacaaatgataatatttggtcataccaatcacgtgacagttttagggcaggggctccacaaggagtattcttggtaggtgaggatgaggacctgcctctggttttgggggactgatggcttgctgttagtgatgctcttataggttggctgttagccctgagcctggttgtttctgtcagccacatccatccttgtggcagctagtgaagtgtgggtcctggtccatgtttcaaagccaggcaggcgcttgcctaacttccattggccttcctgctnnnnnnnnnnnnnnnnnnnnccaagcaccatgagtaagcacttgagcaccgctgatatctggtgtcacttttatagcatttgagttgaaacggttttgaagaagaagttgcactgagtgcagcccctggtgggcaggcagggcagtgggatgagcagtgacataccaggtggtcctttcccgtgagccctgtggctcagcctcagccgcctgcccgttgtcccctcagaggccgtttctcacctttcaggttttttctctatttttacttttttagggtactttccctcatggaattgatattttgactacagcagactattttgcagttggtaacatatctaactgtttcctgattataaggtaagttttaacgtgtgtaatataactgtctctttgacttgggtgtcaaaattcaccttcaatatttccttcattatcctgtggtctgtatataacttatgttgtagagagggaattgagctgagaacagcttctgaaaccgttctcataccaagttcatcctgcacggtacacgctggagaaatgggcacctgcttgtgcttcagggctagggccacacatcttctctggacattaatcttctccttgtcctcctggttggtgcttttctgccttggaactgtacagggaatagccacaagcacagctatgcatgcccttctgtgtgacagctttcccacctggtgtcacacatgtattgatctttcaaaatgacattttggatttgaagtgactgtgattgatttttgttgttgttgtttgtttgtttcaataaaatgtgttccaagttgaaattatctgattgtttctcaggtgagtatgatagagatatttgaaaattcaagtcaagggataaatatttaacccttaactgctgttttcagaaatcacatccaattatttttgctgtataacataaatactagggagcagtttcacactctaacaccaatgtgaaaagggtatgatgcttcgtgaagtagtttatttgccttgaattaggagaaacatgtcaagtgcattttaaagcatttttgaccactgtaaaccctcggggtagatttcctgacagccatgctgtgcagaccacgcagaatttacacctctccataaccagctttgacagactttaaaaaaaagaagaagaagaaaataataactaaaaaaaaactaaagggtgaccagcctcttttccaggaagaatgcgatcatatttgcccttgcctgcataccattacccctcagtccagcacttcatgtctgtgtccacatattctttgtcctctgattattagcatgtgaatgttgtatatgagggtctctgccctttctcagagattcttaggtaaaatagctggtagtttggcaaattttacttgttgctaaggttcccacaccagtctaaaacttatacatactttataatgtccattctgtaaacatgcatgacagggggctggagagatggctcagcaggtaagagcactgattgctgttccgaaggtcctgagttcaaatcctaacaaccacatggtggctcacaaccatccataatgagatctgatgccctcttctggtgtgtctgaagatagctacagtgtatttacatataataaataaatctttaaaaaaaatgcacaacacagaacatgacctagctctagtgtgtgggttttccagtacactgggtctttgtgactctcagatccgagtatcagataagctgctgtattttgaggacagtctaatagcaggctttaccatatcctagcaccgcagagcctctggccagggtctcagctcccttactggtatttctctcagtctggatcctagagggcaggattcacagaaagtagcatgtgtatggtttctagaaggctgtgactaggagcaaggtgtggggcctcagccagcggggaggtgaatgtagtttgtcctgaggtccctgtgataaacaattttatgtcagtttgatagtcgctaaagtcatcttcgatgagggaaccatagttttgaaaataactccatacagatctggctataggtaagtctgtaaggcattttcttaattagtgattgatgagtgagggcccagtccattgtgggtggtgccatccctgggatggtggtcctgggttctataagaaaggagactgagcaaaccaaggaacaagccagtaagcagcatccctccatagcctctgcatcagctcctgccctgtttgagttcctgtcctgactttctttgatgatgaactgtgctgtgtaactgtaagccaaataaaccctctctcctccaagttgctttggacatggtgtttgttagagcaatggaaacaggaagtaaggcagttcccaaatgcagtgtgcttgttcagcactgtgttctggtgaatagaaattgggtggcattgggatactaactgtaaagggcagagggatgaatgaagggtgtgaggaagggggtaggtacctgggcttgtaactctcctcacttgggacagtattcaaggaggaggttgcagagaaggtgtttctgaacctgcttggtctgctatattgagtagcttcaaaagtggtagagggtccccggggaggcattagttgggccactgcaactgattatcatttgagtgttaaaggcatatggtagactgaatgtgttcagcatatgcattttcatatattgtaatggtgcaaatctgtaaattcataagtgtatgtcgtagtgacgcttgtgaccctctgctgtgtgcccgttgggaatttgaaggttctttcactgaacacagtggtctcttgttttaggtgcttctaaattgtgatttctggtgctgctcagcttgccatgtcgatcagcagtttgggcatttttgagtttttgtcatgataaactaagctcttgcagacacttatttagaaatgtttactaggatatacattttaattttcttacgtaaagactaaccagagatttaactttgcatgaaactgtgaatgtgtggtttcggcttctccatacctccttgagattggcagcagccaggctgtgtgagcatcttggcattcagagcactcacctgtgcggatgaccatgttggacagactcccacatgcttattgcccttctgtttctcctttgctgatgctccaaggcaaatgtaggccaggttttgttttttgttttttgttttttgtttttttgtttttttcgagacagggtttctctgtatagccctggctgtcctggaactcactttgtagaccaggctggcctcgaactcagaaatctgtctgcctctgcctcccaagtgctgggattaaaggcgtgcaccaccacgcccagctgcaggccagttttttgctgagttttatttttcttattttttttagtgcaaactgtttgccaactgtgcctttttgtttctgtatattctaatagtctcactgatgtgtaattaacacattacatgcatacaaagtgtaaagcttactgagtctgacaaggaggtcgcaaaaactgtcaggtgggtaagctgtcagggttctgagcgtacttgttacccaacaaattctgtttttattatagattgcttttcattttgtctaatcttttcctcttaacatgattatttagtgattcattcatttttatatgttgtgtcaagaagttcagatggctggagagaggactcagtggttactattgctgtttttgcaaaagatctgagtttgattctcagtacctgtgtcagaaggtacacagctgccggtaactctagctacaagaaagagatccggcatccctttctggcctcctcagggaccctcacacatgtgtatatgccaacacaggctgcacgcacacatggatgagtataacagatcctgtgtgttcgaccagtctgatgagtctacctgaccctagcctattcatactatacctaacctgtaggcctaggctaggtcagacatcctgtgttctgatccagtctggtgagttccttggaccttagcctgcttgtaccttccccacccacagacctagcctgttgcacatcttgtgtgctggcccagtctggtaagttcctgaaaccctgcttgcctgtgtcgttccttccccaaggcccatagcctcagccacacagcctgtatgctagtctaactttgtggccatctgtgccgccctcacactctctaggtgtatatagggtaaatcaagcagatccagtttgttccacttgcattccatttttcttatttctgaaccaaagtcgtcttggttgctccaatctatccatcaagatccaccaggtctatagaaatgagaattaccaagatggacccatggacacagaatttagaagaacagtcatgaagttcatcaaaggattgaagaaacaaacgtaaagtagatgcacacacacagctcatttacctcagagaagaactgcctgagtgataactcaagaaagcactcacctgcggcagaggaaaaggaagacccgagtgatgcccaggaaagcacacacgtgtggccaagggaaaggaagacagttcaggactggaaacctgaattcagtagagagataggaatattgaagagtgctcaaatgaagatgcactgaaaactcagtcattcaatcagaaaacccagagggaagccgtacaggtagagtgggtcatgtggaagatagagtgttgagacttgaagataaagtagaggaattagacacacaggcaacaatatgaaaaacatttttattttttacttttggggtgtgtgttgttgagacagggttattctgtataatcctggccgtcccgaaacttgctctgtagtccaggctggcttcaaactcagcgatctacctacctctgcctcccgagctctaggattaaaggtgtgtgctgccactgcctggagcgaaaggaaaaaaccaaaccaaaacaaaacttttaaaacactaaagtagcatgttggaaatgtggaacatcatgaaaagaccaaatcttcaagttctagacatacaaggagaagaatcccaggttagcgtcatagaccacagatcttaaggttcatagaagaaaatttccccatgttagtgaaagaaataaccctcaaagatgcacacagaataccaagtagatgacagaaaagaaacttcccatggaatattatagctaatacactagttatacaaaacaaacagaggataaagaaagctgcaggagaaaaaccagaagttaaatataaaggaaaacccattagaataatatagtctctcagtggaaaccttgaaattgagaagagcccaaagcaatatattccaagttctaaaagacctggatactaacctggacttctataccagcaaactgtttgctgtagttgaaagagaaagcttttcatgatataaataaacaggctaaaaaaaatggatattcaccaacccaactttacagagaatactgggagcaatatttcaggctgaggctgggcagtggtggcccatgcctttaatcccagcacttgggacacagaggcaggtggatttctgatttcgaggccagcctggtctacagagtgagttccaggacagccagggctacacagagaaaccctgtctcaaaaaacaaaacaaaacaaaaaaaaaacaaaaaaaaaaattcaggctgaggagaagaataagaccatatgtaaagtgaatcaatgaagttataattagtgaaacagcatacaacaacaacaaaatcaaagcgatagcaatcaatacttttcaattagtaactaaatattaatgacatttacttttttattagatattttcttcatttacatttcaaattttatcccgaaagttccctataccttcccccgccctgctcccctacccacccactcccacttcttggctctggcattcccctgaactggggcatataaagtttgcaagaccaaggggcctcttttcccagtgatggccgactaggccatcttctgctacatatacagctagagacatgaactctgggggtactggttagttcatattgttgtttcacgtatagggtttcagacccctttagctccttgggtactttctctagctactccattgagggccctgtgttccatcctatagctgactgtgagcatccacttctgtatttgccaggcacacccatggaaggagttacagagccatttactttttaatcaaaagccctgggctaggtgaatggattagaaacaaaatccatctttctattatctataaaaaagtcaacttaaccttctaagacaggaaccaccttaaaggaaaaggttggaaagaataagcaagtgggatccggaagcaagtaggtattgctatcctatcatttgtatagtagactttaaattctgtattatggattgaaatcagaagagataaagaaggacacttcattctaatgaagagaacaattaaccaagacgacatcacaatcctaaacgttctgtgtacctaatttcatacaaagtgtagtgctagatttcaagacatagattaactccaacttagtaggtgatttcaataccttagctttcttcaacagacaggccataaaaataaaaatcatcagaatttaaacagcattatgcattaaataggcctaacagatatctttggaacccaaacatcaaaaaaatacacattccactcaacaatccataaagcttctcttaaaatagatacaaaagaaatcttaacagatttagaagatttgaaatatctctgtgttgtatttgaccacagtacaacagaacttaaaaagacagcaaatgaatctgtaggaagtctacagacctgtggtggagattaaagagtacattactaaatgatgagtgggtcaaagaagaaatcaagaaagcaatgaaacaattcttataacttaaacacagacaccccacccccaaacattgggtatattaaaagcagtcttgagagggaaatttattagccagctacattaaaagaatcagagcaaaagtacatgatttaatgatgcaactcaagaatttggaaaatcaaaagcaaaccaaatccaaatgtagtaggtggcaagaaataaaataatttacaaaaagaaaaaaaaaaaaaaaggctggcgagatggctcagcagttaagaacactgactgatcttccgaaagtcctgagttcaaattccagcaaccacatggtggctcacaaccacccttaatgagatctgacgccctcttctggtacacctgaagattgctacagtgtacttataaaagagtgagcaaaggtcctaaaaactcaattctcaacaaccacatgaaggctcacaaccatctgtacagctacagtgtactcatatacataaaataaaaatcttaaaaaaaaaaaaaagatgaggcctgaccaagagctagggacactgggaggaaagagagcccctagtctgctgtctggttgaagcctctcaccaggtgagagcagagacttccaccacagttaccatgtgctatgcaggttcccagcatggcgacactattactttcatacagaaatgctcgcaaaagatgagtgctaatagacttaagaccaaggtagatgacctagaatggggccttgctgcatgcctaggtggcatttttacagtaaatctgtcctaatttcttatttcctgtcgatctagaattttaccatagaaagtataactatgtcaggtagacatcaggaacctccctgtgatttaatttagttttcctacaaacaactcttacaagacaatagcattaaaatacagcaaaatagtgtaccctgtaaagacaaagggtgtgcctcctctttgcagagccatccatgcctttggatatatcttactttcagattcctttatatatgtttcttttaagggtttttacttaatttgtatgcatgaatattttacctgcatatatgcatgtgtaacatttgtaaggctggtgcctgcagaaataggaaaaaaaaaaaaacaaacgttgaatcccctggaactcaagttacagacagttgtaagcttctatcttggttctgagaatagaacttaggccctctatgagagcatcaagtgcttttcaacaaccaagtatctctctacccttaaatatatcatacattcttccagagatcctgtctcttagtatacttaaaatctaagctaaaatatcttctaatgacattcacctgtgttagaagaaactcagaaattaatgacatagaaacaagcaaacaacaacaaaaaacagtacaaagaatagatgagtctaaaagctggttctttgggaagataagcaagattgtagaacccttgacccaactaaccaaaaggaagatcacccaaattaccacttacatacaaatagggaaacattacaaaagacacccaaaaaattacagaatatgatggcatttcctgtaggggaatacttcaaaattgtgtgtactctactagaaaaatctgaaagaagtagatgagtttctagactcatccaaaccaccagagttgaaccaagaagagaccaatattttaatagatccataccatgtaagaagattaaagcaataacaaaaagccttttgactaaaacagcccaggcccagatggaatcacagcataattctgtcagacttttaaaaagatctacaatcagcatgtcttctgtgacatgtgtttatccacctggtgcaggcatgcaaccctgggactggagttgtagatattgtgaaccaccatgtagactgggtgctggaaatgaaacctgtgcctgctgcaagagcagtcggtcatcttaaccgccaagccagctctccagctcctataacttacactcctgaaatctttacaaaacaaataaataagtcagaatagaagtgcttccaaactccttttatgaagccaatataactttaatacccaaaccaggtaaagacacccacaaaaaaaagagaaaactataggccaattttctctggtgaacctaatagatgcaaaaatccttaataaaatacttacaagcagaatacagggacatacatacatacacacacacatacacacacacacacacacacacacacacacacacacacacacacaccatccactacaattaggttgctttaatcttggagatgcagccgtgttcaccatgtaaatcagtaaagcaacaagccatatacttagagacaaaaatgacataatcgtctcaatagatgcagaaggggctttgacaaattcaaaatgctttatgatcaaaggggagagtgggacaagagggaccatacattagcacagtaacgactatgtatgacaaacccataaccgacaccatcctgaacagaagaacgtcgaagcagacccactaagattgggatgagataggactgtctagtatttccaacccttttcatcctagcacttgaagtgtttcctataataataggacaagagaattaaaagactataaataggaaaagaagtcagattgttctgttagcagataatataaagacattttaaaaagttctagcagaaaacttctagatatgatcaacattttaagcaaagtggcaggatacaaaatcagcttataaaagctagaagcccttctgtataccaacaacaagcgcatcgagaaagagattatggaaacactcctactcacaatagactcacaaaaagtatctaggaataaacctaacagaagaggtaaaaacttctacagtgaaaactttaaatctctgagggaggagattgagaaagatactggaggatagactgacctcccgtgcttatggatgggtagaattgatactgtgaaaatgaccatattaccaaaaggaagttataggttcaatgcagtcccaagcaaaatccccatggcaaaaaaaatcctcaaattcctatggagccacaaaaaatcctggatactcaaggaaatcctaaagcaaaagaacagtgctgggaggcttccgtaccagacttcaagctatgctggggagctgtagtaataaaaacagcgtggtcctggcacaaaagcacaaacaagaaataaggtagacccaaacgtgaggacacatagtcatagcaatcgcacatctgataagatacccaaagcacacagtagaaatgacagtatcttcaacaaatgattcagggaatactgaatatctccatgtagaagaatgaaattagacccatatctatctctttgcacaaaacccaactccaaatggaccagagatttaatgtgaagcctgaatactgaaactactaaaagaacaatgtaaaggtgtaggaaagaactttgtgaatatgactgtgtttgctttggaattaaggccaactgttgaccagtgaacatcataaaattaaaacactgctctatagcaaaggaaacaatggaaaagcaagtctacaaggcaggagacaatctttgccacctacacatctggtaagaggatcagaatacataaataactaaaaaaaacaaatcaagaaaacaacccaatgtttaaaaagggccatgggtctgtacacagttctcaaaagaagaaataaaatagctaagaaatctcttgatagaaatgcaaaaagtgtttgtttatctttagcaattacggaaatgtaaattaaaaactactttgacagttcattttgccccagtgacaatggttcagatcaggaaaacagctgacagagaatgctgacagggatgtggggaaaggggaccctcgttccctttggtgggattgcatactggtgcagctactcagaaaagtggtatggagagttctcaagctaaaagatgtaccatgtgacccagccacactgctcttgaggacacacccaccccacgggtagcttctcaggtgtgtccattgccaccttctccacaattgccagggcatgcagacaacctgtcaactgatgaatggatgatagaagtgttgtgcatacacacagtgggattctctttagctgtaaagaacagtgaaaccatgaaatttgaaggtaaatggagagaacgagaagatattattccaagtgacttaatcaagtccatgaaagacaaatgcagtctgttttctcttatttgtggatcctcccttgtaatctttagatgtgagcatatgatctagagttacctaagaaatgaaaagggaccatggtcaggggcactgtagaaggatctctggagaggggcatattcggtcactggaaaatatggataatgtggggagcactttacctaatgaggggctagagaggacaatacacagaaaaagaagggatgaatagcattaaggatggttgaaaaatccatagagaaatgttttactaataaatacataagtatatgttatatatattcaagtaacttacatggagttatactacttagttgtaatgctgctcccaagagccaaagactatatcagttaaatttctgttgttttgatacagcactatgcccaagagaacttacagaagaaagagattatttgggtttatgggtccagaggaatgactccgttatggcagcaagcctcagacatggtggctggagttcacatctcgaccaagaaaaaggagtgtagtggattgcttgtagataaagcctactcccaatgacatacttcctccaacaaggccacaccaatatgaaccttccaaaacagcactactacctggggaccaagtgttcaaacacctgagactatgagaaacatttcttattcaaaccacatgattatttaacaaagaccccagtgccaggcatgggaaacctcctcctaagttattggtcaggaaaattacaagagacctccaaaatgaaataggtcattgctgttgcctttgtttaccttccagaacttgaaggtaagatcctgtccctgaagatacaacacacataagacgaaggacttaattctccctgaaggctagccctcatagaacctgagggtgctatgtaagctgccaaggggaaaagcagtgactaattctatctgactgatagcacagcaaaatatatccagaggtgcagtagtggcacttatatcttgggtgtaatgaacaacagtctcaagatccactcaataggaggtactttatccacacttggtactgtacacctagccaactacttgtggctggtgaggtcatggcctctaggagagagcagagtagtccatcccagaaatccacaactgataaaaattcagagaaaaactaaccattgatacccatcctcagtagatctgcaccacaactcatacacccaaggctcagggaacattatggagagaagcagggagcattgtaagagccagaggaccagaatgtcttctgtggaatagtgtcttttatgtatgactcggtctacacctatgaaagtttaacaatatgatcatctaaacgagatctgcaccatggcaacaccagttcacactccagtgtagatgaagaaaatctcacaaggccccatctctagatgaagagctataggcagttaatggctgccaacaggagagtaagtcatctgcaggaacaagccccctggtaggttatctaatcccaagtgggcagccttaggtaaacatattaaacgaactcagcatgttgtacgtgtacatacatacccactaataattgaagaggccatgacattgtaaagaagttggaaggtggataggaggagttgtatgaaattctttaaaaagttaaaaaaaaaaaacccaaatcaaatggaataaaaatgaatcttcaaaacaataagaagccaagtttgttgacgcatgctttcaatcacagcacttgggaggcaggctgatctctgagtttgagaccagcctaagctatatagcaagatttaggccagccaggggtacatagtaagaccctggctccaaacggaagttcttgcatgcccatggcatgggtggctaagcagtctgcctcccgatcagctgcacatgcatggaatgctgtttctagtcacagtcctgggtgtgctgctgagctatgtacatggtttcttgctctcctgttttgagttattgccgatgcaggcaatgttcaggtcatctggtaggtagcttttactttgataggaatggctaaactatttttttaacataattgttagttttcattctcaagagcagtatatgaagggtttggctcctccaagttcttaggtatttttaaaccttaagtaatacataaaataatgtcttaggagaattttatacatatgtatcattgtatctgctcatatttccccttttctctttcatgtctttcagtgtgtttattgctggcttccaggaatacaccaagcccatgattgatcacctggtctccatgaaaatcaaccattgggatgggtaggttttgtctttgtgactctcagaaaactctttttttccccctcaatggcaagagtttagttgagctttgtaagtttatgagtgtattttctcattataggtaaactatttttaaatgaattatttctgagaagtaatgaaacttccagtttgtgtgtggcatgctgttaaaggtctatttgtttcatttctggggctgttggttgggcaagtctgagttgtaattatttctgaataccttgtcacatgtaatagggaagctacagcctgaggacagtgcagtccaactggggtagcctggtcttcttcatcagttgccctgcctgcacactggttctgctctgcttggccccccctaggtatcttatatgttgtaacttaactgctgagcagtctttagtggtagttttcatagttacagtagaagctttggggctctcatggtattttataggtagttaagtgtgtctttaaagaggaaaggcaagtgtgtaactcagacgttagcactgtcatgttttgccaccatctctaggcaggcctggtcagccaaatgcagatgctggggaaattagcaatataatcatggtgtcccttccataaatcccagtgtcagagtggtttctttgtagttcactggggagtgtttcggtttccaaaagaactaaagccttaaaagtattttttaactgctgccatgtttctgtagtgtggggctctctggcgtgaagaaactctggcccaagcctccatattgatcatgcacatcatcctgttatatttgttattatgaaatatttctctttgtttcatagatttcttcaagtgtaacgtgatattgaaatgtgtgcatgggcaattggctttttctttctttttttcctttttctctttttaaagaattatttatgtatgagtacactgtggctgtcttcagacacaccagaagagggcatcagatctcattacagatggttgtgagcctccatgtggttgctgggcattgaattcaggacctttctaaatgtagacagtgctcttaaccgttgcaacatctctccagccctcagcttttcctttaaagggacagatagttaatgccttaggtctctgactcatatatgtattatcttttctttatataacccttaaaaatataaaaactatccttaacttagagccttacacaagaaacctgggcagtttttgatctgctgactataaatcatcatttttgttatagcaagtgtcagaattctttttcttgttagttgaacaatattgcattgtctatatctatcatattttacctatctgttcatctttgatagatctttgggtgtttccatcctaaggctgtgtgagtgtgtaaatctgtccttactaacagctccgttacttctcagggccatccgagaactgtctgcaaaggcattgcacaacctgactccacaagtacccgagtacatagccatgcacggtaggtttacacactactgcctgttgcactctctcacacatgtgcacgtgtgtgcccctccccatgcacagacacaacagaaatgtgctgttctcatagtgggtgatgataatgaagtcctgaatctgttgctaaagagtaagctttgggccaagtcagggtagaacaatgaagacaaatgcagtgtgtttgtccagtggcagccttgggtggcatcaggcacaggtgccatccaaaaaccaaggaattgtactgtgggctgcactgtgcaggttaaggatgatggtgaactccagggctgattggagtgggcggggcctctagattggcctgcactcggaatttggagctgttctgctttctccttcctaagtgtcagaggctgaggttttctgttcttgttgggagggagtaatgaatggaagtgcctgtcacctttcacggatgtgtggcctttgctctcctcaggcagagtactgccaccacctagcaggtagaggtgcaggcaggaaaatcagcagacatgacctctttctcagtggtctctcactgggcatcggtgcctggatatctatactgttgtatatgctgtgtatgtgtatatatgcctagatgtatctgctgtgttctatgacatcgcttggttgcccaggagggggctctgcccattagaaacagtggtggtgaccctgacagcgttgactttcagaggaaatacttgtaagtaacgtgttgttctatgtgtctctcaacccgactattgcagtattccctgcactactgttgatgacacagagtccagatctacacacgagacatggtgccatccttgcctgtgcagaggtcacctatgccctgtacaagctggccacacagagtaacaggtaggagatgccattggtgaagctaggtgatagtagtgatttgggggtttgagaagagcttccctgctctgactgttgatcatttgtgtatttaaggctccatttttacactgaggtggtcagtcataattctgtgcttccttgtctatctggtttctcctcatcatcccaaagctatgactcacatgatgagagaaactgttcaaaggtggcacttgtcatttgtcactgtgtgtgaatgtgggagcacgtgtgtgccagagaacatgcgcggaggtcagaggaacatcttcctcatgttccactttgtttgagacagtgtctgtgagcttcagctgattctctggtctgtacctctcgtctccctgggattacacatataaatgcatcattgtgtctggcttctccccgggtctggggatctgaactcaagttgtttgacttgtatggtaagatactttcttgatgagtcttctcctcagcccccatgtgtcacttgaataatttaaactgctttgagctaggcagtagtggctcaaacctttagttccagcacctagaaggcagagggaggcagatctctgagttccatgacaggcagggctacacagagaaaccctttctggggagaaaaaaagtcaaagaagaaaaaggaagacagggtaagattggaagttctccttgaatatttccctctttggctgagcctgtaatgtaaccataaagtaacaggtcaaggacatgcacaacagtgcatttcaagagctgtgatttccttatgtcactgtgcagccgagtcctcgagagtaaggacttagtgcctcacagtctgtgaccttccttccccttcgagcttgagacttgtatataagtcctttgtggttgtgtacggtggctccctaggccaaaatgacagcagatgggcacatggacttcattcctacctgtcagtcagtcccaagggcatttgcttgtcccctggctccagagcacagctcacagtctatatgggtagaatgggcacctagttgttgatgaccctgctctccttggttgtggcaaaagtcccatgggccgtgaccttcctctgcagtgcattgtgatgatggtaaggtacatttgagacccgttcccaagttgctgggtcgatatgtgacctcagggtattaggcagtatggtagttctgtgcagcacgcaggagatttcagacctccaggggactggactctgtgtggctctgtctctcacttagcagagtagcttctcccagggagttggagttagttaccacgtagctctgcctagcaagtagaggatattagatccccagggtgttgtggctgtgcatagtttggcctaaagcacaggaggttgcagatccataagtaactcacactgcataattctgctagcatataccatatctccaaaaaaatcagatgttcagtgcagactgtagtttatctgatagcctgtgttcagcgagctgcagtgggagtcaggtagggtaccccctgctgaagacttaagtgctgggttgactagcagcagcctttctgatgacaacagaaaacacctgtggaaatccatgtccgctgtaggggccttaactcttccacagtgtcagcaggagcataatggtcagtaaaggtgcttctgttttgataataaataagattgtgtctttagcaaactgaatgtaagcataaaggtgtaacactcagatgcccaccttctgtaaccaacacagattgtgtgtctgtgtgtgtgtgtgtctgtgtgtgtgtgtgtgtgtgtgtgtgtgtgtgtgtgagtgatgtacttgtccatgtgtgtatgtgtggaggccaaagattgacattgtgtatcttaccttccctggttgctctgtcttactatttgttttatattttaaattatatttaggggctggagatatgactcagtggtaaagaacagttcagaagacccaggttcagttcccagtacactcatggtggctcacaaacttgtaactccagttctagggactctagtatcttcttctggactccatggacatccgtcatgagtatggtacacatacatgtacatgctggcaaaactactcatacataaaagaagtgttgaaattatacttatttatttatttgagagagggagagacaaacagaaacacatggggatgagtttgccaagatgcacatgtggaagtcataggacaacttgaggggaatcagttttaccttgtgggtcccagggattgaactcaggctgtcagtcttggcagcaagtgtctttacccactgagccatctctccagcccccaatacagctttatttaaggctgaagtggcacattttcaggggctgtgggagcatgaacaagaagctgatctttctgagcttatgtgaacctgggctccagtgtaatccttatgaactcggcattgtgtctcaccttctgcaggcttgtcacagactatctggatgagaaggcagtgcaaagcctgaagcagatccaccagcaggtttgtgtggtccatctgaaccccctctacctggacaggatctgcttctttgagcatattgtattgaccaggacacaatggcccaatgggctctttccaccagcatgactcctgtgagggtttatctggaattggtaactgggatagattcatcctctggggccaaaatccatcttattggatgggcattgtgtaggtctcagggctgtgttggtgtttcactgtgggccttaacaggagttcccaggtgagggatgggcatgtcccctctgtttggaccagacagtccttctggagtgtcaagtacccataaaacaaaggcctttgcttctgtggctctaatttctactgtcctgaaatttaatactgaattttacacattttggggactagaagaaaatgtgtatgttttttctgggagtttgagattctcaaagccatctatgacataaaagaaaaagtaatttatttcctaaggaattaaattatttttttgtttttgttttttggtttttgtttttttcaagtcagggtttctctgtatagccctagctgtcctggcacttactttgtagaccaggcaggccttgaactcagaaatctgcctgcctctgcctcccaagtgctgggattaatgtaaatatttttctattccatacaattttcctctttttatactaacgaactgtttgtctcagatcatgactatggtgaggccatttgattagttttatatttcttgcttccaagtggagcctggcattcttgtcaggcattcttgaagtgagggtgttgagggcagccctatgcagtggctgaaggaatggaggctctgtgtcctccattgctagggtttcctgttgctgaggaacatgggtggtgacagggctgctacttttagttttgtgggaattacagatgtgtatgaaggggttgtgaactgacagtagttgtgtgaatatccagcaagtatcagatgtactcacaacaacaaactaaattatatccagcaaacatcaaacatactcacaacaaactgaattacttctgagtctgaagactgactccagagccatttgtcagggtttgttttatgcttgtgtgtctatcagtgggctaggatggaaggggacaccctctttctccccactgtgtgccttagttttcccttagaagcaatgcacctgaagaacctaaccaaggccaggcacagtgagttgggggcctttgtcttctgaccttcctgatggactttctggcagtcaaaagctcagctctgtcaccctgccatcattcttgtgttgacagccatcactatatatataacaaattctttaactcaaataactgatttttggctctttaattttagctttgtgaccgccatctctataggtaagtctacagagttaagacatcttgtgtctaatggaaatgtgtgttgtggaatagttggttcaccgaagcacttaaattacatctatgtgcgtgcgtgtgtgtgtgtgtgtgtgtgtgtgtgtgtgtgtgtgtgtgtgtaacacataccatgtgtactagtggcagtcagaggacaactccaacttgtaggagttggttctttccttctatcttgtgggtcccaggaatttaggttgtcagacttggtgaaaggaacctttgtttgctgtcccttgttgtccttgtaagtagccaatagctgaccttcacctgtcctcactcttccacgtgcaactgtcactcaacccagtagtcaagggaatgatggttgcaaatctttggtgcctttcagctttttggaagctaaagtcacaggtcatggcaccccatgtttcagtgtgtccttggcatttctgtggctgaagaccattgtgtcctgcccaaatgagcaggtgttgcctactgctcttggtggctgttggctctcggggtcagaaagcttgagtgctctctgtctctgcagtcttcctttttttagactctgtgcaggaaggataatatgtaaagcctttaggtctggttctttctctcagtgtttttgaggttcatccatcttattgtatatataatttatctctcttgttttattttagattggtattactatgtctcattctggtcttttaaaaatattgattttgattttatgtatattgctggttttcctgactgtatgtctgtagtcaatgtgtatgctgttcccaaggaagccagaaggtgtctgatatcctgcacttggttgttagctgtcacatcggcactggtaattgaacctgcatcctttggaaaagtagccagtgttcttaactgctgattcatttttctagccttgagaattattcttgtcttcatcttcttcttcatctttgtcttcatcttcatcttctccccctcctcttcctcttcctccttttccttctcctcctcttcctccccttcctcttccttcccttccgtttcctcctcccctcctcctcttcttcctcctattcttcttcctcttcctcctcctcttcctcctattcctcttcctcctcctctcctcttcctcttcttcttcttcctcctcttcttcctcctcctcctccttcttaatagtttgtttttgtttttctgttccctagatctgcctgtctcctgagtgctgggttaaaggcatatgccaacacatccagccctcattcagttccttgaaaatattcaccatctgtcttgttgagcagtaaaagctctgtatattctggatctaagttctgttagacacaggatttccccgttttcccctccctctctttcatgtcttgctgtgttgtttctttttgtggtgtggggctgaacatttactgtcctgaactctggaagtgaggagccttacttcccgtgcctcttactgactcctctccagactttgggagtaggcagtgaaggtgggcacacacagtgagttatgctgtgcctgggagcttttgtgggctaatattatcccagtctgggcctctgggcttgtcagaactgtcacataagcctcaccatcttaaccacttctctctgtgaggactttgaaacatttttatttcttgcttttgccataacctactcctgaaactgcctaggttttgagtaaagattccttgggttttttgtttgttttgttgtgtttcagtaggatgaaatgccttgcagaaaacttactaaaataatttaaattgggggactggaaagatggctcagcaactgagagtgctggctgcttttctagaggactcaggtttgcttcccagcacccacatgacaattcacagccatctgttaattccagttctggggatttaatgctcttttctggcctccatgggctccaggtatgcaaatgacactctgaaatacaagcaggcaaaactcccatatgtaaaaaaaaaaaatgtttttctatttaattcttatagtgtttgcttaaagctacagaagagacttaaatagtacagaatttgggagaacagtgtgactttatttggagagcttgtaagctacaaggtgtcagagaagtggcatctcaggccctcagtaggaggatgacgactggggtggctgctgatggccgtgcctttgatggtcacagtgtacttatctccatcgggttcgatagcttctcgcagacagcgtgatgatgaacatgagtgtactacagctttgggccatgtgacggtcgtcttggcattgtggagtgtgttaagcagcatttgggattggttctgtgtgatatattggtgatgaccaagtgtcctgtggaagctaaaaggacgggagtctgcccgaggatgatcttttcatggcaattttgggtttttccaaaaatgtagcgctaaatcacctgattattgaaaactgtcatagttttgggggcctgaaggtgtatctgttgcttagtggggtgtttcatgtgtaaaagactttaactgtcttcttcctttggttttcaggggtcttggaggagagcttatgagacaagcaggtaggtctggggtcagaagctgctgtccttcacttgaatatgggggaagagtaccctgaggtcagaccagacctcccagtaacaggtggtagctgttcccttctgttggagatcttgctactgcccctggcttgctctcggtatgcagtcagggatatgcagacatgcttcctagcctagtatatctagttaccctatgtcaatctgtggggctctgatgtgtcttacatgccacaggactggtcactgtgattaggcatagggatatatcagctgccaatttcttctatgtactaagtactgcagaacaaggaatggtttcttagatcgtatgttaatgtccaaggaatcttacagcataatcaggtgaatattcctagttagttgaatatgatagaaaactcaggttcttgctggcttatctgggtctcaagtcgagccagaaattggttggctgttccatcaatttctgttccatctttacccctgcacatctttaggcaggacaaattttgggtcaaaggctttgtgactgggtttgtgaccccatctctctattagaagtcctgcctggctacaggagatgagagtttgaggttccatagttgttaggagtcttacctagagtcaccccacagatttctgggagtttccatcatcctaggtttctaggaaaatcccagagattccctactaccattaccagcaccaattctagttcgctttctctctctctctttctctctctctctctctctctaccctccccacacttgatcctcctgttctccttctccccctcccccctcccagttccttctctccactcccaatgtccattctattttcccttctgagtgagattcaggaattcccccttgggccctccttgttatttggtttctgtggattgtagcttggttatactgtagtttatggctgataaccacttataaataagaacataacatgtttgtctttctggatctcagttcctcactcagagtgatctttcctaattccttccatttgcctgtaaatttcataatgtcattgtttttaatagctgagtaatattccattgtgtaaacatattacattttccttattcattctcagttgagggacatctgggttgtttccagtttctggctactaccaataaagcttctgtgaccatagtcgagcaagtgtcctggtggcttggtggaacatcttttgggcatatgcccaggagtagtatagctgggacttgagagagaactattcccaattttctttagaaaccgccaaatttccagagtagaaatcaactgtactagtttgcactctcaccagcaatggaggagtgctccattgctccacatcattgcctgcatgtgctgtcacttgagtttttgattttagccattctgatgggtgtaaaatggactctcagagtcattttgatttgcatttccctagtgactaagaatgttaaacatttcttttttttctaatcaaatatatttattaaaaaggaaaaatcatttcatttcagtaaataataaaacagacagtgaactgttactgtgaaaaaggacatgggtgttccataaatgacaaaagtttatagaacagtgagttaaagtctacattgtacatggtgccatactgcacagagagtggagatgggaagtggaaatgagagtctgtacagatttctgcaatcactgcttaggtctgaggaatcactgagtaagcaggagagaagggagagggtggtggaatgttggtcatgtagcacagagaaattattcaggtctcaatatagagcctatcacctggaggaatttcatttgaattaaatcaactctgtccataaaaggtcaagaactgtctataagataaaggacaggatcttcctagtgaacgatgttccattagtgttaaacatttctttaagtgcttttcaaccattacagattcctctgtcaggaatcctgtttagatctgtaccccattttttaaattgggttatttggtttgttgatgtctaatttcttgagttctttatatattttggatattgcccctctgtcggatggaggactggtatagagttcttcccagtctggaggctgccactttgtcctttgccttacagaggcttttcgggttcatcaggtcccatttattaactgttgattttagtgcctgaagttggtgttctgttcaggacgatgtctcctgtgccagtgagttcaaggctattccccattttttcttctatcagacttagtgcattcagtcttacactgaggcctttaatctatttggagttgaattttgcgcagtgtgatagctaaggatctatttgcattcttccacatgcagacgtccagtcagactatcgacatttgttaaagaggctttttcttttccattgtatagttttagcttctttgtgaaaaatcaagtgtgcatagttcttttattttacagggttttttttttttttttaaagatttatttatttattatatgtaagtacactgtagctgtcttcagacactccagaagagggcatcagatttcgttatggatggttgtgagccaccatgtggttgctgggatttgaactcgggaccttcagaagagcagtcggcgctcttaaccactgagccatctcgccagccccctacagggttgttttaactatcctgtattttttgtttttccatatgaagctgaaaattgccctttcaaggtatataaagaattgagttggaatttttatggaaattgcattgaatatgtagattgctttttggtaagatggccattttttactatgttaattctaccgatccatgagcataggagatctttccatcttctgatgtctccttcagtttctttcttcaaagacttgaagttcttatcacacaggtctttcacttgtttgtttagagttacaccgacatattttatgtgtgtggctattgagaagggtgttgtctccgtagtttctttcttggcctgtttattgtttataatgaggaggagtactgattctgttttttgagttaatttgtacccagcaccttgctgaggtgtttattagttgcaggagttctctggtagagttttgaagtcacttatgtatactgtcatcatctgcgagtagcaatgctttgagttcttcctttccagtttgttcctccttgatctccattagttgttttactgctttagctaaaccttcaagtactgtattgaatggatgtggagagagtgggcagccttgtccttggttttagtggagttgccttaagtttctctccatttaatttgatgttggctattggctttctgtatattcctttattgtgtttaggtatgtgccttgtgtccctgatctctccaagacttattgtgaaggggtgctggattttgtcaaaggctttttcagcatctaatgaaatgatgatgtagggttgtttttttttttcttttcttttgtttgtatggtggattacatcgatggattttcaaacattgaaccatccctgcatctctgggatgaaatgtgcttgatcatagtagatgttgtttttcacatgttcttgtattcggtttgcaaatattttattgagtatttttgcatggaagttcataaaggaaattggtctgcaattctctttctttgttgagtctttgtgtggtttcagtatcagagtgactgtggcctcataaaactaatttggccatgtttcttttgtttctattttgtggaataatttgaggactattgttattagctctgttttgaaagtcggtagaattctgcactaaaaccatctggccctggactttttttttggttggtagatttttaatgactgcttatattcccctaggggttataggtctatttaaattgtttaattgtttacctgaccttgatttaactttagtaagtagtttctatcaagaaaattgtccattttgtttagattttccaattttgtggagtacagattttttagagtaagacctaatgattctttggatttcctcagtatctgttatgtctcccttttcatttttgattttgttaattttgatattttctctttgcctttttgttagtttggctaagggcctgtctgtattgttgatttttctcaaagaatcaactcttggcttcttggcttttttgtatcgttttctttgtttctagtttattcatttcagccctgggtttgactatttcctgctgtctagtcctcttgggtatgttggcttcttttttctttagagctttcaggtgtgctatgaagttgctaatgtgagatctcactaatttctctatgaaggttcatagttctatgaactttcttcttagcattctttccttgtgtttcataagtttgggtatgttgtgtattcattttcattgatttgattttccttccttccttccttgacccagtggtcaatgagtagagagttgtttagtttttctgagtttataggctttctgttgtttctgttgttgatggagtccagctttaatccatgatgatctggttacatacaggagttatttcaattttcttatatctgttgagacttgctttgggactgagaatttggtgggttttttgttttgttttgttttgttttgtttttttgagacagggtttctctgtgtagccctagctgtcctggaactctctctatagaccaggctagccttgaactcagaaatctgcctcccgagtgctgggattaaaggcacgcaccaccactgcctggccgggcctgagtatttggaagtagagatatgatacttggtagtggacttatgaaaaggatgtcaggctggagacatggcccagtggttaagagcactaactgctcttctagcggtcctgagttcaattcccagcaaccacatggtggctcacaaccatctgtaatggaaatctggttcccttttctggtgtgtctgatgatagcaacagtgtactcacatacataataaatgaataaatctttaaaaaaaaagaaagaaaaggatgtctattggaatcaacatgttctcctcatgtatctgaactgtgaggtgtgcccatcaactgtaacacggtgactggccgtcagcagaatgttatgggcacatatttgctttacatgtttatattgtttttaaagaattacaaattattcagaagaaagcccactaaatgttttcattttagtgtagtgtatataaagagaccaactgggctgttgtagcagtgtgatgaggaggaggttgagcaggcattgacaaacaggggccagggatgaggtgaggggcctgagccatcactcaggcgtgaagagggggacccaagtggtcattctgggggagtgtgagggagaacccaagtgatgactctaagaacaggtgtgagaaggcaccagtgagtgtgaggacagaccaaggagtcactgtgggcagatggtataaggagagggactggctgtgcccacctgtgtcacctgcgtctgtccctggtcctgttattacaatagaggctttatcacttagcaccatacttcagggagtttgtccctgttcatgttgattggcatgagattctaggtttataaataagagaaacatacttaaaattctctttctgcattgccatgtgatgatgtgtatgtggaaaacaagaggggatggcagcacaaaggagaggcaggtgtgagcatctgaattcaggtggtgcccaggcaggccatatctggcagagagtgaccactctgaagtacggccctttcggctagtttcccacacagctccttgcatgcacagctcctcctctgctgatagagatgttcagatgttactgcatttgaccactgccttaagttgtcttctctatgtgatttaatggcatgccagcctgttttgttcccaaccgtggattgagtcattattttattatgtcacaaatcagatagcagcactaatagatgactagcattcaccagagcaacatccaggcccatctctgagggcagtaggttttaccaatctgattcttaggactgcactgcattgtgcttctataatgaccttgtgccttacatctgttatatccctagacatcctcttgccttatatccctggattccaggtgcttatctctcctacacctatggatctctggtgcttccctccctgtatttctgaatctcaggtgcttacctatcctacactggtatgacccaagtgttcacctcccttatacctgtggcctcaagatgccccccccaacatttatggaacctgcatacttgccctccatctataaaccccaggtgctcacctgtcctatgcttgtgtgccgctaggtgttcattcaagcgctctgactatgtagcctttgagacttttttccttggggaatgtatatttgggtccaggacagccattgtttcctaagtaggtaattttgttttttctgttgtagttgtcattttgtgagacaagactgacctcagggcctgggtcactgaactgcttccattgctattacaaaatatcagaaagaaaaaaacaaaacagaaaaataccagaaaggaaggcttattttagcttgtagtttgatgttgcatgtatttaaaaaaaaaaaagaagaagaagaagaagaccgagccaattgctgggcagaaggtacaggttggacttctgggtcccaggaggaaaagagagatgaagggaatgagaggggctttttttttttttcttccaagacaggtttctttgtgtagccttggctgtcctggaattcactctgtagaccaagctggccttgaactcagaaatctgcctgcctctgtcccaagtgctgagattaaaggcatgcaccaccaccgcccagcttcggccttctttaataacaagtcaagaaccaatttgggaactatacgttagtatcagcatctccccttacacagacccatcatggcagggaaactgaggcagcgagaacagctgtggttgtagctgtaggagtgtgaggctctggttacatagtatgtgcgattagaaagtatagaaatggggtgatgctaatgttccattttatttgatcatggagagaaaaccatgcaacggtgttgcccacattcaaggtgggtcttttctcctctgggaagcttctctagaaactctaccagactaaatacaatcaagtgacggtctagattatcccacggccaagtgaggctaaggtgctcctccactggccgtacctgacttgaagtgttcttaaccttacttggatctcttgagttcacacaggttctttaagagggctccccaagcttctgtcttcaggataggtctggagtatcttcttcctagtatccatctggggagatagcctggacttgccagcatgagaggtgggagggaaggttaggtgctggctataccctgtttaagatgtagtgaggtcagctgtaagagtcattttggaaaaataatgtgttttctttttctttttccatagtgtgcatcttaatagagaagctgtcactttccagaatgccatttaaaggggacgccactgtcggtaggtgctttcctcaaccacatagataacatttccttacagttattcaagttcaaagtaagagatgaacctgcagggtgggtggatgatgcactatagtttaaaggatcacagcattgctattgtcttgaaattgctgcaaactcctgtcatcctcttccagaaagggcagggagtccttctgggctccaccattgtctgtggctctgcctgtcaccattgtacccaatcctgagcatttctgtcccaggtagatgacagtctagatggccaggtactcatttattatctaataatcctagtgctacacaaagggcagtcccaggcctgcataccctgtctaaagttactaattttatttagctggagacagtgagtatatctcaactcatttattggatgtagttgagttgaagttgggtttaaattgtcagggatcagaagaaattgagggagagagataggaaaagatcacttgaagcttgcaactgtaaacaaaacaaaaagttcccaaacacagtgtgcaagtctttggtttaacagtgaattgcattttctccacagtgatggtgatagcagggtgttgagggagatgactctgagcagcctgaggtgggcttcttcctggaactggggctcttgggcttttgtgcagttggaagaatgttctcgagagagaagtcaccatctgctctaagagtaagcagaagatgtttgttctcaggatcagcgaagtattctgaggtgggctgtttctttgctcttttggcagaaggttggcagtggctgataaatgacactctcaggagtcttcaccttgtttcaagccattccagacaacagatcaaggtatgctaagcaagatttctttcccctgcccagagagtgacgctagtgctgtccacagtgcctgtctcagtggctgtctcagtggctgtcctcagtgcctgtctcagtgcctgtcttagtgcctgtctcagtggccccttcatgcactaacccgacagttttcaatactgtcattaggcctgcatggtttgcacaggtaggctagaatgaccattagtaaccacaaattcctctctcttactatactttctgtctttaccaaagtttttccctctgttttgctagtaatggtttgcttaggtcatgcctgagtgctggtgtggaaagtattggcatgaagatgaagaaacacaaaagagactgtgcttgagcagatagatgctcaagctcctgtccatgcctcagggtcaggtggccttgcagaagcagagctgtgacatgtgacacattttttaggcagtaagctgtgattgttgatattttggaaaggcagtgatgtgccaggtgaggactggaaacacagttatgtttacgtgagccctgccaacctgtgtttccttctgttttgtttcttaggcaacattatcattctgtggaaatctgggattgtgatagttttcctggttaaagttgtaggcctcatggttgatgtctcagacttttcttttaaaacactgtgcataatccggtcccaccagccaggattatggtattctttgctgtttgattagtgcatgtagcatctgtgtggtgtactgaggggtctccccgtactgatcttcaccctgtccctcctcagttcctttctccttagttttgggaagagtttgaatggaaggcttggattgagttggaggagattgggatccaaggatatgccacgcagccccctattctgtgtgacgctgcatcatctagcttcaacttactgggctgagattggttccaaactctatgttctgcaaaccctcctgttagagatgccgagaaacccgtattctgtaaaccaggttccaccggtgccgtttgagctcttgtccacataaagaacaccctccatccccacattccttctgctgggaagggaaaaaatgttttgttttatattaactgtgccatttgagagtacatagaaattgtactgtatggaagaagtaaagagttcttactttcggtttactggtgcagagaatttaaagtgattgatacatcttgacaggtgctgataagacaagccagagtgtaacaatgacatacattgattttttttttttaaacctactcattgtgctctattgcagagacccagtcacctgtctgtgcctgaggacttctcggacagagccactttcacttatgtcctcttctgttttaggaggtggctgtctctgccctgactgccctctgcagtgaatactacgtgaaggagcctggggaggcaggctcctccatcgcgagtgagtgagctgtatgttgggcctaaagcagggatctgcaggagctgggtgaagcccaggaggcttgggctgggttggcctgagaagcaaccgtgtctggtcacctttctggagttactctcttaggacccacccagctcgtgccaggcgactaggctacaggaaggagggaggtctctgttacacagaatccttcacgtagctccccctgagccacttgggttcaggacatgtccttagatctgtccagacaacatagctgcccaaggaagcattttatctctgaacagggagcttcactagggcatgacttgtagagactctgcgtaaaagtgggatacaacagtgtccagtaatttacatttcctttttgtgattttgcaaaaatataaaaatatactggagtttgatcttctggcagatacttttgtgtatggtatctgtgtgttcatgtttgtgcacattgaggtcagaggttggtgctgggtatcttctttagttttctttcttcctcccttcccttcccccttcccccttcttccccctttccccttccccctttccccttccctcttcccttcccttttcccttcttgagataaggtctttcagtgaacctggggctcactagttatgctggccagtgagccccataaatcctcttgtctgccaggtcctcatgcttgaacagtgagccctttacggactgagttgccttcccagctccctggcagactttcccctgttttctttttttaatctttctgttttgttttatatgtatgtgtgttttgcctgtgtatcgtttgtgtgactgatgcctaaaggggccagaagagggtgtcagcttccctggaaactgaattaaagatggttgtgagctggtggcagacttgaatctagtcatttttacagtgtttatcaaccatgggcaactttatgcattgatagtaacataattgtttatacgtagtctgtattttaaaagtagagcaataatgtcacattgtacttttccaacaaagtaccatgtcatgtcggttgacaataaatggcgtccccattggtgcactgaaacatgagtagactaaaaagacgcccctctcctcacatggctactgtagtgaatttaccctggtgtgtgtgaattgagaggatttctgcctccacatttgaggatggataagagtatatttctggggtttcagtgaatgggtcctagcagccaccaatggctaaagtctgactggcagggcacagggatggtatccgcctccttgccaccttcctgagctgtgttgtaaaagaacagaactgacttagtcagttttcaaattcttcccctcgccctgctctgactgcctaggctcgtcagtttctgtttctcccttgagatctttgatcctgtcactgctgcacgaatggccctgtgtgcttcatcagcattgccattgtgctctgagtgtcccagaatttggggaatctaacttgtatttctaaggggtccttgaggcagcggtcacttctgaacacttctttcttttcagaggagctgattccccagtaccttgctgagctccagagcccagaggagatggcccgttgtggcttttcctcagccttgggtgccctcccaggtttccttctcaggggccatctgcagcaggtaagggtgacaacagcaccacaggggcacagatgtgaagggccggcaactaatctgcacacctccgatgaggaaggaattcccggaggtagcacatggccatgcaaggcagtggctgttggaccttgactccagtatgtgggctaacctgctcttgcaagacatacttacagagttgtgcacaagtctgtagggtgggcaggcactgtctgaagaaactgtggctgcctggatgagaaggcagtagcctctgtgcagtagctagtgccctgaacgtacctcctaggcttataaccatctcagttgatttccctaataatggagccgtgaagttaaaattccttctgaaattccatgtaccttaagttgcttttgatccaccatgtttatagtcatggtaggaggtaggctaggtatgggtaaaggctgccagccccatgtctcagcctggtgccctatgggcctctgcctgcacctcagaatatatcatgcattattgttttgctaccctttgggacactatttcccctgccatggcagtggcaagctgtaaagagcaaggttgttcatgctctgccctgtgaggtgccaagtggacctctcagccttagcaggcccctcatccagcccctttgatctagaaagaccatgacgcgtttcctctgctggatctatcattgaaagccatgagttgagaggcttgttcatttcttacatctaggttgtcaccccaggtgccacatggagtgctctgtctccttcagtctcctctcatattgtctcatctactctggtgtagcctgctctctcccctgtataagctctggacatagttccagtctggctctggagactttcctttccacacttacctagtccattaagttcatccgctcttctcctctgagtggaaacaccaggcttggtcctgccaacacgccccaagatcctcttgttgtctgtcccccttgccatacaagctgggatgcactaagacaaattcaccacatttgcttttatataagttggtgtcctttcctcctgtgggaccagatagcttttgatggtgtgccgataggcctctttatccttgtacagagcctatatacatctgtcataataactgccctcccctggggtttatgcacttgatatgtggctaaaaatgaaagagatttttagaactgagctgtcagcccaagaagtagtagcaggagctgtagagatggctcagtggttaagagcattggctgtactacctgaggtctgagctcagttcccaatatccacacggtggctcacaaccttctataatgggatctgatcccctcttctccctgatgccctcttctgtcatgaagtcatacatgcaaatagaatattcatatgcatacatgcatccatacatgcataaatagaaatagtagccctgggcttacatggtagctcagtgaataagtcacttgctgggcaagcctaatgatccaggtttgacccctagaacttatgtaaaggtagagagaacctttaggtagaacttatgtaaaggagagacaacaacaaagttgtcctccaacagcctccatatagaggctgtagcatatttgattatatagacacacacacacatatagaggtgggtggttgggatcaagaataccaactgttccctctacaaaatggaaacagtagacaggaagatcttgtagggatgagctccaatccatggcagtcactggggtttgagtgaagctgagagggggctgtgggatgatctcttcattaagtccttccagaagctgaatcagggcatgttgtctagtgtgggaattggctcctgtgagctgcctagcaagccccacccatggctactgtgctctgtggctccagagctacatctctgaaagagaagcgtgttgatagccacactcgacggtacacactcatagcactgagggtggtgagactggattctcaggttcaaggccagactgggctacttactgcaactgtctaaaaactgtgcttgctttgtgcttgatacttcttttgggaccctcttgcccttaggttctctcaggtctgagaagagtcacctgtatttctcccaatgatgtgagctttgctgaagcccggagagatggtttgaaagcaatctcaaggtgagcctctagcctggcaggcgggcatcaacaggcgccacgtggtttgtctgtcaggctagcccagagcaggaatgtagaggtgttttcagtgcaatgtcagggaacatttgcatcttcactcgaaggctacctcagaaaccgagctttgaggctagccctggcaacagtgaggctttatatgaaaccaaacagaaacaaaccaagccatcatgtgggccttggagcagcacagtggcagagttcttgttaagcttgtacaggctatgggttctttcacagtactgctaaataaataaataaataaataataaaattaataaataaagtggatgaagacatgagttgaggcattcagcaatgcctgaatctttcatcttagtgacttctgtgtgtagatgcagtgtgtagggccatgtatgcctcttttagctccccgtggtccttcctgtgagccatttactcctctgagttctcatagctgcatttttataggggtggaagaaagagccagctaccttgcagactgtgggggcggtgaaggtgacttcacagcgagcaccattctgtacctgcagtgggatgggtgctctgcccccctaagtcttcccctgaggctcctccggcatgcccaatgttcccctcagcaagatacttgaggtcattgtaatgtgaagggtgagctcacagacacgcatattttaatttcagaatttgccagacggttggtgtgaacacacgggggcctccagatgaagtcatatgcaaagagaacatctctgaggtttatgctgcattgctgggctgcatgagtgattacaccacagacagcagaggggatgtgggagcctggtaaggacagtgttgtagtttgtctcccctgctgactcacccgagagggcatggcatctcagggaacccaggacaatagtcattaagtcactgtagaaactctcatagcagctgtctgcactgacgtctcaggtgagtagccacgagcttctgcttccctgttatgctgctcaggcatccatggtcctttgagtcagaccgactgtcttctctctcctcctgtacggcaaggttcttgcccaggttgcagaaacaccttgtaaggtagagagcaaggctaatgctgctgtttacgttaacagctgtgccacgtgcctcacactccctcctgctggctgtaagcactgttgtgaagagttcagaaggagcttatagaagattctgtcttgatcgatgtaatcagacatggagagagcatatgatgtgccaggctttaatttttgacatgttcttcctgccttctcattttcccttcctcgcattctgggtgccagacattgtttcttcttacatctccttgcctggtggttaccccactttacggatcactttgaagatctccgctgtcctcacgttccagaaactcaagcacttgtcacatgccaaacaggtcctgaaggtctcttcattttgtcactttttgttgttgttgctctttggttgtataaaagttaattagtttatgttctgctcattgacttttcctgattttctactgtgaagctcattttatagttttaatttcatgtaacgttggtcactaatttacatttgcactgggtcttcccagtgtgtgtttgctgacatttcctatagtctccttattgtaaatatattttcctccacctgaggacatctcccctcaggtccatcagctgttatggattgagttgtctggatattatatgtacagacacaggaagggcttccctgtggctaacctcagtcttgtcagagcctggtaaatggagactttgaggggccccatggccatttccagccttgccaagatttcccccaacacagctgaaatgctgtgcagggaagggatccccacctacctgctacctgctctcctttgcagacccttctagaatgtgccacaggattaacagcaggcagtagcctaagctggcattgtgaacccagcccacacgtggccagtggcttgggcctgtgatagatattggcaggccctagacttcttttctgaggcccctgaactctcaagagacctggttgacctagattcctttgcagttcgagatggaaaaattgtgaatgttgagtgttttttccatggaagatgttaacaaacacttgtttatccagtacagggcactgaagacagaccagaggacaattccacctaagtctagtttagagggtcttgaagttacttacaggagcataggtaaggggttatttacatagatgacttaaaggcagctgcatcactgaaaaggactccctagcagggatgacagctcacaaaacctgcatctctggagactcctgcacttgtaggtagctctgccagctgagagtgtcgtctccacagcagtttttactgctttcatacctgaccctgggcagctttcattagcttcctgtgccttataaattccaacagcttcctgagtcttcgggtcccctcccccttccaaagcaattttactttggactaaatagttacacaacagtgtattcctttgcagtctgcctggcactgggacacccttcccagcaaagcagaaagggccagtgatgaggttctccccgagacctggtccttagcaccttactctctgtggaatttttcttctcaactcgctctgcaaagggtggacaggattctgctccagagtagggtgggggtgggggtccagtgtagaattgccagtagtgaatggttcaattccagacacttttacaccatgtctcctgtttctttcctttctctaaattcccatagacacctctccttgttctttcaaatgcatggcctcctttttcattagttgttatgcactgtgtgtgtgtgtgtgtctgtctgtctgtcccactctgagcattccttggttgcctgtagttctttgtgtaggattaaggcctcctgagccttgcccaccccagtccacataagcatgtctattgttcttgttcagctcagctttaggcagtgatgctggtgagactttatgatctcacagcaaagtccctgttcctctggttctcacaatgtttctgcctcctcttccataatgattcctgactcttaaggctccacagctctgcatttagagagaagtttccttgatgggaggtgaggactgcacttacctgtgggtttaaggaccgaggtttagaatgtagttagggattttgctagtatagtggcagttgtaggttctcatccaggatccctgacatcacaagccttgggtagttggctgggcttccagtataagaccagatttccctctgagcagatattgaatccaattagagggctgttagttacacatacagaaggaagagggtaaaaaaccagtaaggagtctaaaaagtcatatggaattatacggtgttccctccaaaagccaaagaccatttaataaaaaccctaacaagtcacaagaagccttcttttgagttgttggtcgcagttgtctaagaaagtcataaaataatataggctactgctattacccttgattgccccccagaggtggaaggtaagtccctactgctcaagatatcatgagtttcagacacagcctggaggcctctgagctggaactgacctgaaagccccctccctgaggaccagttcccatggtagcagaaggctgcatgcaagcctccacaggaagacaatgaccaacagctgccagctgtggtgtttctgaaccacaacaatcatcatggcacaataaactgtatggtcacattagtggcacacataccttgacactgttttttgttgttgtctttaattcaacagtatctagtcctttctcagagagtccaggtgtttttgaaattctgaccttttcatttactttgctcttcatatttctccttcatatttctcagatagagtcattgtaaagactgcacatttggtcgatctgttgttgctactgctattttagtatttgctatcttttatttatagtttatttagtttttaactgagtttcctaagttatagttaaattgcaggcattagtgttgcatagttttcttttatctggtggtgataataaccagccaggtaccactgagctctcctgtctttacctccaggtcaccgagagtagaagggctgtacagggaggggttccaggtctgaacagaccgggtggtatggggcaggctctgtgatgatggtttcattaaattgctcttgctccctggactaaacagcatttttgagcatacctgtggggtgtttttaccaagaggctcaggtcccagctctttttcctattcatgtgctcagcaagtacagcttctccttgttgctggtttctgctgtggtatttggagcttcatcctgtgtatcacagcttaagaggtggtagtccacatgaaggagatgtacaggctacccccacagtgtgtctgtgtgtgctttggagttgtgcacctgtgtctctggcttgtttcacaggtgtgcacgtgtgtccctcagcacacttcacagtctgccatccctttgtcccctggcattcattgcagatatgtaccagtgtccctgcacacacctttcccaggcttgctttgtgtccagcaccctcatctgactttggggagtgccctggaaccctggcctgcacttgtctgtgagttccccctcacagcaggaacctggtacaggctccatagagggtttgatagaggcagggatgaccccagacccgagagtttgtatctttcttttcctcactctggctgaatgcacttaaattccagtttaaatggctgcctttgctctggaattagaccagtatttttttctttggtacaaattaataacagacagctctgtttagcaagaaagtaagtctaggatggatgtgagtgttggttgctctgtttgtttggtgagaaccagaagtgccagccttgtgcagagagactacaggaggccagcttcacatgggaggaggctgtgggaagtatctgctattacagtgtgtgcacatgtctaaggctttgctcagacttgtccagtctgtcttcaggtgttaagaatgacttctcttgcttgacagtatgagagagagcacgtccctcattccccagtcaagggatttaagtaaagactgccagctgctggcatcgggtttctctgatggttcacactgtgggatttctgtaatctctgaaactttccctgcgtttgggccttgtggagctaagcttgtgtgtggccagtgggtgtctcaagacttttttgcccctcatgagctgcttgtagggtctggttggtagacccaggcagggcttggactccctgtcatagactgaccttctcctgtttccttattcacagggttcgtgaggctgccatgaccagcctcatggatttgatgcttttgctggcacggacagagccggtgctgattgaggcccacatgtgagtatctaaagccagctgaggctggcctggggccttaatgccttctcagacaagcttctctgacccttgtcctggtcctccagagtctgtggaccatggccagggtcctccacctggcctgtgtcagaatccatagtgtaacatacttcccaaccccacaccaggacctcctttgaactggcctgtttgacagtcagcttcggggtgggggagggggggaggctgtagtagtggcctctgaactcagggctctgtagctgaacttcatgccaagatgggctaccatcatttgatccagcctctgtgggtttcaacctccttggccatactgcttgagaccctaagtttgctatctcgtgtgtgccatactttctcagcctggcctctcgtcctccttccactgacctgcaattctgttgcagtgactgttgcttctcactcttgccccaagagtacactgacattcacatgtgcctgtcatgtggctcctgagatgttggagcaggcagggtgcaggcatacccattctgtgttggttagtttcttgtcaacttggcacaaactagaattctttggaaagagggactcagttgagaaaatatgtccataaaattggcctataggcattttcttgatcaatgatttacgtgggaggttccgtttctgggaaagtagtcttgagttctataagaaagcaggctaagcaagctagtaagcagcattccttcatggcctctgctttagttttgcctcctgacttcctttggtgatggagtgtgacctaagaccctttcctatccaagttgtttttggtcatgatgttttatcacaacaacaaaaccctaactaactaagacacaacctgatgtggtttcagcagctgctgataataaagtgaccacgtttctccaggctggcctcatacatgtgccctccatttgcagctgtgagcgcgtcatgtgttgcgttgcccagcaagcaagtgagaagattgatcggttccgtgctcatgctgcccgggtgttcctgactctcttgcacttcgacagccctcccattccccatgttccccaccgccaagaactggaaagtctgtttcccaggtactgtcagatacagatcccctggtagcccagtccctccaagcatggccttcacttgaggaaatcactgaaatcactttctttcaggtctgatgtggccactgtgaactggaacgcaccttcccaggccttccctctcatcacccagctcttgggattgcctacctatagataccatgtcctgctggggctggctgtgtctgtgggtggcttgacagagtctacggtgaggaagcatttggctgtgcagagcaggggacacgggattctttccagagggttctgacccagatgtgtgcacttcacatgtccactgtcttaccagccccatacctgtctgatcctcatgtctctgtagtctgcagttgtatctgtttggccccaggcatttactgtcattgtagtagccctgagaaccaagggagaagctagccatgctgagccacaataccgccttttgggttgcaggtcagacattctacacagagcctctttgagtacatgaaggggattcagaaggatgctcaggtcctgcagagcttcagtgagaccctcctgaaggtctttgaggacaaccttttgaatgataggtgagtggtgtcttcagacagggtacttgtgacctgattgtatttccacagagtccaggtcttccagggacacatttgtcataatagatgaggagcgggacccagccaactcccaagttctagctccaacactcatcttctacggaccccaggaattcatctcctctgtgtcttgctggtccctaggcctggcactgattggtaatccctttcccttgatgcactctcagcaggaaaatgactttgtatgtgtggagatgcagaataccaagtgaagtggagtgaggctctagtctgtaggaatattctccatcttttcttgtctgtaatagccccactgagacataagagccctgaaagacaacacacggagtgtgtgccctggttccttgggatgcgtattccacagatcctttcccgttcaccgagttttcctcctgctccttggagccctcccagctgttcactttggcagacaagcacagttacttctgtctgtccttgttgttgcctggccagggcctgttgtggacaggaactgactcgtttggatattccccatttcctgccctacagacagctacagtggacattccgagattgagtctctgtagacgcacattctctttccttgggtactcattgagtaatggacagctgagtcacgtgggttgcttgtttacatgtaaagatgctggctccctctgttccatggctcaccagcattagtggtccgtctctcaggtggctgttggacactcggttgccctcctagtatctgttcattgccatagcttgtgtagatgggctttccttctcactgttgttttaggatgacttcactatatggggcaagtctctgtcagatttgtagtttgaaggacccagctaccacctgtcctgggcttcagtgagcaaacagttgctgaggaatccccacctaatttggaagtccctgagagctctggtactctccagaaggttcagctttaggttctatcgtcagccctacagtctgaggacacacaaaacaaactcaaaactgtttaattttgcaaatggttgttcagatgttcatactgtctgctggactgtccactgcacttgttttgcatcttgtcaaaaccgtaaggtgtacaggtgaatgctggactctaccaggccatctgacatctatgcatcaggaatcttgttcttatctttgctgtaggtaattcacgaaagaagccacattgtctccagctatattcttattttccatagtcagttggcattcttgtaagcataatgctggtgtgtctgattctaggaatttaacaggactgtcttgagttaccccatttaggaagggctatcatggtgttaagggtttttttttgttgttgttgttgttgttactgttgttaggttttttggtttgtgttttgtttttacttgtcaagagcacgtccctgtttctcacatgggtgtctctaggttcttgggtgtttctgtgggtctcatgtttgcttatctccttctctcagggtgtctgtatcactgctgaaaatgctggaccagctgttggctaatgggtgctttgacatctttactgccgaggagaagtaagtatctgcttgcttagtgctccctgtccgacaaagcctagttccccaaatctcaaaaaaattttattgattgattgacttgccatctcactgtgttgctcagactagctccaaactcgtgattctgcccactcaacctttcaagtgcatacaaatctttggccaccaaatatggctgttattttaaagacagaacacttggattatgatctcagaacccagaagaagacaatgcaaactcaggcaacagacaacaggatggggtgaagtagtgccctgctctccaggtgggaaagtagacttggccaggtgagatggctcacatgctagggctagtaggcagcgaggtctggacgttggagcttgagataaggctggacggaaacaggacagtgcatgggccgtgttatgggacccaggagtatgcctgtgcccatcccagctggacagaagttatggggcacagggcacacacaaagcagctgcttcctacttttgtggtttgtggttccttagcctcctgttgagaggagcagacagccatggtgcacgacagctctctggaaccatctaggtgccagcttcgcttcctgactgagtgatagataccatcttggtgactttagcttctatgaatgccttatggtcttcactgaattctctcttgatttggacagctttgtatttcatgaagatgtgtgagcatctactgttgcttagaaactccctggtggttttggatcttgctttatactgactggtggattcagatcaagaggatctcagttgatgtcctccctctctgagtctttgcccactccagtttgccccattaagaggatctatgcctagttttcataggatcttgtatggggttttggtgtggttttctcccttgatcttgagcctcgtctttgtgcttactgctgaccagcattcaggtgaagccctaaggccaggcgctccactgtctctgcgctctgccttgagatcctgcatgcatcacacacccagggctgctggaggggaccagcttgctttgcttgaagtctgtagtgtctttgttgtttaactgtctgtctttgctggatgctgaagatggcgtttcacctgacactacagggctccctctgacactgtgtagcactgcctttctaaaaccttcccgggtagcttgaacactcacaggggcatggcccggctaggatgctcttctccacaccgatggattcatctaggaaaatgctctaaggatttgacatctatttttctggcttaaaaatttcaaaataagatagtaggaaaataatgatataaatgtttttacttctcttttttgttctttatggattttgaattttggcacatacaaatgtagggctgcctcaaatatcaaatgatgatgtttttggaggtgtttctgcttacattctttggctttttttgttgtttttttttttttttttttttttttttggtagtgttttaatttttattatgtttgggtttgttttgttttgtatgtcagttgctaacagtatatgtacttttgtaaaaattcaacctgacaatctgatcttttaactaagtctataaatctatttcatttaatcttactagtttttttattaaagtaattttgtgtgttctatgctttgtctgattagcagaaccattttcctccattgcattttcttcatttctgggactttttcctctctctgtgttcctcgagagttcctaatactatttccattcactgtgcctttgtacagttagtgcttgaatgaaaaataaaagaaaaaaaggaggacatgagtgctcctaggtatggtggagtaaaaggtttattgtaaataacagaggcagagacgtctgggagagtccaaagtgaacacgacccgagtgggccttccttgtgaggagaggggcgaaggagaggggagagctaggagaccaagagccccggggggtaaagggtaaaaaggactcgcttagctaaagtgggtggactatatacagaagggcactgtcttagtcagggtttctattcctgcacaaacatcatgaccaagaagcaagttggggaggaaagggtttatttggcttacatttccatactgctgttcatcaccaaaggatgcaagactggaactcaagcaggtcagaaagcaggagttgatgtaaaagccatggagggatgttctttactggcttgcttgctttggcttgctcagcctgctctcttctagaacccaagactaccagcctagagatggtcccacccacaaggggccctacccccttgatcactaattgagaaaatgccttacagttggatctcatggaggcatttcctcaactgaagctcctttctctgtgataactccagctgtgtcaagttgacacaaaactagccagtacaggcaccttgggggaagggtggggtatgccagccgtaccctgtaacaggaagcatgagggatgctgggagaacctggaaggaagacaggacacctcacttagacaggcagagattagaccctattcattgagggctcatgcctcttggattagctcattggaagtctttcaggaatgctggtgtataaactcacagggttgctagggaccacaaagctgaatgtagacttgaagggtcctaatgagatcatagactgtatgtgttatgtctagaagagcattagaactatgcatatgccctgtaggaagacaaactgagggtgtagagtcctatgcaagctgggaatgacaatgaccacagctctaagccatacgacattctgtgcccagtaagcactttagggagctagtcagggaaggactggactcctgtgacctggaccaggcagggtgacctgggagctgctgtcctggactgtcctggagtgtagcagctccgaattcatattatcattggggctgactaggactcctctgtaacctaggcccatcacatggtttctttccacatggtagcacttgctggtagtgtcttttctgttgggctgggtcacttggatatgtcacatcgtgactatgccagggcctgcctgcccagttgttgactatatctctgccatgcattttggaaactaaagaagcgggtgatgtcacacatcccagcacagacgccatgacagtgtgcctcatactgctctgtattcctgtgaaaggtggacttacaataatgtcttctccttcaagccaccccttttgtgtgaagttgctcacactttgtaaggaagaaatcaagaagtcaaaagacatccagaaacttcggtcaagcatcgcagtgtgagtttttaagtgttcctgggtggagacagaaataagagggacttggtggttcctggtgggagataaagttttaactacaaagctctttaaaatggagtgtttatgtgttcattatgggaaagaaatgtcagaccactcctatcaggagtggtttggggggattgaccaaaaaaggaaaaaagctaaaggaaagccacatctctcattggttcatcatgtacatctgtcactcgctccagcacctgactggccctgtagatgctcaaaggccatcacaggacagagaatacacctgtactagtgcagggatctgggcacacgggcatgtacatgttagcacagataactggtcatgtactggcaatcacatagatgtaaaaacatgcacacatggggatgcaggtatctgggtacataagcatgcacatgctagcacaaagatctcaccatgtataagtgagcacatggaagcatattagtctacaatgcacatgtgcaaacaagatagcataggtcacatgggagcgcactagtgcataacacacagacctgtacatagatatgcacatgactcaagttcatgctgtgtactttctgggtctcccatgtgtcgtggatccttgggtaacagcatgagtgtggcacagctccatgtcacccgtgggtctcttgcaggctctgtgggatggtgcagttcaatggtgatgtgagaaagaagattcttcttcagctgttcctcctcctcggccaccctttccctgtggtaagtgtgtctgccccacctcaaggccacctgcctgggacccaggactatccttacatgtggcttataaagatgagtgcatgtcgggagggctttgaaggaagcactggtgagatgggttccaggtgtgggcagtcaactggttggtgtttgtatgaaaggaacacgggtgctggtgctgggtggggagagcatgggaagcactactgaggggggggggcatctcagcccggggttaggaagtctgagaacctgtcctgtcgtcttctgaggtagagtgggatgaccccacagcccagcctatttgtcagaaacacacattgccagaggaagatcagatctcctgtgaaatagtatgccaaaggaaataaccaaaagagatagcgagacagacagattcccttgtaggagttcctgctgcaccttctgatgggcatgtctatgaatcagaagtacctgggctgtgcgggactgagttcatcttcctcctgtcattgtgctctctaggtggtgaggggctttcctccctttgacctgttgttctcattccagatccggaagagcacagcgagccaggtctacgagatggtgcttacctacagcgacctggtagatgccgaggtgcttgatgaggtcatgtctgtgctcagtgacacagcctggtgagtagggcctgcctgcgcctggtgccactttctcccatccttgtagctttggatgggaaggggagctatttccaaccctcaacagctcagggccatctaacaactttccacaaggctgaggacacatcctgggaacttcaggtgggaaatgtttaatgtgcaattgcttttctcctcctgtgagcaaggtgggcagtgggtcagacccctgctggtcagaagttggtgtttctcaggaactggaatatagcatgccaccaagtggatgtcagctagctactgtcattttgctgctgcaaggaccttgtggtctttcctctgttctaatgaacttagagacttgtctccaaagtcaagaggtgcagaagagatggtagtggtggtggtggtgtacagcctgtgggtgtgattcacagcctgtgggtgtgattcacagatgttctagcctggatctagaaacagttatggtcacaacagcaagaacttacaacacggaatccaggcactgtacacatgcatggccctgcacatacttatatgcaggtttgcatacatgtagctgctcatataatcacatatgtatgtactgccaagcacatacaatcacatatatggaactatcacctgtgcacaggtgtactttgagctggcttgtcaccattctgtactatttgggaggcacagccaggtagcccagattactgctactgcctttggacactgtcccctcagactaatggagagggggattgctgacctcagatactagtagctctgctcggattggccaggttgcttcagtaagtcagggtttgtggtatattcatgcatacccctcagaacagtgacctccccagggagctcgtgctagggtatggccttcctgcctagataagagctgtggggacctggaaggccagagtgcacttcaagatctttgctgtcagtaggagctcaacttggtgccttctgaggagacagtggtcaaacctcaggacagtggacactgcttccaactttctaataaactcagcttgagtaaggacagctgtgaatctctaatactatgtatgcatgtgtggctgtgtgccagggcttgtgtgcatgtttgtgtagttgcctggggatgccagaaaagggtgtgcaattcccctggagctagggttgcagagagttgtgagctaccaacatgggtgctaggaactctgctcctctgccagagtacaacacctggttttcagagaagctggggtttttttgtgttttttttttttaactaattttacatatagagaaaaacatgcttagtacttaacagcgtattactgcaatgaaagcagtcaacagctaaattctaataaattctaagagggctccagaagccctcttagcccgaggtagcatttcttctgtatgcccctagaatggggtgtggcttagtcctgtgaaagagctaggttctcctagtgtctactctgggggacagggtcttaccccatgcccgccagatctcaaggggtcggggagctgaaccacgtggtacaagggactcaaatgttttcctccacagggacgcagagcttccagttgtaagagaacagcggaatcgcctgtgtgaccttcttggcgtgcccagaccccagctggttccaaaggtaatacttgtagtattctgaggacacatggcacctgtgttgcctgcagttcaggtctaaagtaaacagagtcccacggtcattattcattgctgccgttactttctccagaccaactgggagagctgcttccgctgtcagggcagacaagttctgtctttatagtgtgctggctgcatggtgtcgtctaattgttggaggctgtcttagtcagggtttctattcctgcacaaacatcatgaccaagaagcaagttggggaggaaagggtttattcggcttacatttccatactgctgttgatcaccaaaggatgcaggactggaactcaagcaggtcagaaagcaggagctgatgcagaggccatggagggatgttcttttctggcttgctcagcctgctctcttatagaacccaagacaaccagcccagagatggtcccacccacaaggggccttgcccccttgatcactaattgagaaaatgccttacagttggatctcatggaggcatttcctcaactgaagctcctttctctgtgataactccagctgtgtcaagttgacacaaaactagccaatacagctgaccccttgtcaacttgacacacaaacacatcactagtaagcctcaacccttacattcttattcatccccaaggtctaaataactttaaatgtcccacagtctttacatattcttaaaatttcaatctctttaaaatatccatctcttttaaaaatccaaagtctttttaaattaaaagtctcttaactgtgggcatcactaaaacagtttcttccttcaagagggaaaatatcagggcacagtcacaatcaaaagcaaaaatcaatctccaaccgtccaatgtctgggatccaactcacgatcttctgggctcctccaagggcttgggtcacttctccagccatgccctttgtagcacacgcgtcatcctctaggctccagatgcctctactccactgctgctgctgctcttggtggtcatctcatggtactggcatctccaaaacactgcatgaccccttcagtcctgggccatcaattgcaactgaggctgcactttcaccaatggccttccatggcctctcacagtgccaagcctcagctgctctgctcaactccttcatgccttcaaaaccagtaccacctgggtgacccttacacgttaccaagtccagccagagcacaaggtacaactttggctatatctggaacgcagccactgtgctctcagaaaacacttcccagaagatgtcacctcaatgatgctggtctcttcttaatcaccgctaatttcttagctccagctaaccagcatcaaaagtcccagtaatgcaaagtttttgctttagtagttctggtatcttgttaatcacagctgattcttcagccccagctaaccagaactacagaatcttcacaatcaaaacagcaatggccctgaaaagagtctttaattttccctctgaaatttcacaaaccagacctccatcttctgcagtgttctcaacattatcttccaagctcctacacaacatctgacagagctcttaacaatggatggatcttcaagcccaaagttccaaagtccttccacagtcctccccagaacatggtcaggttgtcacaggaataccccactctgctggtaccaatttgtcttagtcagggtttctattcctgcacaaacatcatgaccaagaagcaagttggggaggaaagggtttattcggcttacatttccatactgctgttgatcaccaaaggatgcaggactggaactcaagcaggtcagaaagcaggagctgatgcagaggccatggagggatgttcttttctggcttgctcagcctgctctcttatagaacccaagacaaccagcccagagatggtcccacccacaaggggccttgcccccttgatcactaattgagaaaatgccttacagttggatctcatggaggcatttcctcaactgaagctcctttctctgtgataactccagctgtgtcaagttgacacaaaactagccaatacagaggccacacgctgtcttctagttcagcttctgtcttctaggaatgtgggaagaggctgtagttccctccctcttccctgccttgatgtacatcctgttaggggctctgtccctctaaggacccctgtcccatcaggcttccatttccatttccttcctggctgcctgtgctaaggcctgtcttcttcacctagcttggccctggtgtgtttagtgtttctgaggaccttgtcctggtgttgcactttaagttgtcatgaaagctgtaatctgttgtgttcctgagctctcttcctgcgttttatgggtcagtctgtgtatggggatttttaaaaattctacatattgacttttcatcctagaaatatgctcccagcttaattcttttaatacctttgtgttgtggtctactataaggttatgtagtgtttttgtacccaggaccaccagctgagggtggctccacccacagtgggtttccaaatgactctagcttgtgtcaagttgccataaaactagccagcacatgcaggcagccagcctgctgtttctgaaagctctatttaccaactctttatagagaaattcagtttacttgggacaaactattgtgtgaagggaaggtcactttatgctgtcagctggccccaatccccagatgattcagggccttgtcaccaccactgtcaaaggactgcactttggagtctcttttatacgctggatcatactctcaatctgtaagtcagtacaaacttatgacggaagaggtgtggatttcacaacacccatggtgctcaccatgtctcttctgcagttttattctgtccaagattgtctgtgctcttgatccttggtttaaactctcagaactaatttgtcagtttacatactaccagccaggttggcctgggactgttttgggagctaaggttcctgattgacactaggccccgacactccctggaaggtgcccttggaaggtcacctatgagtcctacaaatggagatgctgtctgtgtgattggtctccagttcatgtgccacttgaatctctgcttagaaagttcacgtgccagtttaatgacttttagttcgtctttctgcagctcctcctgatcccctcccgacaccctagctaggttatattttaccttttgactgctgtgacaaaataccatgacaaaggcagcttaagaaagaaagcacttccttgtgcttatgctttcagagggctagtctcctaatggcagagcaaagacatggcagtaggagcagctgagagctcacatcttgatccacagacaggaagcagagctcactggaaatggaatcctttgaaacctcaaaaccactcccagtgacacacctcctccaagaaaaccacacttccaaatccttcccaaacagttccaccagctagggacagggtattcacacgtgagcccgtgggggccattgtacttaacccaccacatccacctcatccagctcctgtatgctctccacagctcaccttcctggtgagcttagcttgataatcccatcttcatggcagaagctgtctctccgagttgtgtttttcatagcttatacacacctttattaacaagtagatgtgctgatcaaatggacagcagtgtatgtgggcttgcttttcttcctggaaggggctcttagatgttggctgttatagacctaagggtctttccatttgtttccacccttgaccttaggctccctgcccttacagaacttgagtccttctggagcccagcagtatactggagggctgtgggtgagtcggggagaggaatattctaatcagccagccagtgtctaacctcgggctgggcctggcctgcagcctcccagttgttggcacggcccacctggcctaggagctagtagacctggttctggtgtgcctgacagaggtgactcttttcttccttgctgggtgtgagtggatgtttttcaggtctcatgaggtaagccttggaagcccccttgagtggtattctccagcctatgcagagacatatatgccttttggtggacttcgctaggttctgtgtctcatatgctctctccagtttcaggatgggggtctcagttctctgacattctgagaaacaacttcagttgtgaaactctctctgtattgagtgagacaccagacccattagtacacatttttgtcattttactccatctgctgaggaattaatgttttgcatttgtctcgagtgtcctttaattatgtttaaactttggagaggggtgcattttgaaactgttacaactcttgatgtctcttttgctgttagtgtggcgacatctggttcctgtcacactgtcaatgtctatgaatgttatagtcaagattgtgccttaatatcattttaaatctttattaattagtgtttcatgaattcatgtttactgcataattacagacaagtttacatccatcatctttgtttcctatttgaccttcctgtttaatgtttctttcccccttatctgaatttcatttcctaccctgttaacttgtttcacagctctgttcttctgtccctgattaccctggggccagcactctttcttgacacattacgttatccctggccatgacctccagctgcagagccctgtctgaaactggcttgttctaaccctgaggtcttggaatttagcaggcatggtctcactggtcagcttcttaacttgctcttgtcagctctgtgcctgagctcctgtcatgtctgtgtcatgttgtaagaggttttgttttttcctctctgtgtgcccaagtcttcccagggcttccccctgcaggagccatatgagagatacacaggtgttgctctaggagtggtgacaagagatggggccatggtggagtcttggtcccttatgcaaggtgaactctgccctttacattgttagaaaagtttaaacatatgcaaacagtttattaatgtactctgacaaggccacagagctattactacacaattcaagctgccaggattctgggacatggcaggctttagccatctatcaagagagggtgaggtagcaaccagcctgatgttgccatgtctctttacagcctattccaggaagctgagccttgcctacctagctgggatgtctcgccctgaggctccacaacaagctttaccatcatggaaacttggtgccacagacatctgaggaaggtagcaccttcattgggaggccatccctggagagcagtaattcctcatgcgtgctttgctctggtggccgggactgcccatacgtttgctgtcacagacgtgcttctcattaaatcatgtatcacacagcccagcctctgcctatctctgggacgtccgtgcacaaggagctggaggatctgctgtggctctctccccttcagtgctttgctgtgtgattcctgtagcatgaggggcgtttcagaccctggtgtagtctgaagtgctgggcagatgaagtgacaggcagctcccacgtgctcggccagccaagacaccaacaatgctacaacagtctgagagatcatcagaagccagcatccctgtgggcatatgaatggcacctctggtcccagggcctgcatgcctacctgtcctgctgtgggagtcccatgtctgcctcctctgcctctttgtatctgatgcctgaggctcattaagctgttgcagatgggcagaattcaaggtaacagctcacagtgaagtggccagggcctcaagccaagtcatggtagtatgtgtcccctcagtgtaatagccagacttgaaagcacacaggctgctgcctttactgggagccactttccaggcctgggtctgcaggtttgctgtgctgccctggtggcagggacttctaggggcctgcggcctggttcacacttcattccagtctcaaacacctctttcctaagctcagcattttctcttgggagcagaagaaagcctggctgagatcagctgacgaggccatgtgtgagacaggcttagatgtcttgtctgctgggaaagagaattaactaatttagtattattttaaaacacaattccaaactcaacattttaagacatggagaccaatgtccctttcagtgagatttaatggttgacgtaaaggattttgttcccagctagccacctctgcatgtatatctcaccataggcaacagtctccactggatgcctggtgggctggaaagacctcaaaaggaagggtttccactgaggtacttaggaggatcccacctctccaggtatcgtgacaactggtgtggccaggatggtccatcagggcaataatgctgagtgatatgttagactcagcaaatagcagtttggcatgtgagtgtctaggtacaaaggagtcaggaaagctctccagtgggcatgtttgggcaggcggccatataggtgtgtgcccacacaagagtgttcacttggcctcgtgtgaaccctatgaattaagagcaggaagaaagtagctagggccattgtgcccaagtccaggttcctaagcctagggtggggtaggtaaaaggccaaaagagatctgataaaaccgggaccttagctgtgccttcacaactggtggatggaaaaatgtcctcacaggaaggagctgtgtggctcttgctgggtcttcaagaggagacatccagcgagtcccccagactcctatgttgaaaagcctaggtaattccaagacaggaagatacaacctcttagaggatgaagccaatgttcacaaacagggagaacagcccatcaccaagatccaactctgccagtaactcgagaaatatagaacagtttaccaaaagcaaagcaataggactggaggtctgacatgcacgatctgggaaggcaggatgctggagaggggggtgccatggtctcctgagcagaaagttgttagagctcctaaccatggttagtctgaatataacaacaaggttaggccaggcacacacttgtagcccatcattcaggagcggaagagggagttgaatttaagaccagctcgagctacaaagtaacactctgtgtcaataagcaacctaactcaagaagatcaaggcctgggatcaatcaagatcttgatcacttaagttgagaagttagatgtattaaagttaatttatcattttaatgtgaaatgcctctgacaggttcatgtttgaacattttgtcccagttgttggcaccctttggaaatagggcctagttgaaggagtggccactggaggatacagcttgaggtctggagcctcagccttgcttctggacccctctctactgcctgctccactaagatatgagaaggtgaagatccccggctgggaacaacccccactgtcacgccttccccaccacgatgggccctcagaccatgaggtagtagttggtatttggtcacagcagtaaggaaggtagctagtacagatggtttcagaatgaagaaaagcttagcttaatagacatttctagaacccagaacattttgcaggttcctgttattaaaaagaaaacataagttttctttttttttttttttttaaattaccagatagctggtgaaagttaccaaatataggaaatttgcctaaagtggtgctcggaaaatgtaagcctcaagttatgtagcagaaacgaatgggtgaaaattaatgcagtaaatgtgaggggagacgctggaggaagcagagactaagagtggtctgtatgacagggaggcagaacggacaaggctcagagcttacaggtgttgcagtgagcacccacctaggcagcagcctcagctgaaatggacgaagtcccggccttcctgcaagtccagcgacttcaagttgtcttcaaactcacctcctgtgaggtccttgggggagagaagatccagctcagtcaggcttcctcttgctctctggcctcttgcaaagcctcagctcaggggctgggattaggcctacttaatctacctgttaggtggctcacaatgaacttctgctcctctacagttagggaaggggcccgaagggaaccagaagtcactgagagcagaagccagggctgctgttctatgttgtgttggtcatcaacagcagtgaggtactgaaaggtgcctttgccacctggtgttagcccacttcagaaggcatttaagccactctcagatggtccgggctaattcacctttccttctgtctactcaggtaacttatgtactccatatctgccaagcacccagcacccaccctctgattccccttacctgtcatcccccagaccctgacaggagcaaagcccatcatcttgctgaagagcagcccaactattggcatatgggagtctagggccatctggcaggatgtggaaggaactactctgttcctcttaagtcaggtatctgtcctttgaccaacgcaagaggcctctaagctaggctgtgaccctgactctaccttgtcccactggttccagtggttagaaacaggaagtgaaaaccattctgcctggaaaatcagaaatgtccagtggcagcacctactccccttcctcttttccctcacctctcctttccccacattcagagaagcatcaggcttgggccaggagaggtcagagacatttccacaaccacagcaagaaagctcttcaaaagggcagaaacagtccgtctgtccacataggtggtctttggagatgttcaacctgacttctacttctcttctgggataaaccagagaaatgggagctcacagcagcatgaatgacaactgagggctagagaagactcccacaagccagggccccgacctgccaacaagatccaatagtctacacagtggatgctcatacgaagttgctgagaagaaccagacataagaacaaaaagttgggagtccatacaccagaagtggaaagcagacagttgtgtgtctgcacagtgctgtgttgttgccaaggtgccctgctggctggagccctcaagctgtgagctgcaggtggagtcttgctgctgctcatagctcttctctaacatagggcatactgcaaaggtgagcagtttgcacatctccatgcacggttcttacggagattgtaactctgtgaatgcgcactgtctgtattctaagaaagatgcttatggaaagctaaatgtgacctacaggccagtgcttgcccatctgtgttgaggcattttttctgtgtatcatgggtcacaattcagcagtttatttaaataagaaaaatgtgagaaaaattctggaataaggaagagtagcttccctctgtgtaagacactggattgcgagcaggtaattggtagaaagagacccagggacggagatgaccatcttagccagcacattccctagcaggagaacgggctgcccaatatgtgaggctgagacaatcagatgaacaaaaaagcaaacatgggattcctagttagtctttctaccaaagtaacctctcattgaatcacagatacaagtaagaagcaaaagccctgatacagatgtgggcagtgctctgtaaagtgttatgatcaagaatatacatcccagaatgaatcaaactttcaccaggggaaaagtcaaatagtattagttactctaaatggagaaaatatcagtttttaaattaaaactccagagtgcttcctgtacacatgtgaggacttccattcaatctctagcatcattgtaaaggctgggtgtggtgggatacacctgcaatcccaggagtgggaagtcagaatgcaaggaccgcttgggcttgctggctggcttgtcttgctgaatcaggatgttcctgactcagtgggagagcctgtcttgatgatgaagcactggaaagcagtgagctgctccaccagcacatacaaaaaccacttatgcacacaaacggaagagcgttcaaaacattgcacatcacaggtaggcctgtcttcctcactgtgtgaagagaagtgccgtagactgctagaagatgcagagcgaaggaggggccttccactcccatagtgtctccaggtaatgctatttctgcctgttctgatgtgtggctgttagtcatttgctgctatgtgacatcactctataggagacagacagacacatgttctgaaatgagctgtcacagactggaagccaagggttgagacacaggctgaagtgtgacctgtgtcctccaccacctcaacagcatggcccaccacctactatccgcaccgtgacataagaactgtggcggacctctgcagcggcctttgccgaggacaaagacagggtgacatagctattcttggaactggtgacaccttgtcccagggctgctgacattcaggacagccatgccctctcacctggtaggcgtctggaaattcccatcaggactttgaaaaactactcaagaaccaaaggtgtcaaacaaattgtacacaactcacagtgagatctttagaagcaagactcctgggctcagcacttgagcagaatggtgggcggcaggaggccaatggtgcgcacatgcagtctgacaagagtgactgatgtgcaaggcctgctttagctctgctacaagatgcacccaggagcttcttagtgcagacagccctcttactacagtgaggaagaactgtggacaggaaatggggctgctgactagcaggagtccacatggtcagtgacctggaggaggtcacgtgggcgagacacactgaccctccactgtccagcgtacaccccttccagatggacctgtgatggatgctgtctgaatgcacatgatgtttcttataggggagaaattcctaagcaggacactataccgtcgtcataaaatcagttaatgtcaccatcttaaagagttctgggaataacatccgaagagccgagtctcctgagggcatgtctgccataggtttgacctaccaagcaacagtgttcagagtagataagtttagccttagctccagcaagacatgtggtttggccatcttcactcagcttggcatagctgttgggagacccattccttggagagactatgagattcttttttgcactgactacaagcaacctcagtttgcacagaaacagagtagttggtacctatgcccacatgaccaaaagcagagaagccagatgaaccaaaggaaggtcctgtggccctactgatcaccaccaagctattattatatgtgggcaagactgcccttcgagtagcatgaaccacggcaccttgagcatggtggctgggctcagaacaatagctttcagtgtttaaaggaaagaatgaaaagagctttataaggttgttacccacctcaccaccaccccatccctagtacccacaggcagctactccccagctgcatccagcctacagagcagcagctatggcctctaacctagttcagggtgtccttatagccacaaggtaacatttgatttacaataaggtagtaggctatgtcccggggcccatggttgggtcttttccttggtttggctcatatgatcagaatgggagaattgatacccaggagccctgcacccatagccaatactcaccagcttcacacagatgacaaagggagactgggcagcttggaaatgcaggatggggacctttggcttgggtctttcctacagagatgataccagccataagtcattagggcgtcacacagaagaaactcctggaggcctgtactagccacagcctctgctcacagtagctggtgatcaagtagcagatgggggtcttgggccaatcaggacaggacaggtggttgtattgtagcccaggttctggcagccccagccacctgatagccacacgaagaaccaactcgggagggccaacattgagacccagaatgaaggaatatgtagccatttccccaaggacaggggcagagtcctaagggatactggagactcttgggagctgagggctacatctcttgggcagagttcacgtgagtgtaagggaaaactggcatggtattgaagagacttccctgtaaggggctctggactctgccgcatggctacacacctgtgagtcttcgtagcagtagaagcccttcctgatcttgttctcatcaacgtcacagaaggccaccacctgggggtgaacatgggccagcagttagatggcagtgggggctataagataaaaatgtgatcagaataatggccaacaggataatgaggaacgggctctaccttgtgccggctggctgcagtcaggctgcggtataacttacgcccctgcttgcctgcattccagatggtgaaggacttccagtgaggtaggacttgttcctctaggaagtggacacggtgcgtccagatggtcatcctgtagccgataaagagggaagcttaagtggccaagtgtgtgggctccagtgccactgaccattggcctggggatagaggtgagtggcacaccctgtttagggctgggtgcacaccacatctaaaccatatccgagatctagctctgttcttttgccacctctcatagcaagaagtcaccatggaccaccatgtgaaccaatgccctctgggaagctttggggcatccatacttgtcctgctttctaggtggcaatgtagacctgatggatggggcttctccctccatagctgtcagttccagcacatgagtggccgtctacatatatgagggtttgtgcaaagccaatggctggcatcacatatctttatcacccttcaccttactttttgagacggggcgagctggagctcaccaattcagcaagactagctagcaacaagctccaggaatcttcctgtttcccttgaggattaaggtgtgtgttgccattctagcttttaatgtagatgctgggaatttaattcaggtcctcatgtttctgcagcaagcacttcactggcagagtcgtctctccaggcccacattctagatgtgaaactagtccttttgagttagaaagagaaaagggatttgcagtagacccaacaacacaggtctgatttctcagcttagtcaatactcagaagaaaggtctgcatcaacagtcatgttcacattagaaggtaaactttctgcctcaggctgtcccttacctcagacaaccccaaagatatccttttctgaacacagacagacttgctcccaggcagcaggccttggatgcagatctcccgggcttgtttcttctcaggccccctgagctctacttacctgctgtccctaatctctgcccagacccttgcatccttgtcctttgggtggaacggtccttgtatgcggggctgtacctattatgtcactacctacatcagagcatgttttgcttgctcggcattttcctgagacctcccaagttaaacattctaattagggttatgctgagctcagtcagtgattttggtaggggattccctaggggctctggggaaccacattaagtgaatagcatctaataatgaaccccagctagtcctgtctgaggctgtagtgccccccttcaatgagaaagtcacaaacaagccacacttcagctccatacagtatatctcactgcagccatactatcacccaaggacacggaagaccttcagagtgagaaagaaccctgatctcaaaggcctcatgcaaggagcagacactttaccaccgtgaagccaagaaaggcccttctgatttctatccctcagcaaaccttagtatgatggtaccagacaggaggcagcaaggcagagtcaaaggcaaaaaagcaagacttgccttttggggcttctgttctgcctaagtgtgggtgagtgtgagggaaatccaggcacgggctgctcagaccctgtggtgcaccagcaggcaaacctcctaccccatcttggccacaagggtctctcttcccttctgccttcaagcccttgaggagacctgctagggttcatggctacacaaacacaggagatctagcagggactactaggccccctctgtcatcacagacacttcaaggattgccctgtccagagggctgcttgtccttacctgaccttttgaggaccacttgaggccttggtccctacaagaggtctgttttgttcagtgccagagcaagacatgatgtatatattcatatatgtgcatcaaatccaggagtctatttacaatgtgcttgtgtggtatgcaggcacatgtgcagggagcacccatgagcatttctgcacatgttatatggcgtgctcagtggtaaataaacatgcgcaacaacagctcctggtagagactaagcacagtccatgtgttggggacatcctacacacaccctggccaggtctattgggtgtctctgtggaagaaaaaccttgcacgatctcacataatcaacctatgaaattcacttgcaggatggtgggtttaactatagagtgaagccaacttgattctctaaaacactgggcactaatgatttattttataaaggaattgcaaacatgtccaccaggactgggctctaggcctgtaaggctcttagcatcctgaattttacttggtggtctctaccagaggatgcaggcagttataaaaagggaggaacatcctgcactggtcttgcttctcccaggagtctgcctagagaacaggacgtctggcacctagcacatccatctcttcttgctaagaaatagctaagggatgggttttcctgaacctgtatgtgtgactttctggaactttctgggaagaagctgaaacatcatagctgcagcactgtatcagctcatggagtactggggtgggggtgggggaagcccctactcccagaaggtgtagccaatgaccagcagcatctgtggtcagaaaaagaggctttaagaaccttgctaggggaacacaggggacaacccactgatcctgtcaggtaccacaacacagaataggcagtctcaggctggacgccaaggattaggacactagtggtgtcatgtctagtacccccttctgagattcatcttgcagcaaaccttagtgtgatggtaccagacaggaggcagcaaggcagagtcaaaggcaaaaaagcaagacttgcctgtttggggcttctacactcatctggagaaagggccttatctggttctctttaagccctgaatcatactgccacgggaaaaacgtgataccaggaagcaaacagtttgcagcacgtgtactgtaaaaggctaaacacacatatctgtaaggtgacgcatctgtaaaggttacagggatgccgtgacaacatactgggttcagctgctcacaagtttaaggaatgtttggcttcctggggatactattcttgtgtcctttggcatatgaagtactccacatatatataaagagaaatgacacagattcaggtcattttgaactttaaaaatgacagaatcaagacactgccacctgaggtttagacaaattcaactctcaagcaagcctcaggttgtaattac

SEQ ID NO: 3047 - DNA, 3663 bp, Mus musculus
tgtatctcttttcttcccggttgccggtagggttcttacggaagctgctggcaggatggtactgagcaatgagccggctgcgagcgccgccgaggaggaggtggaggatgatgcgcttgttcgcgcctccgccctggaagcgttcggcgagagtgcggagacccgcgcgctgctccgcagcttgccggcggtgcacagagagcgcgcgtcccgggaggtggcggaggagcggttccgcgtaattatggacaaataccaggagcagccccacctcctggatccacaccttgagtggatgatgaactcactgttggacctggtacaggatgagacatctctgcccgaccttgtccatctggcttttaagtttctttatatcatcaccaaggttcgtggatataaagtgtttctgcgtctgtttcctcacgaagtggctaatgttcagcctgtgttagatatgttcacaggtcagaaccctaaagaccatgagacgtgggaaacacgctacatgcttctactgtggctctctgtgacctgcttgatcccttttgatttttcacgccttgatgggaacctgtctactcaaactggagaaacacgagtacccaccatggaccgaattctgcaaatagcagagtcttacttggtggtcagtgacaaggcgcgagatgcagctgctgtccttgtgtccaaatttatcacacgtcccgatgtcaagcagagaaagatggccagctttctggactggagcctttgcaccttggcccactcttccttccagaccatcgagggtgtcattaccatggatgggatgctgcaggccctggctcaaatatttaagcatggaaaacgtgaagactgccttccctatgccaacactgtgctccagtgcctcgacggctgcagactccccgagagcagtcatacctcgctgcggaagcttggtgtgaagcttgtccagaggctggggctgactttcctgaagccaaaggtggccacgtggaggtatcagcgtggctgtcggtctttggctgctaacctgaagctctgtgccccgggtaagagtgaccagaagctgctgtctgatagtttgacctctgatggtgatgaagactatgatgtcccagagggggtagaaactgtgatagttgtcacggtgatcctgaaggcccttacctacgatgagaagcggggtgcctgcagcgttggggccaatgtcagggatgctgcctgttatgtgtgctgggcttttgcacgtgcctatgaacctcaggagttgacaccttttgtgactgccatttcaagtgccctggtcattgctgctgtatttgaccgaaatgtgaactgcagaagagcagcctctgctgccttccaggagaacgtggggagacagggtactttccctcatggaattgatattttgactacagcagactattttgcagttggtaacatatctaactgtttcctgattataagtgtgtttattgctggcttccaggaatacaccaagcccatgattgatcacctggtctccatgaaaatcaaccattgggatggggccatccgagaactgtctgcaaaggcattgcacaacctgactccacaagtacccgagtacatagccatgcacgaggtcacctatgccctgtacaagctggccacacagagtaacaggcttgtcacagactatctggatgagaaggcagtgcaaagcctgaagcagatccaccagcaggaggtggctgtctctgccctgactgccctctgcagtgaatactacgtgaaggagcctggggaggcaggctcctccatcgcgaaggagctgattccccagtaccttgctgagctccagagcccagaggagatggcccgttgtggcttttcctcagccttgggtgccctcccaggtttccttctcaggggccatctgcagcaggttctctcaggtctgagaagagtcacctgtatttctcccaatgatgtgagctttgctgaagcccggagagatggtttgaaagcaatctcaagaatttgccagacggttggtgtgaacacacgggggcctccagatgaagtcatatgcaaagagaacatctctgaggtttatgctgcattgctgggctgcatgagtgattacaccacagacagcagaggggatgtgggagcctgtgctcagacttgtccagtctgtcttcaggtgttaagaatgacttctcttgcttgacagtatgagagagagcacgtccctcattccccagtcaagggatttaaggttcgtgaggctgccatgaccagcctcatggatttgatgcttttgctggcacggacagagccggtgctgattgaggcccacatctgtgagcgcgtcatgtgttgcgttgcccagcaagcaagtgagaagattgatcggttccgtgctcatgctgcccgggtgttcctgactctcttgcacttcgacagccctcccattccccatgttccccaccgccaagaactggaaagtctgtttcccaggtctgatgtggccactgtgaactggaacgcaccttcccaggccttccctctcatcacccagctcttgggattgcctacctatagataccatgtcctgctggggctggctgtgtctgtgggtggcttgacagagtctacggtcagacattctacacagagcctctttgagtacatgaaggggattcagaaggatgctcaggtcctgcagagcttcagtgagaccctcctgaaggtctttgaggacaaccttttgaatgatagggtgtctgtatcactgctgaaaatgctggaccagctgttggctaatgggtgctttgacatctttactgccgaggagaaccaccccttttgtgtgaagttgctcacactttgtaaggaagaaatcaagaagtcaaaagacatccagaaacttcggtcaagcatcgcagtgctctgtgggatggtgcagttcaatggtgatgtgagaaagaagattcttcttcagctgttcctcctcctcggccaccctttccctgtgatccggaagagcacagcgagccaggtctacgagatggtgcttacctacagcgacctggtagatgccgaggtgcttgatgaggtcatgtctgtgctcagtgacacagcctgggacgcagagcttccagttgtaagagaacagcggaatcgcctgtgtgaccttcttggcgtgcccagaccccagctggttccaaagcctattccaggaagctgagccttgcctacctagctgggatgtctcgccctgaggctccacaacaagctttaccatcatggaaacttggtgccacagacatctgaggaaggtagcaccttcattgggaggccatccctggagagcagtaattcctcatgcgtgctttgctctggtggccgggactgcccatacgtttgctgtcacagacgtgcttctcattaaatcatgtatcacacagcccagcctctgcctatctctgggacgtccgtgcacaaggagctggaggatctgctgtggctctctccccttcagtgctttgctgtgtgattcctgtagcatgaggggcgtttcagaccctggtgtagtctgaagtgctgggcagatgaagtgacaggcagctcccacgtgctcggccagccaagacaccaacaatg

SEQ ID NO: 3048 - protein, 735 aa, Mus musculus
VSLFFPVAGRVLTEAAGRMVLSNEPAASAAEEEVEDDALVRASALEAFGESAETRALLRSLPAVHRERASREVAEERFRVIMDKYQEQPHLLDPHLEWMMNSLLDLVQDETSLPDLVHLAFKFLYIITKVRGYKVFLRLFFVANVQPVLDMFTGQNPKDHETWETRYMLLLWLSVTCLIPFDFSRLDGNLSTQTGETRVPTMDRILQIAESYLVVSDKARDAAAVLVSKFIWDVKQRKMASFLDWSLCTLAHSSFQTIEGVITMDGMLQAQIFKHGKREDCLPYANTVLQCLDGCRLPESSHTSLRKLGVKLVQRLGLTFLKPKVATWRYQRGCRSLAANLKLCAPGKSDQKLLSDSLTSDGDEDYDVPEGVETVIVVTVILKALTYDEKRGACSVGANVRDAACYVCWAFARAYEPQELTPFVTAISSALVIAAVFDRNVNCRRAASAAFQENVGRQGTFPHGIDILTTADYFAVGNISNCFLIISVFIAGFQEYTKPMIDHLVSMKINHWDGAIRELSAKALHNLTPQVPEYIAMHEVTYALYKLATQSNRLVTDYLDEKAVQSLKQIHQQEVAVSALTALCSEYYVKEPGEAGSSIAKELIPQYLAELQSPEEMARCGFSSALGALPGFLLRGHLQQVLSGLRRVTCISPNDVSFAEARRDGLKAISRICQTVGVNTRGPPDEVICKENISEVYAALLGCMSDYTTDSRGDVGACAQTCPVCLQVLRMTSLA

SEQ ID NO: 3049 - DNA, 211910 bp, Homo sapiens
  misc_feature (1)...(211910): n = A, C, G, or T/U
acacccggctaatttttgtatttttagtagagacggggtttcatgttgaccaggctggtctcgaactcctgacctcaggtgatctgccctcctcggccttccaaagtgctgggattacaggcacgagccaccgcgcctggacttaatgttgtatttttagtagagatggggtttctccacgttggtcaggctggtcttgaactcccaacctcaggtgatccacccacctcggcctcccaaagtgctgggattacaggtgtgagccaccatgcctggccagaacattttcattatcctaaagcagaacccattagcagtcactccccatttccccctttcctggtccctggcaacctctaatgtaccttctgtctctttgaattttctggatatgtcatatgagtggaaacacataatatgtgatcttttgtatctttcattcagcatcatgtttcacagctcttccatgttgtagcaggtgttagaatgttattcttttatggctgaataatattccattctatggctaggccacacgtttctttacatattcctttttatggctgaataatactggagcctcttgaaccatcatctttgaaatctgtgaagttccaaagaagactttggacagcccaactgccctgtgcttcccttgaagaagccaatattggaccatattttggttttgttaggaacacagcacccattatataagagctagttcaaagtcactgcttcttgaagagagaatactttcaaatctgtctcctcgtcgacgcccgtcctgactagttgggtccctgcgaacaatgaccaagctctccctggtgtgggtagagggtgattctcccagctggaggtcacctggggcaagatcctcatgaagcccaagcagatttagggttcccagccaacaggcagtcctcacatctgggctcgctagaactgcacatggagcttaccagatttaccgagacccccgagatctcagccacagctggctcccctggggtcacacacctgtccggagccagtgagcagcaccctcttcacctgtccaggtgagcacggctgggtgcagcttgtggtcctgtggtcctgctgtggatgctgaggtcaagggctgcaagtggcgggctctacaggacttggctggcccagcagagtggtgtttcaaagaaatgaagtgaaatcttacccagagcccctgtgtgtgaagcagacgagaagggggctagtctgtttggagcacagggagcccctcaatgcccctcggactccaggatcaaggaacccacctcagatcaggtgcagcctggctaggaagggtgaggcgccagggaggacacctgccctgcttcctgcttgttgtgcctcggacagcaccaggttccggaggcttcccactccttgggagggctcaatgggtcctgggggaatgtgtgctgcagccaatggggggcagtgctgagcggcgggctcctcagacacctgggcactaaggccccctggggctgccagctgggtcggctgtggtgcttgccccatgctctgtacactgccacatacaggcacccttctaagcacttcactgaactcaactcacccacttgccctagcaggtaaccaggcagataatgtcactgatccgttttatagatgaggaaagtgacatgcagagttcatgcctgggtccatggagcttgtcagcggggcagctgggcttcgaccctcagtctggcttcagaccacaggccctgaccatgacgcagcccctctgtcaggggaggcctggtcattgggaccagctgtgtacccaggtggcaccttccccgggtagcttggaggatcacagcccctctgttcaggtggcaggactgggctagcccaggctggtcgcctgcttccagcactaaacctggttgtcttctggaaagagtacagagctcagacgctgggagcttgggcaggcaaatgggaaataacgggaggctgcacggtgcacctctgagctggggatctgacagccaggctatggggaggggcctttccatcctgctcttgaggtgcacacagcaccagagggtgagcccaggggccgagtcaccacagcacccatgtgcagggagattcttggtgggggccactgaccagggcggtcctccccgaaggagttttacaaaataaccctttgtataaaatcagcttcgtatttttctctacagaggtgtaatttgacataaattgcacccatttaaaatgtataatttggtacattttgatgtttgtacctgtgaacctttaccacagtcaaggtgagtatactgattacccccaaaaggttcctcgtgcccttccctgcccctgggcaaccattcattggtgttgtcactgtagattagtttgcatcttgtggaatttaatataaatagaatcatgtggtatgtcttctgtctgcttctctcatgaaggggtgggttgcccctccacacctgtgggtgtttctcgttaggtagaacgagagacttggaaaagaaaaagacacagagacaaagtatagagagaaataaggggacccagggaactagcgttcagcatatggaggatcccgccagcctctgagttcccttagtatttattgatcattcgtgggtgtttctccgagagggggatgtgtcagggtcacaagacaatagtggggagagggtcagcagacaaacatgtgaacaaaggtctttgcatcatagacaaggtaaagaatcaagtgctgtgcttttagatatgcatacacataaacatctcaatgctttacaaagcagtattgctgcccgcatgtcccacctccagcccaaggcggtttttccctatctcagtagatggaaggtacaattgggttttataccgagacattccattgcccagggacgggcaggagacagatgccttcctcttgtctcaactgcaagaggcatgccttcctcttatactaatcctcctcagtacagaccctttatgggtgtcgggctgggggacggtcaggtctttcccttcctacgaggccatatttcagactgtcacatggggagaaaccttggacaatacctggctttcctaggcagaggtccctgcagccttccacagtgtttgtgtccctgggtacttgagattagggagtggtgatgactcttaacgagtatgctgccttcaagcatttgtttaacaaagcacatcttgcaccgcccttaatccatttaaccctgagtttgacacagcacacgtttcagagagcagggggttgggggtaaggtcatagattaacagaatctcaaggcagaagaatttgtcttagtacagaacaaaatggagtctcctatgtctacttctttctacacagacacagtaacaatctgatctctcttgcttttccccacactctcactcagcataatcatgctgatatttatccaagtctaaaatcctttgatattcatccgtgatacacatccatgttgcatgtgtcaaaagcccattcccctgtatggatctaacacagcctgtttatccattcacatgtggatggatttctggatcatttccagtttttgctcatacaaataaagccgctgtgaacctttgtgtacaaatcttggtctggacaaatgcttccacttatctcgggtaaatacctaggagggggatgactgtgtcatatggtaggtccatatttagctctttaagaaactactggccgggtggggtggctcacacttgtaatcccagcactttgggaggctgaggcgggtggatcacaaggtcaggaggtcgagaccatcatggctaacacagtgaaaccccgtctctactaaaaaatacaaaaaattaacagggcatggtggcgggcgcctgtagtcccagctacttgggaggctgaggcaggagaatggcgtgaactcgggaggtggagcttgcagtgagccgagatctcgccactgcactccagcctgggcgacagagcaagactccgtctcaaaaaaaaaaaaaaaaaaaactaccaaactcttttccaaagtggttgcaccatgttgcattcccaccagcagcatatgggagttccagttcctccacatccttgtcaacacttgagattttttgttttaaattacagccatcctagtgggcgtgaaatattatctcactgaggttctattttgcatttccataatgactgaagatgtggagcatctattcgtgtgcctgtttgctgacaaaatatcttctttggtgaaccatgtgttcacttattttgtccaatttgtgaatagggttttttttttattattgagttttgagatttctttgcgtatttaggatatgagtgttttaccagatatatgatttgcgaatagtgtctcctagtttgttgtttgtgtattttcttggaagcgtccttcagaggctgggcatggtggctcgcgcctgtaatcccagcactttcggaggccgaggtgggcagatcacttgaggtcaggagttcgagaccagcctggccaacatggtgaaaccccatctctactaaaaataccaaaacattagccaggcatggtggcgggcacctgtaattccagctactcgaaaggctgaggcaggagaattgcttgaacccgggaggcagggaggttgcagtgagctgagatcgtgccattgcactccacctgggcaacaagaacaaaacttggtctcaaaaaaaaaatttccttattatcctttttattgttgttgagatggagtttcactctgttgagcaggctagagtgcagtggtaagatcttggctcactgcaacccctgcctcctgggttcaaacgattctcctgtctcagtctcccaagcagctgggactacaggcacctgccaccacgcctggctaatttttgtatttttagtagagatagagtttcaccatcttggccaggatggtctcgaactcctgatcttgtgatctgcctgcctcggcctcccaaagtgctgggattacaggtgtgagccaccgcgcctggcctcttgcttactttaggtttaatgtgctctttttctggttggttaatgtagcagctgaggtcattactgtgagatctttgctaacacagatgtttagtgctacacattttccccaagtactgctttagtggcatctcacaaattataagttgtgtttttgctttcattcaattgaaaacactttctaatttccctttagacatctttcttacacagattttagaactgtgtttagttttaaaatatttgaggatttcccagaatttttcctattgattttgttttgttttgcttttctgagacggagtcttgctctgtcaccaggctggagtgcaatggcacaatctcagctcactgcaacctctgcctcttggtttcaagagattctcctgcctcagcctcccgagtagctgggactacaggcatgcaccatcacgcccagctactttttgtatttttagtagaaatggggtttcaccatgttggtcaggatggttttgatctcttgacctcgtgatccacccacctcggcctcccaaagtgttgggattatgggcgtgagccaccaggcctggccttcctattgatttctaattgaatttgattatactttgcatgcttaaattcttctcaatttattgagatctgtttgcatggagagagaaatcctactctattcctcttcttataggccactaatcctattggattaataattcacccttacgattttatttaaccctaattacctcctagaggcccttcctccaaatacaggtatattaggggttagggcttcaacgtaggaacgggggtgggcaccattgagtcaatagcaggatatgggatttatctatttttcctgcagttcttttacgtattttgaagctgtgttattagaggtgtaggcatttaggattattatgttcattagtcgactccctttgtgaaatgactatatttgattttctttgctttgaaatctactttgtcttgtattaatgtagccactctagctttctttttttttttctttttttttttgagatagagtttcactcttgttgcccaggctggagtgcaatggcgcgatctcggctcactgcaccctttgcctctgggttcaagcgattctcctacgtcagcctcccaagtagctgggactacaggcccacgccaccatgcccggctaattttgtatttttagtagagatggagtttccttatgttgcctagactggtctttaactcctgggctcaagggatctgcccacctcagcctcccaaagtgctgggaattgcaggcgtgagccactgtgcctggcctccagctttcttttgactagtgttagcatggtatatcttttctatcctttcaagctttttttttttttagtagataatgtctttttgcacataacttattgttggatttgctttatttttccaacctgccaatctgtcatttaccaagagtatttatttttgacattcgtatttaatgtgcttagtcatatagttttgagtctgtcatcttgcaatttgttttttgtttcatctgccctttgttctctctttacctgccttcctctgggttgagtattttatgtttctgtcttacctcctttgttggcttactaggtatctttgctgggttttgaatggtccctctagggtttaggcagcacttggctccgaattgcaacagtggcctcttttcccttgttgtccaggtgaatgagtggcaggatgactggccgacctttttcgcccggcaccggctccaggcgcagctggacctcattgagaaggactatgctgaccgagaggcacgagaactctggtcccggctacaggtgggcacggcagtgacttctctgggaaagagctggtcctctcatgatcccgccgcatttgtgcgggttcatctgtaaaacggagctggagcagggaacactgagtcctggagcacacatcagggaggaaggggggcaggggcgggggttcccccaaaagggagtccgaaaggagtgaggagtgaagacacacttggctcctcgtgcccctctccactgctaggtcaccaggtatttagcctcagactttcctcatgtgaaacacaggtgcttgtaaatggtggtgtttaccatgattactgttcttactatcagtaacacttgtccactccatcgtgttcctctcccatgggaagatgtgggtaccagatgatccagaatgactgatttcaaaacataactctcggccgggcacagtggttcacgcctgtaatcgcagcatttgggaggcctaggtgggcagatcacttgaggtcaggagtttgagaccagcctggccaacatggtgaaaccctgtctgtactaaaaatgcaaaaattaaccgtgcatggtggtgcatgcctgtaatcccagctactcgggaggctgaagcaggagaatcacttgaacccgggaggcggaggctgcagtgaggggagattgcaccattgcactccagcctggacgacagagtgagatcctgtatcaaaaagaaaaaaaatcaaaatataactctcaaaatgttaaaaaagaatgtgcatgtcaatccagagtgagtatacatcaaagagacttgaactcattaatgaagaaactaggctgggcacggtggctcaagcctgtaatcctagcactttgggaggccgaggtggatagattttacctgaggtcaggatttcaagaccagactggccaatatggtgaaaccccatctctactaaaaatacaaaaattagccgggtgtagtggcgggtgcctgtaatcccagctactcagtaggctgaggcaggagaatcacttgaatccgggaggcggaggttgcagtgagccgagatggcgccactgcactccagcctgggtgacagagcaagattccctctcaaagaaaaaaacaacaaaaccaaacaaaacctgcagacatatatgtgtagcgaaataaaagtggccagagtttgctaaggtagcgcaacactggttcctattctgtgggtcgattaaaactataacctcagaggttctccactgtgtggggattctagacctaaattaggaggaaatcctaagttagacaaagctagactcccctgaagtcaggtggcccctatttctgggcttggcaggcagtgctggggctggacaccgaagcagatcgcgagtgggctttgccttatttccaagaacgaggtgatgagaccggggctcccagaggccagcgataactgcagccgttgctctcgtaggtgaagatcccggatctgttttgtggcctagagattgtccccgcgttgctccacggggatctctggtcgggaaacgtggctgaggacgacgtggggcccattatttacgacccggcttccttctatggccattccgagtttgaactggcaatcgccttgatgtttggggggttccccagatccttcttcaccgcctaccaccggaagatccccaaggctccgggcttcgaccagcggctgctgctctaccagctgtttaactacctgaaccactggaaccacttcgggcgggagtacaggagcccttccttgggcaccatgcgaaggctgctcaagtagcggcccctgccctcccttcccctgtccccgtccccgtctccgtctccccgtccctgtccccccgtcccccgtccctgtgcccccgtccctgtccccctgttcccgtctccccgtccctccgtctccatccccccgtccccccatcctcctgtccccgtccccccgtccccgtccctccatccctgtcccccgtccccctgtccccctgtccacataccaatccccctgtccccgacccccatccccgtcccccatctccgtccccgtcccccctgccccgtccccgtctccgttcccccgtccccatcctccatccccgtctcccatcgccgtccccccgtccccgtcccccgtccccgtcccccctgtccctgtcccccttcccccgacccctcccagatcctggggaccaataaagcccgcagcgggtctcggctggcgtcctgcgcctcgttcctccgctcgtggggctgctttcagggccagacgcacggcgagctgtgcacggacgtttttgcggcgattcaggggaaacgcacgcggacccggtagccaaggccaaagtcggcgcagcgcccaccgcggcctccgggccccgctcccgctcccgctctggggcgcgccaccactcggcgcggggcccgtgtgatccgcgcgggtcccagcgtggcgcgaataagtgtcagggcggttggctctgaggggtgggtcccggggctcgcctcgcgcccccgactgcgtgctcaggccccgcccctccccgtccacgcatgctgaggctccgccccgctccgcggtcccccggtcccacccgcccccgccccgcccccgccccgccccccggcgtgttgtggctccgccccgctgtctccggccccaccgcaagccctgcccctcccacccacgcgtgcccgggccccgcccccgttgcgcgcagccccgccccctatcgcgtgctcaagccccgccctggcggcccccggccccatcccgaagccccgcccccccgcacaccgcctgctcaggctccgccccgctgtcctccggcggcggcctcaccccgcagcccggcccaccgcgtctcaggccccacctcctgtcctgccccgcccaccgcgtgctcaggccccgctgagcggtcccggctccgctcgcgccctgtggggtccacggcgcgctcttccagagcctttgggacccgtgcccgctcgcgtcctcaagtgcacgcgccgtcccgcgcgcggtattttggcggccgacgcgttccgtagcgaggccggcgagtggggtcggaggtcgcggggcggggccagcgtcggttgccgccttagcgggcgcctccttttcatccctcatccttcatccctggctttcgcgctctagcggagtgggatctgcgaacacgtgaggcgggggcgcggtccccaggctgccgagatggccctgagcgacgaaccggccgcgggcggccccgaggaggaggcggaggacgagacactggcctttggcgcggcgctggaagcgttcggcgagagcgcggagacccgggcgctgctgggccgcctgcgggaggtgcacggcggcggcgcggagcgcgaggtggccctggagcggttccgcggtgcgtgggcggcgccgcgtgcccgcttcctcccccggcccgggttcggcgcgctgagtgcactttaccgggcggggaccgcagcccggcggcgccggccgctctgcgagggctgccggtgcgcggtcccgcgggccgtggtggggcgcggccttcctaggcgggagagggccaccccggcgcggcgttaggtgcacggggcagacgcgcgcctcccttggggggaccgtggcccgcggagcgcctgctctcgcacggggtgaagcctctgcggcctccccgggaggcggggtgcagaagccctccgtcccccgtctccgtcactggaggaggtccctgggctggggagactcgggccagatccctccggacagctggtcagccctgcagtgtggactcccaggcttgcctccaccgagcgcggtttctgtgaatgttgtgtggacagggagatagggaatgagagagggggacgcagggaacaaacctgctgcaaacaaagcgcgcctcgggtggggagggcagcagcctgtccgttccgtggacgccgtggacagagcgggctggccgggtccgtgcctctgcaggcggggtggggtgtaggtacccctgtggaggccattcgatgagtctaaattctccgagttcagacccacctttaccgctgtctataatgggttatttccaaacaagtccttaggagctcatagctaagtagttacatggggttttgtaattcagtaaaatcatctttgtagaccctttgagtaagaagaacttttgcattatttggccttcctcattttagaatgacagcgctttgattttaggagtcaggcagggtggggggccttgtgggaggagtgcgggttcggcgtcagatcctcctgcctgtgaattctggccctgtcgcttggacctgatacttgattgcctgtttcttcgggtgtaagctggggcggataacgatgcctctcgtgcagaactgttctgagggtgagggaccctcatccagggaccagtgaagccagattttttgttcctggtgtaacagcccaatggcttcttccttttttttttttttttttttttttgatacgaagtcttgctctgttgcccaggctggagtgcagtgcagtggtgcgatcttggctcactgcaacctcaacctctcaggttcaagctattctcctgtcttagcctcccgagtagctggggctacaggcgcgcgccaccacgcccggctaattttgtatttttagtagagggggtttcaccatgttggtcaggctggtctcaaactcctgacctcaagtggtcgcccgactcagcctcccaaagtgttgagattacaggtgtgagccactgcgctcggccccagtgggttctttctgcgggctgcccagatagagttgatttgtcagggcaggggagttgccatggagaagatttagttcacgcagagccggttgaaagggagactagactagaggtttttttttttttttttgaggcggagtctcactttgtcccccagggtggagtgcagtgatgagatctcagctcactgcaacctccacaacctccacctcccaggttcaagtgattctcctgcctcagcctcccgagtagctgggactacaggtgcgcgccaccacgcccacctaatttttcgtattattagtagtgacgggtttcatcgtgttagccaggatggtctcgatctcctgacctcgtgatccacccgcctcagcctcccaaagtgagccaccacgcccggctggagttttattattactcagatcagtctccctgagaatttgagggccagggttttttagaggtaatctgggggaaagggtgggggtggctgattggttaggggtatacaatcataggggagtcggaaatgatcctccgtgatgtgctgaatcgcgtctgcgtggggccccaggagcagtgggcgggtccaggtggagctatcatgggtccgtggatcctagtgtaggtgtcagacatggaaacaatctgaaaagatatctttaaaggccagtctcaggttctgcaatagtgacatggtctgcaggagtaactggggaactcgcatgtcttgtgatctcaagaataatggctggcaattaggttacgccttagcggaattcaggctcctctcctcctcctagcctggtggcctctcattaactttacaaaggcagttgagttttggggaagggctcttagcatttaaactataaattaaatgtctcccagaggtagcttggcagcttgaagactaaaggcatgagggggttgcctggatcagatctgccccattgccataatttcctcacagatcacttttgcaaaggcagttttgctgggaagcagtgggtgtgttcagatgtggaggtgggagctgccggattggacagaagcagtttcagctgctgagaggaggagaaagcggtggttcagggtctgggaggttgtgaagagctggcagctgtgtggaagggagcagtgcctggatatgtcaaccaaaaagtatctgagacgagtctcaatcagtttagaaggttaagggtgtgcccgtgaggcagcctcaggaggtcacatgtccccaaggaagtcgggctacagcttagttttacacgttttagggagacgtgagacatcaatcaatacctgtaagatgtacattggtctcgtcagggaaggcgggacatcttgggtgggagggcgtccagggcattggtggattcaaatatttcacgattggtgattggttgaaagagtttatctgaagacctggaatccatagaagggattgtctaggttaagataaattgtggagaccaaggtttttcttatgcagatgaaggttccagttagctggtttcagagagaatagattgtaaatgcttttcatcagactaaaaaggtaccagacttagttaattttctcttggatcagggaaaagacctagaaaaggaagggattctctacagaatgtagcttttcccagcaagagacaacttagcagaaccatttcaaaatatgtcaaatatattttagggaaaaatattttgatttctttcagggcctgctgtctgtcatgtgatgctgtactagagtcaggctggaatttggtgtcttattgctacttaagatcggttttaatgctaatactgatcagctgtgcctgaattccaacgagaggagggtataatgaggcctatgtggaccactccccacaatcccttaatatcatgaggcctgaactagtttttcaggttaagtttggaatgcccttggccaagaggaggggtctgttagatggctagggggcttagaattttgtttttagtttacaggcatgtttggcaggggagtgtgagaggagtgccagggatgtgtgtctcacaaggacagagttgagcttggcccttaacggctggcagaggcaggagagagtgaaggaaggaagaggcgaggaggagactctgttaggaagagtatcgaggcagtgggaaaagaggaacagtgtgccaagcaagtaaactgcacgaggctgggccacagtggccctcaaaaggctagagggaggtggggcattccctccaggtggcctgtgtggcctcctttagtgagaggggaggtgtgctcttgagagctggggaagaggtggagctgccctgtggaagctagcaagggaaaatggggtttctgaggctcatgggtatgtttggcctagtgataattaattttcatgttatatttgtttttagtaataatggacaaataccaggagcagcctcatctgttggacccgcaccttggtaagaatagaagctgctgattttgatcattcagttacagatgaccacggaggccttggtgtgtggtgctggcacatgcatgtgctttgccaggatcaaatgccaagaagtgtccctgtcttgcttgcctggctggttggttttagccgacctgtgatagtggcttgagttccagatgtcactctaggctggggggagatgtgtctgagctacttaattcctttctgctaaggaaacaacatctgctcctcatgtgttttttttgtttttttttcttttttttgagacggagtctcgctctgtctccaggctagagtgctgtggcgcgatctcagctcactgcatcctccagctccctggttcaagggattctcctgcctctgcctcccgagtagctgggattacaggcatgcgccaccatgcccagctaatttttgtatttttagtagagacggggtttcactatgttggccaggatggtcttgatctcctgacctcgtgatccgcctgcctcggcctcccaaagtgctgggattacaggcgtgagccaccgcgcctggcctcctcaagtgtttttagtttacattagtttattattttagtttacatttgggcacatgatgtttttctggtaatagtcatacagggtcaggtgttttacatgggtcatcatttaatcctcacagcagctaaggagggcatctgttgtcatctccagtttacagatggggacactgaggctcggttttcttactttagtgtaaggggtgtggtttcttattgttttctttatttttgatgtatttcacactgattaaaatttttctttttctacctacaaatgtgacacatgcttctggcagttcacctgggaaagaggaaggtggcaatagtcaccacgttgagagggagcaccctgggtgggggcaccctggcttcatagcccagtttcaccattcagtttttgagctgctctttgccggggtttcctcgccccccgtggtgttgagatctgtgtgagagacactaagggtcagcctttcatgtgcgcacacgtgcctcttaaagagtagtttgtgctgtgcatcttgttctgtttttttttcttcaaataacagattttggctgggggtggtggctcatgcctgtaatcccagcactttgggaggtggaggcgggtggatcacttgaggtcgggagttcgagaccagcatggctaacacgatgaaaccctgtctctactaataatacaaaacgttagctgggcatgctggcagttgcctgtagtcccagttacttgggaggctgaggcaggagaatggcgtgaacccgggaggcggagcttgcagtgagctgagatcacgtcactgcactccagcctgggtgacagagtgagacttcatctcaaaaaaaaaaaaaaaccaaaaaaaaccctctaaattcgggattcaagaattcattgggatcagacttgtccttctgtcctagaaaaatttataggccttgtgaaggagaccaaagatagaggtccttgggagagggtcagctgcagggaacatgactctgacatctggtggaggggctagccatgctggatggcgtggcaggcagtgggctccccaggccatatcttataggaggtcttgggttcctggagttcctgtgtgtgagcgctggttcccaggaaacagatgtggtcactgctcacaaggtagcgggtggtgtttttatatctcttcaagtaacaacgttggacctgtagttaaatgcctttattcttgccagacctctttccagagtggatcatggaatattaacacttgttgtgagctgcttagagtactgcgaatgatttttagagttattttctttctttgcaaaaactgtttttcgccgggtgtggtggcttatgcctgtaatcccagcactttgggaggccggggcgggtggatcacctgaggtcaggagtttgagaccagcctgaccaacatagtgaaaccccgtatctactaaaaatgcaaaaattagccgcgtgtggtgcacgcctgtaatcccagctacttggggctgaagcaggagaattgcccgaacccaggaggcagaggttgcagtgagccaagatcgtgccattgtactccagcctgggcaacaagaacgaaaacgtttcggaaaaaaaaaaaaaaaaaaaaaaaaataaataaataaatttttttttttgtagagaaggggtcttgccgtgttgcccaggctggtctcatacctctgggttcaagcggttcacccaccttggcctcctaaagtgctgggatttcaggtgtgagccagcgtgcccagctgagttcattattttctggaattcctttttagaaaaaggaaaatgtagtcgtgggatgctggtcctttgtcatttgttgcacatttttccacccttttgcttttttttttttcttttttttttttttttttgagatgtagtctctctgttgcccaggctggagtatagtggcccaatcttggctcactgcaacttctgcctccagggttcaagcgattctcctgcctcagcctccagcgtagctgggattacaggcgtgtgctaccacgcctggctaattttttgcatttttagtagagacagggtttcaccatgttggccaggctggtctcaaactcctgacccccacgtgatctgcccaccttggtctcccaaagtgctgggattacaggtgtgagccattgtgcccggcctgcttttgccttttaatattgtgtctggtgtattttatctactgaagttttttcgtgtttgtttttttaaagagatgggatctcgctctgtcacccaggctggagtgtagtggcgcagtcatagctcactgcagccttgagctcctgggattaagtgatcttctcacttcagcctcctgcagagctgggacaacaggcacaagctgccatgcctagttaattaaaaaacttttttttttggccaggcgcagtagctcatgcctctgatcctagcactttgggaggccgaggcgggtggattacaaggtcaggagttcaagaccagcctgaccaacatggtgaaaccctgtctctactaaaaatacaaaaattagctgggcatggtgaagcatgcctgtaatcccagctacttgagaggccgaggcaggagaattgcttgaactgggacccaggacgcggaggtagcagtgaacgagatcgtgccactgcactccagcgtgggctacagagccagactgtctcaaaaaaaaaaaaattttgtttttgcagggtcagggtcacgctgtgttcctcaggctggtctcgaacttctggccccaagcaatcctgccttggcctcccacagtgctgggatgacaggtgtgagccactgcacccagtctctactgaagttttagaaatatttagcttgtcaaactatcagtttctttgtgtttggcctttggtagtacggttagaaagtttatttttcctaatcagttatgtaagcctcatttattggatgatttagtggcctctcccctacttgaaatgccattttaaatctatattaaatattcaaatatattagcctttgcttttagattttttatcctgttccattgacctatctgtatgctcttttttctgggtcatttcgtttgtttgttttttttttttttttgagatggagtctcgctctgtcacccaggctggagtgcagtggcgtgttcttggcttactgcaacctccgcctcccaggttcaagagattctcctgcctcagcctcccgagtagcatgtgccaccacgcctggctaatttttgtatttttagtagagaacggttttcatcatgttggccaggatagtctcgaactcctgacctcaagcagtctgcccgccttggcctcccaaagtgctggaattagaggcgtgagccaccacgcctggcctgggtcattttgtttgatgttagtttatattttgcctggcatcctttcctcttattttcttgatggttttgtagcccgttcattaatgcggatgaactccggaattattttatcactctccaccctttggaattctattaaattcacaaattcatgtaggggagaagtctttctaagatttaattttcatgtctaagatcatggtattatgtctctaattattcacatcttttgtgttcctcagtgaaggttggtgattttctttagatgattcctggagacttttttttaggtttatttctaggtatgttttgtcttttattgctcttgtgaaactctttgttatgtgttctaactagttattgctgatgtctagtgaagatatgttttgtatactgtttttgtaaatggcaacactgtaatggaatatgtatgtgtaaacatacatttcttaacatctttatagggatataattacatactatagagttcactcttctaaatatacattttagtgttagtgtattagtgtattacagagttgtgtaactatcactaccacaatctaggcattttcatcatctgaagcaacccaactcccatcaacaattccttcccattctctgcttccgcagtaaccactcatctggctctgggtttgtgtgtattcagcattttgtgtgatggaatcatgcagtaggaggtcttttggcactggcttttttcacttagcatcatgtctatgaggttcactgtgtgatgaaatgtttacttcaatagtttttcagtctttttttttttttggagacaaagtcttgctctgtcacccaggctggagtgtaatggcgtgatcttggctcactgcaacctccttctcctgggttcaagcgattctcctgcctcagcctcctgagtagctgggattacaggcgccacctgtaaaattagcctggccaatttttgtattctgagtagagacagggtttcaccatgatggccaggcttgtcttgaactcctgacctcaggtgatccacctgcctcggcctcccaaagtgctgggattacaggcgtgagccaccgtgcccggccagttgtttcttctgggttttcttagcaggtaaatattatatggtttgtaaataatgctactctttatccacgattataaatttttattcttagaacattttattgagttttaattttattgagtttaaaatttacctactataaaatgcacccattttagtaagatgtttgagtttcggtaaatgtatacaccccgcgctatcaagatatggaacatttctgtcatcccaaggagttacttgatgtccttttgctgtcagtcccctcaccccagccctagggaaccactgttggttaatggtactgttcattagttttgcctgttctagaatcattcagtatgtgctctttttgtcttccgttgttaaaataacatctccgggacttaccattgttggtgtgtgtatcagtagtttgtacgttttctctcgtgctgataaatcacaatttgtttcttcttcttttttttttttgagatggagtcttggtctgttgcccaggctggagtgcggtggagtgcagtggtgcgatctcggctcactgcaagctctgccacccgggttcacgccattctcctgcctcagcctcccgagtagctgggactacgggtgcccgccaacacacccagctaattttttttttatttttagtagagacggggtttcaccttgttaaccaggatggtctcaatctcctgacctcgtgatccgcccgcctcagccttccaaagtgctggnnnnnnnnnnnnnnnnnnnngttgtttcttcttttatctgttgatggacatttgagttgtttccggtttttggctgttattaataatgctactttttgggaggctgaggtgggcagatcatgaggtcaggagattgagactatcctggctaacacggtgaaaccccatctctactaaaaatacaaaaaattagcccagtgtggcggtgtgcgcatgtagtcccagctacttgggaggctgaggcaggaaaattgcttgaacccgggaggtggaggttgcagtgagccgagatcttgccactgcactccagcctgggtgacagagcgagactccgtctcaaaaaaaaaaaaaaaaaaaagtaatgctactgtgaaaatgtttatgtacaagtttttaggtagacagaggttttattttctcttgggaaaatacgcatgtgtggaattgctgagtagcagaaagtgtcttacttgtagaaagtgtatgacttggccaggcgcggtggctcctacctgtaattctagcactttgggagactgaggcaggtggattgcctgagctcaggagctcaagaccagcctgggcaacatggtaaaaccccatctctactaaaatacaaaaaattagccgggtgtggtggcaggtgcctgtagtcccagctactcaggaggctgaggcacgagaattacttgaatgtgggaggcagaggttgcagtaagctgagatgacaccactgcactccagcctgggtcacagagtgagactctgtctccaaaaaaaaaaaaagtgtgtgactcatcacctgccatactgatgccatgaagattgtactgttgaccatttctaccaacaaggtatgaggattccagctgctctgggttctcttcagcactcagcgttgccagtctctctgatttcagggagtgtatctcgttgtgtccttctctgcgtttcccggatgccagttgcagttgttttccatgtatgaagacttgcagcccagcgtatggtctgttttgttgaacattccacgtgcacttgagaaaaatgtctgttctgttgttgggtagattgttctctaaatgtcacgtaagtaaggtgggtgatagtgctgtttaggtttcagcgattttctcttacttgttctgtcagttcctgaaacaggagtgtcgaagttttcaaccgtgtctcctttcatttctctcagcttcttctgtgcttattttgaagctctgtaggttggtgtgtatacttacagaattgttaagtcttcatgatgaattgatccttttattatcatgaaacattctgtttatctctgatggtaatgcttgttctgacatttactttgtctgatattaacagagccactccagctcttttatgatttgtgattggttggaatatctttttccttttgcttacgtttaacctagctatgtctttttgtttgtttttgttttttaagagacagggttttgggccaggtgcggtgggctcacacctgtaatcccatcactttgggaggccgaggtgggtggatcacctgaggtcaggagttcgagaccagcctggccaacatggtgaaaccccgtctctactaaaaatacaaaaattagccaggcgtggtgacgcgtgcctgtaattccagctacttgggaatctgagggaggagaatagcctgaacctgggaggtggaggttgcagtgagctgagatcacgccactgcactccagcctgggggacagagcaagactctgtctcaaaaaaaaagaaaaaaaagagacgggttttgctctgttgcccaggctggagtgcaatagtaggatcatagctcattgccgccttgaaattctggcttcaaatgatcctcccaccttggtctcccaaagtgctgggaaaacaggcatgagccaccacacctggccggcctcaatgtcatgttgatgttcacttttacagtaaatgtttcctatgtttttccctagaatggatgatgaacttgttgttggacatagtgcaagatcagacatctccagcttcccttgtacatctggcttttaaatttctttacatcatcaccaaggtaacatttccatagcacttcagagttgacagatacttttgtaatatacttggtccagaggttaccctccaaaatgttatttctcaagaaagatagttcttagacacaagttgtgggtttaattctgtccctttttactgtatgttggggatcagaatttagtgatgtgggctctttggctgaaacagtgtcaggatattcagcatcttgcatttgaatagattgaagcactgtgtagctaggaagggaatggggtggagatgagactaaatcagaaaaacttcttacaaggagaaagcaggccgggtgcggtggctcatgcctgtaatcccagcactttgggaggctgaggcaggtggatcacctgtggtcaggagttcgagatgagcctggccaacatggtgaaaccccgtctctactaaaaatacaaaaattagctgggcttggtggcacatgactgtaatcccagctgcttgggaggctgaggcgggagaatggcttgaacctgagaggcagaggttgcagtgagccgagatcatgctgttgcactccagcctgagtgacagagcgagactctgtggaaatggaagtgcttctcacactttaatgtgcagatgaatttcctgggaattttgctgtgctatagattttgagcaagtaggtctaggcgggggtctcatagtctgcttttcttacaagcttgcgggtgtctgtgctcatagtctgcttttcttacaagcttgcgggtgtctgtgctcatagtctgcttttcttacaagcttgcgggtgtctgtgctcatagtctgcttttcttacaagcttgcgggtgtctgtgctcatagtctgcttttcttacaagcttgcgggtgtctgtgctcatagtctgcttttcttacaagcttgcgggtgtctgtgctcatagtctgcttttcttacaagcttgcgggtgtctgtgctcatagtctgcttttcttacaagcttgcgggtgtctgctcatagtctgcttttcttacaagcttgcgggtgtctgctcatagtctgcttttcttacaagcttgcgggtgtctgtgctcatagtctgcttttcttacaagcttgcgggtgtctgctcatagtctgcttttcttacaagcttgcgggtgtctgtgctcatagtctgcttttcttacaagcttgcgggtgtctgtgctcatagtctgcttttcttacaagcttgcgggtgtctgtgctcatagtctgcttttcttacaagcttgcgggtgtctgtgctcatagtctgcttttcttacaagcttgcgggtgtctgctcatagtctgcttttcttacaagcttgcgggtgtctgtgctcatagtctgcttttcttacaagcttgcgggtgtctgtgtgctggcccagaggctcactgttggcagttttgactatggaagtactcacagccgtctcagggtggggcttggggttcgtagtggcgaggcgcatttctgttgtctggcgggaaagtccttggccagcgagaggacactgcgggtgagctgccaaggacacgcaggcctctgtagctcctctgtttgaggttaggatttctccggaaggcgtggtatcactgagcttcagggaagtgttaatgaatttgggcccttgcggtttgtaggcacttattcctcataaatgtcagaggacagtcatataaatgaacatatttaatgactgattccgtaaatatggtaatgaataacactaccaatttaggaaggaaatctttttttttgagagatggggtcttgctctgtcactcaggctagagtgcagtgatgcagtcagctcactgcagcctcgaactcttggtctcaaatgattctccctcctgcctcatcctctcagactacaggcatgtgccaccatcctgtctaatttttaattttttatgttgcccaggctagtctccaactcttggtctcaagctattcttttgcctcggcctcccaaagtgctgggattacgggtgtgagccatcgctcttggccatgggtagctttcttggggtgactacggtcttactaaattgtgtcactgtaatgtcacagaattctctttgatcagtgggtcgcgtagctggtgatttttgatgaaagggtagaaaggcaattttgctgctctctgtatttttaaatgttataattcagcatctctttatttgataggttcgaggctataaaacatttcttcgtttatttcctcatgaagttgccgatgtagagcctgttttagatttggtcacaattcagaatcccaaggaccatgaagtgagtgtctctgcctcccccctcgtctccagccctccgtgcctgtccttcctccctgcttgccccaccctgctgcaccttccccttcctgtttctttcattttatctccctttgttttgtgtcactcctcttttctttcttttcttttcacttttcctttacttcttgtacaagttgctttaaattattttcgtttaaaatagcccctttataaaaaaaattatgcctaggtgtagtttaacaataaatccgtcattgtttctatgtttttttaactgtgtaagtataactgtgttgggttcccaagaccacccccaggtttgatacttcctgagcgggactcacagcactcagcatagagtcctccttttggctgtcacttgttatggcaaaataatacacagcaaaatcagcaaagggaaaaggcacatgggtggggtctggggagaaccaggcgggagctcccggggtcctccagttgggtcccacagggcctgtgtcattcccccagcagtgagatgtgaccacacctgtgaggtgtctatcagagaagcacgtttgagacttggtgcccagagctttcactggggtctggccacatggacacctctgcctggcacgaaacgaaattccagacccccagcaggaaagcaggtgccagcgtaaagcacacggtttgtgcagattgagccagcgagggacctcatcaggcagggcttggtgggaaccctgctggtgtccaggtccctggataccagcccagggccggcctcgtcaggggccttgcctcagacggcagcggggcctgctatgctcgctgtcttctgcgtggtatgtatttggaggagcacacggtttataaccgtgcagtgcggtggcttgtctcggcgtggatgtgactgatgagcgctgtggggcatttccctgctgccctgcactccgtgcccttctttccctagtacttctagcgccccccagtggaatgattgcagggacaaattgggatgttttttactaattactgaaaataagggtactccttttttattagaagttgataattgttttctttattcttttttttttaaaaagacagagtttcactcttcttgcccaggttggagagcaatggcacaatcttggctcactgcaacctctgtctcccaggttcaagcgattctcctgtgtcagcctcctgagtagctgggattacaggcatgtgtcatcacgccagggtaattttgtatttttagtagaaacagggtttctccatgttggtcaggctggtttaggactcttgacctcggccaggcacggtggctcgtgcctgtaatcccagcagtttgggaggccaaggtgggcggatcacgaggtcaggagatcgagaccatcctggctaacacggtgcaaccctgtgtctacaaaaaatacaaaaattagcctagcatggtggcaaacgcctgtagtcccagctactcagaaggctgaggcaggagaatggcgtgaacccggaaggtggagcttgcagtgagcgaggttgcgccactgcactccagcctgggcaacagagcgagactccatctcaaaaaaaaaaaaaggaactcctgacctcaggtgatccgctcgtctcggcctcccaaagtgttgggattacaggtgtgaaccaccacacctggccttttttctttattcttaggtgtttttactttttatctgtttttcactttttcaaaaggccagtttgtatgtggagaggtgccagcgaagagaagctgctatactgatgtattatgatttttctttgttcattttgatgtctctcttgtctgctgagctaagttacggcggtaggtgtgtgtggtggggattccgggggggatgtggcgaggagttggtgaacggcttgcatttctggccctgagggtgatggcatttgaatggctttcataggcattgggtgggcatggagggcagtgactttgagtagattgtggccagtggcctgtgattttcaagcaagactcattcttcccgtggtttaattttttaggcttgggaaacccgctacatgcttttgctctggctctccgtgacctgcctgatcccttttgatttttctcgccttgacgggaacctcctcacccagcctgggcaagcacgaatgtccataatggaccgtattctccaaatagcagaggtaaatatcatgcagataattagctgctaattagtactcactttcatgttcatgctgtcttgatgttagtggtttactcggtaagcttctgatatgtattcaactgctgtttttttcagtggggtaaaatcccataggataacttattttgaaattgtgataattcatgtaggggtcaggttgagttagcaaatctcatttctttgtagatgatgcaaatactctgttgagggtaatcatggcagataaggaagggtttagtggcatggtgagagagaataaggacccattttacatttagttcttaacgttatataaataatagatgctcatttgtaggagaactagaaaataaagataagcaagaaaaatactaaatttaaatttatgaaattctagtgccaagagataagttgtttattttctccgaacttttcctgatgtaaatattatgcatataaacacagcttattgtattagttatctattggatcataactaattaccccaaacttgagtgtttgacacacatttatcctcttgtagtttctgtgggtcgggagtctggcatggctgagctgggtcctttgtgtcaagcttgcccacagctgcagttaaaactcgacatgggcaggctttgccccaaggccgttggattgaggccaccctcagttctttgccacctgggcccctccaacttagtgacttattccatcaaagcctgcaagggagaaactctgctaatgagatggaagtcatgataatatgttacctgatcatggaagtgacgtcccattcctctgccagatcctgtggttagcagcaagtcaccgagtccagcctacgcaagcgagcactaggaggctgtcaggctctgagccatctcagttgtctcggtcttcctgccacgctgactgcgacagccctggtcagcattcactgagtgcctgctgtgtgcctggcaccgttcaaacactcatagattaatctttaatcacttatggattaataatttaacctatacattgggctgggcatggtgggtcactcctgtaatcccagcactttgggaggccggggcgggcagatcacgtgaggttaggacttcgagaccagcctggccaacatggtgaaaccctgtgtctactaaaaatacaaaaattagctgggcctggtgacacatacctgtaatcccagctactcaagaggctgaggcagaagaatcccttgaacctgggaggtggagattgtagtgaactgagattacgccactgcactccagcctgggtgacagagcgagagtccatctcaaaaaaaaaaaaaaaaaatttaacctatacgttgatgattgatagatcatcagtgattaattaactgtgattaataatcattgaattctccttcatgaggctgttgacaattcttaccctcgtttaaccgagaaggcaacaggcataaaaattaataacttagtttactttgctcataaatggtggatccatgtttgaatccaggcggtttatctggagtctgtgctcttcatcagggctcagcattgccccatgacctgctgttctgagtcctttttaccctcagcaacacgttcttagtgtcttacgatgtcagaaggtgtccccctcataatcgttaagggaaaaggtactccattgtaatctaatttaaaattctctctgatagatggatgttttgtttgttcttgttttgttacgttagaggtagtgtggtgatgggctgggtgcggtggctcacgcctgtaatcccagcactctgggaggccaaggtgggcatatcacctgaggtcaggaattcgagaccagcctgaccaacatggagaaaccttgtctctactaaaaatacaacattagctgggcgtggtggcacgtgcctgtagtcccagctactcaggaggctgaggcagaagaatcgcttgaacctgggaggcggaggttgtggtgagccgatatcacgccattgcactccaccctgggcaacaagagtgaaactccgtctcaaaaaaaaaaaaaaaaagtagtatggtttacccacccttgtttacttgtctgtggagagggactgccaggtcaagggagcatggtttgtcaagacttggcactctgtgattgccgttagaaagcctgccccggaggccgggcacggtggctcacacctgtaatcccagcactttgggaggccgaggcaggtggatcacgaggtcaggagtttaagaccagcctggacaagatggtgaaaccccatctctactaaaaatacaaaaattagccgggaatggtggctagtgcctgtgatcctttcatatttattcaactgttctcttacaaatgaacagctacttgggaggctgaggcagagaattgcttgaacccgggaagcagaggttgcagtgagccaagattgcaccactgcactctagcctgggcagcagagcaagactccgtctcaaaaaaaaaaaaaaaaaaaaagcctgccccagaaaaaaagatcttctaagtgtatcgttatgggaaaaaacaaacaaacaaacaaaaaaaaccgagacaagcattggaaacattttaaggcagccctccgaaaaataaatctagctgggcgtggaggtttcatgcctgtaattccagcactttgggaggccagggtgggaggatagcttgagcccaggagtttgagagcagcctagacaatataatgtgactcagtctctaccaaaaaataaaagaaaattagccaggtgtggtggtacacacctttggtcccagctattctggaggctgaggtgggagggtcatctgagactggggaggttggtgctgcagtgagtttttttttttttgannnnnnnnnnnnnnnnnnnnnnnnnnnnnnnnnnnnnnnnnnnnnnnnnnnnnnnnnnnntgagtagctgggattacaggcatgtgccatcatgcctggccaatttttgtgtcattagtagagatggggttttaccatattgaccaggctggtctcaaactcctgacctcaggtgatccgcctgccccagcctctcaaagtgctgggattacaggcgtgagccgcagtgcccagcctacagtgagctttgctcacaccactgtactccagcctgggtgacagagcgagacccggtctcaaaacaacagcaaaaaaaccctaagaccagctactggggaggctgaggcaggagaatggcgtgaacctgggaggcggagcttgcagtgagccgagatcgcgccacggccctccagcctgggcgacagagcaagactccgtctcaaaaaaaaaaacaaaaacaaaaacaaaaaatatatacacctactatgtaccccaaaaattaaacactaaaaattaaaaataactaggtatttgtagtaaatctaggtgctcttcagtttgaacagggcctcttatctagtctgaatactccaatactgatggttcccttgtgctggaaggcatattaggtgctcaatgaatactcttgattctttgttacaattgggtaactcctttgtttacattctcctgctctgttcttgcaaatgtgtgtttcaagggggtgtgaccaaatgctctgtgtagctcaggcacttcctgggtgagtgtagcagttggcagctgtagcccttggctcagattgaagagaggtttttttttgcagctttggacttaggcctgtgctggtaaggtttgtgaacctgggccctcggggagctggtgagggtgggactggtgactgtgtggtgtccccaaggctggcgtgtgcaggagtgaccgtgtctgtgcttcaccctttcttgcagtcctacttgattgtcagtgacaaggcccgagatgcagctgctgtccttgtgtccaggtaagtttccatggcacatttcttggtgtgtggctggtgggttctgagaggggtttgtttgggtacgtgtttcatgtgcgtcttcagtcctcagacgaaggaccccgggaagtctttggactctgtggctttctctgagggagcgtgcagcagtgtttgggcacagaagacctctgaccctgaaatgaccaccctcagtggtggtttggggtgctggtgggggtcacctgacaggcccatcgacaggagtgcaggtctggaagaggcgtggctgtcatccctggggtgcagcccctgcacagggatggggtggcagttatgagaaacatctcgggccgtctcccatggagatgatgggtggtgttgggcctctgtgactggggatgaaaatcccccaacgtcctgtattaactgcaccccccgtgtgccccagacaggggaaggtggttttctctgctgagcgcagcaggcctgcggtgttggaaagataccaaggatgtgtgtatagactgagcgaacctgtttcatgagatgcaagaaggaagaaagcaatatttctaatcagtattttacatgacatgtgattttaagtatgtatgtagtttactaagtcagaacagttgacattttccccctctgcaatagtgaaagtcgaaagctggtcctaaaacctttcggtggttgtggttgggaatacggtcagtgcctcatgcagcgtcaccttcactcgggtgtgtagctgcaacttgcacagcttctttcccagagaagtgggaggagagaagcttcctttgtggggcagttggaggcattggatgaggggtttgtgacagcctggagctgaggaaggaacgcctgagtcccctggagcaggtgaggcccctcccgagagggcagaggctgcttcctgtcttgtcaaggacataaaaagatgatcgtctaattattaaagtaatctgtatatatttagataatagagcatgaagtacaaaataaaacctttgaatgctttcatcccatgggggtgtgatggcccctgtctccctaccgggtggcgccaactctgtccatggtctccccgcggggcggcaccaactctgtccatggctcagttgctgcactcaattctttgcaccacggaccaggagatgggcctggtgcgccattgtcttcttccaaaacgagatgacctggtgcgagagtgtcttttctttttctttcttttttttttttaattgagatggagtctcactttgtctcccaggctggagtgcagtggcacgatctcggctcactgcaagctctgcctcccggtttcacaccattctcctgcctcagcctcccgagtagctgggactacaggtgcccgccaccatgctcagctaatttttttttgtattttcagtagagatggggtttcactgtgttagccaggatggtctccatctcctgacctcatgatccgcccacctcggcctcccaaagtgctgagattacaggtgtgagccaccgcgcctggcccgagtgtgtctttttttttttttttttaatttttttagtatttattgatcattcttgggtgtttctcagagagggggatttggcagggtcataggacaatagtggagggaaggtcgcagataaacatgtgaacaaaggtctctggttttcctaggcagaggaccctgcggccttccgcagtgtttttgtccctgggtacttgagatcagggagtggtgatgactcttaaggagcatgctgccttcaagcatctgtttaacaaagcacatcttgcaccgcccttaatccatttacccctgagtggacacagcacatgtttcagagagcacggagttgggggtaaggttatagattaacagcatcccaaggcagaagaatttttcttagtacagaacaaaatcgagtctcctatgtctacttctttctacacagacacagtaacaaactgatgtctctttcttttccccacatttcccccttttctattcgacaaaaccgccatcgtcatcatggcccgttctcaatgagctgttgggtacacctcccagacggggtggcagccgggcagaggggctcctcacttcccagacttggcggccgggcagaggcgccccccacctcccagacggagcggcggccgggcgggggctgccccccacccgagtgtgtctacctgtcgtttgtggtgggacatttagactgctgccctcccaatttggtattaaaactcaatattgcaaacagtccacgtaaaattgtgtaccgttctgactgatttctagggatgagtttctacaagtggaacgcacgttttcagggtctgaatgcaattactggagaggctgaacaagttggaagttctttccccgtcttttccagttgggtcaaaccttaagaatgtttgccaacttcgttcaatgggaaatagtatctgcttttattcttacttttcttagcagcagtactgagggttgcgtagatttttgccgagcttggctctgtggagtgcggtgcctgtgggccaggaggcaccatctgagtacttctccctccgtggggtcctccgggaaaagagcgcgctggctcgggatcccgggcggactcccggcgagacaccgcagcgccacctagtgccgggatgagcaggtgcttttcggccgagccagtttccgtgcagaacacctgagcctgggatccaggagaggtggtgcctgggggcgtcggtgccgtggagcctttctcccccttggtctcgcacactctcgcacactgattctcaagagtgtttgagaatggcggatgccgtcagtggaagagctcttacaggtgcttggccggttccctcgacacctcccagactcaccgcaggttctgagtttcctgtacttctcagacccctttttggtgaggattgttcaggtaaggccagggctgcgaggggtcctgtgccagcatttgtctgcagtacaggttcgttttctgctctccagggaggagcagcctgctctagcccactttgctctcaggattgaatgcttctccctgtatcactggcggctctacagctgcacccgtctcccttgattaactgagcttgccaacatccacagcgctgtaggtggtgcttggtgttacagtgttgctagaacatgcagattgagtgctgccttagaaacccacaggaaggggaacatcacactctggggactgttgtggggtggggggaggggggagggatagcattgggagatatacctaatgctagatgacgagttagtgggtgcagcacaccagcatggcacatgtatacgtatgtaactaacttgcacaatgtgcacatgtaccctaaaacttaaagtataataataaaaaaattaaaaaaaaacccctttaatagatatgcctttcgccaggcacggtggctcatgcctgtaatcccagcactttgggaggctgaggcgggtggatcacctgaggtcaggagttcaagaccagcctggccaacatggtgaaaccctgtctccactaaaaatacaaaaaaattagctgggcatggtggtgcgtgcctctaattccagatacttgggaagctgaggcaggacaatcgcttgagcccaggaggcagaggttgcagtgagcagagatcgcaccattgcactccagcctgggcaacagagcaagactccatctcaaaaaaaaaagaggtacgctgtatgcagaaaagttggaaatcttggcgtggcgtggtggcacgcacctgtggtcccagctattccgaaggctgggtgggaggattgcttgagcccagaaggttgaggtttcagtgagctgtgattgcgccactgcattccagcctgcacaacagagcaagaccctgtctcaaaaaaaagttgaaaatcttgaaacatagaagttggaaaaagatatataggtaattcttatacacagtgcgtgtaccgtgtttatcttctttgcaccgttatgacttttaatgtgcacagcatgatcttaacaagtcagagtcagcactgtgctttttcacctgatttcatgtaactgctgatgaatggctccgtcgtgttctgctgtgtttcgatactgcactcagctctgtcacttcctgcctcttgtgagcagtcacggacgcctgggtttggttacagacccgttctcgtgtcaggattgtttcgtgaggatgggcccttagagatggacttctgggttccaggacacgagagtggtgttggggtctgcacacctggtggctctcagctgctctctgagcagtgctttggtggccgaggcagccccaggaacaccccacccccaaattggattaaacatggtgtcgctgattgcaggtatttaattggcatcacgctgattgccctcaccttaggtgttacatactccgcttcgtgacctgactctgcgtgtctgtgggctccttggggccttttcttccccacgagtgtgagtttcctccggtgaagggcgatggggattgccccaggtggttgttggccttttcctttttttttggaccaaagttttaattttaatgtcaaaccgtttttttctcctttatttagttatttttacttttaagcctgcagtcttattaagagatttaacaagtagtcatttatatttttctctaccgtttattaagacagaattattgattcatttggggtttcttttggtctacagtagaaccccgcccttcccagtaggtaaccagttgctttagtgccattttgtgtctgtagggaccagcaccacaaggtcggtgggtttctccctgtgtgtggagatgagagagtgtagaaataaagacacaagacaaagagataaaagacagctgggcccgggggacaactaccaccaagttgcagagaccggtagcggccccgaatgccaggctgcactgatattattggatacaagacaaaggggcagtgtaaggaatgtgagccatctccaacggtaggtaaggtcacgtgggtcacgtgtccactggacggggggcccttccctgcctggcagccgaggcagagagagagagaggagaaggagataaacagcttacattattatttctgcttatcagagacttttcactaatttgctactgctaactaaacggcagagccaggtgtacaggatggaacgtgaaggcagactaggagcgtgaccactgaagcacagcatcacagggagacggttaggcctccggataactgcgggcgagcctgactgatgtcaggccctccacaggaggtggaggagtagagtcttctctaaactcccccggggaaagggagactctttcccggtccgctaagtagcgggtgtttttccttgacactaacgctaccgctagaccacggtccgcttgtcaacaggcgtcttcccagacgctggcgttaccgctagaccaaggagccctctggtggccctgtctgggcataacagaaggctcgcactcttgtcttctggtcacacctcactatgtcccctcagctcctatctctgtatggcctggcttttcctaggttatgattatagagcgaggattattataatattggaataaagaataattgctaccaactaatgattaatgatatatataatcatatctaagatctgtatctggtataactattcttgttttatattttattatattggaacagctcgtgtccttggtctcttgcctcggcacctgggtggcttgccgcccacagtattccgcttttccattcatttctaatgctctgtgggaactctgtgcgttttaaagggaacacggtttgtcaccaccttaatgctgcttccttctgcgatgaagttaactgccctgggccccttttgcagatccgctaaagttaactctcctggggaggacacatgagtttcttttttctttccttttcttttcgagacagggtctcactctgttgcccaggcgcgagtgcagtggcgtgatcacagtttactgcaacctccatctcctaggctcaagcaatcctcccaccttagcctccccagtagctgggactgcaggcgcatgccacgacacccagccaatttctttttcttttttttttttttgagacggagctttgctcttgttgcccaggctggagtgcagtggcgtgattttggctctactggagtgcaatggcgtgatctcagctccactgcaacctctgcctccctggttcaagtgattatcctgcctcagcctcctgagtagctaggattacaggtgtgcgccaccacccctggctaatttttgtatttttagtagagacggggtttcaccatagtggccagggtggtctcaaactcctgacctcaggtgatccacccgtcttgacctcccaaagtgttgggattacaggcatgagccactgcgcccggccatgcctggctaatttttgtattattttctagagatggggtttatttatttatttatttatttatttttacggggtcttgctctgttgctaggctggagtgcaatggtgagatctcggctcactgcaacctccgcctcctgagttcaagtgattctcatgcctcagcctcccgagtagctgggattacaggaatgcgccaccatgcccagctaattttttaatatttttagtagagatggggtgcaagacaggctgttctcgaacttctgacgtcgtgattcacctgccttggcctcccaaagtgctgggattacgggcttgagccactgcgcctggccaagatgggggtcttaccatgtttaccaggctggtcttgaactcctgaactcaagctattcacccacctccgcctcccaaattgctgggattacaggggtgagccactgtgcccagccaaatgattctttactttctggaaatagggacttctttccccattgttcatgctgagcccctccctaagcatgctccacagggacagtggcggaggggagaggtccttgctgttacgagcagttggcaggtgccagccgtcctgtcagctgggcagcgcttctgttttgtgagggccatgaccgagtaggatggcacgtgcgtggctgtctcctgtgtgttaagtgccctgagagggcttgtccccacggaagcatggagccggctctcgcgcaggccaactagatggatgtgctggaacaagggccgggaaggtgggatggccggagttgaagttgcagtggagatgacgtgggggccggagggagggtgggcgtcatagcctggcagctccagcttccacgtctcaccttgcctggggtctccacgtagctgtctcgtgggcgtcgcgtggggcactcccccacgtggactcttccgcctcctggccctcccaagtgtcccttccgggaggtggccttgtggctgttgagggagcgcctggtgcctccctcctggcatcactgccgtctccttccccccaccccataaaggtgtggctaggatgccagtcagacctgccggcatggcctaaagaggaggtgggcaggcttggccagtactggtcctgtccccagcacctctcccactcggctgctctgcttcgaccatgttgcctttgcagttcgcgagttcccttggctcccttctgccctgggccctggctctcctgcttccctgggcagcagcactttcctcccaggttttgcagcccccctcgttgagctccgtggcttccgtcctctctctaacgaggccatgccctcccgtttccttcgtaacttttctttgcactgtggaagtccccagctgtttgtcgtttctctccagagtgtcagctgtgggagggaagggccttgtctgttctccgtgtggcagtgccagtctcgatcatggaggcaagctgggggcctggcctatgaactcctggtggagaaatcaggaggatctgggctaattagctgggcatggtggcgtgcgcttgtagtcccagctactcgagaggctgaggcaggagaattgcttgaacctgggaggcagaggttgcagtgagtcaagatcacaccactgcattccagcctgggtgacagcacaagactccatctcaaaaaaaaggaagacttgggcttttttttttttttttttttgagacagagtcttgttctgtctctcaggctggagtgcagtggcacaatcttggctcactgcaacctccgcctcccgggttcacgcgattctctggccttagcctcctgagtagctgggattacaggcgcacagcaccacacccggctaattttttgtgtatttttaatagcgacagggtttcactatgttggccagactggtctcgaactcctgacctcgtgatccgccctcctcgtcctccaaagtgctgggattacaggcatgagccactgcgcccggccagatttgggcttttggtttgggagctctgtgtgctcaaggtgtcctgcgctgaggccgggctgcaagaggggtggggagtgtgagcactgcctggaacacgaggccgagtccaacagggaagactttcatggggctacacgagcagctggctgtggaaacaggcctgtgcacaagacgcatggcaggtgtgggggagggaggtcccaggggctggggcccagctgccggggccaggccttgcacgtgggcacggtgtcctgaggtcaagggatgcagagttgggtccagggaggagggaggggctgagaagtgggcaggggctccctggcggtgatggggacaggtaaaactgggggggtggagggggcaggcggggggggatgggcagtaggcctgcgacctgagaggttgtggtggggaaccggctgctgagggccctggtcagggcagcgacttggtttctagggttggagagaggaggaactagctggaggaggacaggactcagtacagagctggcatcttggtgtaagggtgcgtgaggtgggagggcctggggaggtgggtgtgtgtggggtgggctggtgaggcgtgggcgaggtctcagtgctgaggccttggttgagctgtatccttttggcagatttatcacacgtcctgatgtcaagcaaagcaagatggctgagttcctggactggagcctgtgcaatctggcccgttcctccttccagaccatgcagggggtcatcaccatggatgggacgctgcaggccctggtaagtgctgcccgcaggggctgtggagatcgcagggaaatggcgccttacatggggaccacggaatgatgttacctgtgattccatcttgacgtaattggaaccccgtgggattgatttaaccgggccagggtcttgggcagtttccttttccctctgctttgggtcctgcctcaggcagggctggtttctgcgctggtgctggtggatgggcttggagccccacctgttgccagcagagggcagtggtgccacgcagccggggctccccagggtaggtttctctgcatctgggctgcttagttcctgtttaagtgcagagactgaacgagctctaataaaacaaggtgggtgagttgaaatttgattctgttcctttgcactgggctcgggttggatgttcctgactgcttcgttgggacacagaccctggcctctgcctgcaggtgcctggttagtgccctggctgcagccctttgccagccctttccctgccctttcgctctgattgtctcttgtgttaccttttcttgtgctaacgaggaggaaaggtcaagtctcagaagagggcaaagcctcttttgggtcagcgtcctggaggctgcagctccctggtcagccttctggagggggagccggcagccggctgtggcctttggcgtggtgggttcagcgccttcttctctctttaattacagcgggtgaggctttgagagcacttctcatccttgtctcacgctgtggagcctgtggtccctctgaggagcggggcactttgttcttgtttaaaaaatatattttatagagacagggtcttgctatgtaggtcagggtggtcttaaactcctggcctcaagtgatcctcctgcctttgtgatgatcccaaagtgctgggattacaggcttgagccgccgcgcctggaaggacactttggagcgcgttttaggggagatgatgagtgccacctcgccacggcgtcctcctgtccgtggcgtcgtcctcctgtccgcagcatcgtcttcctatccgcggcattgtcttcctatccgcggcgttgtcttcctgtctgtggcgtcgtcctgtctgcggtggcgtcgtcctgtctgcggtggcgtcctcctgtccgcagaggcgtcctcatgtcctcagtgttgtcttcctgtccatggcgttgtcttcctgtctgcggtgtcgtcttcctgtccatggcggcctcctgtccgcggtgccctcctgtccatggtggcctcctgtccgctgtgccctcctgtccgcggcgtcgtcttcctgtctgtggtatcatcttcctgcccgcggttttgtcctggccgtggcaggttctgccagggagcgggaggctgtcagctgggtggaggggggctgtgggagtgatagcctggggtgggggcatacgtttcttgagggggaattgggaagtgtcctcctcaatgtctgctgcttcccggtcatgctgccgtggtcttcaggagggcagcctttgaaatgaggaaaaggtttcagacgtgtgagagaaaactgcagacgtgtttcctggagcctgtgctctgcccaggtgatgtctgttttcttcaggcgtcccctcaacctccacataaatgtgacagattcagcagttttcaaaaatcaagatataattcacataccacaagtaatttatccttctaaggtaaacaattctgtagttttctgtgcggtcatcaccattatctaacttcaggacactgtcatcatcgtgagagaaaccttgattgcaccgagcagtccgtccctcaccttccccagcccctgcagccgtggatccatgtgctgtccctgtggacttgctggttgcggacatctcacctcaccagagtcgtacacgacacagccttttgcgtctggccttcactgagcccgatgtgtccaaggttcatctgcgctgtggtgttgtcagtgcctcgttccctttatggccgaatcataagccaacgtgtgggtattttccatatgccagcgtgtgggtattttccatatgccagtgtgtgggtattttctgctcttacaaattacgctgtgaagaactttcatgtgcaagtttttgtttaaacttaatgctttcaggccgggcgcggtggctcatgcctataatcccagcactttgggaggccgaggcaggcagattacttgaggtcgggagttcgagaccagcctggtcaacgtggtgaaaccccatctctactaaaaatgcaaaaaatagccaggcatagtggcgtgggcctgtaatcccagctactccggaggctgaggcaggagaattgcttgaacctgggaggcggaggttgagtgagccgagatcatgccactgcaccccagcctaggtgacagagcaagactctgccagaaaaaaaaaacagaaaaaacaaacccaacttaatactttcagtacccttgggtacacaacactagtttttaataaaattttaaacaaaatttggaatgttttcatctttctggagtctttctaaaaagatttttctggtggcatacctgtcgtactgatgaaatagaggacctcctcatgccaggcatttttgggcattgcaggtacagatgtgctgtctgtgtccccaggtgcccctcgttccggccgtgctggggcagcatcctcaatgcctaaagaggattcattgctatcgtggaggtcagggcaggctgaggctggccttgaagggtacgggggtggaggggtagggcagggaggactcaggtctcggacgtacccactgtgccattggtccatggatcctcagggaatgtgcgttttatgttttaggcaattctggtaaaggtggtggatttagttgcaattggattcttcattttttgccttgggtctcactgaggaaacatgaagaaggggtagatggcagtggccagggtgggggtcctgggaattctggtagcttcaccttaatgtttgtgatgctgggtgtacagacagcctcccacatgaccaaggacacgctcttaggtccctaagaccccagaagaatgggccgctactgccaagaagtatgacatgcgtgtggaagaccatgagccttacccggctggtggcatggggtgtggcaactgccgcagctccccgaaccattgcagtgggaaaggggtacgtgctgtgactaagaccactggacccgacccatcgcagcgacagggggtccatgctgtgtgactgagaccactggaccccacccatcgcagcgggaggggggtccatgctgtgtgactgggaccactggatcccacccatcgcagcgacagggggtccatgctgtgtgactgagaccactggatcccacccatcgcagcgggaggggggtccatgctgtgtgactgggaccactggaccccacccatcgcagcgggaggggggtccatgctgtgtgactgggaccactggatcccacccatcgcagcgacagggggtccatgctgtgtgactgagaccactggatcccacccatcgcagcgggaggggggtccatgctgtgtgactgggaccactggacccgacccatcgcagcgggaggggggtccatgctgtgtgactgggaccactggatcccacccatcgcagcgggaggggggtccatgctgtgtgactgggaccactgggacccgacccatcgcagtgggaggggggtccatgctgtgactgggaccacctggcctgaggttggactggtgaaatgacaatgttggcacctacatgtgtgtcaggatccatgtggatatgtcccgcacacctgcttcttggaatattgtgtaagcagctcttcagcttcacggccttcatgatcgtgttctgggtggggaagaattaaccagcctaccagcccgtggggccaaagcagtgtccttataatcatctgcacctggaaccaggtggcgatcccaccgtagaacctgtggctcacaggatctgaggtggcttcgagggcttctctgccctctaggattccctcatccttagaaatttaaccttaatgaaatccctaataaaactcagtgctgtgggggaaaaacatctcaggtcaggggagcaaatgggaggtctaacaggatgtgaccagagctggttgtctccaatggctctgccccgagtgtggtgcctctgcaggggaggccgttagccctgccccgagtgtgggtgctgctttgggaggggaggcaaatttgatctctgtccggtctcttaacgggcttctaggggtctcctgcagctctcgtcagcctggcctgggagcctcccctcctctgccgtccccaccccatgctgttgggtcagcaggatatcccagccttggggctggagccagctgtggctgcccagggacttgcaggcaggtgaggcgtgccaccttctggccaggctggctgtgggagaggcagcctcctggtgaggggctgtgggccactgcgttcaggctgccttggagggctccacggtgtcccctgggtgcagggctccgagtccttctcggcttgggagggtcttgtggccacatgtgtctagttctgcagtttctttgttgtgggttcggttctttacttttttttttttttttttgatgatcttgttggttttctctagattgttcccaagttttctgttcttccatcccaagtgggagacacgtgttgcacagcctgcatttggaatacccagagggtgggtgggcgggacggctcgctgccccattcccctcctagctgctgggacaggtgggaattcctgtagcaaagtcaaaccagccaggagtggggaagtgctttttattttgacatctccaagttccacgttgaggtggagagacattcgtttttccccttcctcccgaggtgtaaaacggtcttctcaaaggcttaggagagccgagccctgtgccaccccccggcatatgctggcaaagagtgaggcgtgctgtcctgccgtttagggcagagcacccaggcggtttggcagcagcacctcagaactattcagagatttgccctcagcaagagtgagcaattgtctgacgcagccggctgaaatccctgggaagggaatgaatgaaactgccgtgaagcaacgcctggcggggccgggcttctggcagctcctggggccagcacgtcccttccagagcgtctgaagccctgggcggctgctggagcatctcgagtctttccagagtcatgtgtgttgtttccttctgtctcttggaagggtccgtttggtctgatccaggttgcctcagcaggaggaagtcgtgctgggtgctgagcgggtgggaggtttcaccttgggcttggcagagctgcaggcagaggccgggcgcctgctgtacatgatgaaacttgcaggtggattctgcttagggtttcatctgtttcctttgatgcacttggcttcattgtcatccacctgttcattactgtgggcgaaacaggtgaactctcaacaagtaccatcgaaaccaggatttgatcttcatttccctcgaagcgtagttcccttgcagtgagggtttttaactcctgtgggagggaagcaagtgtttggcaatgtaatttccctggaaggcccctgtacttcagctttaaaaacacgctttggtttagtcccaatttaagcattaagattaatgcaaattgaggaaattcaaggaaggagaaaaacacattaaaaatggaaaatgggctgggcacagtggctcatgccggtaatcccagcgctttgggaggccgaggcaggtggatcacttgaggccaggagtttgataccagcctggccaacatggtgaaaccctgtctctactaaaaatacaaaaaattagttgggcatggtggtgcgcgcctgtaatcccagctacttgggaggctgaggcaggaaaatcgcttgaacccgggaggtggaggttgcagtgagccgacatggcgccactgcattccagcctgggcaacagagcaagactccatctaaaaaaaaatttacaaaaaggaaaatggctgtcatttcatgtgtgactctgcttgctgattgatagttgtgctctcttggtttctagtgctctgattggaagattgtcgactgtgtggagtgggtttctccctgtgtgttctcacaatggctgggaggcggcggcggggctgggggactcggactgcgagacggggctgttgactatgaaagtggtaataggatgctcttccccttatcggctgttaggctcgagtctcccctttgcagtgcggtttctttttatttttatcattgacaaaagcacaactcttgttaaaggataaaatagtcacacacaacagcattaaaaaccaagaaagccaaagaacgctggcactgtcagcctcactcccagctcccgctcggcccttgtgaagagaggtgctgaagccactctgcttttttatagttaataaaagcagccaggtccccaagtaggagtggttgtggccaagagtgtgtgggccgggaaccagggcttgagctgctgtgagctgtgcccaggccctttgctgactccgtctctcctgtgacctgaggccagggtgagcaccagcgcccgccccacctgggagggaagcagcagacctctcaccgcagaggctggtgtgaggctaattagcacagtcagtctttgaagatgaaagaagacagctgattatctaaaacatttcacatttaggctttgatttctcttcagatttggggaacagcaccctactgtttcatttagggttcagtgtggccagaggaagatgacccacgtggtcctttttagttgtagtgctctcttggggcaaggttttggatggagaaaataggacaagagcagtttgaatgtgggtactttccagagatcatgctcctgtagcatttgggtgaaacgaggtaccccaggccacgctggttcggtctcctcgtggcgttaaggaaagacctggagcagccagctcctaacactcatttcccatcactcagcattttatgtggggcgggcacagtgccgtgagtcttacagaaacctgcatggtgagccgcacgcctttgagtccccatcagccctggcccatccctgctgaggtggcgcgacctgctcacagacgtgtgctcacaggcagcccgtcgcggggtcatgtgctagacggggagggggcttggcgggtcaccagcctcaccccgctcagttcttagatgaggaagagacaggcagagagctgggctgggctgctgctgagtgggctagagctgggtctcagtggcccctgccccagtcgtcctgacctgtggcccctgtgcaggttggggtgcccctgccctctcccctgccccgccctcacctggctcacagacccgtgatgcctcactgcccacgcagtcaccttagaggcaccttccctctaaggcagatgtccctcaggctttggtcctggctgttgatatctcagctctgattcacccttgacctttattacctgatttctgtccttggttctcgagccctccttctgtggacccgttgggtacacgtgtgacacttcagaacccgcaagtcccaggtcacacctgttgtaccatcactttcccctcctggcctgtttacccgggagcccagcaacaaatgggagcttctgtgctgctgtccgtgcatacggcccaggagccgggctcatccccgagacgccgtgttccctcccgctgtccgctcacacctgcctgtgtggacgtggctctgacatgtctccttcctggttcattgctcatctgttctcatgtggctgcgccgccaccctgtcctgggggtccttgtcccagcacgtggctctgtgcttcacgtcatcctgagtctgtcccgctctgccgcctggtccaggtgggagccatttccttctgtgaagtgttccctctggaggccctgggctccccgactaccctcccgcctctcctgtggctgtcggctgcagtaaaggtgctggtggagggtgtgagccatccattcatagagtgccagactctgtcccatgctgcctctgtgcccttgatcctggcagcacacctgctgtcctgtggcctgcgtaaagggtggcctcggaagcctgtggcctgggtaaagcgtggcctcggaagcttgtggcctgggtagtgggtggcctcatcttggcctcggaagcaggagggctcaggctgtggcccacgcctggggttccccatccccccgtgtgtcctggtgtctttgcttggctcgccggcctccatgggctccccaggtggcaggtggctctcagccatgctctccgtcctcatgcttgtttctgccctggcagagctgctcagtggccagcccgtgggacccctgtgcaccctgccgcccccagcatatgtcagcagcgccgtccgggggagatgtggcatcagcacagccttgtccttgtctctgcccgttcttccttccttgcctctatgtgtctgcttttttctcttccacatggtgtccacagtggataaccacatccactggcctcctggttggtggatcctcctcctgctgggctcagagctgtgccacccccacctgcactgcagagaagctcagacccctctctgacctcagacgctggagcctgagccccctgcttcccaggccaatgccccttcaggtccctgcaaagccactgctctttgtggtctccctgccgccgttgccctccctttgccgctgagcccgtgggctgcttggtggcttgggagctgcatacaattctattttgtctggtttgttttcaggctttctgtggcaggaattgtgtctcttgcatctttttttttttttttttttagacggagtctcgctctgttgccctggctggagtgcagtggcgcgatctcggctcactgcaagctccgcctcccgggttcacgccattctcctggctcagcctcctgagtagctgggactacaggcaccctccaccacgcctggctaatttttttgtattttagtagagatggggtttcaccgtgttagccaggatggtctcgatctcctgacctcgtgatctgcctgcctcggcctcccaaagtgctgggattacaggcgtgaaccactgtgcccggccatggatcattaacctcttttctagcatcttacctctgtggtggttcacttttgcgagcttttgctgggccttggaaggtgcgtgggctcgctgctcctctcttctgtgggaactgttgcctttgggcagggggcacaccccagaggtggtcacacacacctgaacgggagcacagtcataagtccctgtcatgcaaagatgggctgtgcagaatgagctcggaatagcagccagaaggctcagtgatgggggagttgtttaagctggaatactgtaatgctgctggctgtttatggctgtgaggtcactacgtgggctgctgagaacattttaaaatgctgagtgagtcatgaaacagtcatgcgtcccctaacaatgagggtagtcctgagaactgcgtcgttgggcagtgtcgtcgtgtgaacaccgtagcgtgcacttaaacatagatggtgtggcctgctgctcccaggccaggtggtgcggcctgctgcactcccaggccaggtggtgtggcccgctgctcccaggctgcaaacctgtacagcacctgactgtgctgaatactgcagggaactgtaacacagtggtgtttgcacatctaagcatagaaaaggtacagtaaaaatatatcatcagctgggcacggtggatcacgcctgtaatcccagcactttgggaggccgaggcgggtggatcacgaggtcaagagatcgagaccatcctggctaaaatggtgaaaccccatctctactaaaaatacaaaaattagccgggcgtggtggcgggcgcctgtagtcccagcgactcgggaagccgaggcaggagaatcgctcgaacccaggaggcagaggttgcagtgagccgagattgtgtcactgcattccagcctgggtgacagagcgagactccgtctccaaaaaaaaaaaaaaaattatatgtatatacacacgtgtatacatgtgtgcacacacacacacacatatatgtgtatatatatgtatatataaaatccttttatgggctcactatcaatatgtggttcctcattgaccagaatgttctatgatgtaggactctagtgcgatacactgtcatgaacagattgataaattaggtgaaggatgatgcctgtgaatgacagacgtaggaagccacaatcattttgtgttttccacactctctttgagagctgtgttgccttggtttatggatgaggacatggacccaggtcaggggctgccaggtcggtgctggggtgtggagctgggccttgcatggcccccacctgtgaaggtaattagtgtttaccttacagtccaaagtttggtgaaaaataacacttcgttctggaaagataaaagctagatgtgattatttcgatcattgaagcatttttgtgtgaaattacctttttttttggtgtcagtggcatgatctcagctcactgcaacctccacctcccgggctgaagtcatcctcccccctcagcctcctgagtagctgggattacaggtggacgccaccacacctggctaatttttgtacttttagtagagatgaggtcttgccatgttgtccgggctggtctgggactcttaggctcaagtaaccctcctgccttggcctcccaaagcgctcggattctaggtgtgagccactacacccagcctgaaattagttttcattttgatatttgttttcttaaaattctttataatttgtcagaaatttattttgtcagaaacagtatattttttcactctggggctctgattctaatcagtcatttaccaatccagcaatgaaagttttcacttccgtcaatggcttttttcctctgaatgtgtggtggtcctgaggggagtgcattttgctcgctcctgggggaggcagtggtctggcctgtccccaccagtgccccctaggccccgccttgaggacaagctctcttctgtttctgagcgctctcccgtcctgtctagggcaactgctgctctttctaggggtggtagtggggctcttgaagatgtccctcgctttggtttttgcaggccagcaaatgcactggacgttgtggtttttctggcctccagtagtggtgtggtgggaaggttcttttcctgccctgctgctgaggggagcctcgagcgtaccagagttcctcagtgaagcctttgcacgtcctgcagggtgcagcccagcatgggtttcactgccctccaggaaaggcctggccctggtgggctcgctgcagcacaggcacggacctggggctgtgctctcaaggcattccagcctggaaagggttgttttggtgttaaagatcctcttccgtgcctgtcctgtggcccctctgtgtggcatgcccaagagtggctttgaacatggctgccctccgtgtgctgagcctgcgggggcacggctaccctccgtgtgctgagcctgcgggggcacggatgcgattggttgcttcccaagataccatttcttggtgtcggagcaggactcgggatggcagaaaggggaacagactcgctctcctcatctgcagagtcggcatggttatgtggggccacagggtgacccgctggcctggagctagcgtggtctcagccatctgcctcagtgccggccggcactcacagcttctcagaagcctgtgttaccagccagagccaagcctgaactggtgtggtgtgggggcccttctcccagggcctcgggtggagttgcttttcttggcctagatttggcagtgcctgaagggagcctcaaaccagcatctcctgcttggcagcgggtgagcttgctcccgagtagctcgacagcctgtgatttactgggcttggagaacatgccccaggggggggaagctggctcgcacgttgcagagaagccagcttgggtgggtagccatcgaaaggtggggcgggttaggatgattgctgagaaactccttttgtttgcagcttgtgctgtgctggtttctagaacaacaaaaacagacctgcagtcattcctcatttaccatgcagggctgttttcctctaatccctggtgtcatcacctctgtctagtgtatgcttttcagcaggtggttttaatttggttcccattatgcttccatgaaagtgggctgtgccccccattttatggcctagcttatgagcactcaagaccattgatgactagagtgcgctctctctggccgcgtcctcctgctgacaggtaccccatcccaccgccacgctgagcactggccactgcacactgcacactttctcaggtgaagatggccttacttttcagtgaaataaatggaaacaaagccctgtcttcattgactcgttccttccctgtcgtctcttttgccctcctgcacccatgcctgggaaagtggataacttttggggcttttctctgtgtgtgctgaatgcccaggaggctgcctgtgtaattcagctggaaactgtccccagggtagagagaagtgtgaggagaaaaagacccttcgcccggtaaatgtgtggggttctggtttctcccttactgcagatggtggcgggccctggccttggtgctgtctcctgtgtgtagctggggacggtggaagctgggctgggcctttccaggtgtggggcatccaggccagttacaagagatgatgcttgctttcccgagaactcatcaccacttgtatcttagtctgctgtagagaatgttgtactacacttcataggaattgagtaactaaacaacgttcatgtgtgagggcactctaggaatttcacagtgtcttggattctttttatttagtgagagaaaccagacgacgtgttagcccgttgccaagtaagactgggggacacgtcagcctgttgccgagagagaccaggggacatgttagcccgttgctgagagagaccgggggacacgatagcctgttgctgagagagaccggggaacacggtagcctgttgctgagagaggtcatttcccggatctttgtcctgcgtccgcccacagctgcacagctgctcttctggtttaggttctggcctttcccactggggttttccagcagcctctgtagcggtcttcgttgttgagcacttcactgttcatccccaggttctccatccagctgctgttggaatctggtcatgtggccatggctgcaggtgatacggtggtgctctttgcctgtaggatgagatttcagccgctcgcaggttcatttgttgtggaacaacgtactccacagctggtggcatcagtgacagccgcactcttgcgtggatcgattctgtggcctcgcagggtggggtgcagggggccgtttgttactgccctttgatgcctgggcctctgccgagaagaccacgtggcaggtgccttgaagggctgggtgcggcaggggcccttgactgaagctggctcttcctgcatggcagccggcttcccggagggagtgtctcaaggggaggtgtctggagaggccctgaaagaggccgccaggcttctgacctgggattgggggtcactggcatcactcctgcctgcctctgttggttgtggcagttggaagcctaccaaggtggtgggtgagggacccttgattgtccgtctggcaaactctgttccccactgagctggccagccggctgcagtgacagcttctctgtgaagtgtcttgtcttcttatcccccaggcgcggtccggcttctcgttgcacactggtgggcttcaggccgtcagcccacctcccagggaatttgagtgtgtgcttggccctgcgactgcccccgaaccccgcgtcccgttgcggggagctcgcctgtgccccacggtttctgctcagcaagtgttggctctgtaaaccgatgacttagggttaaaacacatattaaattagatacatctggactggtgtgaaataatttaactttcgattttatatttcacacaaactaaagatggggaagagttcttaaagttaaatgagaacttgttttgggcaaacaaggatcatctccattcacttggtagggaacgtgttactatccatttcgctaaagagaaaggggctaagtctctgatcaccttggtgaatgtgttattctgagtggctcagggaggtgggtgctgccactgccccattttacagacagaggaacaggagcgcagagaccctgctctgctccacaggcgtgactggtggtctgtctggctgtctccttcccgttttgatcgtaggtgtgggatctgcaccacaggtgtgactggtggtctgtgtgccttcgctgcttctccactcagcgcttaggagagccccccagcgggctccatggagagagtctaagttccctctccttttaagaagatgtttctattctacacttaagtaagagatcaggcagtttacagggttcataatgcaaataaaagacaccagtatttagtgaaagcctcttcaccttgtctgagcatctcctgatgggcggcacctgcttcttcatttttccgtgtggtgggcgacagcaggacaggggtggcgtggtgtgcggtgcagatagtctgagacagatgcagttctcaccttgactgtgaaattctgttttctgaaggaaaggaaattcattcgcgttttcttagaagggctcagttctaggattcttcgattatgaggcttggatatttatgtgaatcatcgcatttgtcctccagactttaaagcagaaggtaaaacctcaggttgagaattcaggagggctagaaccagtgtttgagagaaaatctgatattcctgtttggtctgatggactccaggtgatgacgtccgtgtgtgcgcatcgtggggaccgggctgccaggtgtgtgtgtgagacacgggctgagctggtcacccttcgcatttgttggtgaagcatgaatgcagatggaggcctttgtgtgaggtggtttggcctgtaacttttatcctttgtaactttatttatacgcagataatttttaaaaacctactgagatatcttctttttccaggctagtagtgccctgaacttaaacctgggcacgttttgtgatgccattgatgagggaggggtggagaggctgcagtctccatgaggggactggacttatcattgcatccctattttcagatgaatttttgggagatgatttcactagtctcttataattactttatcatgtacagaaactgttttctttattattaggtggtgagtgtttagaataaaaattctgaaagatgtgatgaattgttttcacaatttgtgtgtatgttttaaacttctatttgtatttgtaacattaaaaatcttttttttttttttttaggcacaaatatttaaacatggaaaacgtgaagactgtttgccctatggtaaggtttatttttaagagacgatatctttgtgatgtgagtttgctcatatacaatcaagtgtctttccttaacattttattcatagatataggaactgtacattggtatgtttggacactatcgttcttttttttgttgtgggttttagtaactgaactttttttttttttttttttttgagactgagtctccctctgttgcccaggctggattgcagtggcacaatcttggctcactgcagcctccgcgtcctgggttcaagcaattcttctgcctcagcctcccgagtagctgggactacaggtgcctgccaccatgcccagctaatttttgtattttttttttttgagatggattttctctctgtcgcccaggctggagtgcagtggcactatctcagctcactgcaaactccgcctcctggattcacgccattctcctgcatcaacctcccgagtagctgggactacaggtgcctgccacaatgcccagctaattttttgtatttttagtagagatggggtttcaccgtgttagccaggatggtctcgatctcctgaccttgagatccacctgcctcggcttcccaaagtgctgggattacaggtgtgagccaccgtgcccggcctaatttttgtatttttaatagagatggggtttcaccatgttggccaggctagtcttgaactgctgacctagtgatctgcctgcctcggcctcccaaagtgctgggattacaggcgtaataactggactttttgtcactttcctagtcctttgataaagagggattgctgccaggggtctcgtgagggaggtctgggcaaagcccgtgtcatgatctgaggttggacctggcttcttggggcccaggagcagccatgttcctctgatagccacagccaccacctcttttgccttcttcctaattctcttaatttattctttttgagactgcatcttactgtgtcgcccaggctggaatacatgacacagctcactgcagcttcgacctcctgggctcaagccatcctcccacctcagccccctgagtggctgggactacaggcgagctctaccacgcccggctaatttttttagcagtggggtcttgctgtgctgtccaggctggtcttgaactcctgggctcaagtgatctgccctgccttggcctcccaaagtgctgggcttaaaggtatgagccaccacgcctggctcaattctcttaattttagattgagcctcaatttctgaaaataagggcagtgtttttctccacgcagaggtttaccatctggaaaaagagaaacttcttagagcctttgtgtgttttagaagctatccggactgggcgttgtggctcacgcctgtaatcccagcgctttgggaggctgaggcgggtggatcacgaggtcaggagatcgagaccagcctggccaacatagtgaaaccccatctctactaaaaatacaaaaattagctgggcatggtggcacatgcctgtaatcccagctactcgggaggcggaggcaggagaatcccttgagccagggagttggaggttgcagtgagctgagatcgcgccacagcactctagcctggcgacagagcaagactctgtctcaaaaaaaaaaaaaaaaaaaaaagaaactatccgaatatcaaatttgaataactttctttttttgaaagtttttcattatggaaaatttgaaacatgtataaagaagagagaatggcgtgcacgccccgtgtctctctcaggagtgtgcgagttttcgtgtgcagcctgtttcatccctgcaccgcacaggagggacacacagtgccatctcacctgtgtgcacttccatacatgtctctggaaggtggggctctttatgtcctcaccacacccgagaacgcgagcagccgttgccaggccctgtcggcgggaggagcgtccttggtgacgtgaacacagacctccctcttgggctgtcgtgcttgtcacccacgctcattgtgcccactgtcagagccttctgagaagttactcagatgctctttcagctgacctggttttataggcaagcattatgagttaaacggcacctctgcccgaggtcacggcacccacataaaactggtgaacgttcactttctgtcatttcccagcctcaaggcagagcttcctgcagggcactgcagctccagcccccatccccctgctctgtccccgccccactgccccttcctccatctccttgtcttccatcacctcacctaactctcagctctgtcttcagcttctcttcttttctcctgtcccctgtcagttggttgcagtcttgtccatttcacttccagcccatctctgaagccgccatgcacttccaccccagcccttgtctgtcccgggaatgctgtcctcctggcctcagcttgccctcgtcgcagcacccgggcgtctcctgctcgcaggctctccctgtcgtgctgtgcccagtgctaccttgagcctccccttggctcagcctcctgtcctgctattgtcatcactgcatgacaccgagtgattccccctgaaaaacagagcaagccacaggaaccccgtggcctgtgtgttctccccagccgcagtgtgctccatggcttctggggttgctgcagtgtgccctgtggcctgtgtgttctccccggccacagcatgcccgtggcctgcgtggtctctgtggccgcaggatgcccgtggcctgtggggtctccgtggctgcagtgtgcctgtggtcggttgggcctttgtgtgtgctgccccccttcagattggctccctgccctctgagtacttgctctcctgacctccactgatgttgcttcacagcaaggaagtcgagtaggttcaactccagcagctcttggttcatgatttgggatgatgggggtcttggtgatgtctcctgcctcaaggcccctgtggagccggctgttggtttcggggacacaggtggtgcagtcagaagatgcctgcagcccttcctgcgctgagtccagttcttgtttgcagctgccactgtcctcaggtgcctcgatggctgcagactccctgagagcaaccagaccctgctgcggaagctgggggtgaagcttgtgcagcgactggggctgacattcctgaagccgaaggtggcagcatggaggtaggcaccatgagggcggtgcctggggagggccacggggtggggaggggttgctgtggggggcaggcgccattgatgagggcggggcaggtgctgttggggcaggtgctgtggggaggcagtcgccctgttgcggggtgggggaggcaggcgccatggggtggggaggcaggcgccttggttctggacacagttgggggcactctctggagggcaggccgagccgtaggtgagcgtctggtgtggctggtgctgtggcttttgtgtccagtggtgatggcagagaagatgtgttagtaacaagtgttttctgctttcattcatttctttaatcctagaagtgtttctgattttgagaggaatggttttcttttggttattttctgactgcatctcccagttggaagaactgcagctggcgttggcaggaaggtggcgtgtgcgtcgtgtggcttggagtcagcgtggcaggatggcggcgtgtgtgtcgtgtggctcggagtcagcgtggcaggatggcggcatgtgtgtcgtcgtgtggctcagggtcagcgtggcaggaggctggcgtgtgcgtcgtgtggctcggtcagcgtggcaggagggtggcgtgtgcgtcgtgtggctcagagtcagcgtggcaggagggcggcgtgtgcgttgtgtggctcggagtcagcgtggcaggagggtggcgtgtgcgtgatcgtgtggctcagggtcagcgtggcaggagggcggcgtgtgcatcgtcgtgtggctcggagtcagcgtggcaggagggcggcgtgtgcgtcgtgtggttcggagtcagcgtggcaggagggcgtcgtgtgcgtcgtgtggttcggagtcagcgtggcaggagggcggcgtgtgtgtcgttgtgtggctcggagtcagcgtggcagcagggtggcgtgtgtgtcgtgtggctcggggtcagctcagcctccctggcgtggcagcgtgtgtgcgtcgtgttgctcagaggcggtgtggcctccctggtgtggatgcgctgtgggggaaagctgcatcggatcagtgatgagtctgaatgacaggctccctttctttttttttttttttttcccaaggcagaagaatttttcttagtacagaacaaaatgaaaagtctcccatgtatacttctatccacacagacccggcaaccatccgatttctcaattttttccccacccttcccgcctttctattccacaaaaccgccattgtcatcatggcccatccccaatgagccgctgggcacacctcccagacggggtcgtggccgggcagaggggctcctcacttcccagtaggggcggcggggcagaagcgcccctcacctcccggatggggcggctggccgggcggggggctgatccccccaccaccctcccggacggggcggctggccgggcagaggggctcctcacttcccagtaggggcggctgggcagaggcgccgctcacctcccggacggggcggctggctgggcggggggctgacccccccacctccctcccggacagggcggctggccgaccccccccgcctccctcccggacggggcggctggccgggcagaggggctcctcacttcccagtaggggcggccgggcagaggcgcccctcacctcctggaatgggcggctggccgggcggggggctgacccccccacctccctcccggacggggcggctggccgggcagaggggtcctcacttcccagtaggggcggccgggcagaggcgcccctcacctcccggacggggcggctggccaggcggggggctgatccccccacctccctcccggacggggcggctggccgggcggggggctgaccccccacctccctcccggactgggcggctggccgggcgggggctgagacaggctccctttcaaagactgttggagaaagtgaaaccgcctttcttgctggcagaaatgatgtcttagcagtctgtagcggccggtgtgaacgggttggttctcaaggagacagacttttctagtgttcttagggtgctgtgtgttagcgaccttcagtttgtttcaagtgctataatacgtgtggtttgggaaggaattacttggttaaggtcagctcacactccgtcctggatgatggcacattccagagacgcgtgttgtgttgcagtgttgggtgtgcagctcactctgtaggaagttgctcattaggcacagtgttcgtggctagtttctcaaagctgctgtggggaatgttcagtgctgtaccaggcagggttctccagagaagcagagcccataggatgtgtgtgtgtcggcgaggctgtgagctggagaccaggagagctcatggtggttcttggccaaaggcctcagggtggagacccaggaagagctgattggttttagtctgaagacagaacaagtccagttgagagattgccaggcaggagggcttcccccctcctcagggagggccggcgttttgttctgctggggccttccgctggctgaacgaggccccctgcatttggcagggtcctctgcctgactttgtctacagattcacatgctttgctggtccagagcccctgacacaagcactggaagcaggtgtgatgaaatagcggggcgccccacggcgcagtcaggttgccatgtaaagttaagcatcacaagcactgaaatgttggtacagaaaataatccagtatcctagttctctcgataatgatgtgcgtgttgccacatacacttcacgtaattctaacgtggttgggttttagtccccgtcttgtgtttttctcttccgtctttctctacgtttcctgtatttctaacttttttccatttttatctcctcggttggattttcgttgtctctgttagtaccgttctcttcttggttgtcttctgttgatgaggacggacttacgctctgacgggctgttagatttctggttcatcccactcctcctgccagccttggctcgaggctttgttagggtgggtctttctcagctcttttcctccagggattggtctttcctccacagcatggtccttgctttaagtatgtagcctttcagggacttaggtgaaagtcacggctttctctcccgtcctgctgggcccgggtctccggggccctctgagggttgcacagtctccaagttctctgcggcacttggcctcccagccattctctgacaggtgcgtctgagtctcgccttgtgcttccttatcttggagtgcccagggatccaagggaatttttgggcagagttttgggcctctgtctcagcagctctcttctccccaacatcctctcccccacatatgagccctccactcattgagattgctgcttcctgggctgtttccttggtacggtgtagaaagtacccctgcggggaggaggtggaggtggcccacctgcagcttcccctcgctggggattgttgccctgccttggttgccatcacctgctggccaacagtggctttaagtcttccgtccgagtctcaccattgttgaggtcgggagggcatgtgtagaagcagcctgaggtcattgtctttgtggtgccgtctggtctttgtgaggtggctgagctgcgcgcttgcgtgaggagaatggcggctggggtgcaccggtctgtggggcgttaggggagactgggggctggggtgtgccagccatgggccattaggggagactgggggctgaggtgcacctgcccgtgggacgttaggggagactgggggctggggtgtgcctgcctgtggggcgttaggggagagtgggggccggggtgcacctgcctgtggggcgttagcggggagtgggggccgggctgcacctgcctgtagagtttaggggagagtgggggctggggtgcacctgcctgtagagtttaggggagagtgggggctggggtgtgcctgcctgtggggtgttggggaagagtgggggctggggtgtgcctgctcgtggggcattaggcatcttgctgggtgtctgatggtctccgccacggtcctaagatggctgatgatactctcttcataccagttaccctacattacagtgtaccccgaaatttagcagcttaaacagtgcactttttcctcacagttttggtgggtctggaatcttgacgtggctcagctgggtccccggtcagggtctctcctgaggcttcttaaacagtgcactttttcctcacagttttggtgggtctggaatcttgacgtggctcagctgggtccctggttagggtctctcctgaggcttcttgaaggcgccggcctggccactgccgtctcaaggcctgcattgctggggggtgtgcttccatgctcctcatgggttgctgtcgggacccggtgccttgtgggctgttggtggggacctgtttgaagtccttaccatgtgggcccctccgcagggcagtgcacagcatggtagctggcttcattggaggctgagaggcgggtggaaaccacggctgtttggaaggtggcagctctcaccagactctgcgtattctgttccttgggagggaatcattgggcccaggccacaccccgtgtgagaggaacgctaggcggtgggggtcgtgggctgtcttggaaactgcccccctccttgtttcctagacttggaaactgagtcccagagggctagagctaggatgagtcattcgaagcaggttgatggcatcagcaccagtgtgtgagttctggttctgccgccaaagcccaagctgtttgtcctctgggaggctgtctcaggctacagccgcagcagctgccctgaactctcactggacaccttttctgcatgaggccggggaagcagggcccacagccaggcggcccgccctgcactcacccttggcaggagcagctgtgtacgcgggggccttgctcagcgcagggctgggctgcacgccgagcgcagactctgacggctcctcacacagctctctgcgtaggactgcgttcccattttatagagggggaagtgggggcatggagcggctcaggagctgttcagaatcacacagcaagtaggcgtagagcaggcctgaccaggagccaggtcccagggtctgtgccatgggccccttcatggcgtgtccaggggatgacaatgcaggttccccatgtgggtgtgaagagggctacacgttgctgccttttgaggggcattcgggaggcaggatctgtaggaactggtgaccggtgagacgcagcacctggtgatgaaggggcggtgtgtggcctgggcggtggcagtggtggccgttcaggaaggggctgccaggaggcagagggtcccgaaggccgggtgcttccccagggaaggcgctggtcctgtcgtctgtgtacccatcatctgccttctctcctgactttccctaatcaaagctggacactagctgaggatgttctggactcggggcgtgttttgtggcccacaccaggatcttcctggcagtttgtgctgatggcactgcctccaggttctcccttcttatccggtctctgcaaagtgcatggaattttcacaggcacgctttaagattcaaagtgacactgaatgactggttccagtcatcaggatgctgtgagctacaaagctgatctgaggatgctttgctttgcacaggtaccagcgtggctgccgatctttggctgcaaatctgcagctcctcactcagggtcagagtgagcagaagccactcatcctgaccgaagatgacgacgaagatgacgacgtcccagagggggtggagcgtgtgataggtgcgtggggtctaagcggcggcctctgctcttgggcaccgtcgggccaattcccctctactccaggaccacacttccttcttccttgctggtgctggcactgtctggccacccgtccccttcgctgagtgcacggtcactgcccgtcctctggctcctgaacccaggcctgtccctgaccatggacagtctcttcctgtgtgccgtagaagccctttttcccaccgcctcgcctccttcctgacctgggctgcctgttctgggcagctgggtgtgtcctcaggaaacagttctcccaggaaattgagttggggtccctggggctcaggtctctggctccttggcccctaaaccctgctcagttccttacctcaggagccatttcaaactcccttaaaccacattacaccttgcaggggtctccatccactgccctgttctcctcctgtggggtctcctgctgcacagagacagagccatcagcggagcccctcatggcggccatcctgggctcctgtccacacactgtcctgccctcctgccgtggttggatgaggtcttccctggacccaggcagggcctcttcatgtcccctccctgtgaggcccccatcctcccagtatctcccagcttcctgatgggcaggcggggccacgctgcctgtgctgtgctgcactctgctcacatccccgccgctccctccagggcaggtttctccccagtcatccgcaccccacctcgaccgtgaccatcagggcgcctgtggcaccgttgccagccccgagccagcatccactccggcccttcccttgacctttgcttctcagagccctccctggttgcgtggtaggcgcccgcatctgtgctgggcggctctgagtcccgggcggggccctgggtctgccccttccccgtgtccgcagcctgccccaggttcattcccgtctcccacccgctgcaggcagtcccccctgcccgcattccagctgctgtgctggctccagactgtctctccaccctcccctgtggtcactcagcgagcttgtccatcagggtcttcccagggctgcttggtgcccacaggcgaaggcttcacccttgctggggcttgcagggccctcaccgtgtgacctgacccctccctgcatcctctaggcttctgtgtggttcttaaaagttcagcctgccgccaaggcctggtccctgggagagacgtcttcgtgcagccgctggctgggggttttctctggaagcttcccagcccactttggtcacccgtgagctgcgggctcttcccctggcctgggtggggcccttgatgttggccttcccctgggggcaggcagctgctccctgtagccggctttaatggggtagatctctttcttaggaacagagaacttgggaacatggctgtatgtgatgatttgagaaaggagggaaggaaatgttcttttcctgtcattaaaattaatattgttaatgtaattcccttcggcgtgtgcactgagtagcgtacaggatgggtcaccttacagctgggaaactaggaactttgtgtggactctgtcacgcatcaccttcctcttcctacagagcagctgctggtcgggctgaaggacaaggacacggtcgtgcggtggtctgcagccaaggggtaggtgtctgtggccgcagaagcaccccggggggtgggccggcctctcctgtgcgattcagcagctacaaatacccaacagctttggagtggcagcgcggccccctcctcggccccctccaacttatgtgtgttgctttacgtgttggcgtgaagatggttcccgaggcggagcttcggtctcctccgtcctcctgcctctggctggccctgccgggtcacgagcaggccgggtttacctgtctatcttcaaaatgttcccttgcttttccacatcctcatcactgtgccccccacctatcgttccccacagatgggggtcacggctcctacaatgacggtgctcagggaagagccctcttttgtggggtgagcaggtgccagtccctcattcacccctcactagcacctgtcatacctgtgggagtcgacatgcaccctgcaccccaggcctcagtggaggtcgtggggcagatccagtggggcctggccttgaacacaacaggtggagccctggcctggaggagccggtggccctgtgggctcgggctgtgcagggacagcgatacacgtgaagaagatgctgaagtgtcggggaggcccctgctgtggaggagaggaggcaggtgcaggggccagcaggtgctgaggtgtcagggaggtaccttctgtggaggggatgaggcaggtgcaggggccagcagatgctggggttgggggaggcccctgctgtggagaggatgaggcaggtgcgggggcagtaggtgttgaggtggggggaggcccctgctgtggaggggacgaggcaggtggaggggctgacaggtgctggggggcggggaggcccctgctgtggaggggatgaggcaggtggaggggtggcaggtcctggggggcgggttggcccctgctgtggaggggatgaggcaggtccaagggctggcaggtgctggggggcagagagaaccctgctgtggaggggacaaggcaggtggaggggctggcaggtgctggggggcagagaggcccctgctgtggaggggatgaggcaggtgcaggggccggcaggtgctgaggtgtcagggaggtccctgctgtggaggggacgaggcaggtggaggggctggcaggtgctgaggtgtcagggaggtccctgctgtggaagggatgaagcaggtggaggggctggcaggtgctgaggtatcagggtggtccctgctatggaggggacaaggcaggtggaggggataaggcaggtgcaggggctggcaggtgctgggggatgaggcaggtagaggggccagcaggtgctgggggacggggaggctggtttttgccattgctctcccatgcgtctgtgctgggtccgtccataccatgatctctgggaggagctccacagggctgtgcaggggctcacataggcctttgtgttgctgtacgcaggggatggcttttcagcccagagcctcgtctggttgggtgtgatgggcccacgcagtgagaggctgggcaggccttcccagtgtccttcctggaggcccctggccaggaccttccccacggggccatctccagggacttggaccctgtgagccagcctcaggcggcctccatgtggggccgtgagcccgtcacctggcctgatgggtgcctgcacagtcagcgtttggggtggcacagaggaagcccggctctagtagggagggtcagggtgaagccctcagcgttcgcctgctgcctcggtaccctcagccgtcactggtggcctgcagcgtccgcgttacagtggtacatggtgacctgccctgtgccgcgtgtgttcactcgtcccctttgaatctggctgcaggctcctttaccctgcagcgtgttttagcgcgggggctccaagcagggtgcgggcttgcctggagttggcctcttctctcctggtctctggaggaaaggatgggtgttcaggccattcacacgtgtcacgcatgcccttggcgacaggctggtggtgcccctgacggattgctgcgtttctctttcagcatcggtaggatggctggcaggcttcccagagccctggcggatgatgtggtcgggtctgtgctggactgcttcaggtatgtgagaagagcaggggaggcgtgtgggcctgaccctgagttgagaagccctggctttccttatatcctttcacgcttgcttttcattgagctgtttgtcagaactccagaagctcttttttcccccttttgaagttaaacttgagaactcttgttatttctggtatgttgcttttatcaattccattctatttaaaaaccttaaggaaaaagagagtcagtttagacatatacccatgtagatgtttattctgaaaggaaaagctctactgagtgagttggggctgctccgagagctttctgtgggaggttcgggtctacccctcgcctacccattagccacgtgtatcactcagaccttgaagtgaggctggtgtgaccaaggcctgagtttgaattggatttcattttaacgaaatgtgaggctttgggaggccaaagtgggaggacggcttgagcctgtgaattcgagaccagcctgggcaacgaagcgaaaccccatctctacagagagttaaaaaattagccagacgtggtcccagctactcgggaggctgaggtgggaggatcacttgaggccaggagtttgaggcttcatgagccatgatggtgccactgctgcactccagactgggcaacagagtgagacccggtctcagaacaaaactgagtgtagacagccacgtgtgctgtgccgcatttctcttgtcagccttcagggagttctgggtcttgggaccgtgtggcttgtgggtggtagagttgtgggctgggatgtgcgggtggcagggcctgggatttcagcctggggcctgcagacctgccctggtgtgctcacacgtgtgaggcatcgatctgtgacctccccagggaattctcccttttgcttgtgtaaatgtctctcccagtttcagaagcggagggtcgagagcaggcgtccagcttgctcaggaccccgggcgtgctgttgctcttcattagcctggacaccgtggcgaaagctgtgctgtcagcactttggaggctccagttcgcgttgcctgtcagtcaccagggacagctccggagccgttcacaaagccttgttttccttctggagcagatttcttgtgcacttagcctccagcctgctcagtgacaatttcaggagcacaggaaacaatgtgtcagatacgggtcatgtttttcagagcagtgtgcatgcatgtgtgagaaatattcttccagtggaaacattgctagcagaaaacatgctctttaccacaactgcttgatgggaggcaggggttggagggtgctacgtgcttggcttctctgtaggcgacctccagccttgtttcaggcgtgtccctggagctcctttctggtggtcatggtgggcatatgtcctcctgtcgcctggtgccacctgcggccttcacaacagtgtggtgggctccaggccgggcctgcctgtgcctgtctggactttgcctctctcctccagccgctgggcggcctgctcatcaggcctagtgcgtctcctaaactcactgtgtgtctttccctccacaacgtgcagcctctctggactgtgtgttccttactctagctcaccttcttggtctagtttcatttttcctggctggtttaatcttcaggtgctttttaacctttatttttgttattttaatgtgctcattccatttttgtagctaggttctgggacggggtggcctttttactcttgatttcgcagggccttcatcccaaagtagctgcagggccatcatcccgagtcctcgcaggatgcagctctggtcagtgcctgccttcccttttcctgggtgctcagtgtgtgattgtcaaccgtggcataaaaaggcggctctggacagcgcctgctttccctttcgctgggtgctcagcatgtgattgtcaaccatggcataaaaaggtgcagcctcagagcaggatgtctgaagacaccaggaagccaggagttgctggggtgtggggcggcccacagccctgcatggtggctgctccaatcttgtccttccctgggacgtgtggtaagctgccagcctcttctgaaacgggtccgagaaagggcattaattatattaactgtaagaacacccagcacccaggagggttaacttactcccctctcctttcctgggctgggttatgcagtgagtggaactgcacccatccccagggggttcaggatctgtgtggctgatgtggctgtcccccaagcgtgcacgactccctcaggacctggggccccctcctgactcccatcaccagccctgcagcattaccctggacctaggaagtagcgccagaccccaggctgtggcagaagcagggtgccttggagaggagtgtgtctgtgtctgtgccaaccccattggtttctcctgtgagcaaaccaactgaacctgtgcccgggcccagctgtgggtcctgctgacttgcccgagggcatcttctgagacactcggtgtggagcgtctggaagccacggcactacgctgtgcctccccctcgcccgccgccccgtgtcagcaggagcctcaccacgtgggttcctttctgttgagctttacggtttcatcgaggttttggactgggtgatgtgttcattcaaaagtcaaaccaaagggaagaagacagcctccccagaccccagagcccccccgcaggtgacctggggcacccgtttcgcatccctccggggactgatgcaggtgtgagcagatggatacagaggttttcttgttttgtttttgagatggagtctcgctctgtcgccaggctggagtgcagtggcgcggtcttggctcactgcgatctccgcctcctgggttcaagccattcccctgccgcagcccccaagtagctgggactacaggcgtgcaccaccacgcttggctaattttttgtatttagtagagacggggtttcaccatgttggccagtcgggtctctgtctcctgaccttgtgatcagcccgcctcggcctcccggagtgctgggatgacaggctgagccaccgcgcccggctgttttgtttttagagatggggtcttgctctgttgctcaggcaccatgatagctcactgcggcctctacttcctaagttcaagtgatcctcctgcctcagcctccgagtagctaggactataggtgtgcagcaccacacctggctaattattttatttcatttttgtagagatggggacttgctatgttgcccaggctagtcttgaactcctggcctcaagcagtcctcttgcctcggtttcccaaagtgctgggactatagacctgagccctgtacctggctaaaattgtctctttcattttacacagataatggcttacttgtcacactttaacaccaaacgcatctttgaggtcattttacattagtgctgttccccttgctcttgatgatctgagacccgtgtacctgcgacactctttacccgcctcctctctctctctctctcttcctctcccgctcatccgcccactcatagcttccactattttctgttgtcttccctcctctgagaccccccctgtgcttccaggagtgccttaagcttggatctgagggcaggaactcgccccggctgcttggcttctccctgtgcccctggtgtccatggacagggtcccctgtccggttccactgtgccgtggtggtgctgggcctctgaggcgagccggatggacggacggcatcccctggaccctgccacccttgccaccgtgccacagtgaacacgtgtctgatttagaagtagacattggtctgacaggcatttgttttggtatttttaagtcacggtaaccttggtgttttgtcaagttcattcagatgttaactaaatctttgtgaaaggtgtgaagcatctttctccaatgaaaaccctaaaggacgcaagtgctgatgtgaaaatacgcaaggggctcacggagcctctgggcagacagtacacgtctggaacttgtttaattgtgattgagtctgtcggtgacagtgagctctgaggagcccgctggtggacgctggtgtctgtctcagcccctcctctctgggctgggcacgcaggaggtgaggcagccactgggcggacaggcactctccgattttcctaagtattcttgtccatactgattgccagctagtcatacaatttagtgggttttcctaaacatttatttgctgtcaagtcaatttaattagaatcaggagagcttctgaaccaccccggggaaattagtacgtataaaatattatgacttgatcgatggccattgcaattgttcattaaaagttcatatttcaaatactgtgaaaaatcttgaaatgccaattcattattgtagcatttaattctgagtttgactaaacagtggggtgtcatttaaagaaggtcttcctgctcccttttccactgacgtcttcctgtgctgggattcctgttttaagttcctacttttctgaagtgtcttatttctttctatgggagcgtgggtgttgcccgtacttggagcgacaccactgtggtgggaaaaccccacctgggacggcacggacgggacggtctctttgtttggggactgaccaagacttgtcctcactctcgggagatctgaagaggccctggggtaggcacggctgttgtcttcatactcagttgcagtgtgttatttcttcagccaactgattatttgtttttttattttgagacggagtcttgctctgtcacccaggctagagtgcagtggcgcgatctcagctcactgcaacctccgcctccctggttcaagcgattctcctgcctcagcctcttgagtagctgggattataggcgtgagccgctgtgcccagccttgatactttaaaaacttaggaatgggttttagtgagccttacgtgagccttacaggcagaggatatggacctgccaggctgtgctccttgccatgctgtgggctttgaaccaaaagctgacacgtgggctgtggtctcaggatctttgttgctctcagtttccaggagactgacaaggcgtggcatgggggatgtctggcgctggcagagctgggcaggagaggcctgttgctgccgtctcgactcgtggatggtgagtagctgaggcacggtcaggggggatgtctggcgctggcggagctgggcaggagaggcctgttgctgccatctcgactcgtggatggtgagtagctgaagcacggtcagctgcgtcaccaggctgtccgtggcaggctgcagcccttcgtctgaacccatctccgcggtgtggccctgccgcgggcacgcccagaagagcttgagaacaaggtctgtctacctttttctcgcattggcctttgtaatttcctaattgcctcttttgtctgctgtggaattttaatgccacagattaccctgtgtagctggttttggagggccacgaatccttgtaatgtctgattttcttactccccaaaaccggttttcattcttgagggacattgtcgccccttaaggacacatgcagtggcacctgcttcagttgtagaaccaggtacccctggcagcatcctgggtcacctggagtgacgtggtgctccctggagatgaggctcacgccagcgtgaaaccagggtgggaactggggtggagggccaggggagctctgcagtggccagcagtggggtggggacagagggcacagcatggcagatgcaggggcactgccccagaccagctcttgtgccgtggccacacgcagccctgtctgtgtttggtggggagagtccctgggtgtggctggcagtgccctctgagggcaggaaggaaaggatgtctgtacaggatagagtgggggcccatcctgagagggcctcaccacagagacttgattctgtccaaaataaagacacctgagatgtggtggcctcacgtcttcccagtgtggagctgtggtggcgtctgaagtgaccgctttgcacttggcattttgatgtatggggagagcttttagagcctgcagttcttttttttaatgtctctgcttatttttttccagacttctttaatgtttagacctctttattgcgatctaatttacatgccataaaatgcactcatttaagtgtacggttaagtggtttttatatatttacagagttgcgcaactattgccataatttaatttccgaacattttcattgcctccaaaggaaccctgtgtttaagaactcactctttactctccccagcacccccgccctggcagccatgtctccagtgtctctgtgaatttgtcttttatagacatttcctaacagtggaacctacgacatgtgatctttggcgtccgaattcttcggctgagtttctctgtgtcgtagcctgtggagtgcctccttccttcctgtggcagagccttgtcctgctgtgtaaatgcaccacacgccacgttttgtccatccttttcatcagctgatgtacatctgggttgtttccacctttcactgttaggttaatgctgccatgaacatcgtgtacacgtttttgagtggatgttgggtgtaggcctagtagaaatgctgggtcatacggtaactccacgtttaactttctaagaacctgccaaactttttccaaaatgattgcaccatttcaagttcctgcctgtagtgtgtgagggttctgcttctctgatcctcaccaacacttgcttttatctttttttttttggacgcggtttcactttgttgcccaggctggagtgtggtgatgcaatctctgctcactgtaatctctgcctcccaggaccaggcgatcctctcacctcagcctcctgagtagctgggaccaccggtgcccaccaccatgccacattaatttttttttttagttttgttagagacagggcttcaccacattgcccaggctggtcttgaagtcctcagctgaagcagtccacccgccttggcctcccagagtgtggggaatacaggcgtgagccaccacacttgccccctgcttctttaaaaaaaaaaaaaaaaaaaaaagccgtcctagtgagtgtgaagcgccaccttgttttgcttttcatctgcttttccccagtgactgatgacactgagcattttctgtgtttgcccgtttgtatgtcttctttggagaaatgtcttttcaagttctttactcatttaaaaaaatatttttttaattgttgttgtaagtaagagtttttttatgtattctggatataagtctcttattggatatatgatttgcaaatgttttattgcgttccatggttgccttttcactttctattgattgattgacagagtcttgctccgttgcccaggctagagtgcagtggccccatcacagctcgttgccaccttgatctcctgggctcaagccatattcccaccttagcttcccaagtagttgggactacaggggtgcaccaccatgcctggcaacttttttttctttttttgagacaggatctcattcccatcgcccaggccggagtgcagtggcgtgatctcagctcactgcagcctccacctctcaggctcaggcggtctgcctacctcagtcccctaagtagctggggctacaggtatgtgccaccatgcccagctaatttttgtattttttatagagatggggttttcccatgttgtccgggctggtctcgaactcctgagctcaagcgatccccccgcttcagcctcccaaagtgctaggattataggcgtgagctactgcacctggccttcatgcctggctaattaaaaaagttttttgtagagatgggggtctcactatgtggcccaggctcgtcttgaacttctggcctccagtgatcctcctgcctcagcctcccaaagtgctgggattgtaggctgtacctggtgtgttttcaatttctttgatggtgatatttgacccaggttttaaattttaattaagtccagctcatcagtctttttctttcttgtgtttctggtgtcatagctaagaaatcattgctgaccccagaaccatgaagttgtggtttcatttaacgttttgttccatccgaagtaagtgactcgtaatgtttatttgtgacactagatgtgtgtgagggtgtgtgtgtgaatgtgtagctgggatggaatgaagtccctgcctgtggggagccagctccaggttcactcaaaggagacaagagactctactggcttgtgtgtgtgctctgtcatgtcttatggcaacatgcactgaccccaggcagctggggcgagaggatatgggtgttggcatcataaacgaaaagggtaaagctatggttcagaaactgatacgtgatgtggaatacactggcccatgaccttcgcatggttggttggccccttctgcctggcggtgccctccatgtgagctgaaccctctttgcagcccccattctgttcctggtgggacatggagaagctgtgctgtctctgcacagggcaagggttctttcaggcaggggtgaaagagatcccatcttggggctgactcaggaggtgacagggctgacatttgatgagcatttgcagcatgctttttatgtttttgttttagacctcacaccattcctctgagagccgtcttgtttatataaagctatagttgggagccacgtgtggtggcggtgcctttaatcctagcctcttgggaggccaaggcaggaggatcacttgagcctaggaatttgataccagcctggacatcatagtgagacaccctctctgaacaaacaaacacacacacacaaacactgcagctgtgggagccaggaagtctttctggtgtcacagctcatgctcagcccttcggcctcctccatgtcacacggctgagctgtccctgcacctccttgtctccttggagagttactgtggttctctgtcagtttggtttgaaaagtgaaaacaggctgggcacggcggctcatgcctataatcccagcactttgggaggccaaggcggggggagcacctgaggccaggagttcgagaccagcctggccaacatggtgaaaccccgtctctgctaaaaatacaaggatgtggtggtgcatgtctgtaattccagctactcgggaggctgaggcagaagaatcgcgtgaacccaggaggcagaggttgcagtgaaccgagatcgcaccactgcactccagcctgggtgacagagcaagatcctgtctcaaaaaaaagaaaaaaaagcgcgaaaacaaatgcttggcaaataaatgtcgtagaaagacacaatatagatgagcatgtttgatgactaaagcttttgtttgtcttagaggaaatgtggagcttcattggtgcatgctaaaggaggaagaagtaaaactagggaagtcaggtgggcaggcagtgatgcgatgtttgcctggaaggcaccctgggtctttctgcccttagtcctctgaatagggggactctgcctgctggactcaggaaaaaagcatcgcattttctttgggttactttttagggaatcctgctgattcctctccacacatacagtgcacacacacacagaatctccatctgttgtgctgtaagcctatttcttggtctctgactctgtgcacaccaccacgcccagctaattttttaaagaaattcgaaagtagcctgcgcaacaaaatgagatcctgtttctacaaaaattgttttaaaaaggtagttgggtgcagtcccagctactcaggaggttgaggtgggagaattgcttgagtccaggaggttgaggctgcagtgagccatgatcgcagtgctgcactcacgcgatcctcctgcctcggcctgtggacagtgggccatgttctttttctctttgcatcatcacctctgtttgaggactactgttaaagggctacttggtctttattttaggtgattcaaattccaggacttttcttgagtggtcctggcgtaggtcctttcaccttttttgtggctcctctttgaacacctctgttgttgtggcaggaggaggtgggcactcctcaccatgagtaagctcctacaatgtttgtgaacccttacggtttcctttgttggatacaagaagcacaggtggggggatgtattggtttaagtttaccttttttttttttttctttttttgagacagagtcttgctctgttgcccaggctggagtgcagtggcgccctcttggctcactgccagctccatctcccaggttcaagtgattctcatgactcagcctcccgagtagctgggagtcaggcgcccgccaccatgcccagccaatttttttatttttagtagagaccagatttctccatgttggccaggctggtctcgaactcctgacctcaagtgatctgcctgccttggcttcccaaagtgctgggattacaggcgtgaggcactgcgcccagccaactgtactattttgataaaatgtatacatgtgctccttattatgcattttgtggttttcatcagtattttgctttttgaaaaatgtcaagtgttctgatctctttggacattttgtatgaaccctatttcccttgctatccttattgattgagaattgtgcatattgatttgggtaataataactagcacttggtgtttttctgagcttggatgtgtagattcatgtctttcatcaaactcgggtagttttcagtcattgtttcttcaggtatttttgctgcccctctcctctccttgtgggactcttgttatgttaatacacatgttggtactcttggtggtaccctatgagtctcttaggttttgcactcatttcagctcttgagtcttcttgttatgttaatacacatgttggtgcgcttgatggtgccctatgagtttcttaggttctgccctcatttcagctcttgagtcctcttgttatgttaatacacatgttggtaagcttgatggtgccctatgagtctcttaggttctgtgctcatttcagctgttgagtcctcttgttgtgttaatatacatgttggtaagcttgatggtgccctatgagtctcttaggttctgcgctcatttcagctgttgagtcctcagttccagaatttctctttagtttctcttttaataatttctttttgagacagggtcttgctctgtcgcccaggctggagtgcagtggtggtatcacggcttactgcagcctcaacctcccaggcccaagcagctctcccgcctcagcctcctgagtagctgagaccacaggcctgctgcactggaaaaaaaaaattgtagaaacaggatctcactttattgtccagactgctttcaaattcttggactcaagtgatcttcctgccttggcctgccttgggattataggagtgagctgctgtgcccagcctgtttttataatttctgtctctttatcaacattccatgttagtttaaatgttgttcttttggtctcctttagttctttgtccacagttttcttgagatctgtgagcatatttaaagctgttgatttaaagtctttgtctaagactgagcacagtggctcacacttgcttcccagcacttaacctttgctttaaagcctaaaaaggaagaaatctttgcatatgtgtttcccaaataacagatttgagggctgtgttggtgacataggtctgtttatacccactgtgtggctaaagcaggtctctgttaaattagcatctacaaagcttttctcctgccttccctcaaacttaggaagctccctatgcaatcttcaggctggggtccttcactgccccctctcaaggaggcctaccccttcccccagaaggtgcagtctgtcaccccatgtcttataaagtgtaatggtctggtgtcccaaagccacagagaagcccattctaaccttcctgcaactttctgaaggttggagagcatgtttgttttactgctaggaggctcaaggtccctgtgaacctgcatcaggtagtaagccctgcatgtcggaaatacagactgcctaactcttatctaaggtgatgttttgagaaaatttttaaatgtataatacattttataaatttcgaaaaaattttaataaacattaaatttttataagtttatataaatgttataaattttgaaaaatgtacagagttgcattggagcacacgctctcagtgttcatcgaagacgtacaagcagcgtcttacgacgatgttgctgcagctgccttggggtcttgttaaaagcaccattcagtagattaattcccacctgtggactgtgttttctggcttccaaaagaaactgtcatgtttttctctctggatgacgaaaactctgcacgtacttcctatgacaagtgcgattggcgcccactgctcttggcagttgaggtgaggacacagcgtttctgtgacggtgaaggggacagggtttggagggagattcagacattaaacaaggaaacgaagggagcaatttcagagaatggataaagtcgttaagaaaatacaaaagggcggtgagatcctcagtgatggggccaaccagtgacttgaataagacttggggaagacctcctggggcgacatttacgctgagagcttctaccgtgaaggagccgagcaggatggactcctgaccgcagcatctcaaagaggaacgaaggctcgcacgagctgggacagcagaaagagcagaagagtgggcacagaaaagcgcctgggggccagatcctagaggggcttcaggaacacagtgaggggtttggaaattattcaacataaagtcggatactggggaatacacgggagtgcagtggaaaggaagagcgagggagagtgaggccattcgggagccaccacagtgttcggagtgagaccagagctgtgaagaaagagaaaaggaaatacgctgcatgtaggattctgaactcaacgactttgctgttctattcagtgaaagagagtgagatagtaaggtcagtgagtgacatgttggagccttccacatagtaatggtctacaaagttatggattgatgagttcacacaggagggagtgagagatgaggaaggtgaatgggtggaaaagcttgaaccgggttcccaggctcactggcatggggaggtggagaaaaggggaggaagcagccgacatggaaacccgcagaggctccttcagaagggatattttataggagaggagtccgattctgagagggggaaggggtggaggaccagagtttcctcacaggctctggagcactgaggtggatggtaaattccaggagagcagctccagctgaggtctagggacagggcattccctccctggtagagccgttggggctcagtgccgaggctggctcaggctcttgtggggggccctgctgtctgtccagccctggctgtggcctggcctgaccctgctgccccctgcaggcctgtgtacctcagttcccaggtgatcaaggggccctgggagaggttgggtctgagcacgtcctgacatggccccagtgtccagttccccgcctgtttttgttggcttgtttaatcttggtaggcttttaagctttcaggttttcaggaaaatgcaaagcatgagacatctttgactttgtacgtggaccgattgttctttttttgtgttaatggtgtttttttccttgtgtgaacgtgtgtgtttcgtgttgcactccgccctgctctccctccctccctccctgtagaacgtggcattttggctgaacgttaacactggtgggggcagacggcagtgggcccccgttaagactgtttagaaagggcgttgtcggcatcttctcttacatgtgaattcaaggatcctttattttttttcagctttattgatatgtaattcgtctaccatataattcacccatttaaaatatatagttccatggtttttagaatattctattattacttagaaaattgtggcaaaatatgtataacaaatttgctctttttattattaagcatgttaatccagtggcattaattacactctcacttttgtacaaccatcaccattatctggttccaaaacttctcatcaccccagattaagaagtcactcgcccctgatgctccttcccttcaaccctttgtaactctagtctactttctgcttgaaaaaggactttgcctgttttagagatcttgtacaagtggaattggacaatatttggcctttcatgtctggcttattttatttagcatcatgttttcaaggttaatctgtgttgtagcatgtatcagaattttctttcttttaaaggctgaataatatttcattgtatggacataccatatatttatttattttatttttacttttatttttatttttttttgagacagagtcttgctctatcacccaggctggagtgcagtggtgcgatctcggctcactgcaagctccgcctcccaggttcacgccattctcctgcctcagcctcctgagtagctgggactacaggcgcccgccaccgtgcccggctaattcgttttgtatttttagtagagatggagttttatcatgttagccaggatggtctcgatctcctgacctcatgatccacccaccttggcctctcaaagtgctgggattacaggtgtgagccaccgcgcccgacccatatatttattttttaaagataggatctcactgtattgtccaggctggagtgcagtggctattcacaggcccaatcatagtacaccacagcttccaactcctgggcttgagcgactctcccacctcagcctcctgagtggctgtgattgcaggtgtgcaccaccgcccctggccatattttcttgatccattcatttgtcagtggacgcttgggttattcccaccttttgggtattgtgaataatgctgctgtggacatggatacaagaacctgtttgacacccctttttttagttcctttgggtatataccctgaagtggaattagtgggtcatgtggtaattctatgttcagctttttgagagcttatcactttttgtatgtaaaaattacgagtgtttagttcttaagtcggatcatgcataaatgcagaaacgtagttaaaaaataagtctcttttttttttctttttgctataaagctctaggaatcgattttgcttttagagatagacacaaagggcttatcctggttgcaatgggtgagctattgcagatgacctttggaggaattgtgtcggagtgtagaattttcacagtgtagctcgccatgcatcaggcacatgtagcctgtgccacaaccattgtgcttgggcggggttctccatgctgccctgttgcaggaggatgctctgcccctgcttctccctatttgtcatttaagatgattcctggtgctttttggtgagcgatcaaatggtgttctcagaatctttgggcccttgacaacggagggctgtattcttgggggtgtgatgtgagagctccttgtctgcagggtgtgaggctttgggtcctgagtgtggaccgtggcatgtgatgtcttgtcacggctccctgcacggctgtttagtttctgaaagctggaagtataatatttttgttctttgccaaaacatactggtgtatataaacagaagtgcccaggtgagcgactcagcactgcgcctgtgtttatggttctgcgtctgaccgtgtgccttttaggctggtgtagtggttgtctgaggtgggtgcctgacagggctgggggacctgctggtgtccttgctgctgctttagggacagcttgaagcagtgtcctcagataccccttggaattgtgacaaactctgtatccctcttacaagttttatagaactctaaccagttgcaaataactatttgccatcctgagtattgtcattttaaaataaaactattgcgtcactcatctgaataaatctgggaaattgaggtagaataatctaccattcttcgttaaaaaatttacagggctgggcgccatgtctcacatctgtactcccagcactttgggaggctgaggtgggaggatcacttgagccccgggaggttgaggctgcagtgagctgtgatcgcgccactgcactccggcctgggccagtgagcgagaccctgtctaaaaaacaatttcataggcaagtttttctctcacagaaattttattcttcctttttcttcttaagcccatatttccatttacttttttcccagagcattttaccctaatgtaatgtatttctgtgcctaagaatctttattgatctatcatttatctgcaacgaaagaaaataacataaacataaacttcaacttttgcattttgtatggccataagatgctagttatttatttattttttccacaggtgttcatgaccttttttttttattatttttttaactatacttttaagttttaaggtgctagttacttagaagtttttttagattgggttttaaaaaattatgagtacagagttgaccaaaacaacataaaatagcatattattgaaatttagctcttaataagatagctgtttagtttgagttatcttttgatgagtcaggctttttttgtttttattttttgaaatgattcttgctctgtcacccaggctggagtgaagtggtatgatcttggctcactgcagccttgacctcctgggctcaagcaatcctcctgcctcagcctctcaagttggtgggactacaggcaaacatcccattgctcagctaatttttgtattttttgtagggatggggtctccctgtgttgcccagactggtcttgaactccttggctcaagcagtcctctcacctcagcctcccaaagtgctgggattatgggtgtgtgccaccatgcctggccgtgagccatgcttttaaccagaataaggcaaggttctgcaacagtacaatttttgctttttatttatgtattttttttgagaaaaggtctcactctgtcacccaggctggagtgcagtagtgtgatcatggctcactacaacctctgcctcccaggctcaggccatcctcccgcctcagcctcccaagtagctgggaccgcaggtatgtgccaccacacctggctaactatttttattagagacggtgtttttccatgttgcccaggctggtctcaaactcctgacctcaagcaatccatccgctttggcctctcaatgtgctgggatgacaggtgtgagccactacgcccggcccctatttttactttcagttttaagtgctaagaagtcttattcattcaagtcttattcaagtagctaggaatggcagaaattttgctttagcaatgctggtgtttcaactttttccaagctcacgcctgacctctgtgctctgtcactgagcagcttcagtagggtggcctcagtcctgtgaagtgatgcgttgacagccacctgcatggggaagcatttcccagtctctggagcagttcccatcgtagtgtccactgcatggtttccagtgtgttgggtgagaggctgcctttcttgaaaagtgagagaaagggctgttgtgagaggggacatggggatggagaaaccctttctcaagcagagccttaggggctgaggctccggaagtctacgctcctaaagcactctgaagcctgaggaccccatggatggccattgagtagccccaggggtgcttcgcacatgccggtacttgaccactgctttaaacccatgtgcacacatgcacgctcacacacatgcacgatgcagaagtgcatacacacgtgtacatgtgcacactgacacatgcacgttgacacgtgtacacccaatcgaatgtgcacaactacccccacagatagcacacacccacacaatcgaatgtgcatacacccacagatacacacacgtgcacacccgtacaatcgaatgcacacatccgcagatatgtacacgtggacacccacacgattgaatgtgcccccccacagatatgcacctttgcacacccacacaattgaatgcacacacacccccccacaggcacacgtgcacacccacacaatctaatgcacacacacccccatagatatgagcacgtggacacccacacgattgaatgtgcatacactcacagatacgcacacatgcacacccaatcgaacgcacacacacctgcagatatgtacacgtggacacgcacgattcaatatgcatacacccacagatacgcacatgtgcacatccacacaatcgaatgcacacccccccgcagatatgcacacgtgcacacccacacaattgaatgtgcatacacccacagacacacatgcacacccgtacaatcgaatgcacacacccgcagatatgcacacgtggacacccacacgattgaatgcgccccccacagatatgcacatgtgcacacccacacaattgaatgcacacacacccccccacaggcacacgtgcacacccacacaatctaatgcacacacacacccatagatatgcgcacgtggacacccacacgattgaatgtgcactcacagatacatgcacacccaatcgaatgcacacacacccgcagatatgtacacgtggacacgcacacgattgaatatgcatacacccacagatacacacacgtgcacatccacacaatcgaatgcaccccccccgcagatatgcacacgtgcacaccggcacaatggaatgtgcccccccgattgcacacgtgcacacccacacaattgaatgcacacacacccgcaggtacgcacacatgcacacccacacaatcgaatgcgcacacacctgcagatatgtacacatgcacacccacagaatcgagtgtgcacacacccatacataatgcgcatgcactcacatgattgaatgtgcacacacccagagatgcacacacacacatctaatcagatgtgcacccccacacagatatgcacatgtgcacacccacaggatcgaatgtgcacgcctaatcagatgtgtacacccctcccacatatgtacacatgcacactaacacaaatgtgtacacacccgcaggtatgtacacatgcacacctacacagtcgagtgtgcatgccccccacggatatgcacacgtgcatacccacacaatcccatatacccacccccacaatcacgtgtacacacccccgcagatatgcacacacgcacacccacaggatcgaatgcgcacacacccacagatagcacacacgcacacccacacaattgaatgcgcaccccccacagatatgcacacgtgcacacccacacaatagaatgtgcacacacccgcagagatgcacaagcgcatacccacacccgcagacgtgcacatgcacacatccacacgatcaaatgtgcacgtgcatctgcagacatgcacaagcagacacctacacgcactcgcagacatgcacacccacatgggcgaatgtgcacaccccccccacacagatagcacacgtgtacacccacacaattgaatgtgcatacacgcacccgttcacaggttaatcgctgccacagctatcagctctttttcattgactgttacggcaaaatattctaaaggataacatagatttatgtttatttgcattttatgtttccttatggttcatatgagtttattggaaaattagcaacatacacatcattttggggaatggaaagtgaggcagagtaagccagaacattcactgtaacattataagcaagtagaataaattgataataccttcaccagtaatgcactttccctagtggaaataaattatttgtataaatagcctcttgatgtttgtgtgttatttagttatacaaatcacatttttcttttttacatatggcactttaatgttagtactgaaaatgttttttctgacattttttcagtaattgtcatttacatcaaatatgcagctagagctaatagaaaaacagttaaaacaatttgttgtaatggtgagatatttataaggaaacatttataaaagatcttctgtaagacagcttagacttgaaaatacatatcagtcttagagtcattcaggtgtttttacaaccaaaagtagaagcaccttttaatattcatgcttaatatttataaaaactgaattggagggttttttgtttgtttgtttgtttgtttttttgagaagcagcagctgcatttgtaaaaatgtgaaagtgccagttcagaggtgttgtagcttgccaccttggaaggcgtgtgtgtggccgtagctctgtgaacacacgtgtgaacccggcgttaggacacccgggccctccttcgtagtgtgaacactctggccgtgtcctgcagcttcgccttcttagctccttgctgggattttccagcatcccttagacttgtcctcttttgtcctttgggtctgaggtcacactgggcctcttggctctccatggagctcagtgtgggtgtgtcttgccggcaggcaggttccggggccgcagcatccccatcgcccacccggatgttcctggggctgtaggccgccagctggcacagggccacggctgccgtctgcttctgctcctcgctgctgtccaccgcgcatgcgtctggagcctcctcgccggggcctgtgggtggggccccgtcaccgtcgaggctgcctggcttggtctcagggtggctgggcccatcctcagaaccttctgtcccagtcttctgtggaacagcagcagcaggttccgcagctcgtggtcgaccggggaaggcgggcctcggagcctgggtgttacaggggtccttcaccgagagattgagtggaaggtcctgcagctctgagaagctggcggtttccgcctgggggctgccttggtacgtgggttcgtgggtggctgccaggtttatctctgatttcttggagaggttgagggggcccatcccggagctgtcgtccggactggaaggcgcggcctccgagacgagagaggcgcttccggtcggagcaggagggtctccgttcacaacattgaggctagaagaagccaagaaaaagcttagtaggagcttgcttagaaaagcaactgcgtgaagcagtgtgagcaagtataagcctggctcatggaacccaaccagaaacattcccttggaggttttgaaaatgacattttcttaccttactggagactctgctgtggtctcagcagcctgggcaggtaggcattctgtgcttttcttaacaggcctgaaggctgtgaggctttgctctggcgggtagagtcttcccagtgcgctggaggctgccttgttggagaggtcgtacaggccttcgcaggtctggctcgtctgcatgaagtcggtggggctcggcctccctggggagcccgtggctgcactccctgcgcgggggctcattttggacccttccgtgtctctctgcccagccttggaggagtctttagcctcaggaattggactttcgaactcgacgtgttttctgttggggtccgaagggtttaacctggaaggactcgaggctggatagaccagggtggcttcttcaagcaggtgagagctctgatctcgggtgaggccagtgacaggtgggagtctgagaccataggaggaaaatgcagactctggcctgtaaaatccgtaaggaatcggcaggttagagggatattgctggaaaaacctgtagtgatcgtatgtggctggagatggagccaggtgcttagggatcggccccgggtgaggcaggaagtgtctcgggtcttgggttccgtagactgacagcaggggtgcgtcacactcaggcgagctcccagccagcaggtaaggcgagtagatggtggccagcccgtgctctgtgtaaaagtgaggcgggtactctgggattgtggggtgcatgtaaggggaaatggccccaagcccctttgtagatgagattttatgtggaaactctggtggaaggaaaggtgagccggctttccaggggtagccaggagtgtggaaggccgacttggtgtggaaagacacggccttggcagtggggttgtgtaaagccagtgtctcgggcgcctcggcgttgtctggccccttgagtctgtgctcgccgactggaacaaatgcagaaggccgagctgcgccttccagagcaggctgggcaccgagggcggcttccggagctgggctcttgcagggtgatgccctgtggagggctggcttctgtcccaggcacctgtgggttccccgggcttgcagctccaggttttccttgatgtcttccctggcagagctgtgctgaagcttcgagtcgaaggcagagagtccatttgcgacagacttggaagaggctggcttcgccgtggcatcgggctggttggtttgcttggggtctagtgagttagatttagggcacttgggaactcgatcctgctctgatactaaagtaatcgagtttttacaaagaccatacttcatgtgattaaaaagatgtgacttctcattgcaagtaaagggacattggaaacatttatacttgaagggctttcctggaggcctggggatgtaatgtggcttttttggcttccgctctttgaggagactcattttcctccttatgccttggactctggctgtccaggtggcgtgatcactgtcgacgccgcgtgcacttcgtggtttctaaagaggcacctcccgctttgctttctttcccgagcacttctatcagaagccagctctgcgtgctgagggtctggcgagagcctccgtcatctggcggctgggagctgtaataaagagcagtcttggtgtcaggacagcgagtgaggggtcggcgagaagccggcctcggctcgccacagtgccacaggatccctgaagcagaacccctgaagggctgaaactgcctgctcctgaggggagcagctgccggtcacagaagcagccctgccctacccttggtaacctggctgctgactccccaccgtgttttctgttttctgagtctgatctgaaagagtcacctcggggcctagaggtggagtgtggtgtgtggtgcgttgagtgtctgttctgagaatgcctgtaagcctttgagttttgggaactttcatcctgtgacctggacctttcctcgaaagcgccctgccgggggctgaggacaccgagccccctcccagggtctggacagagtcctgtcccagggctgcccgactctgcttgggggttacacgcttgaagcagtgggtgtgtgatcggccacactctcacgtgaaatacgaaggggtttgtggctgtttccccttaacatgtacccacagtcacagagtgcccctcacttttacacagagcgtgggctggccaccgtctacttgctcctacctgctggctgggagctctcccaagtgctgtgcgcccctgccgtcggcctgtagaacccaagaccatggatgctgctgcctcccctggggccgatccctaagcactcgtggcagtttctgcccactttagccacgtcgttggtgtattctagtgtgcttgtttaaaaatgaagaacattcgaacacaagactctaccctactgcttctaaagtcagctttatcattaagtagcatttatgttgtctcagatatgaatacaaatgctatatttatgttgacttaaatggttgaaatactgttggtgaatttgtacatcctgtgagtgacagcagcattgtgagacatgctttcacggtcacccggttcctgctggccaggaggcatggccagcagcgcctgcccgtccagatgcaccaccaaatggaagaaccaaagctttgccacactcctgcccgagaggagaccagagtgagtagtatccgctttagagatggttgggtcatgggaggaagctgtcctggcccttaacctttagggagtgggttcagccctctggccacacccactcaggtcctgggacccaccagaggctgtgtgtgtgatgtcagagctggcctgctcttttggattcttccagagggtctctgtgtcccccttaccagcctcaggtttccttcagaggctgtgccgcacgcccaaggctgagaacaaaggctgtttttttttttttgagacagagtttctcccttgttgcccagtctggagtgccatggcgcaatctcagctcactgcaacctccgcctcctgggttcaagcgattctcctgcctcagcctcccgagtagctggaattacaggcgcccaccaccatgcccagctaattttttttgtatttttagtagagacggggttttgccatgtgggccaggctggtctcgagctcctgacctcaggtgatccacctgccttagcctcccaaagtgctgggattagaggcgtgagccaccgcacccgtcccagaacaaaggctttgagagtctgggactgtccacctggcagctgggcctggagcgactcaagcagcaactgtgcctgggagacagggtgagtgggagatggggtggaggtgcaatggatcaaggctaagcactttaattcgtattaaaaatgtaaaaaagaaaaggtctttagggtctaaatattttcaaacagcttaaaaataaagttaaatgacccaaatgcctatcagtgatagactgaataaagaaaatgcggcacatatacaccatggaatactgtgcagccataaaaaggaacgtgatcatgtccttcgcagggagaaatggatggagctggaagccagcatcctcagcaaactaacgcaggaagagaaaaccaaacgtgcatggtctcacccataagtgggagctgaacagtgaaaacacatggacacagggaggggaacatcacacaccagggcctgtttaggggtgggggtcggggggagggagagcattaagacaaatagctaatgcatgcagggcttaaaacctagatgatcggttgatgggtacagtaaaccaccatggcacacatttacctgtgtaacctacacgttctgcacttgtgtcctggaacttaaagtataataaaaaaaaaatacattaaagtaaagttaaatggagggctgggggccgtggctcatgcctgtaatcccagcactttgggaggccgaggtgggaggatcccttgagcccaggagattgaggctgcagggagctgtcatcccaccaccgcactgcagcctggtgggcaacagaatgagaccctgcctcaaaaaaaagctaaatggaaatgacttaagaaaactgtttcaactgcagtattttttttaaggaatgggcagatgtgcccattcttgagtctgcgaggttttatgtgtagacatcagggtggctaaaagtcaagtgaaaagccgccccttgaaaatagagcaacgtgtgtgggagcctaggaggcagctgtccctgaagcaaggcgccacccctcctccctgcacccgtgtccttcctcccacacgccaggggccaggggtggtggctgggctttcatatggctgccccgaactctggggaagtgctctgattttgttctcagcaaactggtttctctactgatttattcatatttctttctttctttcttttttgagacggagttttggtcttgttgcccaggctggagggcagtggtgcgatctcggttcactgcaacctctgcctcctgggttcaagagattctcctgcctcagcctccctagtagctgggattacaggtgcctaccaccacgcccagctaatttttttgtaattttagtagagatggggtttcactatgttggcccggctggtcttgaactcctgacctcaggcgatctgcccgcctcagcctcccaaagtgctgggattacaggcatgagccaccgtgcctggctcatttatttataattcttaaaaacacaaccacccttccccctacaaactgcctctattaacatactttaagttctttaagacatttatttactaagaagtggtttgggtagaaaaggggctctgctgacctgccaccttcgctgtgatgagtttctgtgtagcagggacagcgaggcacggtttggatgaggacaagatgtttgttaccctacaaccagggagggtgtcgggtgacaccctgggctcagaccccgcgctcagcacccgtctcccaccgtgggctgccacagaagctacaaggcaccgggtcaaggccaagcaaatgaaacacgtaatgatagctctgtctttctaatttccccctattagaagaaagaacgtgaaataattctttatgggctcagtccctaccgtgtggggcagacctgctctgggtgatgaaagcagtttccctgcctcccttcaggaagtagagaagccgggtgcctggttccagccaaacgctgggccagccagctcagtcagtggggcctgtgccggcatgcctcgccgcgctccctggttctgaaggcgtgagaacctctgcaagtcaggttcccatgattgtataggatgtgttacggcagggatctgaaagctgatgatttcatcactagctggaagcatcaggatcgaaacgatgacagttgcaaaatgttcatcaagtgagagctgcgtcctcgcgagaccgaaacgccgcctctagcacctgaaacacaagccctcagaggagcagatgattccctcaggatttaagaaaattgaggacttcagttttcgaagccgcattatttcacattgctgatacctctagcgcctgaaacacaagcgctcagaggagcaaatgattccctcaggatttaagaaaatgaggacttcagttttcgaagcagcattatttcacattgctgatacttttaggcaaaaaaaaaaacaaaacaaaacaaaaccaaaaaacaaaaaaacaaaaaaacccacaaaacccgtgttggttagattttctcaaaagctttacaacaggcaggttacgtgtaagctctgctgttgcccaaaatagtaattagggaaataattgcttttaaatgaatatgtctgttttctagtcagatttgcccttttgttctttgatcagttagttcacgtaagcgggtgtggcagggaggaagcccctggtggtgagagtgtttggagctcaattgctcgaagggaattggtgtcgatatggagtctcgggcagtggttttagtaaccttggataaaccgacctctcaggcttgcacaatttgctaattaaaacagggagcacagctgcttcagttgtaagccgggcgtaggtcacctgatctgtaaaactacaatagtgtcagagaagtaagtgggataacattgttgctttggtaagctttcaaatgatgatgatgtcagcctgtgagttctgtgtcctgcttaagtgaggtttataaggatgaagaaaccaaacccgacggccagtacctcaggctgtcacagctgtctgtgggcacagcgtttgaaatagtctctgtgtggtcagtttctaccagcccgactttgtactctggcagctgctggtgttaaatattcccaaaagagtatgttgttgcccaaacagtgtaacccagaaatctagctgtttacagtaatttggatttgtatttagaggtgcagtttttctctagaggggataaagaagtgcggagcgtctttctctcctgggggaggtgtgtttccattttagttaataacatgcccggagagctgtctgtctgtctgttaataaagcagagtctcattcattatctgctttcatttgagaactgcagtgctagcgtgttttacagtgaagacctcggtgtgatcctgaaggagggtttcatcctcctctcatttcccactggatcggcaggaagcgttagcagggtggacatgccacagagcttccagatctggatcaaaggtggctgttgctgaaatacttatgcagagtcttccctgactgctgctggctaatgtgtgccctcttctccaacacacctcctccgagcctggcctggcacaaagccttctttctccaagttatttcagatcaagcagccaatgtagacagtgtctacactaaagggcgtaagaacagtggggtgcagtggcttcaaacatgctcaggatccagctgagctttcaccaggcttttcttgccatatttacagatgccactctgtgcctttctaaatattttaaatgttgtgtgctcagccgatgcacttggcttctggaaagtgcgctgagctgagagctcgcttctcttcctgctcaacgtgcactgggccgggtgttggggcgtagctgcccacacagacagtgctttgaagagtgagtggtttcggttggccatggggttgtgtctaaattgccaatatactgtctttccaaaggttcctaagtgtggacagttaatgcagcagacagttgttagggtaatagtgagaagttgggatgcttaacaagcttctaaggagtttgaactttgaaaaatagacaagagaaagagttcttaaaaaaaaaaactttgataggacagagcggaagtaattacagtttaactttatgggacgtttctgtgacaggctgggtaactatgcttgtcatgcgtcctaacctgtgccctgagattgtgctgtaatgttccttttggtggtgtccagctgtctggcaaggagcctgctcggctggagcattgtgaagggcatgctgtaattacaatattgtgatgtggcgttgttgcataactcaaggacacaccattgtcgcctacccactgtgatgtcgcaagaacgagatttgtgagttttactccaattgagcttttccagtgattgactgccactccctcccagcctttcggttctttaaaatgaaagataaacctcaggacaaccaagacctggggaaaagacagtctttgggaatgtaatttggaagaatggatccagaaaaacaaccaggggctcttaactctagtttcggcaggagatcccgagttacagacctgagctcgtaaacaaacgctcaccactttacagtcgccgcctcatcctgaaactccggtcagaaatgctggaaggcctttgctaatgcgcagtgaaaattaggggcacagatgtggacggactgtgcttggtcagtaattgttctcctccaaatcaagtttatgagaaatttcatataaggaaaaaaacccttttgtatctgtgtctatatgtacagaagaccttaacaaccaaacagaaacttaacccctttggtttggttttgttttcgaaagcttatgcccaattttaaacttcatgtaagcttatgtacttattttaaactttaaaactattaaaagttaaactagatagtaaattcggcactgtctaatgtgcatacaccacaaacatataaccctaaattcagctgtgtctaatgtgtatacaccacacatatatataaccctaaattcagcctgatgtacttataccacacatatataaccctaaattcagcctaatgtacatataccacacacacatatatataaccctaaattcagcctaatgtacatacaccacacatatatataaccctaaattcagccctaatgtacatacaccacacatatataaccctaaattcagcctaatgtacatacaccacacatatatataaccctaaattcagccctaatgtacatacaccacacatataaccctaaattcaccctaatgtacatacaccacacatatatatatgacccttacctcttgttagcatttattgtagtttgtttttgaggttaggagcagttaagcaataatatgaatttgtgttggtttaacttttatgaattttagggcagaacaaggagttaatttccagataagcttgttcatgttcttagaataaagtgtcagcctcattagaagttttgtaatcgtggtctgcatcccagccatgcacctgctgggtcctgagtaatcctcggagcccagagcaaggcagagcagacacggagcaaacgctgcgttcagctgggtattttagatacgtctgagaagagttttaaaataaaacttgaatttgaaaagaaatagtgagtacttaccagaggtgggcagtgctgggatgtggccggtcttggtgccggtggctggcggtgctcaggaagcagtacctgttctcacgcttgctgggtgaaactggagcctgctgttccagtgggagggatttaagtgtaggagttgagccctcggggcgtagagatgcacctgatattcctcctgcccgcagctacgattcatgtgtttgcacccaccgagctgctgcgggcagcctccccagcactggacccagcaagcaagttatctcgccgactcccagcgctgtctccagactcaactgtctgtgagtgcggcgtcggtgctgcctggacggccatatgtcagagggctttcgatgtgtccgcagttagaatagagattactatattcatcagaatcacacccgatgaatatttggcgtcatgataaagacatgtgagactttcctttagaacttgagcatgtgtacgcaggaggcaaacacttggattgattctcaagcgcgcataccctgggaggcacagtattcatggcgtccttgccatgaggtccagtgaggcctttgaggatctgtggaccttccaccctctaccctgctcctgagagtctctgtccctggtcctcctcaggagctgagccggcagggagggagcttatcccagagcctggctgcagggacctgccggagcttgcccgacaccaggcaccgcaagagctgcggagcagggtgtgtgggtgcgggggagggggccagctgtgcactcccgcaaaccaccctccccccactttaaattgcagaggcacttaacttgggggccagtttttacctccacacccccccaccaaaactgcttgcttgcttaatcggaggccgcaccccagttgtagcgaaggctggcatgtggtgtcggtttgaggactgggaaaggaggtgggatgagctggtgtcaggcccttggatgagcctgaggctgcagggcagaggctgcagggctgtggcatagggacgagctggccaggacagacatactggtttttttttttttttttttttttttttttgagacagagtttcactgttgctgcccaggctggagtgcaatggcatgatcttggctcactgcgtttctcctgcctcagcctcccgagtagctgggactacaggcgcctgccaccacgcccggctaattttttgtatttttagtagagatggggtttcaccgtgttagccaggatggtcttgatctcctgaccttgtgatccacccacgtcggcctcccaaagtgcttggattacaggtgtgagccactgcacccggtctgtttttttgtttttgttatttttttccttaagacttaagattttacatggctttgtgtttacttttatatttaattccttttttttttcttttgagacagggtcttgccctgtcacccaagctggagtgcagtggtgcgatcacggttcactgtagcctcaacctcctggactcgagtgatcctcccgcctcagtctccccagtagctgggactacaggcacggtcactatgcctggagaattttttgtagagacagggttttgccatgtttcctaggatggtttaataccttaaaattttttttggtggcttttgtccattgagacatccatatactttatgaagtcaaaaagagttatgtaagtcttatgacaaaaaacagcagttccctgtccctcttacctattcctggatagcaaactatcccaaacttagtggcttaaaacaagcaccgttttattacgtcttaggatatattgtgtcaggagtttgtggagggcctggccgagtgctgcttctgtttcatggacactgactgaggtggctccgtgggagaaagctggcaggtgactggtctggagggtccaggacagctttactcacctgccttctgtcctggaggggcagctggaatcctgagatcagctggaacctcatcctcacttagtagcacttcagaggcctccctagcagggtggtcagctgtatgatggctcaggacttcaagagagcaaggcggaaggttccagtcctccagaaggctgggccgcagattgtcagggtgtcccttctgtcacctttctctgctgaggcagcctcgtgctgcccagatgcaaggcgggagccgagggctccacctctcagcggcaggagtgccaggtgtctgcgctacgactccctctgcccggaagccccaccttggcctttcctaagctgagtgttctgacccttgccatggagggtccagtgaggcctttgagaatctgtgtaccttccaccctctaccctgctcctgagagtctctgtccctggtcctccttgggagctgagacggcagggagggagcttatcccagcgcctggctgggtgtttacctcctcgattccagccttactgatctgttggtggttctgtgccctctctccccctctctcccttctccactcctggtcgaggtgttgtttggtggcttcccttcatggaagatgggaatttgcctctctttgccccttctgcccccatgtctgccttccccgtcacccagggggttttgcctgcctctctcttgcactggaaggcctgctgctcggatcccatgtcgtctttctcttgagttaatcatttagtttgacatgaggcacacaccttttataggctcttgagaaagtgcaagagagatttttttggaggtcttgaattattgaaaatgtttttatctactcttcaacctcactgatagtttggctgagtctagaatttcaggccagaaatcatttaccttcagatttttgcaagtgttcttcattttctttctttcttttttttttttttttttgagatggaatctcgctctgtcacccaggctggagtgcagtggcgcgatctcggctcactgcaaactccacctcccatgttcacgccattctcttgcctcagcctcccaagtagctgggactacaggcgccctccaccacgtccggctgattttttgtatttttagtagagacggggtttcaccatgttagccaggatggtctcgatctcctgacctcgtgatccgcccgcctcggcctcccaaagtgctaggattacaggtgtgagccaccacacccggccgcaagtgttctctattttctctagcttctagtactgtggttgagaaccttgatgccattctgattcctgattctttctctcttaacattttagtgtgaaaattttcaaaatacagacaagttgtaaggatgctccagtgaactctcatatgcccaacggtggggttctccagttaacacagctgtctgtgttcccttcccttcccctccctgtccagcttacttacccttcccttcccctcccctcccctccccgtccagcttacatacccttcccttcccctcgccgtccagcttacttatcattcccttcccctccccgtccagcttatatacccttcctttcccctccccatccagcttacatacccttcccttcccctccccgtccagcttacttacccttcccttcccctcaccatccagcttacttacccttcccttcccctcaccatccagcttacttacccttcccttcccctccccgtccagcttacttacccttcccttcccctccccgtccagcttacttacccttcccttcccctccccatccagcttaatcgtcttgctgcatttcaggtcagttgcagacatcagtatgctttgccccaaacacttttcaggcatattcttattagtttatgattcttctttcaaaggtaaggtttacattcagtgaagggcacaggtcttaagaggatcatttaacgagttttgacaaatgtgttctcccattatggccccagagagttccgtcacagcagtgccacccttccccacccagaccgtggcaactgcaggctgatacttttccaccatggattagttttatgtgttgtagaattttatgtcagtagtgattcctgatttttatggacagctgtttctcacctgcaggttctttcctttatcctcagtagtcttagttttcttaactttatatttcgacacttctgttaagtacttggtttctgattttggtttccatgagctctgttttgttctgagtgttccttttgtagcatctcattctcatgcagtactttcagtagcttttcttatctaaggattttagtgatagctttcttttagtggggagtggaggagtgggggtggatgttctccgtgtgtgtgtgtgtgtgtgtgtgtgtgtgtttaaagacctggggtcttgctgtgttacccaggctggacttgaactccgggtctcaagtgcttctcctgcctcagcctcccgggtagctgggactgcaggagcgccatgccatgcctggtgccctccctgcatcgtcagtgtggctgcctgccttccagggcctctgctgagcacctcggagagtcagccctgtctcctgccccagtgctccttgggttaggcctaccctgcccctccccacagagttctctggtgccacagatctggagctttttagggacctgtcctgtggatcagggggagtctgagttgcctccctccaggggagggctgggcttcttggtctgaggcatttcctgctgtccctgcacttccaggctcctccgtggtcctggtgctgccttccctgcccttcctcttctaccctgtagcttatttcttgaaaaaagaaaatggtccgtttctgctgtttttagtgggattttacccgctattttttacatgttcaaccccctgtgttactcagaattcttgcgattaggtttttgaccaaatcttaggaaccgtcatgggggtggcagctgatgtttcttgcgtgttgatggtgtggggcaccgtgccaggtgcatcacctgcactggtccatttactcagaagcaccacgcacctggcctgtggagtccccccacccacaggtcgggaacgtggccgaggtacccagcccagagggcgatgagcagagttacaccagaggtggggggtgcttccctgggtggggaaggaggggtacctggggtggtggctgctcttgggggtaagcaccggtgccagtgtgtgttggggggtgccagggacccaggcaggtgctggcgccgcggcctctgtgtcagggcctctttccctaggggcacacaggctggaagtgcagtcctggttgagctttcctagtttccaggtcgggggtgaggcacaggacatggccggctcggccccttcctctccatcctgtccagctcagccccttcctgtccatcttgtgcggcccagccccttcctctccgtccatcctgtccggcctggccccttcctctctgtcctgtctggcctggccccttcctctctgtccatcctgtctggctcggccccttcctctccgtcctgtccagcttggccccttcctctccatcttgtccggcccggccccttcctctccatctcgtctggcccggccccttcctctccgtctgtcctgtccggcccggccccttcctctccgtcctgtccagctcagccccttcctgtccatcttgtgtggcccagccccttcctctccgtctgtcctgtctggcctggccccttgctctccctccgtcctgtccggctcagccctttcctctccgtcctgcccagcccaccccggtcccttccgcagcagcatcctctccagtgcactgtgtgctgggactcaagtcttggctcttccatcttcaccctttgtgacttggggcagcaattgctgacctccctgggcctcggtcttcctgtccgtgaaagggacttgtgagcatctctcacagaacacctgtgatgaaggaagggcgtcacatcttggatcttcttaaaatacaagattgtttctgttttaatcctttgtgttccttgtgaggtgctgcatccagaggaaaggagaaaggaaatgaaaactctgcggaaaatccacaggcctggcatcagcctcccagtctgattttgacgcggctgtaggggagacacagcaacattctgtcccccgagggcacagcttcaggaacggctccgggccggagggcacctctcgcctggctgtgttgtgtctcagggctctgcgcttctaaagggactcaggccagtgggcagaactgtgggatgggactgggaggcttagggggtgagggtgtaagccctgtgcctccctccacgtgctgcgtccggcatgccacgtcccctcgtccagccctctgctgccccctccacgcgctgcgtcccctgtgccgtgtcctctcgtccagccctctgctgccccctccacgcgctgcgtccagcgtgccgtgtcctcttgtccagccctctgctgccccctccatgcgctgtgtcccatgtgccgtgtcctctcgtccagccctctgctgcccactgctctctttgggacttccattgtttccccttccccttcctttcctggttttcttccctagtgaggtgcccttcctgctgctgcagggccctgctgtggcctctgccttccgtccctggcggtagtgagactggctgagacccaggggaagcttggagactgtcctagatttcggagatggtggtacacaggcttgctggcttgggttagggctctaggccctgccttcgggttgtctggaagccgccagccaggcctggacacctctctgcccccgtcacctcggagcagcagcccaggagcgggtcacagcccttcccctgtgttacatggtcacctgcctgagaacccctgcaggcccctgtgttttgggaagttgatttaactgaacagagcgcagctgagaaggggcgcctccctccccacccaccctcattgcctgggaccgcgtgtccaggagccgggcctcgggtgtctggtctctgggccacacaggctaacatggccaagcccagctgcacccccggggtcctcacccgccatgtgcctgtggtcgtggccaaggtctgggcccaacctgctctgggcgctgtgggcaccgctcagccattttctacaggtggccgaggagacatttggtttctcattaaaaagaaacaggccgggcgtggtggctcacgcctgtaatcccagcactttgggaggccaaggtgggcggatcatgaggtcaggagatcgagaccatcttgtctaacacagtgaaaccccgtctctactaaaaatacacaaaaaattagctgggcgtggtggtgggtgcctgtaatcccaactactcgggaggctgaggcaggagaatggtgtgaacctgggaggcggagcttgcagtgagccgagatcatgccactgtattccagcctgggcaacagagcgagactccatgtcaaagaaaaaaaaaaaaaaaaaaaaaaagaaacaaccctgagaacatcagtggggttttactgactgtgtcagacaactcagcgatgcagagaaatgaaagtggagttgatttggctcttgtggtgagatacagccaaggtgtatgagagaatttggggaaagctttctttctggacatttgttgacgttgatgagtagtggagggctttatttgtaagttgaagtctgagatttgtcatgccaatacctaaattttaatttgtttgtacaaataacgccacaatttaattcttttttctttttgagacagagtcttgctctgtcacccaggctggagtgcagtagtgcgatctccgcctcccgagttcaagtcattctcctgcctcagcctcccgaatagctgggatcacagttgcgtggtaccacgcctggctagtattttgtatttttagtagagatggggtttcatcatgttagccaggatggtcttgatctcctgacctcgtgatccaccctcctcggcctcccaaagtgctgggattactgggattacaggcgtgagccaccgggccgggcccacgatttgaatttttatggaactggggctaacttaattttttcagacgagtgggagtagagcaaacggcccctgtctgttgcccctttttcctaccaaggcccctccaggctgtctcttgcctggtgagtgtgaggagatgggtgggcgcggccctgtgggatggtgctctgtggcagggctggcagtttctgggtgtgtggcctgtgggtagcctttgtactgggcgcacagtccccggctcctcccttccaacaccttcgccctgagcggcctcggaaatggggcttctggcggctctgcaggcaccgtcagagtcagagggagggcgagcggcttttggtttctgtttaaacagcgtcctgtcgctccctcctctcctgtgcggattggcgctgcggcttctgtgttgagagggaaacttgaaaccctgagctatggcttgttttgtctttgattgggaaacccaattcaggtttgtgaacttgggccaagtttaagaattcccacagttttcttcagctcctctcctccctgaaccccgacagcgaggtgtcttacgcttcggcattctcactcgcctgactcagacttgttagttttccagagcaactcatgtggccgccgtctagggagtttattcagagggtgcctctacatgcacagcagccaggtacagaagtcatgagttaaatcgcacaaggacaagtaaaatgaaaaaaattagcactcagatcttcttttttttcatgctacaaaataacagtgaaaaacctaacgatgaaaatagatgcgaacagacaaaaggtcaatgggcttgatcccttctcatcctctctcctgtgtctcctggaggcttctgcacctctgtgtcttcccccgctctgctgcgtcttctccacctcgatgtccccctctgcctgctgcgtcttctccacctcgatgtcccctctgcctgctgcgtcttctccacctcgatgtccccctctgcctgctgcgtcttctccacctcgatgtccccctctgcctgctgtgtcttctccacctcgatgtccccctctgcctgctgtgtcttctccacctcgatgtccccctctgcctgctgcgtcttctccaccttgatgtcccccgctctgcctgctgtgtcttctcacctcgatgtccccctctgcctgctgcgtcttctccacctcgatgtccccctctgcctgctgcgtcttctccacctcgatgtccccctctgcctgctgcgtcttctccacctcgatgtccccctctgcctgctgcgtcttctccacctcgatgtcccccgctctgctgcgtcttctccacctcgatgtccccctctgcctgctgcgtcttctccacctcgatgtcccccgctctgctgcgtcttctccacctcgatgtccccctctgcctgctgcgtcttctccacctcgatgtccccctctgtctgctgcgtcggggctgcctaccgggcttggtcttcagggccactgtttctcctcagctaagtcctgagagtcacatttccatccattgcagtgaaatcttttccttcaggtatttccagaccttggttttggccccttttcatatcttccttgtttcctcgctgtggttttcatttcccctttcgtctccttaacctgttttttgatggtgtctttttaggttatctcaagttcatttcaagctctgaaagtaggaagtaaagtaagaaccgcgtggcactagcaatcactaggcattgttccaagcacacggataaactgagaatcctcgtggtcgccccgggggtgggactgccattgtccagagagacctgcttttgcctgtggtgccacacgggtccctctcacaggatgcgaccatggtggctttgcgtcatgtcacctcagccaggcaggaccttctgctggaacccccttccctggtagtcctcggagagggctgtgcacaatctggaggcagaagcgaagcagtagcccccgtgcgcggcagctcttgaggctgtgctgctgttggctgtgctgttgttggctgtgctgttgttggctgttttgctgttggctgtgctgttgttgcctgtgctgctgttggctgtgctgctgttggctgtgctgctgttggctgtgctgctgttggctgtgctgctgttggctgtgctgctgttggctgtgctgctgttggctgtgctgtgctgctgttggctgtgctgctgttggctgtgctgctgttggctgtgctgctgttggctgtgctgttgttggctgtgctgctgttggctgtgctgctgttggctgtgctgctgttggctgtgctgctgttggctgtgctgctgttggctgtgctgttgttggctgtgttgttgttggctgtgctgctgttggctgtgctgttgttggctgtgctcttctgctgttggctgtgctgttgttggctgtgctgttgttggctgtcctgttgttggctgtcctgttgttggctgtgctgttgttggctgtgctgttgttggctgtgctgttggctgtgctgttgttggctgtgctgttttgctgttggctgtgctgttgttggctgtgctgttgttggctgtgctgttttgctgttggctgtgctgttgttggctgtgctgttgttagctgtgctgttgttggctgtgctgttgttggctgtgctgctgttggctgtcctgttgttggctgtgctgttgttggctgtgctgttttgctgttggctgtgctgttgttggctgtgctgttgttggttgtgtgtgctgaccccggaccccctacagtatggctgtgcatggactggtgatttggcccccatggcctcatcagccctgatccatccctgcattgaattcgtatggggcttgtggtgagtctggactgactcagctttctaaaagctgaaaagcaaaagttaataggtctgcagagataaatggacagacccggtatcctcctgagagctcaaaacacctcccaattattgataactaaatatgtagtggagatatagatatgtataaaacgcacattacatactgtgtgtgcacatacaatatttcaacagcagaggcgactggcatgattccataattgatacagaaccgtgtagctagccgttggagaatacacatttgtaggcacctgaggaacattcacagatattacacagccaggccataaaacaagtctcgagacatttcagagactcactggcggacagatggtattccatgctcacaaagtaatgaaattaaaaactggatacagaataataaaggaaaggtgataatttttagttagaagatatacaaatgggtaaatcacatgagtcaagtctcaggagaagttttaaaataaaaagttaaaaaagtttaaaaataaaaataaacagtcacaaaattattctatctaaaattttgggatgcagctaaggaaacttaaacctttaaacaggtgtgacgaaattgtggcctgcaggcccagtggggcctcagcctgtttctgtacagctttggagccaagaagggttttcacattttaaaaatgttatcaatgagaataaacacaaccaagcagagtctgcgatgtggactgcatgtggcccacagggcccgaggttctctctggccctggcaggaatcacttggtgactcggcctcagacacgtgtacagaaaaggagaaaggttcactctgcacagggcgggtgggaagagggcagtgagcagaaccctagaaatgaaggaggtggaagacaaagatgagagaggacacacagagccaaacgcagctcttcgagagggctgatgggaccaataaacgcgtggccgacgggcagaaagcaggagccttacacacggaagggagccctcgtgcagccaccgtggagatggaaaatggcatgttaagaatatcttttgccaggaaatttggtagcttaggcaaaatagacgttccgagagaaatgtaatttatcaaagttgacccaggtgggaatagaaaagtgactcctcactgcttcagcgcatctgcttgtaagcgggaacgattactgttgaccccataggatttttaatgattttgttgagacgcaattcacatgccattcagttctgtcattaagtgtacagttcagtggcttgtaacgcatttgcagagttttgcagccatcgccacagtcagttgtagaacattttaccccacgctccttcgctgtcatccccaacccccccgacagatggataaaccccccctcctagacaccacagatgggttctctgtgtctacccattctggacatttcctgtgaatggaaccgtgccccctgtggtcctctgtggtggctccttgccccgagcgtggcgttggcgtggtccgtgggcgatgcagcccccagcagtgctccttttcttttccttgttgaagcctgttccatcgtgtggcatcttagtcagctcaggctgtggaaacaagtcaccacagatgggggctcaagcagcacaaatgtatccctcacagttctggaggctgggtgtccaaggtcgaggtgccagcaggctcggcagcaggctcggtttcttccgggttttcctgggcctgcaggcgctgccttcctgctgcgtgctcgccgttcggtctgtgtcttggtgtccttgtttcctcttcttaggcggacactggtcatagcagatccgggccccacttgcgtggcctcattttaccttacgcatctctaagggccacatctccagatacaggcactcgggggcactggggttaagacttcagtatgtggatttcagggagacagaattcagcccacgacgtacatggaggccgcattttatttatccatctgtcagttggtagacgtttgggttgtttcccactgtaggctgctgtgaataaagcattcgtgtgtgagtttttgtgtggatgtggtttttgtcttgggtataggcctgggcttggagcataggactgttcggaaagttaagggaatgaacgtattcagagctcagaaccgtgtctggcttgcgatgcgttctgttttgaggttagtgatgatgatggagagcggctcccgaggacgagagctcgtgatggagagtgcctctttatgcccgatgtgaatgtggctactcagctttctctctctctttttttttaaattaatttattttgtcgagacaggttcttgctctgttgcccaggctggagtgcagtggtgtgatcatagctcactgcatccttgacctcttgggcgcaagtgatcctctgacctcagcctcctgagtagctggaaccacaggcatgtgccaccacgcccagctaattgtcgtattttttttctttttctttttttgtaagggtagggttttgccatgtagctggtctcaaagtcctgggcttaagcagtccacctgtctcagcttcctaaggtgctgggattacaggcttgagccactgcatccagcaacaccccccctccttttttttttctgtttttgagtcagggtcttgctctgttgcccaggctggagtgcagtggctcactcacggctcactgtagctttgaactcatgggctagatccatcccccgacctcagcctcacaagtagctgagactacaggtgtttgccagcacacccagctcattttttctttttttttttgtagagacggtctcaccatctagcccaggttggtcttgaactcctcgcctcaaatgatcctctcatcttggcctcccaaagtattgcgattacaggcatgagccactgttaatggccccagctttctttgggttcgtgttttctcagtgtattcttttctgtcttttaatttttttatattcttgcattttagatgtatgttgagtaaaaatctaccgtatgtgattttaagctggtgagtttagtccatttactttactgacatgtttgggtgtctttgtcttattatatgaattttgctttttcagatttttttttgtttttaaaagttgtggttcctattgggcccccaacccagtcccattccacatcttcttccttgttggtttggaatcatctattctgtttcctgtgtttcttcaggggtcgtattcagcttgtaccacgaatattcagagccaacagccagcttcttagcctaccctccaagtaacacacagcacaccctgacctcgatcactttccatctgacatatttgacattgttgagtttttagttcttcttgtttaacattagacattacaggttgagcaccctgaatccgaaaatccaaaaccgaaaactttttgaatgctgagttgacactctgcaggtgatgggctgcagtcaaaacacaggtaaacaacacacagttgattcagcaccccaaggggaaaaagatcctcccaacccccttcagctttgataaatcctttccacataagaccaggttccctcatgcaagcacgtccacaaagggcgatgaaatgtcgggtgcaggccggacgcaggcgctgcaggctccttatgaggctccacatgggcgagacctgtgcgcaccgctcgtgtgtttgcgtatcctctgctctgtggtgtacagatactgttgaaaacatcagaaaggcctgcaggttacttgtatgggggtgtacagatactgttgaaaatgtcagaaaggcctgcaggttacttgtatgggtaacagtggtcagaaaaggggcaagcattcacgtttgcatgtcgcacagaaagtcagactgctggggggagctgggcagcagtgtaagagcacggtgctggagtgagtgccagagatgacctaagaaacaggaggaatggttgacgttctgtgctggaaacgatgaccagaaaaaccctgcacaaagctacacgtgaaatttctatcacgtattgaaagagtggatctgtcagcatcgcagtggacacaagccacttaacagtgccaatcacaagacaagcaaagctctgtgtaaaggccctgatcgcattcatgaagctctgtccttgggactcatcatctacgaaaggccacacctcctaacaccgtgctcttgggagtgaggatttcagcaggaattctggggaacagaagcattggggcgtcgcatctccctgtggccttcctccctgtggccttcctccgcctgccagctgccccctcaccctgctgtccacctcacggacccctcttcgccccatatgggccactttggcccccaccaccccttcctggatgtgcagaccctatgcggtgccacctgatgcttcaagactgaattttccagaggggcagggaaaggtgtttgcttttttttttttttttttttttttttttttttttttaattttttagagccagggtcactctgttgctcacgctggagtgagtgccatggtgtagtcgcggctcactgcagtcttggcctcctggactaaagcgatccttccacctcagcctcccaagtcactgtggcactatgggtgcatgctaccgtgcccggctaattttttttatcttttgaagagatgggatctcactatgttgcccaggctggtcacgaactcctgggctcacgtgatctactcacctcggcctcctgaagggctgggattacaggtgtgagccactgtgcctggccaggtgtttgctcttaaaaagtcatttctctctttctgtgtgtatttgtgttttgaggtaaaatttcacataacataaaaataaccattaactttaaagtgaaaaactcagagcatttagtacatacccaatgttgcacagctattacttctgtctacttttaacacatttttgtcaccgaaaaaatactctggtgtccattcacatagtcatgacacatcacgacacatgactgtattcccaacccctggcacctgccaggctgttttctgcctctacgtttacttattctgagaattttatacacatggagtctgcaatgcgtgaccctttgtgcctggttcatctgtattgtagcatgtgtcaggccttcatttgtttttatggctgaataatattgctttgtatgggtagactccccccccactttttttttttttttttttttttttgtagagacagggtctcaccatctagcccaggttggtcttgaactcctggcctcaaatgatcctctcatcttggcctcccaaagtattgtgattacaggcatgagcctgaatctgaaaaagcaaaattcatatagtaagacaaagacacccaaacatgtcagtgaagtaaatggactaaactcaccagcttaaaatcatatggtagaattttactcaacatacatctaaaatgcaagaatataaaaagattaaaaggaaagacagaaaagaatatgctgagaaaacactaaccaaaagaaagctggggccagtaacagtggcttaatgcctgtaatcacaatactttgggaggccaagatgagaggatcatttgaggcgaggagttcaagaccaacctgggctagatggtgagaccctgtctctacaaagaaaaaaagaaaaaaaacagacgccccaatgcttgcgttccccaaaattcctgctgaaatcctgactcccaagggcacagtgttaggtgtggcctttcgtagatgatgagtcacagggacagagcttgatgaatgctatcagggcccttacacagttgacggacacttaagttttcccaccttttggcccttgtgaagaatgcttctgtgaacgtttgcgtacaagtgtctgtttgaatccctgtcttccccttttttgggtgcgcatccagggcgggatcgctggaccgcgtgcggaccctcgctgcgcatccagggcgggatcgctggaccgcgtgcggaccctcgctgcgcatccagggcgggatcgctggaccgcgtgcggaccctcggtgcgcatccagggcgggatcgctggaccgcgtgcggaccctcgctgcgcatccagggcgggatcgctggaccgcgtgcggaccctcggtgcgcatccagggcgggatcgctggaccgcgtgcggaccctcggtgcgcatccagggcgggatcgctggaccgcgtgcggaccctcggtgtgttactgaggcgtccccaagctgtttccacagacgctgtgctgccctgcattcccaccagcaaggcgcagagcttctggtttctccatgtcctcaccaacacctgtgttgttcttttttaaaaaattataatcagcctcgtaggtgtgagggggtatcttgtgattttgatttgaatttttcttaatgacgaatgacactgagcatcttttcatgtgctccttggttgtttgtgtatttctctggataaatgtctagtcaagtcctttgaccatttttaaattggattgtttgtccttttgttgttgagttgtaaagctgtttgtatcttctggatattaaactcttatcagatatatcatttgcaagtattttctcccattctgttggttgtctttttttttcttttgataatgtctttgtattgtgtcgtgtttaatgtaaacatttcaccattgttttaattccctcttttcagttcttttctgtgtgtgtgcagtttttgggtgtgtgtgatgtgtacatacacacatgcacatatacaggtgtctaaaaagtattttgtttttttgttttaaatatttgacacttttaaattggagttgagattctgtatggagtaacgtattgttgaatgacaggaaagtatgaagcttgtcggagtgttattacttggcatagccacaggagccatacaaatgatacaaccttgctgcttgtgtctcatggtttttttttttttttaatttaatttaatttttttttcattttttttttaaattatactttaagttttagggtacatgtgcacattgtgcaggttagttacatatgtatacatgtgccatgctgctgcactgcacccactaactcgtcatctagcattattttaatttgttttagtttttttttgaaaaagggtcttgctgtgtcactcaggcaggagtacagtggtatgatcacagctcaccgcagccttgacctcccaggctcaagcgatcctcctgcttcagcctcccaagtagctggtgctacaggggcacaccatcatacctggctaacttttgtatttttttgtagagatgggatctccctatgttgtccaggctggtctcgaactcctgggctcaagtgatcctcccgcctcagcctccctaaatgctgggattacgaacatgagccactgtgcccagccagcctttgttgtttttgaaagttgaaattcatgtttttggatcaaagctaagctgtgacatataaacatgaagtgatctagttaggtttggttatacaccatgtgcagaaagcaacctcttcatgaatcttttaatgaacatctttctacctggaagaaaccctttacctactaaacttactttcacaccttcctaattttgttgtcttccgtgtttttgctagctccaggcctattcggcatttaaaataaaatgcaggttggccagtctggctgggcagttctacaggtactacggctggaggatcccagttgacttgaaattcaggttttgcttgtgaaagtagctggctggggcttctgttgatgacagtgctgtgtggacggcctggttcgctgggtgtgcctcacagacacaggacactttttagggttgcttttgaatgtgcctgaggtgaggttcctgtgttttccttgtacttaccttcatattttctgaccctcctgtggatggaaaatcgactgagtgtgtgaagggcctgtcggtgtgaacgggccctgctcagccggtccatggctgtcttaggatcccgcttggtggcgaggagggtgcggctcgtgggtggctgcctggggctaccccgtgtagacttgctgggactttgtctagacaagagaactgctgtcagtggcgcttcctgcggggggatgagtgcggctctcagcgcctctgtggggctgggggtcttgggccgtgaggccggggccaggctgcgtggcaaccctgagtcccaccctcattgtctttgctcggggccccgagaggccatggggagcctgccggctctgtgtcctccccgcactggcttttagggaaagagagtctcgtgggtcatccggcctgccggctctgtgtcctccctacactgacacactggctttcagggaaggggagtcttgtgggtcgtctggcctgccggctctgtgtcctccccgcactggctttcagggaaagagagtctcgtgggtcgtctggcctgccggctctgtgtcctccctacactgacacactggctttcagagaaagggagtctcgtgggtcatctggcctgccggctctgtgtcctccctacactgacacactggctttcagggaaagggagtcttgtgggtcgtctggcctgccggctctgtgtcctccccgcactggctttcagggaaagagagtctcgtgggtcgtctggcctgccagctctgtgtcctccctacactcacacactggctttcagggagattgggccttgtgtgtcctgttgggtgagcagacacacaagctgtgacttcagggctacggaagttgctctgtggtttccggcactgcagactccaagtgtgagccctgtagtgaggacaaagagtggaggttggagttcagaattgtggacaggctcctgaggaccagcagaggctggaggccagggcttgcccgccgggagtgtggctgtggaaagattccagtccacagtgggggctgctgcccagactcaccctgaataaagtgtcttcagagccacctgtcctgcctgttcatggcagtgacccagaaagattcatcagtgggcggtgagttgggaacagaaagaaaacccttgagataactgggttggagacagggagcaggcttgtcattgtgcactggtgacatggcctttggcctccccagccgtctggcctgggcctcgtggtcctgctcttgggcttcatgtgtccttgggtgtcagctccagcatggcgtcctctgggccctgctgcttctgaagtgcctgtgccagggacactgtcttggggccagtggaggtctgagtatgggggctgggagtcctaggcagtgagtcatggcagaactggcccctgacttcctggttaagcctttaattctcccgaatgcctgtttttgcttctttcaagttgttgtgcttgagccactctgtcattagctgtgggcgttccgagtgccagcgcacagtgttgagcagagcgggtaggagcgccctggcttcagggagggcccccgccccctgcatggcggtcacgctgcgctgagcgtcccctcccctctggtggcctttcgcagtggtggaggggcaggaactgactggctcttttccctgtggtggctgctcgggtggcagtgagcggacagcgagggggacagacacaggtggaaggaaccacggtgggtttcattaacaatgacagtggctcaggagatcctgaggctgattaatttgcaaacagcaattacttgggattgcttgaaaagaaagttctagcttagaacaggaacctgaggagggctggccacactggaatccagtgcccactgtgacagtggagagccagcagacgccactggctttgatggatgatggagagggtcctggtgtcttctgccatttgtggggggtccttgtgtgctgtgtttgcaggcaccatgggtctccctggacggggttcggttccaccccagcgcccttgtcttgtttcatcgcccgtgtccgggctgtgtaagaagcatgtccatttgtcccgagcggagggtctctgccccgcccctgagggaggccaggaggcccttgttggatgctctggcgggcggcactgggacacggccattgcacccggccctggacacagggcggccaccgcatccggccctggacacagggtggccagggacttggcggggggagctcttcagaatctgtcacatgcacgtgaatgctttatggctttggtattcttctgtttaattttagtaaaaccgcggcccgttgcaagaagagtgtgggcgttggcagctttgtcccaggtgctgcagggttggggtggtccctgtcaccgcctgctgctggtgggggtcagctgcacggatgcacggcctcgcaccagcggcagccccagaggccatgcatagggcaggccccggtggtcagggacccacccagtcctgccaggcgttgggcttgggatgtgcggccggctgggggcacacattcatgccgcaggtccccgtgagtctgggccgtgtgcctggcgagccctgaattccacctcacgtcagccgctgctggttcacgtcagctgctggtgttgagtgttcgcatgatgcttttctttcttgggggatggatcagtggatggagaaataaagctgtgagggcataaaatcaatgtttgtttatattgataatcatcccttaaactcagatccaggggcgtcaagagacctgagcccggccccggtgtgccgcgcactggccatgtgtccggagagggctgtgattgcggctgtcagccctgtccattggagctgcagcttggtaaatgcacagatggattttgagaaggtttccctctaaagatgtgggagtctttgcacctcgccaagctgtgctggtgtggccgtggcacataccgggctttttacgtctcttctagggagtgagtcggtgggcataggatggctaaggtatgggaattttaatagggaattttctagtaaatggttctgttagtattacagcttattttagaaagtaaggtgctttcatagagaatgtttaaaattattaagaggtagacaattcttttaaaaacctgaaggtcttttttttttttcttttttttgagacagagtctcgctgtcgcccaggctggagtgctggagtgcagtggcgcgatctcggctcactgcaacctccgcctcccaggttcacgccattctcctgcctcagcctcctgagtagctgggactacaggcgcccgccaccttgcccggctaattttttgtatttttagtagagacggggtttcaccgtgttagccaggatggtcttgatctcctgacctcatgatctgcccgcctcagcctcccaaagtgctgggattacaggcgtgagccactgcgcccggccaaaacctgaaggtcttatattgtggtgtgagtttatatttatttccatcattttatatttgtcagatttttatgcaggggggctgcataatgtctccctggagagcctcagcctctgtggaagagttgggtcaggagaagcctctcggcggaggaagccggagggagaagcctctcggtggaggaaccttcacccagagaccagcctgggggtccttggcccagacgggggaggtgggaacatggccttgggttctttcctccttgcagtttgggtgaataatgtgtgatgaggcctaagaggagatttataaagagtataatctctcagtcttagagaaaagtgtttcaaagtatgggttctcagtgtctgtattgaaaaaataaaaaattcagtgaatgggtaggttatttttcgatctgagggttatttctaagcacatgatttatctttagcacgggagggtgatgccccgccatgtctttttagcttagggactgtcttctgccgtgagttggcctctctgcctgtgcacgtgtgttgccggccccggctcagctgtggcagaagtcagtcacctgtggagttatggaagtccaggcggccaccccaggccggggcctcattccgttaagtagggccaggtgtctgtcctctcacgcgtccgaggtggctgccggcgtgcgggtgtgactgtcgatgagagctctgagctgggatatctggtgacggctgcccctgcttggtcttgcggtgtggctggggagaggattactgggtggaatgtagccgtccgccttttgtgttgacctcttgacctcccttttgggaggcttattaatgtcaaaaagtgaagatatgaggatgggatcgtaatttctttgtgttgctttccagtagcccagggaccaagctgtgggaaccaggcctccatgtgctggccccaccgtcctcgtggtgcctgtgtctgtccaggcttagtcctcagatcagctgcttcaccacattggctgcaggctgggtggcagatgcccccaggaggaggagaagcatttcttcccagggctttggcctgtgctgtgtgcctggaacctttaggtgctgtggcttcgcagacccggacgcagcgtggaggccaagcggtgtctgtacaggacccttcagtgatgagggtggccaggctccagccaggtcctagggaaagctctccgagagcgacggcttaagcagttctgaaaaattgcaaatgatctgtgttcttggagaaagaatgggagagaagcactcactcacaataatgttgcacctactgtgtgcgggtagggtgcaggcagtgtggtccagtgtgagcggggagggtgctggttgaggggttagtgctcgggacgcagcctttggacccagtgccctcccaaaactctgctcatcagtgcccctgagctcagcattgacccctggaggaactgggcgccttccctggtctcagactgtaagcctcctcgggaagcagcagttggctcctgatgcagctggcctcagatcctgttgggagagcaggattggtgaggaacctggagaggagtaggaggtgctgcctgatagcagaggtgggtgatgggggcagagagggtagcaggggcccagttcagtcctgtctggttttcacgtggagctttttatagagttgtgcttctcaagcctttcaaatgcctcacagcggcagtccgacgtgcagtcagtgacagctgagtagattaccaccctcaggactaaatgcaaaatcatcttcactgggtgcagcatttacagttttggtgctggaacctcctaaccagtgttcttaggggctgtcttaccagtgaagggagctgcctgctgttgacgctccacaggaggtttgcggcatggctgccatctgtgttgtggcctgggactttcttagagagtgggtaaaagatgagtcatctcttgtgtgatttatcagcttcacttgtgcttccagggctctttgaagcgtctcactttttaatttcatgaagaaacaaatgtagtgcagagaacagaaagctgctgtgtgacctgcgggtgcccagcctgtggggcttcctcatcgcccccatccaggcagatcgagtgccggctctctgtgctctccaggaggtggcctttcacagcagggacgttctgtgctcttattttaacaactgtaagaatctgagcttggtgacagttgggtgacccgggctctgtgtcttcgtgttggccagggtgtgtcatacacctggcctggcctgcgtgcctcacgtgtggtggggatttgtgactgtccccagcaccttgacagagggtccttgactctgcgaccctgcacagtgggtggtggcaggtgggatcttggttcacaggcacaggtggggagagttgctgggccagcgtggctgggtgactttcctgtggaaagagcgggcttggggcttggtgcgtgatcccaccgaggccggggttgtgcttggggcactgggggagagcagagcaggtgatgcatatccgggcgcccaccctagcagcacaggaagggctgggatcaccactccccggggcaccgtggggacagcgggggcctgctcactccccggggcaccgtggggacagcgggggcctgcttgtgttgggggtggggctccttgccccccaagggcaggccgagcaccaagtctgtgcttgccccgctgtgcagcgttgcaggtgcagcagacatgaggccagctgctgctccctgcaggcagctgagggcctctgggaaggcttctctacaacgtcctgtgggaactggaaacccagatgtcagtggaaccaggtgttctgtccatcactgcctcttacctcctagcaaattcaacactggcgtttttttttctgagcaagttgagctgcatttttgggacaggagccatggctgtgtgtgctggtgctgaagggagggtctgcagggacggccacacggatggctgtgtgtgctggtgctgaagggagggtctgcagggacggccacgcggctctcgggagccgtttcctgcgctcgggctctgcaccggcaggctccacgctgagggtccctccacatccaccccatcgtgggagggaggctcagtgctctgcaggggcctgagcagtcggggagacaccccctgcccacagccaccctctctgggctatgtgggaggtgcccacgtttccacgccttcctcgtggagggtgtggcgggctgtctgtgccgcgggggtactcggctgcactgtgcacagccctcaccgcccagtgccgaaatgggaaggcctgacagggcgatgcggtctgcaccagctacatctgcagaagtccagcacgatgcagtttatgcctggcagtgatgtttgtttttaaaattagtaaaacctcattagttatcagaaggcgtaactatatgatgattttttgtggagggattatttctaccttttgtgcagagaatgcctggatcccttctgccccttggggtcacatattgcagtggggactgtggtgctctgagggttaagttgtttctgtcacctggaggctgctttttcctcaggcaattggcgttcaacaaatgacaggctgtctagagagaagggtttttcaattacatggctggacctgggttgccaaaaggaagcctcctggggtgtgttctatacgcgacatgcatttgctgtgtgtaattggaaccatgagaaaggtttttgttcagagctattggatagtttccttattttaaacctgttgaatctggaaagagttgtttttgaaatttttttctgataataacgttatataaaagtttatggcagaggagtttctgttccacacgcccctccccgagctttgtggtcgcccaggtgcctggctgtcaaggctggcctgtcccttgtgttcagggtcccgagatgtcagagctggcagcccaagtcctcccctttatcccgagcaggagaagcagtcctcactccatttttcaccccagggtatagcagcacctaccaccctgggatgaatcagagccaagaggcttggtttttctgttcttgttaaggaaattgatcatctcacaccctctcaagctgttttactttgtgcaaatcagattcctttctagggacctgcgaggagaaacatcctcagcttctaggactcccggggatgccgtcagcagccaggccttggcagctgccgcttcacctgtgctggcgtgtggggccctgacgtctcttgcgggtgtcatggagcaggattggaggtttctgagcagcaggagggcaggagaaaggccccaggactttgcgctgtggcctggcctggaaggaggctggctgggcccttctggatgcctgtagcagcactgccacctgggcagaggccccagaggccccagaggccgaggcaggctttgttctctgctgctgggactcagccctgcgggagcacagggaggacagctggaagcccagcccctctgtggctctgtccacagctggggacagcagtccagtgtgcacgggccacccacagccctctcaggaactggcctcttctctttaagacagaggagtgcgccaggtgggcctctggctggacctcctaggccatcagttttcccagcaggaagtgctgatcagactgaaggaaggcctgcgtgtgtgtgttggcccagatgcctgttagtggacgctgtgtctgcacagctgtctctgggtggctgattcatcccagcagctgactacgatggtgctaaagagaaccatcttacacggacttggggacagaaacctgggctcccctaccgaggtcaggtcctgggggtgtggtgggatcagctcccccagcacctccgtggcctggggtggggggtctgtgtcctcccttgggggcttctcacagggctgccaagcagtgtccaggtgcatgcgttgggcgtgcaggaggcctgaggccattgtccatgctggccactgccactcgcggttgtctgttgggagtcggtctgtccagtggatgaataaattgggactcagcggtttgcacccagatgcccgaggctatggagttgccgggtggtcgtgcctggggctgcctggagtggtgttgcagtgactgtccctggggatctggcctggcagggatgccacatttgggcagcgctttcctcttgaaggtgccacagcctgttagttttgatgtgttggccacgaacaggctgccctgttagcacagaaagtgaacgtgagcagtgcgagaaggctcagagtggactttccggggcaaacaactgagggccttttgggcgtcacagatttggtttagttcggatcgaggtaatcatcttgaacccgcttattagagtcagtggctttttctgtctcacagccgccttcttgtttggtttcgcgtctcacatgcattctgtgatcctcactgactttttagaaggaaaatgtttgacatttacaagaagtgagagatactcttgcaaatcatccagcagtttctggtttgcagattgatggcagccctggcctttaccctcagtgcctcctgccggtgatggtgctgccggctctgacctgtgtgaggagggccttggagagcacaggtcccccagggggaggactccgggaggtgctttgcgggagggagtcatggccgagagagggaacgcagagctgccgtgtgtggccgtgcagggccttccacagtgagttgtggggtcctgggggtgagagctggtggtggtctgaccatggtgggaggtggtccggtcctgtagaggcgtggctgccgcagttggggcgggctctgggaatggcgcggtgtctggatgtggaggagtgaggaggagccggccctgagctgcacccaaggagagggctggccatggcgggggcaccacaccggaggacagctcttctgtgggcactgggcttgaagaagctgcagcgcatccaggtggggtgtcctgaggaaaggtggcttggagaggggtgggcccctgcctggagccctggcaggctggggagaccttggtgtctggcagggaccccggaatgtcctgctgctcccccgggcctctgtgtgcagcgccctgcgtcgtggctgggctgagaggaggcagtttccctagcccctcactctggcgaatttcacattcttgataccacggtatctttgaactttctattttgaggaaagttcatttttatgtagttttagtaagtgtataaacgtaataatcttattaaaagtaatcaccatatgtatataaaatacactgtgcagaaacatccatttttattgctgtttatagagaataaaagatccttagatgcaaaaagtcagaggggaaatttgcatataatattcgtagtcctacagttgttgcttatggtgttttgcctaagaccatttctaggtgcatttttctgggagataatgtatctgatgacagttgcatgtgcagataaccggcctctcatgtatccatcccgggagtgccttttctcagactgtgtgtagtgttagtgaacttgattggtgggtgtgaagtgtacagacggcgtgtgcgtggagcgggtcgtgtgcagagccccgaacgagaccctggcgtgtgcgtggagcgggtcgtgtgcagagccccgaacgagaccctggcgtgtgcgtggagcgggtcgtgtgcagagccctgaatgaggccttggtgtgtgggtgcttcagcgtgagggccacctggggaggagtgcttatctggggaggctgagctgggttggaggcttgggtgctccccctggctccgtgggtctccattgctggcttcatagctgtgttccgttttctttgttcagcagttgatctcaagtatttattccaaagcacttgaaatacatgaacctaataaatcgaacaaatacagtaaaactttagcttcttggaacatccccatatacttacaccacgtcctaaaatcctctcatgtctatgtaaaaaatcgggtagcctgggtaacgtgggatgccatctctacaaaaaatttaaaaagtagctgggtgtgatggtggcatgcttgtagtctcagctacttaggaggctgaggagggaggatcgcttgagcctgggaggtggaaggtgcagtgagccaagattgtggcactgcactccagcctgggagacagagccagaccctgtctcaaaaaaataagaaataaatgaaatcacacttgtgtgatgtcagattacccattaacccacttttgaatggagctggaaggataatccacacctacctcggatttctctgcgtggctgttttgcataggagccctgcatgggttattcttgaagtcagcactgtaggagccgtggccggctttgcattttcatcctggttcaccccagacctgctctgggcagagccaggcatcccctgggacgctctgcctttgcgtgtccacgacagtacaattccaggcactgcctggcatctgcgtctctccctcccctgaaccaggggcgcctctccctcccctgaaccaggggctcctcttcctccctgcctggcaggagctgcgtttccttgagtctcctcagactcggcagacccctgggtggtatcatgtgctattctgaaggagcttttgcttcatggcacttgaaaaaaatcctttcactggatctgagttggtgagcatgcatcttcctttcgtaggtttgttttctgaccaggccgtgggtctaacaggagccccgagcctctgggtgggctccgtgtcgcttgcgtgcctcactcatctggcaccgtgaccgcgctccggccctgagccccacttctctgaagcctcacgtgttgcccgtgtggtctgctcctcaccgtcttttctcttgtccttgcccagttgtcgccgtgatcctgaaggcgctgacctacgacgagaagcggggtgcctgcagcgtgggcaccaacgtcagggacgccgcctgctacgtgtgctgggccttcgcgcgtgcctatgagcctcaggagctgaagccctttgtgactgcaatctcgaggtaggcccattcgtcgaggtacatcggatgcgccgtgccccctgacggcgccgtgtgtcgtttcctccatgagaggtgtgcacagcagatgctcgtgaaaaggtgaaattacttggccagaggatctgtgacaaagccaccgcttggaggtcaagctccttttctgtgggtgagcaaccagagcagaagtgtgtggaggaacattctggaggtcttggccaccctgcaggcagtggattcttgggcgcaggtgatcgacaaccagagcagaagtgtgtggaggaacattccggaggtcttggtcaccctgcaggcagcagattcttgggcgcaggtgatcggcacgctgggtggcgtgggaggaagcaagtggggcacgggaatcgcctgtgcgtgctccctgcggtcgtgggtcttggcgagaggcgaattctgtctctatctcctttcaagttcctctggaatacagcaggcatgttggacatggcagtcttcagatggtgtttgtttttgttgaggagctggattttgtgtttttgtggaccagcacttgagagaatgttcagtagcaatagccttcgctggcatgcctgatgtcagctcctctgagatgtaagtgaacacttcagaacctctgggaggtagggagacactttttccctctggcttcctgatgagaaaactgaagccagcaggtttcatgggatcaccagaaccccagaagctgtgcggcctgtggcgggcggggctcctgcctcggtgtccagtgcgcgcacccagctgagccccgtagtggtgtcctgtgccagggactttcaggatctgatactttttgcttaggaaacatgcaaaacatgtgtccccagcgcaggaaacgattcaattcaattcaaccgtgtgcgctggttttgtacactgcttttggactgaaatgagttcttttgtgctgaagaaggcaggtgcttcctttcttgttgtgcatgaaggagctggaggcgggacaccgaggaaggcgactcagtgtcactgtccgtcatgggtgtgtgagcccacggctgaatcatcacaaggtttcacacccgcacttcacctgacaacttttactaggaaaatgaactagggaaactgacttcagaattatgcccaagtcttagaagctcctcctgcagctgttcaggagccgagcgtcccctgctcactacaagacgcctgaaggggtcatgggatgcagcgtctgaagcttccacctggaagtgcactgctccttttggtctgggcggggcggggcgccggtggcagatgcccctggtggcaggctcaggctactgtgctgggtcccctctgccccgcacgccccgcgagcaccagcagggcctccccggcatgtggcggggccagcgttggcctggggcccgcttggctttgatctcgtggggcttcgtcttttggacgtcctgggtgcgcctccactgtggctcctgggttccctcacgcacccgggtgtaagcgccactgcctgtgtccgacaagcagctcgttgtgaggcacacgctggtaagcagctcgttgtgaggcacacgctggtgtaggctccgaagggtctcggtgacaggcgcttttctcttgttcctgcccactgctgttccatcttaccaaatactcagtagcgtccggagagggacctcaacccggttacttccctgggtgtgcagcacgtggccagcgtctcatagtctagattcttgcatcagagcgaagcctgagaggagccgagggtcctcctcctatccagggagaccgtgtgtttcccgaggcagctgtgaacacgcacgtccctcttgtcctgctcctcttcggaggagaacagcgcggctggagggtgctggtgctggccaacgtgttatggagagtgtggcttacctgaggccagggaggtctggggtggctgagagcggctgtggcctctgtctgctgctctccccagtggccactctggcagcgctgctgggcaggggcttggctgctggtggtcttcagggagcagtgccttgcagagtggagcagagaagacggagaggtccggctttaggcccctgccgagctcctgaggccctgccgcgtgcctgtgccagcctgcagcgctgctgtctgtgtgcgggagctcttgtgtgtgatcagcctcaggaaaggctcttcctgttacttccttgtgctgctcctgcacttctaggaagttgatcctgtaactaggaagtgaaagcaaaaaaatgtatctttcttattgttgataggaatagtcacagaacgagaaaacttccttacgttgatatctcattcagtttccttagcaaccctgagaggtgggcaggggccaccgtcattctggtttcactgaggaagtcaggacagcactgaagacacctgtccagcaccttgtgctgacggcttcccagccaggcccatcacctggtggccgaaggcttctgagccaggcccatcacctggtggccgacggcttctgagccaggcccggcacctcgtggccgacggcttctgagccaggcccggcacctcgtggccgacggcttctgagccaggcccggcacctcgtggccgacggcttctgagccaggcccgtctgggcagcagctcccaggccctggcccggggctcagcgctgcctcgtggctgagaagctcctcaccacctgctgtgaggccgtggaaagaccctgaatgcagacgtgtgacggctgcagctgcatctggcccctcagatggtggttcccctttcatggtgaaaatcctcacggatttccttttcagcctcatattttgtctaagagctgtcaacatcactgaaacctgggcctgcccttcatcctggggaggactccctggtccagtgtcacaggaggagtcgggccagggttgagggctggcacaggacatgggggtgagacgaaacctccactcacctgggagggtgtctaggtgggcacggaacccagggtcgtgtatgggccatcactcatgggttctctgttttgggggaaagctgatcccactggagggtgactgtaatgagagtctccagatcaggtgccgactttggagaaatgcaggtgcaactgtccgaacaaatcaagtccccgctactggacggggctggcagctcagctggggccggagagaaaagtcacgagcaagaaagttcttacctaaggtcctggacaggcagatacataacttctgcctttggcaacgttagatgtcatcgttccagagtaaaatacctataaaaacctgccgatgcgcggggagcctggccttggtctgggtgtggagggctgggggccggccggtcggtaggtcctggtgcaggcgggccccgtgcttcatggaggttggcgccgctcggtggcctgctcgcttattcttaggcctgattcacagaggctggggccactcagtgatctgttcgcacgttctcaggcatgaaccttcagggctggactcctgttcttttgtgcagtttccacaggggaccctcttgctccagggtcatctttctcactttgaagccccttgagccgcccctgcacagcctcctgttggccccgtgagggtcctgactggggctcctcttttggagcagctgccacgtgtggaccggcacgggcatggtcgtggtctgcccagctgggtgtggggttgagcccatcatgctgtggggtgctccctgggggttgtgtgtgtgtgggtcccacggtgggaggtggggttggggtgagtgtgacttctgtctggggcatgttgggtgggcgtgcaagggggtcctgggactcctgagtttctcaggcctgaaggactgtaggacgcactgtgggctgcaggcttgaagaaggatgtgagtttctggagtagcctggactgcacagccagggcctccccggcatgtggcggggccagcgttggcctgggtcccacttggctttgatctcgtggggctttggtttttggaggtcctgggtgcgtctccaccatggctcccgggttcccttgcgcacaccgagccagcagctgctggggcctcagggctcgcagctcacaggcttctgacgcctcagcctggagctggcgttgtgcccctcgcccctttacctgtgccatcccggccgcagacccaagggtgcccttggagccgtgcccgccggcctgggtgtcaggcttgtccaacgggttcttagagaacctgggccccatccctccttggcccacgcagactccaggcatccggccgggcgggctgtgagtcaggctgcaccaggtgagcgtgtgggatgctgctggtgcgagcctccctgcccaggagccctgcgcacccgggtatcggttggggtgtgcccttccagatctccctcccttggtttgtcataggtgaccacattttaattaccagcttttatgcccgtcaatttgggaacgtgatacaatcttgatttctctaactttcacaagttcttcggtgggtcctgtaacagtgggtgcttgggatcagagcatcagagtggaattttcgcagggaaatggaaatgcctgatcgagctgggcggtggcagcagccgctcctcactcttcaggtgcctggctcttctgagagtcagttcgggggtttagtggctcactttttctaattggttcctagctttttgctaaagaaacttggattaactgttcttttgcctcatggtgtgaatttatactgttcctgttttataaataccagaaggagcttcgtaggtaacttttaccatgtgttgaaggtagcattggttttgaaaacctgatttcctcagtgtcgcacacgggtagcttaagaggtgggataattgttggagtagtgaatggatttccctgagaagccaagtgcaatttaggggcagtgacagtgcgaagttaaagtgggacagagtggttatgtgttatctgcaaaatccctcctaaccagtaatcacagtctaatttgcaagaaggaaaagaaagccgagccctacgctgctgctgctgccattgtgcgtccagtgatttcctcacctgaaactcttttgtaagcagctcgtgttgacatcagctccgcccaggcagccacggggccctcccctgccagggggcagcctctgactttcggcctccacctcgagcaaacctgctgagcggcgcggcccagggaggatccgccgaggcctgcagatccgagatctcttcctcgggggcaggattgtcctggaaaatcaggaaatggcaggcattgctcagagctacgtcttgttctccctcaccggtgttgctcagtggcacagcttccaggggaagacaacacgtgtttttcaagaaaagttaagtggccattaccgagcagagtcctaaccctgtgaaacccggcaaatcctgcctccacgtcagctcaggtgtgactcgaaagcacttaaaaaattctcgtgttttaccactgtgttgattagtgtgagctttggttcttgggggttaggaaaattcagccataggcaggtccgatatgatttgcaactttcaaaaaacaggatggctaaataacaaattactagtctgatattttttaaatgtctgactttcaaatgacacagaattattgtttcttaaggtaaaaacagtgtatttggctttttattgctataaaatattatataaataagaaaacttgagctggggtgaggtctgcactttgctgtacctgccgaaaatgaggtgcctggagcttgggacaagtcgaggcgtgcacttccccttgactcggacaggaaagagaatccctttctgtttgacacagaccatttctctgtgttgggaaatcctggtgaagtatcacataaacttctccagcgaaagcaaacgggcgaggacacctagggcacgtttcagcgcagacaggccggcccttctcgcggcctcgcagtgtctctctccaggttcccggggatggtagatgaacgtggtgactcactcagggtgttcctgcgaagggaaactgagaggcccacgtgggacgttgggtgtcctgttggagtagtcctttaggaaggagcttttatatttatatttaactagcatcattaaacctgtttgtatttatttctcgatgagccagttttgttctgagaatgagaaaatagagccgttttaataaatgtccaaatcaggacagtgttaaatttgttgtaagtccatatatagttgattggtcgaattaacttgggagtctgtgtttagttaaaaacagcgtttctcaggcgttgctgtattttctgtgaggttcagtaaaatatacacgcaacagcaaccattttgacttctcatggcaggagccagcttcgttgaagtgggccaggctgaagtgaggccagctttgcctgctgcagccctgtggtctgtgtccaaattgctgagtactgccgggagagggagccgggagtgcctgcgtctcctgctgtcagccggtctgactgcctgagcggagctgttgaagtggactgaacaacagtaaccttagagggttagacttggtgaggatggtagatgattttaagtttcttctcttttttccattctttcttcattaatcaatgttccacactttaaatatagtaatttaaacaaataacacatttcaagaattcagtgtaacatgtgacctttcagtagtattggctggagccggcggcaataaagatagaagcctgtgttcctcttgtggcaaatgttaaaggaaaccagaaattcttgattcatatttttccctagaacacgtggctttacaggtttcaaaaaatgaaactcttgttcatatggtaaatatgacacacatttctatgcattctgaaaagatttagaataaactgccatttgttgttaaaaatagcagttatataactttttttttttcttgagacggagtcttcctctgtcgcccaggctggagtgcagtggtgcgatcttggctcactgcaatctccgcctcctgggttcaagcaattcttctgcctgcctagtagctgggattacaggtgcgcatcaccacccccgattaagttttttgtatttttagtagagacagggtttcactgtgttggccaggctgttctcgaactcctgatctcgtgatccacccaccttggcctcccaaagtgctgggattacaggcgtgagccactgcgcccggctgtagttatataacttttagttattagaagatcacattcatatgtcttgatcagtttaatgatttctaagatatcattaacaaaagccattatgatgtattgaaataggattgatcttaaaacgttcgtgctaatgtaacgtgagttccctttaattttaaaccagtatttttctcttcttatttaggctatagtttgttataaagagtatagagaggaaaatggagtgcttttctgttcatagagtttttctgaaattaaagtcaaaattttcagtttcaagtagtgaaagcagtgttaacagaaagtttcccagatactaatcctgggtcttttaagatctttagataattagttgctttccaaaatagcttttaattctgaactcattttagacttaaagaagaattgcaaaaccagtggagttcttctagaccctccacagcattctccgatgtgaacatctcacatttggaagccaggaggtgcagtgtgggataaaggccactaacaggctggtctgcccgggaccccgcatggcatctggtggtcctgtgccctcagcctcctctgctctgtgagctcctcagtctttatctttcttgatcttggggcacttaaaaaataggttttattgagatgaattcacttgccataaaattcacccctttagggtccacagttcagtggtttttagtgtattctcagacttgaggagacctcaccccagacagaagccatgtgcaccaggtcccgtcacccgctccaagcctggcactgccagcctgctttccgcccctgtggatttgaccctgagacctccagagacgactggccagatgttctgtaggacgcccctctctctgatgctttctcgtgtgttactggaaagagtgatgtgaggtgacctgccctcctccgtgtgctgttgggcccatatagtgccccacaacgggtcctgcgtggtctggaccttgatccctggtcaagatggggcctgccaggtgcctccacttgaggagactgtgttttcctctgtaactagcagtgttcttgtggggtactcgaaggttatgcaacatcctgctgtttctcctttggttttcaccccatccgagctctgtccaaagaccttgttgtgtggtctggtggtggttcctgtgtccccaccccgacgttcagtgattgcagcttgttcttaaggaaggctcgttcctctcccagctttatttcatcattcgctcctgccagtgtggactcatgggtgctcatcctgtttgggggttatcatctaacactattgttactagttttgtttgagttataatctaacactaactattgttattaatgttgctcaaattgctccagctttggccacttcaggttggcttctgtgtcctttcagcaagatcctgttcttttttttttttttttttttcttttttcctgagccttttttctttccttctggcaccacaagatgcacctggcttatctttttgcccctgccccagccctagcatccaccacttcccaggagtctcacatcctctcggtggagaacagtatttggaatccaggacgccaggcttggcctcagctgcctctaggtcccctccctctgtagctgagtgtgtgcccctcttcacagtccatgtttgcacagacaccagctctagcccagcttcctcctggcctcccttcgtgtgccgcttctgggcctactgtgtagcacgctctgctgccgtgcgtctgccgtcatgcatctgacgtgattttggagctgccagcccacacctgtgtgagcaacagactcaccactcagggtgggacgctctgtgcatcctcctcaccctgggcatagcgttgccaggccatcgctcgggtgagcccttctggtgctgctggtctgggatgcagacaagtctgccggttccctctgtgctggtccgggatgcagacacgtctgccgcttccctctgtgctgggctccccaggtctgtgattgttgcttcttcaatctgcatgtggttgtgttctacaactcaagcaccaaacaggacagtccgtctcccccaaaaactccccagtctgctccccaaccctgggccaacattggtctgattttggtcctgatagtttaccatttctggagtgtcttataaacggaaataatcagtaggcttttcattctggcttcgttgacttggcacagtgcccttaagactcatcccagtgatctttcctttttttttttggagtggtgtattgttggacggacctggcggtcacaggcctacctgtctccttgggtgtctccagtcctttctggaggctcaggggggctcaagggaagactctgcttccctgcttgagttgcccgcattcctttgctcatgggctcttcatctaccttcacagccagccacgtccacgtctcgcttcatccttcacgtaccctatgcctgtggtcctttcttctgcctcctgtgtctgtccttccttcttccttcctgtatgtatttatctccttacctgtctacttatcagtctgtctagatggggtctcgctgtgttgcccagactgtactcaaattcctgggctcaagggatcctcctgcctctgcctcccacagacagatggagcacaggtgtagccagggccgctggtgtgtaccactgtgttcggcacccgctgggctgcaggagtaatccagggccctctccccatcttagggtcaactgattgccaaccttaattcccctttgtcaggtaaaggaacatgtttgaagtgggacacccttatctttgggagtgggtattattctgctgaagacaagggtggggacagatatgctgtgaccagggtagttgggcttatgactttgttgttgtttacgtggaggaactgaaagacctgggtgtgctgctggatgccccaaggatctggcaggaggaggcatccaggccctcagggcaggtagcgggtgggcctccgtggtgttgggaggtgctgggcccggaggtatcagcaggaactgcagggtccctaccgcaggctccccacacggtgacacctgtctgtccgtccgtctgtccacaggagcaggaggggctgggcggggaggacgcagggtctgtcggagcatagcagtggcccgtacgtgagggactttgttgttgccgtctccccagggtgcagagcgtggtggtttgtggccatccttgcagtgtgagtgagcaagtggccgaggggtagactttggatggctccaggcggaactcggggaaggaggccgtgtactcccatagctctgggctctgtttgtggctgtggccacacagggcagggcctcagggcagggaggccagtgcttttgggaagggcctcccccagccctcagaagcctcccaccctattccccttgggctccatccttctgttttttttctggctctggttcctggcgtctgtttgcaaggctggctggacactgcaaccacctgggcttgctgctgtggcctggacgctggggtctctctcggcccggtggtgagctgagaagcggccctgtggtagaagagggcctttccacgctgagaccacagattgtccctgcaataagcaaacatttctctaaaatgtgagataaacgctttatccactggtgatccgtggttgttagtaattaaaccaagtaaacggtagctcattcggtcaggccgcttgccgccgatgaggggtgcagagcttctgcagcatcctggggaggtcccggaacgtgggtctgggctgtgctgatgctggagcagccagcggggagagctgccaggccactcctgacagccccgcacccgctctggatggaagcttctcgctcccagccgatacgggcctgctgcctgctgctggggctggaggggcccctctgcttgagccttggggtaccccgtgcctacgtgccctcctggctttgcccatggttggtggccgtgttttgggctgcgttgatgtcgttgtggagcccgctctgggcctcggcacgtctgagcttgattggggtggaaaatgcacctggtggtttgtattatgttgtttctgttttatttaatttcatttgccattcttatttcaaaagatgcttcctatgtttatgctatattgttagtttaacttcctaccctttccatctatgaatttctgtttttattgtggttctcagtgaccacactctaggggtcctttctctctctctctgtctctcccccctctcccctcctcccttcctccctccctccctcctaggcagagcctgtgagacttgcaggcatttccccagaacccaggccctcttggccatctggctgctgccccacccaacctttggcctctcctggggctcctggatggttgggcgtcccaaatccccatcagcagagcacttggtcacaaggcccgagtcacatgccccagcttctccgaggaagtgcagagtccagccgcagggaggactttctcaaccggccctggggccagctgtcctgctcctccttgtttgctgtgggctcacctctgtgggctgctcactcagacccactcgcacccatgggaccttcccacctgtttctcctgcctccttcagtctgtgcccagcaccctgctgtcaagcccattcccccccagcccctgacgttggacatgctggaggagactgtggccctgtggcgtgttctgggccatctccagggcctggagcgggcacctgtgcccagcactggaggctgggggacaagtgctctctctgataaatgcccccgagtttcagttctgtggctgtagtttgtaggtctcctagctcagcatccccgagcccatgccctggggactcatggggccgaggagagaggagcgcagagaacatgaggatacgtgagccccttgcctgagaggtgtgctgtgaacctggagagcaaggccagtgggtctggggtgacagacagtgcgagatgcaggaaaacaggctcgagatgctgtgaatctggagaacaagtgggcctgggtctggggcaacagacagcgtgagacacaggagaacaggcgggatgctgtgaaaccggagagcaaggccagtgggtctgggtctgggtctggggcgacagacagtgcgagacacaggagaacagacgggatgtcatgtgcattgtggctggcagggccggcgcctcacacacacgccccggaagtcaggatgtggtgctgacggtgtccgcgctgccaggctggagcgggtgacggtgcctgcgctgccaggctggagcgggtgacggtgcccgccctaccgggctggagcggagcttgctctctctgcagtgggacctgctcacttttccttagctggatgtatctttcacatttagcttgtttaacagcagagctggtgagaggacgcacacctggcgtcaccattgtcccccgtgcatgtccccggcgtccttcatgttgacgcgggccccgccccacggctcaggtctgtcaacttccctggaacaaggcagagcacttggcccctggaagacctggaaaccaggaacctcggaggcgctggcggccttggaggccgcttatctccgcgtgtctgaaattctgttttccaccttttccctttaggctggtaggaggcgcaatctctcaagccttccttagaaaggatgattgtcctccaccctgccccaaaccccctgtgttctgtgcaacgcctgatgagagcgttctgggttattcacagtaactgagctgggtgatctcacaagaggacataatgaagcccaaggagcctggtgggggccgggagaggccttgctctgagtgtggctcgcatgggggcagcgccttggcgtctgtgtgtggtgcggtggttttcctgccactctgtggaaggggcctctgccagacgccttgtcttcagggcctcaggtccctctgggcacggtgggtgttcatgtgtttctgcagggttaggctctgtgcatggcgtggtctgcaggacctggacagcccctgccccggggcatttgtgtcggccaccttggtttgcccccctgtccaaacgctgccagttctcgtcctccagggcactccgtttctgtcttttcattcactggacctccccacctcctgcgccgccccaccacagcaggccaggtgcgttctgcccccaggccctgtcctcgtggctctttgatcctgtgccctcggtgtgcaccgtctcgtggctctcgttagaaccagggtcggccacccccagctcccacatggcgtctggtgtcttgggggtcacatgtgtctgtctgcagtccctgggtgcctcaagctgtgtgttgcctgtggggcatgtctgaacctcaagtgggcctgagtcgtgagagaaaggctttctcatcgatactgtgtggtctgtactgttttgcagaatttctttttaattaatcctttctctttttcacagtgcactggtgattgctgcggtgtttgaccgagacataaactgcagaagagcagcctctgtaagttttctcattttgatatttcctttcctgaaggtggggggtgggcctggtctccctgatgctcctctgtgcactgctgcctggccagctcacccatccacagcaggagccgcgagggagctgctgagagtgccagctgcgggcaggccactggttcttactgtctctgggcgtcttcagcgtgtgaagggcggtcagggttaagcatccccagagctgcagccatcactgctgggggttgatgggtgatggaggcgagtgggaggtgcccgatgacaggtcttggtgcaggcagctgcacgctgaagacgcagaagagagtgggttctgcgagggtggccagaatgtggcggcgggacgggtcactcaccgggtggctttgagcctcgggaggggctgttgcgagcagtggtcagctctgcttcacccgccacactcgcctgggccttgctggatgtgggagctgcctgcaggaccgggtgcgtcttgaacacagatggctggtttcctctagagagagccctgtgacgtttggggtgaattctgggtgtgaggagctgtagcaactgctgctgcgctgagcagactacttcatttggctcagagctgggctggagtgaggcctgtgtctcttgggaccacagagagcggacagttgagacggtggaccagtctcaagataagagtctttatttcagatacagataagacgctgaacacgttttaagagggtaagaacagagaggcagccctttgagaaagatggaggggtgaggttggcttttggtgatggggtgggccccacagttcctcatgggctcgagctgctggaactctgtgtgcaggctcagcatagctggcttagtgggaacctgttgagggagccgttcacactccctgatactgtcagacttgggggccagtggaccaggtggaaggggtgctgggactggtgagggtttcctgtcagccctgcagtgtgtggcccctggtgagtgggaccaggcggaaggggtgctgggaccggtgatggtttcctgtcagccctgcagtgtgtggcccctggtgagtggggccgtgcaggtgcagtgttggttctctctctctctcaaatgcaggagctcagatgataccctgaagtctttctagctcaaaatgtctgtcatcttctatagcttctggtggtctgcctgctctctgtatcctgaagtagttagaagtctttctctgcctcaggtcctttaaaactagagagaattcaccaggagagctcagaagctcttctctgtccctgaagctgctcttattttgtcttcagcatcagtaaaaacctcataattttttggggaaatcatcacatttttgccctgctatttacccaaaggcagtaaatgtaagactttgaaatataatacaattttatgttaaatctgtacttaaattaagcttttagattttctttactgcaacctaagacatttcatgggaagcagtaataaaattaaagtacttaggcttctatgaaccctgaatatgaggtgaaataatataaatcatttttcacattaaaatccctttaaattggcaataaatcttttctgataaataccaccgagtgcacctagcttaccctgtagcttgcaaaattaaaacagccaaaagtaaaagacacctttttgaagcttagttggaaatgtgaggattgagggcctcataattgggaatcattttttggagctgctgctttcagataacgatgtctcggtctttctggctcagcttggcttcctgtttgacgctgtgtcactgggtgaggtcacccctgtgaggccctgaggcctcttcagcaccggccaggaggcagcagcaaaaggcgttgaagtcctgtccctccttggggctggacacggtcccttgcccctgaactctagacgccctgcattgccctggtgctcccatgtcaagactggccgcggtcgtccatcccatggtttgtgaccctcccagcaacgctgtgaggaaggtgctgcagctggttctcagcattggcaggagcatggcgactcaggcagtcagtgtgtgagtgagtttgtgaaaacagttccagctgtgttcgttgctgaatgctggtttttctgcatattggaaggaatctagcagacccccaaacgtgctgacattgcaagaagacatgtctcccggcggggaaggaatgggcagtagagatggggtgtggtcgtggcttcttgttcatcatgaggaagggagatggggccccgttcactcacagttaaagtaaaggcacttaaagcctacatttaactgagaagattttaaatctttttcttccagcatttcgtttgatacatagtgtctgacctctatttgtgactttttattttgggataattgacatttatatgcagttttctcccctcccctcccctcccctcccctcccctcccctcccatcccataccctcccctccccgtccatgccctcccctcccctcccactctgtcacccaggctggagtgcagtggtgcgatcttggcttattgcaacctcggcctcccgggttcaagcagttctcctgcctcagcctcccgagtagctgggattacaggcgtgcaccaccatgcccggctactttttgtatttttagtagagacggggtttcaccatgttggccaggatggtctcgaactcctgacctgaagtgatctgcctgcctcggctcccaaagtgctgggattacagacgtgagccactgtgcctggcggagatttacatggagttttaaagactaatgcagggagagcccatgcgtgtttcaccattgcctccatgataaaatctggcaaaaccgcaatggaacatcacagcctagaacattgagccaacccaccagtcttattccttcttccttggttttacctgtactctgtgtgtgtgtgtgtgtgtgtgtgtgtgtgtgtgtgtgcgcgcgcgcgcacgtgcgctcacgcgtttacttctgtgtgattgtatcacatacaaattcacgtatccaccaccacaatcaggatacacagcagccctgtcttcccgagaggcctgtgctactgctttgcccacagtccctgctgtttccctctcctgacccttggcagccaccggtcggctctccgttgcctattctattctgtcatctcgagaatgctgtgtaaatggactctgtggcctctaatgctgtagctttcttctctcggcacagctctctggagacccaccccgagcgtggtgggtggtgctggtttgctgcttctgttgctgagtggtgccgtggtttgtgtgaccattcatgtattacgacatcaggatggtttctagtctttaagctgctgtaaacattcgtgctcaggttttcgtgtgagtgtaacttccatttctctgggttaaatgccaggagtagtttctgggtcgtggtagttggacatttaaactgctttctagagcagctgcaccattcacgttcgcaccaccacctgcccgcagccctgcctttctctgtcctcgcttgtgtctgacatggccactgttttctgtgtcggcctttttgacaggcatgtggtgatacgtcgttgtggtctttacctgcgtttctgtcatgcctgatggtgtggagcatctttcacgggcttacttgccgtctgtacctcctctttggtgaaatgtctgctcaggtcttttactcatttctaagtggattgttttttgtagttgttgagtttagggcactctttacatatgtaggattctggtcctctgttggatttgcgtttggctttctcccagtctgtagctcatctttccgtcctcttcatagggcaagagtttttaattttttaattttgctggggtctcgatcagttttttgtttttgtggctcatgtttttagtgctttttaagacgtgaagactttcttaaggtctgggaactccacctcgcccggtcccggggatgctgtcccgtgttttctgttctgctggttggtctgcgtgtctgttctgccagcgcacactgtgtgacgggctgtgctgcgatgctgctgtgcatagtcagccttcgcactgggcagggagatgcctcccagcgtcttctttctcaggactgttttccctgttttagggcttgtgcttttccacataaatcttgaatttttaaaacatcttttagataccactggaatggtacatgtcttcctaatagtgtatgttaaattgatgttacagtatatctttgttgcattgccttttggcgggttttgtttcttactttcctaatgaatttatcacaaaagttacaaatttgcaaagcagcagtcaggcctcctcccagcctgctgtgaagcgcctgtttcctccaatctccagcccagcccaggggtctgccttggagccacccgcacgtctggtttctgtgtgattggccagaggcggtgggcgcgtctgctccttttccctggggggtgggggcacagaccctgggtggctgtgttcggctccttacttggtgcccgtctgtgtgtgctcctcccagcagccatcgctcaaccttgctctcaggaagcccccaggcgagtgttggcaggaatcctgccaggcgggaggtcgctcctccagagcgtggtccctgaagccgccagcctccctggcctcgccccttgctggtggtgtgtgtggtgtggccgtgggtgcactttgctgggtcttcctgggacactgaagtctcctgtgtctccagccctgagaactcggagcccgggtgcttttgggaaggacggggcaccagctggtgacacatgggaagggaggtgtggttgtcaccttgcccaggtaacctgctctgcctggtcggtgcgcctaaggggggcagggtgtttggggaggacatgagaggcctcctggaagcacttcatcctgttgaagttcacattttgaccttttcagcagcccttgctctgggcctgtgcccggccctgggactcggcctggagagcctattgacaccgtgccatgggtgcgggcagggcgccctccctggagggcggcacgtggtgccagttggtgaccatgagctgcctcactcctgaggaagagtgttcgggctctgggctttgatttaacctgcctgtctgtctctctgagttgacagccggggcctccgcgtgggtgctgctgggaggctcagtggtaaaggccacttttcaggatgtgtctgattttataaacttgaattcttaaattgtggttttaaagagcaccaggacgtaaaaacagagtgacgcaccttgaggctctgttcagccaacaatgagggcttttatttaaaaaataaagccgtgggtcattcacgttgtgctgtttgttctgaacttgcctctggtgttggcggaagctgacctcgctcacctgctgtgtttgttctttgctccgcaggccgccttccaggagaatgtggggagacaggtatggctgctttcaaacacctttattccaaaaacttcctgcgggtttataggtaggaatcttgagagctataaccctggtgtcttctcgcactgtgagatgtggtgtggctacatcaatgccagggtcatgagttcactataggacgcacatgttaaacagcgagtcctgtttcacagggaacctgcatgtacagtaatttacacacacaggccggaaagctgtgctttacacgttgccaagagccacataatgtggctctgcagggtggggcgggtccctgggaccagcctggccttgcggggacgcagacctgaccccgcctcatcccacacagagcaggagctggctctgttgacgtcagcttgtgcctcatccagaccatagacgggcccagaagtcagctcccagaagctacggaccccatgaccccacgaccccacatcatgctggggctgcttttgctgtgccctctgaccctgacatctggtcactggtcagcttcgcctgtgaatggggggccccaggttactcatgttgtgtgtgatgacgtcacatcttgggcgtgtggttgggtcttgcaggagagtgggacagaggccggagaggggaccggggtctgggctggacctgggcggggagcaaagttcccacgagaagtcagccgagaaggctctggagttcccggacagcaaagcaaatgcagccggggtctgggctgtggccaggtggtgtggggcggcatggggtggacgtgggcctgcggacccttctgacctgtggggagccctccaggcaaggtgtctgacctggagtggaagcattgaggccaaatgagtccacaggaaaagccggatgccagagtcagctggagaggcgggcggacgaggacttgcgcctgttattgaaatggttctggaggagcctggcgtgagtggtgtgggcggctttctgtagacggagcccaggaaggggcgtgactacttcttgctggcccgaggcagccgaggcccacccagcatccttggggtgccgtggggcctgcatgtgttcagagccctgagccctggtcggagccagttcactaggaagagacaccagccttgcaaggggagcctgggtgtgcagacagcaagagccgcccaggccaaggagaatgtgaacgaggtttggtcttttgagtggagagtgtggctgctgtgaggaagaaggagcttgttggaaaccacttagctgagcctagggacttgccagcttcctggaaagtgagagcccaggagaagaagtctccctgtccctgggcttccagcccctccagagcccccactggagaggggcgtgctgaggccagagcccggggtgacgaccgtgctgggtgggccctggggcgcactccgccatcactctgtgttccgggttcccagatgctgcttcctgggaggagcagcccagtcgcatagggagccacggggccctgcagctgagctgaccagcctccctgtgtgtgtggctggatttgagccacgttacctttatcggggcagctcaggttggggattgattgacagggaaaggaaaggcctttacacttggtctaaatttaggcaagcagccagaaaatgggatattcccgtgggtgcgggagtcttgcacctcagtcctgagcctgagcagtgtgagtctcagagcatcctgcacagtgaccagcatgcggacggcagcgggagcctcgtggaagaagcggcacagattttgaagagacacagactttgaaagaaatgcaagacgcgcaggtgcggagcgtctcccagccccgcacggccatgtcctgctgaggttggatagaaacatttgagaagaaggtcgagaacttggcaaggcaaagcaaacgggagtggacgtgtcgcatagcacacagggaagcagcctaaaaaccctcggatttggaggaggctgtttctaatacacagatttggaatgaagttgtaagaaatgcgttacagtggaggccgctgggtaacagcagcagggatggggggtggttggggagcggcctgggggacacagagggggctgggggcagagacgagggaccagcttctctgtccaggttcgtcttggctggagttggagactctggtcctgagtggtctctgccttctccctactgagcccaggggctcttgagcaggttgtgactaacccatgggcagcttccacgttcagggcctgtccgacattccagccctatgaccctgctcctaggcgagtgctgtccaggcccccgacaccatcaggcccttgtggtggcctgtccacacccaggccccccacttcccccctgcacaggtgaggaagttgaggctcagggcagctgagcccgcttttgtctgctcggagcctgttgttccagccctagcctggccagacagagccttggcccctgtgttggtcttgctttgttctcaccgtggggggatgctggacacagagtccccttgttcttgttctcggtgagacctggtcctgggccaccccggatgtttccctgggctcctgcctgctgtgatgtggggcatggagttgtaccccagtgggcgacatcccaggttgtggcacctgctgtctttctgcagagtgagccgcaacagctccacctgggtgcaggtttctcccctgttcacggttcagtgaaggatgctcatgctgtcactgattgcagcagcctcaggcagaagtttatggtatctccatcagcccaagctcccagtgtaacccttgggagagatttgctggaagaaagccgcatggtacctgctcattccggcctctcctggtgggaaggagggatgtggccccgggtgttctcaggagtgctggctgttcagttacgttgacttgcgaagctattacatgaaggtgtgaggttttaatggtcaagtgcagggtggtgatgaatgggttaaagacgtcaaggaaggatctgaatcccggcctcggaggtgggcaggcttgggagacctttgaaaaaccctgctgtggtttatagctgtaaggctttctatgtggggtttaaagtttgtcatttgtattttcttaggaaattatttatgttgtttccagaatttcacatcctggaacctgagagtggtatcagtaacaccatgtaggctgcggggctggagctggggctccactgggaggctgtcgtggcggggtgggaggaggtgccgcctctcccatgtcagagcctcggcggctgctggtcctcgatgcttctggggtcagctgtcaccacccccaagaaccggctgggccagctgcccccagtcaacgtcttgcctgcccgggactgctgagtgaggcctgggctctggtccaggctttgtagaccgtgcaggcggctgcatccccgacctgacccaggcctgctcgctctggtgtgcaccgacctgccagctttgtggcactttgtggcatggggctcaggccgatggaggtcagtggctgtaacactgttgagacccgaagaccgtttacggtgtatgttttcgggaaaggtctcttaccacgtaccgaagtggaaatgtttgagttgtttgaaaaagatgaaatacttgtgagtggtttcaatgatttagcgtggtgttgcctgggtagaccgtcaggaagtcagtgtgacgtggaagtcctcggcgagccatgtctgtggtgtgtggcttgctcaccacctgcctcagggctcggggttcatgagtgtaaatgtctgtggatgtgattattgaacttggtgaaatgcctttgttcattcaaattcttctttttcccccatttccactttcttattagggcactttccctcatggtattgatattttgaccacagctgactattttgccgtcggtaacagatccaactgtttcctggttataaggtaagtctttaatgtatatcacaaaaatagaatactctaaaatcagattggatgtcagaaatcagctaccaccattttcttttttcatcctgtaatgtccactcaatggaatgtagtttttgtgtgaaaaattaaaaatggaattgggaacagtgactgaaacttgtgtttcatgttgattggacacacctcatgctttactacgctagataggggacatttactcacgtgttaaagaggggctcagcttcaggagtgcggccttgccgtgagtgctgtctctgcttatgatttttctcctggtcgccccgttttacccgtgctggttctgtgtggggcttggagtttgagaggaagcagctgcaagcacggccacacctcctcctgatgcttccctactggatgtcctaaatgctttcccaccgtgaaatcttggattagaagggactgtttctttctgtttcggtaataggaagtgttttgagggactgtttctttctgtttcggtaataggaagtgttttgaagttgaagttatctgtagattgtctatgaaatgagtaagaggtattttagaaatcaggttagaaacaaatgtttagcacctctaattgcagtttacagaattatatcaaactgttttagttgtgtaattaggtactggggaggttacttcagttatcttagttgatccattgcagcagaaatgtgaaaaagggtgtgactttatttatttatttttggagacagaatctagctctgttgcccaggctggagtgcagtggggtgtgactttatgaagtgatttatttgccttaaattaggaccagaagcatgcccgatgcatttttaacattaaccattaaataccctaaagatcgattccccaacagccctgctgtgtagaccgtgcagaaaggacgtttctccgtcaccagcctgggcagaattttgaaaatgtagcatttggcctctttcccaggaaggatctttgaacacacttatctgtatttttataccctttcaggtttcctcaacatttaatgtccttttttgccttatcagttctttcctattaatacttggccatatattttatgtggaaaatctactggcccgatgcagtggctcatgcctgtaatcccagcactctgggaggccaagacgggcagatcacctgaggtcaggagttggagaccagcctggtgaaaccccgtgaatactaaaaatacaaaaattagccaggcgtggtggcgggtgcctgtaatcccagctactcaggaggctgaggcaggagaatcacttgagcccgggaagcggaggctgcagtgagccgagatcgtgccactgcactccagcctgggtgacagagtgagactccatctaaagaaaaagacaatctaccaccttttcccgagtttcctgagtaacacacctgacagctatgggaagcttcagcatatttcccttgttgctgaggtttctaagccagcctaaaactcgcatgtaattagctgtgtgcgttttataaaaacatttgccaacccaagacctgggtccaggcatgtcttcccccagtgtgtttggcttcctcacgatgccaggccctgcgtgcagaccagatgccacttgtgaggacgcaccggcaggcaggcccctccaatcctgagggcggcatcacggggacctgcagtcatggctgcaccctagtaccgcggggcccccctgcacccgaggcagggtcctgctgtcagcctggaccttggggtgagggaggcagtggtcctgttcagcagagggcatgggactgagcacagcccatcagggaggagagttagcagggccctgggccctggcggggagctgctgggggcctttgagccatagtgaagagtgtggattgtcctgaggtcatggcactttgatggtcaggtctttgttttgaacatatccctgtggctgtatttggtgactggaaataaggagagggcttgagggctcttgggagacgggagagggctgggggcctggaggtgtgcccgctggaggaaggtgggagttgccagggcattacagagggtctcagagctgtgttggcatcactccgcaggtggagggcacagctgagggcgacagtgtcgttgagtgcgaggaggttggggcctcagcttgcacgtgctggcctgcgaggaagcatcagccgtgctgacacggagatgtttcctctgcaaattggagtttcggacacacagactggaattgaactaacgggcaccccaggaagactgtggggcgagacgaggaggatggggggaccagccgtcgccccactctcctgttcatcatcacagcctcgttggggtgtaaacgacccccagtaagctggtgcatgttcaataggtacatttttgtaaatgttaacatctgtaaattcgtacctatcaccacaatcaagacgagaaaaggcccaggtttcccctttcccattcggggtccctcccctcccacacccccttcttcaggcacccctggtctgttgctctcactgcagctgtgtctgcatttcccaaagctctgtgtgaatgggttcaggcagtgggcactctcctcactcacactggcttcctctgctccatgcttcctgcagactgtccgcctgtggggaccgtcccccgagcctccagggccaggggtgtggtacgtggcgtctgtctccactcacctggtgaggggcttctgggcagtgtcttgtctgggttgtcacaggtgcagctgcggtgaacatgtgtgtacacatctgtctttgggcctgcactcttgttctctggcatagatgcccagagctgggtggctgtgctgtcagttttttttttttttttttttttttccttttgagacagagccttgctctgtcacccaggctggagtgtggtggcgcaatcgcggctccctgcagcctcgacctcttgagttcaagcgatcctcccacctcagcctcccgagtagctgggactacaggcacacgccaccacgcccggctaatttttgtatttttctgtggagatgacaaatcatgttgcccagggtggtcttgaacccctggtctcaagtgatccacctgccttggcctcccaaaatgctggccttgcaggtgtgagccaccacaccctgcctgtagctttttctgaaatggccacatggctttcggcgtgatggtgccacgcgcccccggtgctggatgagctcggggtccgggatctggggtccttgccggcgctgggggtgttggtctttcaagctcggggtccgggatctggggtccgtgctggtgctggggtgttggtctttcaagcttggccattgtcatgggggtgtgggagcagctgactaactcgtgttctagtgactgatgatgcagtttcagtcatcatccatttcaggggcgtgtttaacacatctttcgcccatttacttattaggttagtcgttttcttcctgttgagaatttgagaattcttcatgaattctgcatacaattcctttttcagatgcttccttgctacatatttcctcctgctccgtggctttccctttcagtatcctgtatattcctaagtcaaagcctttttaaaaaaaaatcagctttgggccgggtgcggtggctcacacctgtaatgccagcactttgggagacccaggcaggcagatcacgaggtcaagagatcgagaccatcctggccaacatggtgaaaccccgtctctaccaaaaatgcaaaaattagtcgggcatggtggcgcacccctgtaatcccagctactcgggaggctgaggcaggagaatcacttgatcccgggaggcggaggttacagtgagccgaaatcgcgccactgcactccagcctgggcagcagaatgagactccgtctcaaaaaaaaaaaaaaaaatcagctttatctttgtacatctactttattacatatagtttacatatagtaaaattgccagttttcaatatgggtttaagtgtggcagcgggtttggcagatgtgagctgttgaatgaccaccactgtggtcagtgtggtgcacatgaccctccctccaggaggcgccatcctgactgacctcctgtcgctggggctcccccgttttagaatccgtgcaggtagcttccttcatctgctgcctgcctcatcagctgcctgtgtttcagggttcctcagtggttctcactgtgtggacgccccacatttgaggggctttgagcccccgtgggttttgatgtgagcacacggcacagctctgttctccccggctggttttctgttggagtgagcattgagcccccgtgggttttggtgtgagcacacgtcacggctctgttctccccgatggttttctgtttttcatgagcattgagcccctgtgggttttggtgtgagcacacggcatggctctgggttttggtgtgagcacatggcatggctctgggttttggtgtgagcacacggcatggctctgttctccccggctggttttctggttttcgtgagcattgagcccccgtgggttttggtgggagcacacggcacggctctgggttttggtgggagcacacggcacggctctgggttttggtgggagcacacggcacggctctgggttttggtgggagcacacggcacggctctgggttttggtgggagcacacggcacggctctgggttttggtgggagcacacggcacggctctgggttttggtgggagcacacggcacggctctgggttttggtgggagcacacggcacggctctgggttttggtgggagcacacggctgcttcccacagctctgctgcagaccctggggcttgggccgttggacagctgagcagaggcttcgttttcttttcctatgtgcaggaggctgaacaccgcttcaagtggttgaagtgtgtgtgtattttctgtaaactttttgatgatatttctgctacactattttttttttattgattcagaagaactggtttattttagggaagcctcctgttggtaagatcagttgcggttgttttttccagatttgttgtttgacttttgactttgtttttggtgttttcctggtagactttgttcggcatatgtgttggtagggatcgatttcttctgtggctctgggtttcgagtcataattagaaaggcatatcctacttagagattattgtttaaaagtcttccgtgttgttttcacaagatgtaacttttatttttgagacataatttacacgctttcagctgcccctgtatggagtggacggttgtggaggggctgacagtgtgtccacctgcgtcacctgcatcttccttgggagtggagctcccaccacttccacggccaacactccttccccccagcctgtgtgctgctgccctgccctcgacgcggagcagggctgcccctcggggaaggtcgtatccatggaaccagagggaacacactcctgtgtgtcaggttctttgctcagcgtagtgcgcctggggaccgtccgcagcgcgtgtgtcctcagtgcatgtgtcctccgctagtgtcctcagcgtgtccgcagtgcgcgcgtcctcggctcgtgtcctcagcgcgtgtccgcagtgcgtcctcagcatgtgtcctcagcgcatgtcctcagcgcacgtgtcctcagcgtgcgtgtcctcagcgcgtgtgtcctcagtgcgtgtgtcctccgctcacgtgtcctcagcgcgcacgtcctcagctcgtgtcctcagtgcgtgtccgcagtgcgtcctcagtgcacgtgtcctcagcacgcgtgtcctcagctgcttttcgttggtgagtctttgctcagcatcgtgcgcctggggcccgtcctcagcgtgtgtgtccgcagcgcgtgtgtctgcacctccttttggttggtgagttgtgtgcactgttctgtggctatacagtttttctgtgagtttgcctgacatttaggttattttgaatttttggctctgatgaataaagcagttgtatatatttatttagaaatcatcttcatgtggatgtgtattttcatttctttcagataaagagttagaatttttatatatttaactttatgagaaactgccaaactgttttgcaaagtggctgtataatcttgtactttcaccagaacgtatgcagcctctggttttcccacatctgtgccaacgcttggtatttaccagtcttttaaaatttacccattcgagtgggggtaacgatttaacaattagcattcctggctgaatactgatgttggacatcttttcatgtgtttattggccttttatttattttcttttgtgatgtttatgtacaaattttgtatcaattttttgtttggggtttatctttatatattctgttacaagtcggtttgccttttgattttcttaaaagtttttaacagctttgccgaggtataatgggcatatgttagctgtatatggagtgcagggctttactgaagtgcagctggcacacactaaccagagcgcacagcttcctgtgtgtgacggaggcctgagcacagccatcaccctggagcccccccatgtctgctccttgtaattcccgcctcggtcctcccccaccctgaggcccctgatctgcctctgtgggtgtagatgagttttttgcacgtccttgaattttgtgtgaatgaaacaaagctgtgtgcactcattttgtcagtcttctttggcttagggtagttgagattcagattgtgtgtgttgttgctgagtattcgattgtgtggatcaaccacggtttgttttccccgtggatgatgtcagggtggtttccagatttcgccgttacacatgaagctgtgtgcacgtttgtgtaaagcccgtgtgtgcacagatgctcttttcttttgggtaactgctcaggagggaatggctggatcacgtggtagatttgaagaaatgggcaaactggttttgaaagtaactgtgctgaattcccacccacaggcagtgagttctcgttcttccgcgtctcaccacctctccatgctgtcttttccagtgtgtttattgccggctttcctgagtacacgcagccaatgatagaccacctggttaccatgaagatcagccactgggatgggtaggttttctgtttttgtttttctaagagctttttttccccccaaaggagagattcagttgagcttataagccttgagtgtattttctcactgtggatgtcgtattttaaaataacttctgagaagtaatatgaattccagtcttcatgccggatgtgttgagtcatggtctgtctccagttccacttctggagcgcctggtccagtgtgtccgacgtggcggtgtacccgtgcgaatgtccacgctggcgtgttgtggagtgccgctgccgtccgagggggcgcgggcgtagcttggaggcggactctgcgttgtctccctcagcagtgcttcccgctgactctgctccatgtggctccacaggtggtttctgcgctgtctcctgggagcccagcagttcttagtggccgttttcatcattacagtagcagcttcagggtttccttgcatttcataggcagttaaatgtgtctcagaaaggaaaagtgaagtgcggtctggagcataaacagcgcgttagtgctgtgaccgccgccctgaggaggtcagagggtcccctcctaggacagtgccgtgctgtggcactcctcacggagcctcgaggagcggtaggtgcctgtgggtggaggtggctttgtgagggtgcgagtccagaatctcagtttcagagttggtgtgatgtggagggggtcctttctgatccatgggggatgcgtttgctgctgcctggggagcggcccggctgcctgccgtggtcctgctgcctggggagcggcccggctgcctactgtggtcctgctgcctactattggtcctgcttcctggggagcggcccggctacctgcggtggtcctgctgcctggggagcggcccagctgcctactgtggtcctgcttcctggggagcggcccggctacctgccgtggtcctgctgcctggggagcggcccggctgcctactgtggtccaggcagggccctcaggactgggagcctctgggaaaggaactcctgggtagcactcgggctgccgggggaagaccctcccttcattcgcttacagagaggggtgtgaattcctgagactcggggtgtccctgcaaatgttacaccaaaactctctccattaggtacaaggtcccctaaaccgaacctggggaaaattaattaatttgtcagttgtatcagccgattagtcaataacgtctttaaaaccaaagttacagatatatgcccatagcgtcggagctgtgggactctccagttggtacatatgcccgtggtgtcggagctgtgggactctccagctgttgctgtctgtctctgcctcagttctgtcggcctttccttcacgtgttttgggcggggtcacttattggaggcagatacactttcgctttttgtctcttcctaatgtattgaccctttatctttgcggaacggccctcattgtctcgtgtgagatttcttgccttaaagtaactgatgactggtgtagtacctgagttggcaagccttttctttgaggggctggataaacgtggtagatctctgttccatacgctttgctttagtttattttatttagtttatgtaacccttgaaaaatgtgaaaaccattcttagctgagggccgtccttactcgaagaggcctcgggctgggcttgcggctgcagactgcattgcctccgcttctcaggtgctttgtcttttctgttccctcagagttgcaggcgatggtcttctagacagcatgcagttgggtgtcgctcagggtgtggagtcctggcacatgagacgccacctgcctcgaagagctctttgtttaccgttagaagtggaccctgagcagggccctcggccgacaccagaggggctgtggcaggtggtcctgccagcgcgggcgtctgccattgtgcctggtttcactgtggtgctgtgggtttggtgtttttaaataattagaggacagacacccgccttctgcatgttttcaccttcacattttgcttctttgttgttacatggtcgccctcatgatgattttaagtcaggaccacttgctgctccagctgggtctggaggggctggggcatgagctctgcgggtcgctcccagcttgaccatctgcctctgcatggagctctggaaggaggggtgggctcaggaggggctccagcctcttgagccggtcctgggtcagcctttcgcggtccgcatgttcaaccatgggtgctttcagtgtgtgtctgatgaggcagttattggatatgtgccccagatttggtgggtgagcctcaggaaattccttctgttcaccccttgtaatcgtggaggggtggtttcacgtggctctatctcacactcacaacctcagagtagcgtgggggtggggaggccggacacccaattgccacctggccctgagaaggaaaggcagctgtgtcccaagaagaaccgtggttagccgtgtgacctcgctgttgtagactgtccttgtcgtctgttggagtcggaggttcttgtactggttcgtgtgagtgagtgagtgagcctctgctaagtggccggttgaggactcgtgtgttgtctccctcactttctttttatgaattgaataaagctagaatcataaaatgaaggcacttacgacattctctcctcactctcagggtcatccgagagttggctgcgagggcgctgcacaacctggcccagcaggcacccgagttcagcgccacgcaaggtgggtgtgtgtcccggccggcctgcgggcaccatgcatgcactgcagaaaggcctgggttgctggtttcaaaggctgggggctgaaaataaggttgtgcttctgtcttggtgagaagcatctgaggaaagagctgtggacttgatcagtggataggctgtgaggacggatgcggtgagtgtgtccgcctgcagggcagggagccgctgaactgtgttacgtacaccggagcccgtgatggtcccgccggatgcctgacatgcagtgctgcttccctggtctctaggtggctcgcacctgccacacgacactccctggtctctaggtggctcgcacctgccacacgacactccctggtctctaggtggctcgcacctgccacacgacactccctggtctctaggtggctcgcacctgccacacgacactccctggtctctaggtggctcgcacctgccacacgacactccctggtctctaggtggctcgcacctgccacacgacactccctggtctctaggtggctcgcacctgccacacgacactccctggtctctaggtggctcgcacctgccacacgacactccctggtctctaggtggctcgcacctgccacacgacactccctggtctctggttggcatgcacctgccacacaacactccttggtctctaggtggcttccatctgccacacgacactccctggtctctggttggcatgcacctgccacacgacactccttggtctctaggtggcttgcacctgccacacgacactccttggtctctaggtggcttccatctgccacacgacactccctggtctctaggtggcttgcacctgccacacgacactccttggtctctaggtggcttccatctgccacacgacgctccctggtctctaggtggcttgcacctgccacacgtgaatgcactttggaattgggcagcgtgtatagaaagaaaaggcctgaatgggagactcaaagtctgcccaggactaacatcaccttggaatggctcagctaagtctgcacttcttacacttcatcagtgaagagagaaatcctgtttgttctgtcttgtttttttctacttggaataaataatcatctgacttaaatgtggggaagaatacacacatttctcaatgtgtgtaccgtcactcccccgacatttattacaggggctacactggaggctggattgtggctcttcagtggagttactgatgtgacgcctgtgttgaacatcctgtgggggctcgttcattcctaagggatctttcagcttcgtgatctgttaatgaggcatccacgtcacgggtttagtgtggcgctcccctacttttcagtgataattaacccttgctgacactgagggggctcagctttgtcctccacccggttgaagagcacggacacccagaacaggactgtgaccttttgtagatttctctgattctcgaaaatccgatcacccccagccgccacatcttagcctctctgattctcaaaccatcgcaagcctggcagcacttggggaggcttaggctcggggagcttggtttccccacgcaggtgtggcagagccgcctccctctgcgtccgtgagggttctgaggagtctgtgctttctgagcaaactcagagtagaggcaccacccctgggggcagccctgcctctgtcctgctccgccccctccaccgcccaggcagccaggcagagctcctgccaggaccagaggccaccctacaccgacagggaaggcctggggagtgtgtcgtcctcctccatgctccctctcctgtctgagttacccaccccgtctggggcacttgggagcgggccatgtccagcacaccgcagcctccgtcctgttgcccttggtgtctcaggggccatctgcatcaccacgggtgccgtcctgggcactggggtgatgaccctgagggatgccagtgtgggcgggtgcgtgtgggcgtcccacaggtcgtccgtgtgtgcacgccgtcgcctgccctcccggccctgtgtgggtgcgtgtgggcttcccacaggtcgtccgtgtgtgcacgccgtcgcctgccctcccggccctgtgtgggtgcgtgtgggcttcccacaggtcgtccgtgtgtgcacgccgtcgcctgccctcccggccctgtgtgggtgcgtgtgggcttcccacaggccgtccgtgtgtgcacgccgtcgcctgccctcccggccctgtgtgggtgcgtgtgggcttcccacaggccgtccacatgtacacaccctcacctgccctctcggccctgtctcttgcagtcttcccgaggctgctgtccatgacactgagtccagatcttcacatgaggcatgggtcgattctcgcctgcgcagaagttgcttacgccttgtacaaacttgcagcccaagagaacaggtaggaagagtgggtctcgaggagacacagggctctgtccctgatcccctcaccatgtaatcacagtgctctccagttcgagactctctcatcccttctcatttttgtttatctgcaccagtgtcacagtcgataggccccaggttgtattgatggagtgtgtaagtggccctctctcctgacggtcatgccgtgggtggaccacccacctcttcagcggggcgggtgcagcacccggatgggccgggcatctccccacggctgtcctgcccctgctgcctccttgtgcacctcctggtctcagaggtgacaagcgaggtcataacagcaaaggtcctttttccaagacggcattgagcgacttgcatgttcagtatcctttcttcatcacgttccatagtttaaaatgccagagaatatacacgtttcttttgaatttttcagttggctatgtttgtacaaataataataaagcatgaaaaacatggggtcactgggaagttgtgtgcaggaggctgtaaggcatcgactgtcgtcttacgtttcttcccagtcgagtcttcctcaagagtaagaactcccggacttaccatagtgacggcaacctgcttctcggactccagtttaagaaacgtttttaagttcatgccctgtgctggagacagttccctgggaacgggttgagagcagggtatgggcccacctcccgcccaagcctgaggaagctctggtcggccccgagctcagatgcagagtgcagctccttcagggacgctcgctcgtgtgggtgcagctgatgcccgtgcaagacctggcctttatggcgctgctctgtggttgtggaagaaggcacatggggtggggtctggggagaaccaggcgggagctcccagggtcctccagtcgggtcccacagggcctgtgtcattcccccagcagtgagatgtgaccacacctgtgaggtgtctatcagggaagcacatttgagcctcagtgcccaggctagactggggtctggccacgtgggcacctccgcctggcacgaaacaaaattccagacccccagcaggaaagcaggtgccagcgtaaagcacacggtttgcgcagattgagccagtgagggggcctcatgaggcagggcttggtccaggcccccgcatgccagcccaggtctgatctcgccagggaccttcccttggatgtcagtggacatgagctgtcgtctcagcctcacctggacctgtctgttttccaaggtggtcacattggcaggggtcacagctttaaggggatgccctaacatcctcttcctttgaccaggcactgcttcatctaaaatcacaaatgggccaggcatagtggctcacgcctgtaatcccagctatttaggaggcggaggtggggggattgttagggcccaggagtttgagaccagcctgggcaacatagtgagaccccatctctaaaataacaaaacaatgcaatgtaaaacaatacagtagaatacaaaaataatcggaggtatgtcctgcagaggtctctgggacccactgggacctgaacaagaatgagaccttgctgagcctatgctcctccaagtgtacttggggttagggtcttggggagtgtggcctcagctcctccgagtgtactcggggttagggtcttggggagtgtgacttcagctctgtgtttgaacttctgcaggcccgtcacggaccatctggacgagcaggcagtgcagggcctgaagcagattcaccagcaggtttgtgtgcagcctctgggtgtaccctcaggaggcatcacaggacctgcccccttagggcctcccaccctccccaggcagggtctgcagtcctggtggccactgtgctccatcagtcctgggctcagtgggggacctgcggtgtgatcactctgggaacaggctctccgctggcgtcatgcttgtgaacagccaccttggagggttgccctgggaggggaagagactcctaggaaatgagtgcagactttctgtgcacgtagccagcatgtccttggtctctgaggaaggcttatgaagctagtgcagtcggtggaggtttcggctgcagctggagtgtggtttccctccggggcgcgcggctgcggtcccacgatggagcgtgcagccaactctgggtgggggcattgggccccgtgctctcctggtggagttgggggcacacagaacgagcacagaagcctctggtttccagccgtgcatctgcagctggggtctgatgtctcctgaaagtaaagcagaattttgtgtgtgcgtctgtcggatttctctggggagacagtgtgttcatctttctgggctttgagagattctcaaaggcttctgtgacccagaggtaaagtatgaactatggatcttggtgttacaggagaatataaaaattgttcacgagggattacgtggtttacttgtctgttgtccagatagctttatattctttaagattcagctcggattcttatcctatttttgccattaactttcattatgattttggcaaagccattttgtttgcttacatttttcacttttaatgtggtgtctggcctccccctctgaccgagacaagcatggctgcagagtgcagacggggaggtggccccgggcagcagccatgaacgtggcctccccactgacgctgagccatggctcccttttttcagtaaaatataagcagtaatagagccgatctccttgagtttttgtgagaattaaagaatacattttaaagaattgaggagaatttttggcacagtgtgagcattcagtaaattttagttgtagtggccatcacaacgtggcttttaagctctcttacaaaaaaagaaacatcagcatcctgtttggcacagttacttttctgcacaagaggctgcctgggtgggttctacgtcggtctctggggccagaatgcaggtggctccagctccctactctggccctctcctccctctctctgtgcctcagtttccccttcaagggagctctgggcctgtctggaggttaaacaaggccatctgcgtcagtaggtgggcctccgtcctcagccccctaggcggctctcctggctggcatggcatcttctgccattttctctttgttcttgtttttgacagttgttaacgtatacgtattattttaaaatttaaatcattaaataactttcagttttttattttcagctctatgatcgtcagttatacaggtgagctttacaaaaccaaagttcttatatctgtgtcctaatgaagaactgcgctgtcaggagcaggcggggcgggtgtgttcgcttccctctctgcatatgtgtgtttgggttgagcgggtgggtgtcacccggcccgctgtgggaggtgcatgagggtctgacctggttgtgtgattgggttgagtgggtgtcacctggccactgtgggaggtgcatgagggtctgacctggttgtgtgtttgggttgagcgggtgggtgtcacccggcccgctgtgggaggcgcatgagggtctgacctggttgtgtgattgggttgagtgggtgtcacccggcccgctgtgggaggcgcgtgagggtctgacctggttgtgtgattgggttgagcgggtgtcacccggcccgctgtgggaggcgcgtgaggttctgacctggttaggttttcagctctgcaggtgtcatcgcgtttcctcgttcccaggacttgctggtcataggcaggggtgtggcctccccaaccccgagatctggccgggtgcctccctgagggtttccctctgtgcctttgcagcccaggcagcctgtctgctctgacagattgctttgctttttctagaatttgctaccgagggtgtcacacagtaggaagcctttgggtgtggtttcttccccgacgtgtctttgagatacctgtgttgctgtgtgttccgtggtgtgcatgtacggcgccgtgttatccactcaccagcccaggctcatctgggtttccagcctttggctattgtagggaagctgctgtgcacatctagacgtacaagtcttggtacgtttcacgtttcctggctgactaccaggagcagcatcgcagggtgtggggcacatgtgtgacttctcagcagccgagccaacttcccagaccctgctgctgcacgtccccatccacaagtgaccccttggtgtggtcggctctgaacgtgggccctctgggtgagtagaggcctctcgctgctgctggagtctgcctctccccagggctcctggtgctgagcctctttccctgtgctgacgaagcattcctgggtctttcgtgaagttttttgctcattaaaaagttcagactttttgctcattaaaaattttatcgtctgtcttattgagctgttagaactcttcatatattccagatgccagctctttgtcacacacaggatctgccagtgctttctccagctctgtggttcacttttcttttctcttagtgactttttttttttggagaagcagtctcactctgtcgcccaggctggagtgcagtggcagcatgtcggctcactgcaagctcacctcccacgttcaagcgactctcctgtctcagcctcccgggtagctgggactacaggtgccccccatcatgcccacctaatttttgtatttttaggagagacggggtttcaccatgttggccaggctggtcttgcactcctgacctgaagcgatccgcccgcctcggccttccacagtgctgggattacaggctgagccaccgcgcccagcctcctagtggctttttactgggacttgtgtggggtagtgaacctcgtgctgttctcctttaccttcgaggggtgaagcctccctttctgcctcctagtccttccaggctgctcccaagaggtcccttggctgctcccaccagtttctggccacctcctcagtcagcagggcgggtggccctgtttgggctccaccccacacactgggcctggagggctccttcaggtgctccttggggtactggaggacccctgccttgggcctcagtcctgtactcttcacctcctggtgttggagccagcatttcatatgttgcattctgtccagttttctacttgcaggaggggacatccaaccctgccactctgtgtgggccagaaaccagggtctcaggagtgaatattttgccctccccagggcagcgcgcctgcccttgtgcaccagggtcccgctgtcagcgccagggctggggcaggtgtcccagatgggcagagcagcccggagctccgcctagcttcgctcatggtagaaccgcagtgcactgcttctctaggctggatagggggctctttctggcatctgagattagtttctataaagtaagagctgagcgctgcttggaattagttctgtgatgggataccagtcaggactagaatgtccagtaaaaattaaaaatcagcatcaccccagctaggatgggagacctctggaagatggctgtaccacgttttttcctttcttttcataaaaggttgctcatgctcagtaacacattcaactagttctcattttaatgctttttggagcctgaggttacattggcaagcatatttcatggtgttttatacgtcaagaggttcttctaattctgatgttttcattccttttcaggggtctgggaggacagctcatgagacaagcaggtaagtctgaaggcctttgcagccctctgcagccctttgccgcagccatcgttgagggaggtgtgctcgtggcgtgcagggcggcccattagcccccagggtgaagggctgggtgtgtttcttctgtggaggcggcatctgtgatgtgcttggtttgtccagtggttcctacgagggagagattgagagattgagattgagagagagaaagaggaagttgtgagctgggaggggttgcacccaggagccactggttctggaaatttctcaggaagcagaggcagctggggcagtggggccagtgcttgcctgtggacccagtggacattgcagatccctccgagcacggccccagcgtggacagagcagccctggtcgtgccctgtggactgagcagcgcagggaccaagagccgttttgggcgagcacaggaagctcaggcgggggcaagaggaaagctgagcagaggcgaagctccttacacacccgagtccaggcgaacctctgcgcctgattcccaagcctctgataccccccgggggttaggacagtcgggcattttttctttgctgattcttttttagcatgtgaggaggagggaagcgtagaacacattttagactgttccacagagtattaaaggaaaagcctgatttcatagacattcctgatggcagcagccgaccccaaggtccagggagctggattccccgacacagctcctggggccctgctgttgtggacagcccatcccacgccaccctcagcccctcgctgtgggactgtgagtgtgagtgtggaggcacagctggtgaggaagcttggaaaaatcgcggttgtgtgcagacttttgctgaggtctgcgtggtctgagcagaggagagcaggctgggattcggggaacccacggccggatgtcagggctgtaccagcctcttgtgctttctgtccacacctcccagccctgacctgatagggacctgcccgaggcctgcagccatctatctccagccaggctggccgggcttctgtactgagagcagccagcttgcatttctgctggtgttagctcagtgttctcatgagtctgatggacgtcacgggaaagtcaatcctagaaacgtgagccagtttctgtcagctgacgtcagaggcatgggactgccagttctgcaggtggtccctgttggctaagaccggtgtgtcatgttttggatgtagacttggtcattgtccctcagatgcctccagagcacacggtgcaggggtgtcacctttccgacgtacccatgggtgcccggagttgcctccttagtgggatcaagaccatcccccacatgtcatggacagctggtgacctgtaagccgtttctggatctaggagtttggcttgggatggagtggggtgtcgagtgctctcagaagggttcaatgtcccccacttcccacccacgacacgggtcgtgccctggagatggcagttggaggcagtcctacgaccttcacacgaccttcacgtgctccccgtgtgctgcggggtctgcttttagggtcgctcttggtgtttgagcagtaagtctgcacaggagccactgcccaccatgaaaggggggagttaaaggcgttccgaatccctttggccaacgacggagttgaaggtgttccgagtccccgtggccggcggcgacagagttgaaggcgtttggagtccccgtggctggcggtgatggagttgaaggcgttccgaatccccgtggccggtggtgacggagttgaaggcgttccgagtccctgtagctggcggcgatggagttgaatgcgttccgagtccccaggacgccattttggctgaatttcctttaccctcctgctccgtgaagcggggcccattggggaggtgctgctctgtaatctgctcttcttcttgaatgtgtggttagggcagccacattgatgtcccccaggctccagagtgaccgccccttaggggtcctgctgggcgttggccgctgttggccgcagggcaccgttggcctgtgcattgctgccacctacccatgatgggcagaattgtcacgagctcaggaggaaaccatggaaaaaccgcaggtcctggagcctccgtgtggttgtcgtgggcagctttccacgcgacgtgccctccctgggcgtgaggctgcatttgcacttagcggggagagggggaatgttgtgggttctagttgggctttttgatgatgatatttggaaagacttgagacaaagtagccaccctgtcctgtcccttcctcacccaccacacccactgctccccgctggcaggcactgcaggctgcacaagtaaccgtggaacctaaacactgatgtgcttcgtccgggttttaaaaaggcgcccttaccgcggtttcggtgtttggcgtcttcacgccatccgggttctcggtgctctgctctgaaggatggtggagggctgtggtctgttgttgggggtgctgggtgcagggtggtttctgtctgcctctctctacccccaactccagctttcccaccctgccctctgctctggggcacgtgtgctgttgggatgcatccctcagggttcacggcagggtgtggattgctggggggcatcgtggagaagggcatctttatgggaggcatccctgctctgggccccctgccggcctccagctgtgtctgcaccatgagtgtgtttgctggagtgcggtgtttgcactccctcacaccgctgagtgcaaacgcggcactcctgcacatgtcgcctcgcaccgtggcgggcgtgtcccgtggaaagctgcccatgctgcccacgccctccctgggggccccttggctgcctgcactccccagccgtgacctcagctcccggcgccggccctccttgtgcagctccttcccctccatggcctttgctggccccaggagactctggcctgcaggctctgaagccggctgtgtccctggtgatcctgactgagccttggtgtcaactcaggtttttttctcctcctcgttcatttttacacttcgtaggaaattattttccctttcagctttcaagtaggaatagttcagaaggggaaatagttctgcatagcgtctgtggtcttggccccgcatctcccagtcccacatttttatttttccaaaggcaaccctttcagttttttagctgtctgttttccttgcttctgtatttctgagttctgtatgtacgcagctgtttcctgatatccttagttttagatgtgttctttcaagtgagacaagactccaagctcttgtcggggtgagaaatctgcgggttcacgggctacatgtgggagacggggaggggctgctggtcactttctcacccaggccagaggatggcgcccttacccccgaggacgccggcatgtcggtgacatgccgcccgcaggagcatcaggtgcgccctggccgcaggtgccccggaggtgtcgaaccgcagatttcttcagacgttttttgcacattttgtgggaaaagtggctcaacccttgggagtcgtctgcgtccccatatcaaagaaatgtcatacaggttggcctttgtcgtgaatattcacgagaggagatgaacatcctggatgtcctcagcgtggcctgaactgagctgcttcccccggtgccaggaagatgagcgtccccttgtctccgtcttagtctcagtggctcttgcatttcatgctttagaatcaaaggaaagaaacaggaactctgtttagtgaagcagcgatgaaggaggggtttgtcagtcagggtggactgcgttttgctcttgaaacaatccccaagtttcagtgtcttaaaaccacaggtgtttttttatcctgctcacatgtggatcaccgagggcaggggccgggaggaagggggtcatctggctcacagccttgcaccagaggcgtcacgagaatcaggaaaagttctcctctcatgccgaagacgggagggaaaccagagggactggtgagccttgagtcggccacaggtgtgtggaggatcgtgacttagcaagccggggacacgctgttaatggacttcctgctgtgggggtgagggctccgtgctccatctctgatgccctgtacacacctgccacctcccctgtcccctcagcagagacatggccggtgctgtcgtgcctttcgcttttacctgtatcttaaatcacacaggagttcattcggatttacctgtacagataccctgttctctttcttgttccgtgggaattcactgggatttacccacacagccacctgctgcttctccttcttgttctgtcctgcatttctcaccttctaagaggaccattttctctttgcctggagaacactctagtgttttccatagtgtgtgtctgctggtggcaccctctcgtttgtttatcccaaaatggctttttccactttttttttttgagacggagtctcattcactcttgttgctcaggctggagtcacagtggcgcgatctcggctcactgcagcctccatctcccaggttcaagtgtttctcccgcctcagcctcccgagtagctgggattacaggcatgcgccaccgtggcaggctaattgttgtatttttagtggagatggggttccaccatgtgggccaggctggtcttgaactcctgacctcaggtgatccacccacctcggcctcccaaaggtgctgtttttttttttttccccactttgattcttaaaggttatttttgctaagaatgaaactttagtttgcatttattcattcgtttgtgttttggcactttaaagataatagtctcttgtcttctggagaggttagctgccagtctacttattactgtattggagacaatcttttaagtttcgctggcttcttttgagatttttatctttatttggttttcagcacttttaccgtgatattcctagaacaagttccctttgtgtttatctgacttggggctctagggttcatacttgttccataatctgtattttctgtcgatgttttgttcactttagaaaaattcctagccatgatctctttgaacattgctcactggcctctcctctccttttgggactcttattacccacgtcttgtctggatcaccgcacttaattctttacgcctccttacactccctcctctggttttgtcttattcagtttggacttttttttttcttttcttttcttttttttttttttgagttggagtcttgctctgtcaccaggctggagtgcggtggcacaatctcagctcactgcaacctccgcctcccgggattaagcgattttcctgcttcagcctcctgagtagctgggactacaggcatgcgccaccacacccagctaatttttgtattttttgtagagatggggtttcaccacgttggccaggctggtctcgatctcttgaccttgtgatctgctcaccttggcctcccaaagtgctgggattacaggaacattttctttgatttaaatttcattgtcacaaattctttcaggtgtgccttatctgccgttaaacgcatccttgaatttttttatttttcagaacttattttttatagttttcatttttttcacatcctggaacatattaagcatggtttaaaatctttgtttaatgtcatcatctggagcctctgtggctgtttctgaaggacggtatatcatacatgaaaagcatctccaccaagctgcaggaacaagacatgacagaaatgctttgaggtctgcaatgttctcctctcccagagagacttgatgttggctcttgacgggaggcgggtgcttgctgtcggggtcacctccattgggttttgggacgtaggaggggtccgtgctgggctggcccacgttttacacctatttctaggtgtggtcctctgggttcagagcctgtggtgagggctctaccgcttctccctttggtcatcctggactcccgttctcctgctagctggagatgctcctggatgcactgttgggggtttctggttcttgtggcgccccctggagtcagccgtgagccggggagagttggcccccgccgctctgtccctctcaggtcttcgtgagctctctggtaactgcaggcacttcctgtgtgttttcattttgtctggcttttaaaaatgtcttagtggagggttggtctgcgttatctagtctgttagtttttaaaaaatattcttcatttcgaaataattatagacttacaggaagttatgagattagtaatagagcctggctgtgcttcccatgcttcctccgcggtgactccgggtatgacagtgttggagccgggactgcggtgtcgaggccctgcctctaactggactgcaggcctgtgcggtttcgtggcttcatgtgtgtgtggagtggccatgtgtgtctagtttcgtgcagattgatgccctgtgtagatttctgtaactaactccacactcaaatcagaaacctgcgtccttcccacagagacagcccctgccctttgcattctcaccctgcccccctgccaccagtctgtcccttctagaatatgccatgatcgactcgtatggttgtggcatttcgaggtgggcattttctgtgagcgtggtgccgagaccccatccagctgtccatgtgttcacagtttgtgccttcctagcccacggttgggttttaccagagtgtgttcgaccagcactcagtaaagtacactggggctatttctatctgttgctgttgtgaacaaggttgccaggaatattcctgtgcgagatgtgggtacaagccttttcatgtctaccactgagtcccgtgtgccgtttcgtgagaggctgaggcaccgcttcattccaccgctgagccccgcgtgccgtttcgtgagaggctgaggcaccgctgagccgcgcgtgccgtttttaacttgattataaaatacatttaaagttcacatgcaggtgcatctccaagaaaattattttaaaaactagttaagactttcatttcccagtcctcaacacacatcagagcagtactctgttcagagctgaaaggattcgcgctgggacaaaggcgtgtcacttgagtgagtgatggtgtcacaggtgcccacgtggaagaaggtaaagtcgtatctaaaactaaatgtgagagtaactaaaaacttacgcataaaaactaccatcataaaaatcctcgaagaaattttaggagacgttgtaggacagtgtcagtctctgaagaaaacttcttagtttagaaattttcaaatctgcgcagaagtaaagagaagtagtttacgggggggcccagagtctcgcccggcgcttcctttctcctcccctcctctgagtttaaagaagaccctgaatgtcaggtcccagcagcccctcgctgggtttttctaacttgtggtaagaactggttttctggggttttttgtttctttttgtttcccccctcttggcatgtaatccccagctaacagattttataataataattccacaaggtagaaacaaaaggagataattatgttgggccttatattgaagaatagaccatgtgtaggttggtagggaaaacggagattgagaataaacgtctgttctacagtcgaaaaggtaaaaagttaattagtgtacaaagactaaattgtaaaactgcctgtgacgaggtaaaggatccagtatgaaatggggcagagcagacgtgtgggcatttcaagcagaagaggagcagactcacgtggccgtggacggtgagggtgccggcctcacctcggaggcatggaagtaccaggttacttcacatcgagaggaccgttttcctctttccagtcggctgtggttggcactgaagaatcttggtgctgacagacacagagcagggtctctcgtggaacaggagttgtctggtctgttcagtttgatgagtggcagtatctgtgacgatgggaagtgtgtgtgtggtccctgtcctgtgtgcagggacgccaggtggaccgacggcctccgcatctgtagcacggtcaggcctccttgttcacggtgacaaaaaatggaaggagagtttagtccctcaggagaaatagcaaataccatgaacaagtgtgcagcaggcgtctgcgagtgggttccgttgttaggtagagacggtgggagctagagcagtgtgtggccgtgggagctgctgatgctgtccagtcgtctctgtctcgtgcgtcctggccccctcgtggctggtcagggccacgtttctggtcatggagagtgtgagtgacgagctatgtggggaagtgacaggcatgacctgtggtctggagcattgcaggtgatggctgtctgtcgcttgggtcctgagtgacaggtctaggagcagaagccgctatgcttcccgtacagcctgtcacagggacgtctgcagctccctgacaggccggcccggcttctctgaagtgcacgtgggctcacacatgggccttctgccacgtggctgggtctgcagcactttcttcaggctgctcagcggaggaggcgtcttgggcttctcatggtggttctgaaatggttctgggatgtttccagccctggcagcagggtaggttgggcgggtgaggggcaggagctggccgcacacaactcagaatgtggcaaaggcaagccgctgtggcaggcgcttttggaaaagtaacattgcgtctatccttttttttttttttttccagtgtgtgttttaatagaaaagttgtcactttccaaaatgccctttagaggtgacaccgtaattggtaagtgcttttgtttttaataatagcattttcttacagaatgacttcagattaaaaggtaaaaatgaacctgttaggatgggggcgataaacgattatagcttaaaggttcaagatattaatcggatacgttgccttgaagttgttacaagaacctgcttaaataatgggtacccaccgccctctccccccaacacaggagggcccttccccgccgtcacctcagtacccccacctcctcgcttccatgcccagggcccggcactctgggtcagttcttctcccaggcagacagtcgggagctgcagccacccaggccctcgtggaccaggagcgtgccggccgccgacaccacggaccctgtgggcagaggcggctccagttcctcagcagccccccacactgggctgccagagcacagtgaagggagcccccagggctgtggtgtcccggggctgtctcagcagcctcagaagttaggactttttttttgttaattgaatagccttcacatttgttgcttgtgcaggatctaattgagttaaagatttgggtttatattggtgggagccgggggagaccgtttgaaggaaaagatttaggggtaacaaaagaataaaagtttcccaaaatgtgatgtataaaaatttacagaatgctggtatttccctcaataagagcttacacaatttaacagccatgagaggaaggggccttagacttaacacaacgtggagaatgttcactttggcttttccacagattcctctcaaaggttaccatcgactttaagattagtattaatagaagctgtttttgctgttgtttttgatttcatggtgtttttgattgcctgggtacgctaacttgattttttgacagatggttggcaatggctgataaatgacactttgagacatctccatctcatctcaagtcactcccgccagcagatgaaggtacagtgagcatgggcgttcccggccggcgctgtggcggtgttagtgtgttagtcacggatggtgtttgtgttggcgactgtgcatcatgaggctgtccctgcagtagcctgataactgacaaatgggggcataattctatttggaatcccggatggtagcgtctacacggtttataaccagaaaatccaatacagccattggaatccgaatgtttaattttttattgcttctggctgttttaattatagttacctttgaaatactttttctgcatcaatagtaactgtgctctgttgagttccgtgtcctgtaggatctgaggtttggaaactccctttatgatgctcctgtgcagatgagaaaacagcaccccaggacctctgctcgcacacattgacctggtcatgttgtgtgggtgccagtgtgtgtgtgtgtccccggccacctgccctcccctcccgtcctgggggttacaggtggactttggactcacagagctgtaacgctgatctcattgcatagataagaaaccatgggcccggcgcagtggcgggtggatcacttgaggtcaggagttcgaggccagcctggccaacatggtgaaaccccatctctactaaaaatacaaaaattagcggggcgaggtggcgcgtgcctgtaatcccagctactcaagaggctgaggcaggagaattgcttgaacttgggaggcgaaggttgcagtgaaccgagatcacgccattgcactccagcctgggtgacaagagcaagaccctgcctcaaaaacaaaaacaaaaacaaaaacaaaaaaaaccatggttaccaacgttgactaggttttgatattgaggatgaagaatggaagtacatttaggtgtcttgtaattctctgacttcctccatgcttagcatttctttttccttagcatcttcaattttcttattttttttttcttaaggaacttgaacattctgtaggatccaagtaccgttctactaattgaatttgaatgcatcatgatcagtgcctcaaaattttatttcaaaagtccatgattaattcacactggccatgatgctggtgcactttgcccctgggattggcacaggtggtgactcgtggaatgcagcaccctgtagacgacgcacctcctctgctcatggcccccacctgccccgcccccagtgcctctccaaggctgctctgttggcctcggctcctgggcttcgggggagcggtggaaagaacacgtgggtttggtgtttgccacttgctggctgtgtggtcacgagaggctcctccgtaggtggcagaggtgggggttcgaggagacagtggcactgagccccgcacgcggcgggactggtgactctctgcccgctcctgctctgtgcagcaattgccgtccctcccaccacggttcctggtggccttgggatgggttcccgggggtctcctgctgtccggccccaactcctgttcccagtgcgcccccggagccctgtctctctaaatgaggctgacgtggcttggcctgaaggccctgccccgttactctgggtgcatagtgtatgcctttttcttcataactatttctgggaaagaaaaatatgctccattttattattgttccatattagaagacagacattgtggaaggaataatcaggttatccattcagtttcttagttgtagtggtagtaaagtgatgcgtgtatctgacagatgatggtgagcaggcgtgctggaaaggagtagcatgacttaggggttcttttggtttggttcgaaagtcattgctgtgccgagatctcagggtgacccgctgtgtccctggtcaggtccttctctgacctcaagggtgacctgctgtgtccttggccgggtgcttctccaacctcagggcgacccgctgggtccctggtcaggcaggggctgctctgacctcagggtgaccacggtgtccctggtcaggtgcttctccgacttcagagtgacctgctctgtccctggccgggggcttctccgagcagagctgctgtgcgctcaccgtgctgcctttgttttaggatgcagcagtctcggccctggctgctctatgcagtgaatattacatgaaggagccgggggaggcagatcccgcaattcagggtgagtggggagcccttttcttgaagactccaggggcttccagcaggaagctgctggggagtgtctgggcacggaggaggcctcggttgtgcagtggagcagagccaccacgatcatggctggagtgggactgttcgggtctcaggttcccagccgaggagctgtgggcaggtcctgcagctgcccaggatgttgcatcagctctgaacaggtggctcagcagggacgcgtctctgttgacggcaccctcttgctccatcacccaggctggagtggtgtggcgtgattcggctcactgcaacctctgcctcctgagttcaagcaattcttgtgcctcagcctcctgagtaggtgggactacaggtgcctgccaccatacccggctaatttttgtatttttagtagagacggggttttactgcattggccaggctggaatcgaactcctgacctcaggtgatccacctgcctcagcctcccaaagttctgggattacaggtgtgagccactgcactcggtcagtgtttttagaatttttgtatgcaccgtgacatttttctgctgtgtgtttcactcgttaatacattttgctgttttttccttctttatgaaagtagcattaggctggctttacgccgtgtcccgtgcgtagctgctgtgccgcctcactgtacatcctgcacccccgtgctgaagttcaggcttgcttctcgcacatcatgttcgagggatctgcttcatgaatcgtacttttatttttaaagtgtcacatgcacatatgttggcccacagtgttcctttatgtcatatgatagaacatgcattattaatcacgtcaaaagtgtgtgaatcaccacttaaaattattataagtatataaaaatcatgcattagcttggcatggtggcacacacctgtaatcccagctacttgggaggctgagtgtggggttgaggctgcagcgagctaagcttgcaccacggcactccagcctgggtgacagaatgagactctctcaaaaaaaaaattctctttctgattcctattttgaggtaggccactttggaaacgtgtctgctttgggaacctcaggcggctcctcctttgttcactgtggctttgctcctgtttggggcacacgtcgggtgtggctgtacacgatgggcagcagagggcctctcttcacactcgttgcttcctttcagaggagctgatcacgcagtacctggctgagcttcggaaccccgaggagatgactcgctgtggcttctcgttggccttgggcgcccttccaggcttccttctgaaaggccggctccagcaggtgaggctggccacgcgcagtggacggggcctagggcgagggtgtgggagcctcgtgtgttggggcatgaggtaggcccagccgttaataaacccatcagtgcttgtagctgggagggggttcctggaaaccggcacctgtggccaggaggaagggggcagagggcacccaaggtctgtggccccttagggccctggcgaaccctttgctgtcagaggacagacttgaaaaagctgaattctgggagggaggagaaggtgttgtttgtagaagcagctgccgagagtgaggagaacacagttgcctttgtgcgttgtggagccgggtcctgttttggttgcggccgtgcatcctgcatccaggtcggggcagaggtggttccacgtcctcccagaggtcagccccacgctggcctcagtgacctgctctctcacgctttcctgtggtgctggtcccactgaccaacctgccgggaactcctgcttgtctcccctccggccacctggcgtctgaagctggaataggccctggccactgggttccccacgcccttccctccccatgggatccagccttggcacttcaggatctgcagctccagacggactcctgcctgtgtggcgggtgggcctcgcagccgccatgccatctaaaactcgcatgtgggggtttatccagttgaaacacagataaatgtgaaacaggatcacttggagatatgacagatgaggttgtcgggacccagcagcttcctttgtcaataccccaggtctcagcgtaggacaaaagggggggacctcaggtagggtgtggccagacccccagtgacaccctggggtgggggctggccgtggagaggctggaggtgacctctccccgggtgtccttcctgggttgtaccgggggccgtggagaggctggaggtgactcctccccgggtgtccttcctgggttgtactgggggccgtggagaggctggaggtgacctctccccgggtgtccttcctgggttgtaccaggggccatggatggccgtgaggaaggtggtgccaggagctgcctatctcatggtgtggggtctgtggctccgggccaacattgccacctccctaaagagtgcactttgttatagcttatggttcttctgtgattctttattgctttccaggttctcacaggtttaagagcagttacccacacttcccccgaggacgtaagttttgctgagtccaggagagacggcttgaaggccattgcgaggtgagtcccaacagttcctccctaaagtcgtaagtctctgaaaggccagcagatgaacgctaagggggatgtttttgctcagaggcaggacttatgattcttcacttcctaggtttcctctcttccagaggatcgtcagtcccagctgctggaggctctttcattctcttgctgtcatagtcgtagtgaatgttaaacttctttagggacactgggccccttggagaattggagaatgtgtcctggcccaaggttggcaaagaggagctgaccctgccagccagtgtttggaatgatctctgcactcgttgacagacacgcacctggggccacgccatatgccctctcctccctgcaggcacacaagaggagcagtcccgcgggggccacgcacgcccccttctctcctatgccagcatccgttccctctagtcagggtgggaagtgggagggaccagccgcagggggcgtccccatccacctttcaaccggagagacggcagagcgtgacctcggggaagcacgtcccacgttccatacatgtggaaggagctctgtgtttctgatctacccgagggtcctggactgttctgagcgtgtcttctcaggatcaggaacacacatcagccctctgcgatgtggaagatgaggctcaccgatgtttgtttgttagctcacacattttaaatttcaggatttgccagactgttggtgtgaaagcaggagccccagacgaagctgtgtgcggagagaatgtttcccagatttactgtgcgctgctgggctgcatggacgactacaccacggacagcagaggggacgtgggcacctggtacgtacgtagcagtgggtgagcgcttcttctgagaagcccatctattccgtggaaactcggaggccccgggcttttctgcagggagaaatctttgtagatttgtgccgtgttttgcgttttaaaggctctggggaagatgacctgttctctgctcccgggtgagcctgcgtggcagggctttgcaggtgcttgtccagcccgtcctcaggtgttgggcctgtgtcgtcctcgttgacagggtgtgagggaggacgcgtcttcaatgaaaggctgccggctgcttacattgggttttgccaacatttcttgctgtagtgggattgataacccctgaaacgcctgtgtgtgtaggatgcctcggggccccggtgtgtgtggctgtgggtggctccctgcacacgtccctgtagcgcacagggaacctctgcaggccccgtgactccctggcagcgtgcctgggctctgtgtggggttagtcacgggtgtcgaattcacacaggctgccggcgtggtgggcagaaccagggttggaacccccctctcaagctgggtgtctctgcctctccttgtcccatcagggtccgcaaggccgccatgaccagtctgatggatctgacacttctgctggctcggagccagcctgagctgatcgaggcccatacgtgagtgtcacgtcgcagctcttctgcatcctagagggcagccccgagcttggggaggctggcggggcgggcggtcctggtgctcagtggcatttgcactgctgggcacacaccctcctcccagagagcctctctggtccctgaccccaggtttgtgcaggcccctcctcctgcccccatagccatggcgtgagctggggcccatcctcctctgcccagtgcccccaggacgaggctctgctccccagcctgggcctccaacggtgctctggccagtttgatgacagccagcttcccggggtagggccgggcaggaggtggggacttctcagcttaggaccctgaacctgggggtctgctcctgccaggaccagctgagccatcactcagttccctgcacctgaggctgccattggggcctgcccttgctgtgtgtctctgtcgggggcactgggttgtgggtacccccaggccctgccctttctgtcggtctctctgtcgggggcactgagtcatggaggtccaggccctgcccttgcggatctctgtcaggggcactcagtcagggggtccaggccctgcccttgcgggtctctgtcgggggcactgagtcatgggggtccaggccctgcccttgctgtcagtctctctgtcagggacacttggccgtggggatcccagggcctgatttccttagttctcacctctttctctttccccctccccatctcttccccagccccagcttctctctccccatccccggcctctctgtccccatcactcttctccacccgctcctgtaatcctatttgttgtccctgcttcaaccctaagacctcatcagcacgcatgtaacacgtagcacatgtgtaacaagtacgtagcatgtatttgctgcgcacctgtagggttgggctcctgggatgtgaaggtaacggagtgtggttcttccgagccagtgtcctggtgtcagctgccaactcagccaccatgtcccgaggagcccgcatgtcctcgtggtgcttgggctggagtcacggctcggaccgcctgtgctcagtttaccgcccgctcttaatttaccgcccgcccttggtttacctcctgctctcggtttgcagctgtgagcgcatcatgtgctgtgtggcccagcaggccagtgagaagattgaccgtttccgtgctcacgccgccagcgtgttcctgacgctcctgcactttgacagccctcccatcccccacgtgccccaccgaggagaactggaaaagctgtttcccaggtactgtcggggtgtaggccccccgtgctggccccgcagccatggcgagatcattggcagcccggccttgtctcactcactctcttgcaggtccgatgtggcctccgtgaactggagtgcaccttcccaggccttcccacgcatcacccagctccttgggctgcccacctaccgctaccacgtcctgctggggctagtcgtgtccctgggcggcttgacggagtcgacggtgaggaggcgtcgggctggctggggcaggaggtggctccaggagtgcctggtgcttccctgtctcttgggagcgtgtatggagctgggccttttcttccattgctttctatctctctcgggcatatttggttagggggtcaggggcccagtgtcttcctcatgacccaggaggcttagggcctgtgggatggttgagtctgatgaaggtgggacagggccagcgccactctcttcctgcggccgcagccttggagctcccagcgtcccctcggggttcaatcctccaggacctgtgtctgatgcctgcatgtgggtacctgggctccatcaggttctagatcggcctccgccctccactttcagggctccaggcccagcttctcatgtctgtggggagggtctccagagccttggtctgtggctgagctgtggaacttgaaggcctctctgcatcttgtcactcgtggcccctgcaccttgggtcatgacctgctttatgtggcaaccctgtgacagctgctaagtcctagaaaacacgtaacaggacgtgaggtgccctctgcgccgtgtgggcgcgtgcggggagacccgggccccaggacgtgaggtgccctctgcgccgtgcgggcgcgtgcggggagacccgggccacatgcgagcggggccccgagacattctgcactcgggaattgcggggattatcaaatcccgcttcagtgggaaacgtgagcgaaacccaaggtgagtggccgcagcctttcgtcacgtgctctcccgcatgtcctgagtgagggctcaggctgagctgccgttgccgagagccttgtgtctgcttcgggtgtctgcactgtgagtggctccgtgctggcgtccgcaccagccgcttggggccagaccttcgcgtctctgcagctcggagcagttctgctcttcagcagatgcttgaccggctgtagccaagcctgaggggtggcaggctcgggggtcccactgccttctgaggtgtctccgtgttgcagatccggcactccacccagagcctctttgagtacatgaagggcattcagagcgacccgcaggccctgggcagcttcagcgggacccttctgcagatctttgaggacaaccttctgaatgagaggtgagtggtgtctcttggggcctcagaggcgtgagtggtgctggtgcctctcaccacgttcccacagattcccggggtctcgcagggtctgtctggggtctgaagggagaagcgagacacacgctgtaccagttggtggctcagcgaggaagatgtgcctgcagcatatggttctccgggcggccaggcctcagcccctgcgcctcctcttctagcctccacatgaggcagggaaatgaccgttgtgtgtacaatggacgtaaaggtagtatgagtacaaggtggtccctgtgtgtaggaaggcgttgtgggagctcctccagcttggtgctcccacggacgtgcttgcggacgctcatcagccacccggcaagtgagagctctgcgttcctgaggatggaatgtcaagtgagaaacatcgctgctttctagaagtttctggctttacatggaggcagagtatagaccctgtgggccttgacctcagaattgggaacatcctctggaagggttgttcccagcatgtgcgaggacgaggacacgggcctggtgtcccctcgggcggggcctcggcagcctctcccatgagagcacagatgccgctctcggcaaacaggaactcggcccagccatgttttcttttctcgttacgactataatcagctgcacataaaggggcagttcgatcgattttgataggtgtccacccttaaaatcttccccagtcaggacggtgggctccagcccaaggtttcctcccagcccttcgagtccgtgcccctgacctgcgtcaccatagcctcagcccatggtcacttgaggcgctgggccgcgtgccggtcgctcattcctccgtgccggtcgctcattccgccttgccgttcgctcattcctccttgctgaccagtcgtgtctgttggtggaggcaccacagtgcatctgtctgtgggcattttggttgttgccgcatcggggctgttgctggtagagctgcaggcagtctgtgtgtgcgagcctgtgggtaggtgtgcacagctgggcctccctctctgtgggctgcggagcccagctctcctgtgtgttagtcggcctgtgctaaagctctcctgatgctcctgtcgcccagaggggacctccccagcctccttttctgtggggtaaataccgaggcgccgcaggctggctcacacagaggcgaatgtctagctttggaaagctgctggagggtttccagaacgcccacgtgtcatgtctttctgctgatgctgtctgaggtcactctcactggcgcgttgctgttttatattctctttggagaagtgtcttcatttttttctgttctccttccctgactgttgtggtctgatcctcccttgtcacacatgtgacttgagggtgttttctccctgcctgtcctttcacgcaccgagcgggggcctcacactttcctcacgtcccagcatctccccttgttctctgaggcacagatttttctggtgtgtctaagacagcttgcctaatccgtggtcactgagattttctgttttgtcctagaagatttatagttttgggttgtgtatttagacctgggacgcgtcttgagtgaggtttcttacatggtatagcgtcggcacaggcaccttgacgcccagcggtgcccaccccaattgctgggagggctcccctctccgctgcattgccgttgcagctttgtaagaaactgtgggtttactttggactcttctgtgcccgacgtgtttgcttcactttgcaccagggccgtgctgtttctatcccttccactttaccatcattttcgaagttcagcgtcagcctccagccttgtttcttctttccacagttgttttgtcttttcctgaagctttgcgtttccacgtaaattataaagggggcttgtcgctttccactgggatcctgctgactctcagccattcagggagttgggcgtccttgttgctggtgtccagggtctcacagctccttctcccctcagggtgtccgtgccgctgctgaagacgctggaccacgtgctcacccacggctgcttcgacatcttcaccacggaggaggagtgaggctctgcttttcatgacttcccttccgattaagcctaagtagctcatgtattaaagaaaaagtcatcagacacagagatcagaattccaggaaatgatcttccagtgcgttctgggtcagttatggtgactgtaaataccgtcatcacagctggccctcaaaataacgcaataataacatatttacataatgacatattatgactgtaagtgcagtcagccccatctggggctgaggcgggggccctgctgtgcactctccccccagctatcccaccgggccaggggtgggcctcagggttgtgctgggagccgcagggcctgaaggggcctcggctgtacggggatgagactcgcaggggagagggcagaggccggtgacctggcgaggacttgcccaggagattggagctccttgcttctgcgccacgcggatgccccaggctggtctcagctgggttgttggctctgagtggtcatctcgttgctgccatattttcttgcttcattgaatttcactgtgttgggccagtcttttttttttttttttttttttgagacagggtctagctctgtttcccaggctggagtgcagtggcacaatcacagctcactgcagcctctacctcagcctcccaagtatctgggactacaggcatgcgctgtagtctaatgtacggctaatgtttgtatttttagtagagacaggatttcactatgtttcccaggctggtcttgaactcctggccccaagtgcctgccttggcctcctaaagtgctgggattacaggtgtgagccactgcgtctggcctggatatatttgtatctggggcacgttgggtcatctggagacagcgtggtctgtttttgggggcactgcttttttttttgtttgttttgagatggagtcttgctctgttgcccagggtgtagtgcagtggctcgatttcagctcaccgcaaccccgtcccgggttcaagcagttctctcgcagacttctgagtagctgagattacagctgtgcaccatcacacctggctgattgtttgtatttttagtagagacggggtttcaccacattggtcaggctggtctcgaactcctgacctcaagtgacctgcccacctcggcctcccaaagtgctgggattacaggcgtgagccactgagcctggcttgggcgctactcttaagctgtcaggtggacccagagctgtgctggtctccagggttttctgcccctttaaggtctctgctccctggcgcttcccttcccaccgctgctggggcagtgccggggcttctggccatcttttgggtggttcgtccccagccttggacagcgtcctcgtactcaggtactggctgacccaggcccaggttagtcctcagcggcccccaggaagccccctctggtgctcagaacctgagcgagctctgcagacttggaatttcccgcttctcaccacgggcttcccgctggagtctgccacctgctggacttggctctgccttaaccttcgggcgggaggcagatctggtctctgttgctccatctttgctggacgctgcacatgtttttaaatctaacagcattgaagggtttccccttttaatttcttaatggggcatcactgactgaccttcttacacctgctgttggaacagcctccatgttcacaggtgcacccagctcggttgtggcgtattatcctttaatacaatgctaaatactccatttaaattttttttttgagatggagttttgctgttgttgcccagactggagtgaattggtgcgatctcagctcactgcaacctctgcctcctgggttcaagtgattctcctgcctcagcctccctagtagctgggattacaggcatgtgctaccatgcccaggtaattttgtatttttagtagagatggggtttcaccatgttggtcaggctggtctcgaactcccgacctgaggtgatctgcccacttctgcctcccaaagtgctgggattataggcgtgagccaccgtacctggcctaaaatattgacatatatttttctggcttaaaaatttcaaaataagcnnnnnnnnnnnnnnnnnnnnnnnnnnnnnnnnnnnnnnnnnnnnnnnnnnnnnnnnnnnnnnnnnnnnnnnnnnnnnnnnnnnnnnnnnnnnnnnnnnnnnnnnnnnnnnnnnnnnnnnnnnnnnnnnnnnnnnnnnnnnnnnnnnnnnnnnnnnnnnnnnnnnnnnnnnnnnnnnnnnnnnnnnnnnnnnnnnnnnnnnnnnnnnnnnnnnnnnnnnnnnnnnnnnnnnnnnnnnnnnnnnnnnnnnnnnnnnnnnnnnnnnnnnnnnnnnnnnnnnnnnnnnnnnnnnnnnnnnnnnnnnnnnnnnnnnnnnnnnnnnnnnnnnnnnnnnnnnnnnnnnnnnnnnnnnnnnnnnnnnnnnnnnnnnnnnnnnnnnnnnnnnnnnnnnnnnnnnnnnnnnnnnnnnnnnnnnnnnnnnnnnnnnnnnnnnnnnnnnnnnnnnnnnnnnnnnnnnnnnnnnnnnnnnnnnnnnnnnnnnnnnnnnnnnnnnnnnnnnnnnnnnnnnnnnnnnnnnnnnnnnnnnnnnnnnnnnnnnnnnnnnnnnnnnnnnnnnnnnnnnnnnnnnnnnnnnnnnnnnnnnnnnnnnnnnnnnnnnnnnnnnnnnnnnnnnnnnnnnnnnnnnnnnnnnnnnnnnnnnnnnnnnnnnnnnnnnnnnnnnnnnnnnnnnnnnnnnnnnnnnnnnnnnnnnnnnnnnnnnnnnnnnnnnnnnnnnnnnnnnnnnnnnnnnnnnnnnnnnnnnnnnnnnnnnnnnnnnnnnnnnnnnnnnnnnnnnnnnnnnnnnnnnnnnnnnnnnnnnnnnnnnnnnnnnnnnnnnnnnnnnnnnnnnnnnnnnnnnnnnnnnnnnnnnnnnnnnnnnnnnnnnnnnnnnnnnnnnnnnnnnnnnnnnnnnnnnnnnnnnnnnnnnnnnnnnnnnnnnnnnnnnnnnnnnnnnnnnnnnnnnnnnnnnnnnnnnnnnnnnnnnnnnnnnnnnnnnnnnnnnnnnnnnnnnnnnnnnnnnnnnnnnnnnnnnnnnnnnnnnnnnnnnnnnnnnnnnnnnnnnnnnnnnnnnnnnnnnnnnnnnnnnnnnnnnnnnnnnnnnnnnnnnnnnnnnnnnnnnnnnnnnnnnnnnnnnnnnnnnnnnnnnnnnnnnnnnnnnnnnnnnnnnnnnnnnnnnnnnnnnnnnnnnnnnnnnnnnnnnnnnnnnnnnnnnnnnnnnnnnnnnnnnnnnnnnnnnnnnnnnnnnnnnnnnnnnnnnnnnnnnnnnnnnnnnnnnnnnnnnnnnnnnnnnnnnnnnnnnnnnnnnnnnnnnnnnnnnnnnnnnnnnnnnnnnnnnnnnnnnnnnnnnnnnnnnnnnnnnnnnnnnnnnnnnnnnnnnnnnnnnnnnnnnnnnnnnnnnnnnnnnnnnnnnnnnnnnnnnnnnnnnnnnnnnnnnnnnnnnnnnnnnnnnnnnnnnnnnnnnnnnnnnnnnnnnnnnnnnnnnnnnnnnnnnnnnnnnnnnnnnnnnnnnnnnnnnnnnnnnnnnnnnnnnnnnnnnnnnnnnnnnnnnnnnnnnnnnnnnnnnnnnnnnnnnnnnnnnnnnnnnnnnnnnnnnnnnnnnnnnnnnnnnnnnnnnnnnnnnnnnnnnnnnnnnnnnnnnnnnnnnnnnnnnnnnnnnnnnnnnnnnnnnnnnnnnnnnnnnnnnnnnnnnnnnnnnnnnnnnnnnnnnnnnnnnnnnnnnnnnnnnnnnnnnnnnnnnnnnnnnnnnnnnnnnnnnnnnnnnnnnnnnnnnnnnnnnnnnnnnnnnnnnnnnnnnnnnnnnnnnnnnnnnnnnnnnnnnnnnnnnnnnnnnnnnnnnnnnnnnnnnnnnnnnnnnnnnnnnnnnnnnnnnnnnnnnnnnnnnnnnnnnnnnnnnnnnnnnnnnnnnnnnnnnnnnnnnnnnnnnnnnnnnnnnnnnnnnnnnnnnnnnnnnnnnnnnnnnnnnnnnnnnnnnnnnnnnnnnnnnnnnnnnnnnnnnnnnnnnnnnnnnnnnnnnnnnnnnnnnnnnnnnnnnnnnnnnnnnnnnnnnnnnnnnnnnnnnnnnnnnnnnnnnnnnnnnnnnnnnnnnnnnnnnnnnnnnnnnnnnnnnnnnnnnnnnnnnnnnnnnnnnnnnnnnnnnnnnnnnnnnnnnnnnnnnnnnnnnnnnnnnnnnnnnnnnnnnnnnnnnnnnnnnnnnnnnnnnnnnnnnnnnnnnnnnnnnnnnnnnnnnnnnnnnnnnnnnnnnnnnnnnnnnnnnnnnnnnnnnnnnnnnnnnnnnnnnnnnnnnnnnnnnnnnnnnnnnnnnnnnnnnnnnnnnnnnnnnnnnnnnnnnnnnnnnnnnnnnnnnnnnnnnnnnnnnnnnnnnnnnnnnnnnnnnnnnnnnnnnnnnnnnnnnnnnnnnnnnnnnnnnnnnnnnnnnnnnnnnnnnnnnnnnnnnnnnnnnnnnnnnnnnnnnnnnnnnnnnnnnnnnnnnnnnnnnnnnnnnnnnnnnnnnnnnnnnnnnnnnnnnnnnnnnnnnnnnnnnnnnnnnnnnnnnnnnnnnnnnnnnnnnnnnnnnnnnnnnnnnnnnnnnnnnnnnnnnnnnnnnnnnnnnnnnnnnnnnnnnnnnnnnnnnnnnnnnnnnnnnnnnnnnnnnnnnnnnnnnnnnnnnnnnnnnnnnnnnnnnnnnnnnnnnnnnnnnnnnnnnnnnnnnnnnnnnnnnnnnnnnnnnnnnnnnnnnnnnnnnnnnnnnnnnnnnnnnnnnnnnnnnnnnnnnnnnnnnnnnnnnnnnnnnnnnnnnnnnnnnnnnnnnnnnnnnnnnnnnnnnnnnnnnnnnnnnnnnnnnnnnnnnnnnnnnnnnnnnnnnnnnnnnnnnnnnnnnnnnnnnnnnnnnnnnnnnnnnnnnnnnnnnnnnnnnnnnnnnnnnnnnnnnnnnnnnnnnnnnnnnnnnnnnnnnnnnnnnnnnnnnnnnnnnnnnnnnnnnnnnnnnnnnnnnnnnnnnnnnnnnnnnnnnnnnnnnnnnnnnnnnnnnnnnnnnnnnnnnnnnnnnnnnnnnnnnnnnnnnnnnnnnnnnnnnnnnnnnnnnnnnnnnnnnnnnnnnnnnnnnnnnnnnnnnnnnnnnnnnnnnnnnnnnnnnnnnnnnnnnnnnnnnnnnnnnnnnnnnnnnnnnnnnnnnnnnnnnnnnnnnnnnnnnnnnnnnnnnnnnnnnnnnnnnnnnnnnnnnnnnnnnnnnnnnnnnnnnnnnnnnnnnnnnnnnnnnnnnnnnnnnnnnnnnnnnnnnnnnnnnnnnnnnnnnnnnnnnnnnnnnnnnnnnnnnnnnnnnnnnnnnnnnnnnnnnnnnnnnnnnnnnnnnnnnnnnnnnnnnnnnnnnnnnnnnnnnnnnnnnnnnnnnnnnnnnnnnnnnnnnnnnnnnnnnnnnnnnnnnnnnnnnnnnnnnnnnnnnnnnnnnnnnnnnnnnnnnnnnnnnnnnnnnnnnnnnnnnnnnnnnnnnnnnnnnnnnnnnnnnnnnnnnnnnnnnnnnnnnnnnnnnnnnnnnnnnnnnnnnnnnnnnnnnnnnnnnnnnnnnnnnnnnnnnnnnnnnnnnnnnnnnnnnnnnnnnnnnnnnnnnnnnnnnnnnnnnnnnnnnnnnnnnnnnnnnnnnnnnnnnnnnnnnnnnnnnnnnnnnnnnnnnnnnnnnnnnnnnnnnnnnnnnnnnnnnnnnnnnnnnnnnnnnnnnnnnnnnnnnnnnnnnnnnnnnnnnnnnnnnnnnnnnnnnnnnnnnnnnnnnnnnnnnnnnnnnnnnnnnnnnnnnnnnnnnnnnnnnnnnnnnnnnnnnnnnnnnnnnnnnnnnnnnnnnnnnnnnnnnnnnnnnnnnnnnnnnnnnnnnnnnnnnnnnnnnnnnnnnnnnnnnnnnnnnnnnnnnnnnnnnnnnnnnnnnnnnnnnnnnnnnnnnnnnnnnnnnnnnnnnnnnnnnnnnnnnnnnnnnnnnnnnnnnnnnnnnnnnnnnnnnnnnnnnnnnnnnnnnnnnnnnnnnnnnnnnnnnnnnnnnnnnnnnnnnnnnnnnnnnnnnnnnnnnnnnnnnnnnnnnnnnnnnnnnnnnnnnnnnnnnnnnnnnnnnnnnnnnnnnnnnnnnnnnnnnnnnnnnnnnnnnnnnnnnnnnnnnnnnnnnnnnnnnnnnnnnnnnnnnnnnnnnnnnnnnnnnnnnnnnnnnnnnnnnnnnnnnnnnnnnnnnnnnnnnnnnnnnnnnnnnnnnnnnnnnnnnnnnnnnnnnnnnnnnnnnnnnnnnnnnnnnnnnnnnnnnnnnnnnnnnnnnnnnnnnnnnnnnnnnnnnnnnnnnnnnnnnnnnnnnnnnnnnnnnnnnnnnnnnnnnnnnnnnnnnnnnnnnnnnnnnnnnnnnnnnnnnnnnnnnnnnnnnnnnnnnnnnnnnnnnnnnnnnnnnnnnnnnnnnnnnnnnnnnnnnnnnnnnnnnnnnnnnnnnnnnnnnnnnnnnnnnnnnnnnnnnnnnnnnnnnnnnnnnnnnnnnnnnnnnnnnnnnnnnnnnnnnnnnnnnnnnnnnnnnnnnnnnnnnnnnnnnnnnnnnnnnnnnnnnnnnnnnnnnnnnnnnnnnnnnnnnnnnnnnnnnnnnnnnnnnnnnnnnnnnnnnnnnncaggcgagattgcttcccctggtgaaaagagagcaggtgagattgcttctctggtgagggagcaggttggttaatagcaggtgagattgcttctctggtgaaaacagagcaggcgagattgcttctctggtgagggagcaggttggttaatagatagcgggcgagattgcttctctggtgagggagcaggttggttaatagatagcgggcgagattgcttctctggtgaggtagcaggttggttaatagagagcaggtgagagtgcttctctgatgaaaagagagcaggcgagattgcttctctggtgagggagcaggttggttaatagcaggcgagattgcttctctggtgagggagcaggttagttaatagagagcaggcgagattgcttctctggtgagggagcaggttggttaataaagcatttaaacaagaatgatgtcatcttcactgctgggatcctgcagctagctgtgtgtctgtggagggaggaggtggttaatgggcctggaaggcacctcctcttggttgcagccctgctgtggctgggatgggatgcagggtcagcgtcctcctcctgacgccttccactgacggggctccctggcctgggtcctgtcgtctctccggggtggggcggtggcgcttccctctggcaaatgcactgcatccctgtcccagatccggaagaccacggccagccaggtgtacgagacattgctcacctacagtgacgtcgtgggcgcggatgtgctggacgaggtggtgactgtgctcagtgacactgcgtggtgagtgaaggcccttcctgcacggccacctgggcctggcaccgcccctcttcctgtccccaccgtgtctactcgtctctcccaaaaccctctgataggaggaggaaagagggttcccaggtctccacatcctctgcttaggttttacaaggcagccgtgctgctgtagccgaaacctcttctcaaccgccctgtccccaaacagtgtcaggtgtcaggaacacagcaaagccatccatcccaccaggggagcgggcacctgtaccacaaggctgtgtctggtggcctgtggagcagagggcactgaaggcctggcaggtgctgctgccccagacctctctaaagttctcttggaataggccgtgtgagcacctgttggaaatcaagaggcacaggcggaaataagaaaagctctccccacgcctctgctctgatgtccacccccttcctcagggccatgaggccctcaggaggccatagtgccactctccacgtttactttggcaggcacagtttctgcaacatgggctggcttctttaccatgggtggagtagaatggcggttttgaaagatgtgtgtattgagttgggggtgggagggtctgaatgagagcagagtggggaaagtgcaggctcaggtgtcctgggccaaccggtatgttcctgggaacagcagtgatggtgtcttacacatatgggcatgggcacccatgctggctcacacacatgctcactcgcgcgcacacacacacacacacacacacacacacacacttctaaaaggggagcagtctcgtcaccccgtgttggagatcaggactgaagcaaccagaggctgtgtgggtgtccacatggcatacccggggtggtggagtcccaggtgtcctgcctgtggacgctgctctgttttgagtgccgactgtgagggcctccgtgctgatcccggtgcgttgctacaggtctgtggggtccacgccccttgttgaatccagcaaggacgtaggtgacgttccctaggtgtctcctcggaacagtgaccttccaacagggctgggttcccatagagctcacgcaccaggcagccgctgtggcctcggaggacagaggtggcctctccagggcttccgcgaggttttctggtttggggaggagtgtgtgtctgctcctaaacaaacacgtggtcccaggagaggaaccgggagcagctgggctgtcttctcaacatgcgttgagagaatggccatcttaactactgctctggagacccgtttttacaatgatttttttaaaaaaaaacaccaaggtgcattctggaccagattctaaaataattggctttaggactgaagaagccaggtgtcccgagcggggcgaggcctcctccagcgaggctgggtcggggtggcctcctttcctcacatcagggagggaggaactagcagggtgggcctgggggcttctcctatcgtttaatcccctttctgttaaaaaaaaaaatccttagaatttaaagagaatattttaaattagaaacgaaaaacatgccccagatatctccacagcattgctagaatttttatttcgcatcaacagctaaattaaaacctggaaaacccttgtcagcccctccttggcctcgcttggtctgtcctcccgcagtccctgcgctgggcgtggtccttcccgaggggcaccccttgttgggaaggaaccgtcctcctgcgattccggaaagggctcaggctcgaggctctgctggagaacgtgctcctgtgacgtcttttctgccctcagcctggctatggatgtcgggggtgaggtctcctttccctgactgcggccatggaagcttgacgcgggacctccgcacacctgaggttctccggtgggcactcgagagactcacggctctccctctcctcacagggacgcagagcttgcagtggtgagagagcagcgcaaccgtctgtgtgaccttctgggcgtacccaggccccagctggtgccccaggtaaccctgtcaccttcacagcatgaggtgcctgtgcttccctgagctctggaatgttctggggccagcggctgtgcttagcttctgccagcacgtccacacggcccgttccctcgtctcatgtcaggacccctgggattacgggaccagcagagctgccttctctggccactgcccacacctgtgggcccctgtggcatccaggccacttgctctggggcgtttggggggccggggagtgggtggagctggcaccagcttgatccaggctcctcatgcctggccctggggtctgtttgtgctccaagtgccaagagtgccaccctacccctcctcatctgcttcccatgagtggggccggggctgggtgagaggcccccagaagctgcccctgtgcacctcaccagcccgtcactcttcttctaaagtaacaaaaacaagtacctcagttctcacgggggctggggcccagggttgctgtgctgtctctctagttaccagggttggctccttcctctcagcctccttccggcaggaggttatatctgagagggaggaggagaaccatgtccagatacatgggggcagtggggatgggctgagcatcaggacacagcctcccccatttctgtgtgtgtaaaggctgaactcaacagcagactttggaattaaatgtgctttttacatttttattaggaaaaatttcaaacgtgtgaatgcaggttaagagcagtgcagtgaacctcccttcccgctccccagatggggtgcccttccgaggacacgttagtcatgagcacctgtcagccacatagctcaggctgccgggtgtgtgggaaacggcacaaatggtttcctgcaggaaccgtgtcagtccccacacagggcccagaggggtgagggtcccctggctgggaatggtgtgtgttggagctgaccagcctgagcttgtcttgtctcttcttcagcctggtgcctgctgaagccagtcctggagcccatacctcacccctgcctggtgaggatgtcttgttcctgagggaggccggtgtggaaagcctcgcacagtggtgcctccagctgttgaagggtagcgctggcccttggaggctggcactagctgacagcttttcctctctgcacctgcgctctggtgacttggggtggacgcctctgccttcacttgaacacaaatgtgcttcctataaaatcatgtaccaagaagttcctgccttttgtctctgagcctgatgtgtgtaggggtgatggaaaggctcactgcccaggggtcagccagaggggaggtgggctgcactcctcctgcctggagaccaggcccccttcttgcctggtgctgtccctgctgtgggagacgtctggccacaggcagtgccccacccagtcttggagagagatgaatgttaaatcagaggttcaaatgctagagaactgagaagccctggtggcaggcatggtctggagtgctgggcagatgctgtttctgggcccgtctgcctggtgggggtgctgtcctcccccctgtgcacacgtgagcatcgtgcatgtggcccctctgcagtgcaggagtcactgattgatgggtgtgccgaccagcagcttcacaaatgtctgctgcaaggggaattgtcagagtccaatgtgtgcctctacagtaatgtgggaaataaataccattcttgaaataattacactgtcttaggagagcctgggcagagtccacacttgggtttttaggcaaagggcaggaggctacctttgtctctgtgtctgagctcgtgctgatccatcccaaagctggtgaggggaacgtgtataaaaatttcactgtggtagcaacccacacccatctctgggacctgtgctgtgctcatagggcttgaggtgcagaaccacggccagcagcaccaaagcagccccaggtgtggccactcagaggcccaagggcttgggtgagcaaccctttccctatgtgaggagcccaggggtgccatgtgcgtggtgtagattagggtggctccctggcctgctctcaggtggggatggggcctggacacaggaacatgggcaggccgagaactgggaggtgccaccgcatctgtgaggcttgtgaggtcaccaggaccacaagaccaggactgtgacagtccgtgctgtgtgtttagcagacagctcttcacgggatgtgtgtgacgacctggccacacaggagtgtggggttaacacactactgttgttgtgtttgacctggtggccaatggtctttataccctaaaagagccttgggttacatttttacgagatttaaatattttattccaacctgtgtaataggggtctcctcctccttgaactgtcccgattggctggggtcacgtggtgagggtcctgggtgaccaggcctagccttggccacatgagtccacacagtggaaaaggcttggctcctgtggtcggcacacacgagactctggttgcgcctgctgggtgtggaacaggcgcaccatcgccatgcctgcagctcacaaagctcctgctggcctgggatgcactgaggatggaaggaacaagtggcttctgagaaaaacatgatgaactgttcttagtgcaattaaaagaagattccagataaatggcattttaagacatggaggcaggtcgattacccacccagacccatcagtgacactatgtggcaaagcagttcttcttttaatgtcggtctaacttagcaacccgaggaaagtggatcactccactggccactgcctctttctttcccactggatcccatccatcactggggcacttgtgctcaccagacacctggtggcctggaaagccctctttcagcagccgtttctggagcccaccagggtccaggtgatagagtttggcaaggaaccccttgctcacatgatagctggggcagacaatagcaaatgaacaagcaagcaccatcaaggcaggcaacactgagtgctatgaacaaagataaagtgggcaatggaatggcatgttgggtgttgactccgagaaggtgttcagaaaacctctctgaaggggcagcatttgggcagaggtccagactgtgtccaatggcagaaaagagaatgcttgtggtcccagaagtggagcaagctttgtgagtttagagagcagcaagaagccagtatccctgggaccggggagctgatgtgggatttgtgtacccacaaacacgttctaggtgctaaccagaaaccctccatgtgagagcagagaccttggagatcctgagggtttctgctgagccctggaatctagtcacgctattttgatagcagaatggatgagagaatttaaggcccagggccagatctaatggaccgctatataaagctgggaccctaaataagtctttttcaaaggaacagcagcaagactcttatctcaatctatctcccctgaagtggcctgaattaatactacctgtatgatccccaaaactcctaaagtggaaaatttgattgacttggccctgaccagtggtattcccagacaagggcagaagatgcaaatacaaaacctctctggtagaatgtaggctataatatgagtacatttttgaaaagggctagaaatgatcaagaagagattagaaaaaaacagagcccctagaaatgtaagaagtgaaatgaaaagctcaatggatagcttagacacagctgaagagagaattagaaaactggaagatctgaaaacattatccagagaactggaagatatgacagcaacatcaagagacattgaagaatgtctaacctttgggtaattggggtctcagaatgaaatgaaatgatgcagatattccatactgacatgcaacagtccccagatacagaagcctaacagtctcacatttagacctgccacagtgaaactgcagaactgtaagaaggacagagtgatataaacgactaccaatttcccagcagcagcactggagttgagcagtgagtagaccaaggtcttcattatgctgagagaaaatagctgtcaagttgcttgaattgtgcccacagcataacattaaagaagagaacaaaattaagtcatttagataaaaatatgccattcttatctgtttggttttttaatcttggcttaatatttggggttgagtcatttgttttgagagctgtcctgtttattgcagggtgttcagcaacatcccagatggaagcagcatccccctacccagctgtgacaaaaagaaaaaaaaatgtctccagacactgccaaatatcttctgggggtgcccctggttgagaaccactgctttagtggataaactttaggcaggagggaaatgatcgcagttggatagttggaggaatgtggagcaagggaagcaataaactgtgaccataaaaacatagaaagatggcttatatgtggatttttttttaaagcacgtagaattgcttaaaatggacaacagcagcatataaatcagtggcagagttggtggctgaatttagagcatcttaagtctatgttctcctggaacagagtgcagataattcagttatcagcttggctaggtgcatgttgaagtatttagtcacacacaaacagttaatgtatggggaagataacttctatactagtaggagagaaatggaacaagaataaaaaatacactatcaaaatatgcaagaatggcaagaggaaaaggcagaacaagctgcaaaacacacacacaattagaaataaatattttgggacacaataaatgtgaatggattaaaacctctgttaatgacaaagttctccagttaaaggaaggcaaatagtgttattaggaatagattactatatgatgattaaaggctcagttcaacaggaagatgattgatagaactttcctacatttgtaacacagtcttagaagatattaaagcaaacattcaagaagaaattgatcacctactaccatagtgtattttattgaattggtacatttcaataaagtgtcataaggcacggttgaaggagaaaaacttgacccaatggacagttacagaacccaagtgtgtgtgtgtgtgtgtgtgtgtgtgtgtgtgtacacagaaattttaaaaatgtttttaaaaacatctctttaaaagaaataatgaaaattataaaatatataatgaaagataaaagttaatcaaaacagatagaattcacctaaagtggtgcttaagcgattctgaagtcgtgaattatacattacagaagaaaggctggaaattaatgagctgaacataagcagaggactaactgtaaagaaaattagaataagagcagaatgaaaaggaaatgaaacataataaagaaacaaacccagatggttcttcggtgaaaagacccacctgggagcagctgccatgggtccgtcagctgaagtgaaggaagtcctggccctcctgcaagtgcagtgacctcaggttgtcctcaaaggcgccccctgtgaggtcctgtcaggagcagcagattcagctcagtccggtctcctggctctaggaggccactgtggagcctcctccagggccaggggttgggggtggcctgtgtccacctgtcaagtgttctgctcctctgctaatagcggagaggctggaaggagacaaaggccagagagggcagcagccggcactgcttgtaccacaggccctgttggtcaccagaggggaggccccccctgccttctggccttgcctctctacataaggtggctgactctccctgggggcactcggaatggaatgagactaacaggcaatgcctctgctgtttgaccagggcagacccaccttccctccacacacccacccctctgcacaggccaggagtgggaggaggcccctcagacagaaactgcatctcagaaccatcaacagctgcccctgtctgatcccctctggcctctgtcatccccacccctgcaatggagtgagggctgtgaccccgggtccctggatgcttaatcttgtcctgtgtgctggccttggccaggtcacctactctcctgtatgaggccacagcaggtgtccagaaatgcctttcagacgtgccctgcaccccagcacctcctgaacaagttcctgaagacagcccggcagagtggtggacacaagtctctggcctctggcaggacagaggagggactatgcattcctgtcacagtccttggtccttgggcccagcaggaggaatcggagcttggctgcgccccttacccccaccacatcagaatccattacaccacctaccactgctgtcactcaaatgatgctgtcactcaaagccatccttcctggaaaacatttccacacactctgccgctatctgtccttcctcccttgtctctctgctctagagtttgcaaaggaaacacacctgagttcagggaccaggccagcccagtgcgtgttgacaccgtcttaaacaagactctgttaaaactagatgcttctgtaaagcaacatgttccattaggagaatgaaaaggcaaaccacaaaatggaggaagacatttgcaaaacattaaaccaacaaagtcgagcagccagaggtgtaggggactcctacaggtcaggagagacgcagcgtgcagtaggccggtggggaaccctgatgagaaacaccgccagagaggaaggaactccagtgtccagcgggcacggggggttgttggtcagactcacacctgaaaccaccatgagaacacactccccaaacggctggcgaccaagtgcccagcccagtgtgagggagccgagcagctgggccctctggctctgggcatgttcctgggcatcatccagagaagctgaggatgcagccacacccacgacctgccttccactcccaggattagacccgaggcagggatgctcacgcaggaggacacagcgtccttgcaagggcaaaccgggaaccactgcccacaggcctgggtcctggcgtggcctctgggtggggtggcgtttgcacacgggacgtggagaaagtccacaccatgcacagcgatacgcacacaccccaaacacgtggagtgaaaaccagatgcgagaacacagacactggattctgctcacatgaactacaaaaataggataaattagactatggtttagggatgtgttcacgcacacgccatgagggttggccctgccaggtgccaaatgcacgttcacaaccaacatagacggcatttcgttcctggaaaagcagtgatgtaaacgatgttgggacaattatccaaatagaaaaattggcatctgtaatcaaaagaaattccagttgtatcaaagatgtaattaaaaactagaaatcccagaagcaaaatgggacaatgttgttttttaaatttcacaaccaggagtgattgtcttagaatgaatcagactccataaatgaaagtcacttaatttgattatatcacaatggcaaaaatacaaaaatatcaaatggcaggaaaatttgcagcatgtcggagagttttccttatgaaaaatactgaccaatagaaaaatgggctaatgaaaataataatttactgaaggggaaataaagcagtttataaatatgtgagaagatgctttccctccctttaagggcacgaggcaggtgctccatcgctggtgggttgggttggcacagcagctgcgggtggtgaacagccagactgggattgaatgtgtgtgctctttgacccagaaatttttagaatttattccacacagagccacttgagcgaaattatgtatatatacaaatactgcagcagcattttaaacagcagatgattaaaaatggccaaaaggtacatcagtaagtaactgtatcacaaatgcatgaaacatccgtataatcgaagagcgggtgttttagtgacgaacgtgaaccttgggtttctctttactcttccagctaacggtggaggaaggcacaacaacagtgccaccgaggtgccctgagacccgcaagctgctcccgccaaacggaattgcaggggagcctgatgcggcctcggtctgaccacctctcaaaaggatggagcagaacacgcaaaaccacaggtaaccggtcggcagagtgcaggatacacaagcccattcttcagctgaactaagaaaagagcgtcggcgtcagggagacagaaaggtcatgtcgtaaaggtcacacggacgctgccgggttccagcaagcaaacttaaaacatgaagcaatttataaggcaattaggaagatttgaacatcgatgggatatttggaattctgtggtgggatggtggttttatggtccttttaacagtttttatctccttgagatagggaaacaataatggatgaaattaggctagaatgagtgccacaacaccagcgtggggatttggaggtgtggaggacacataagatggacacgcttgctccagggatgggtacatagggctggtttcctgtcactttgctaatatggctcaaataagctggaaatttccctgaatagaaaagtcacagcaacagtagagcccgggggctccagcggcttcacacggaataacctccaatctacacacgtgaaaagagcaagagatggaacaagcatgtgctgtgaggccacactgccagctgcccctggaagaacaagcaagagacaggtgaccgtgggggctctgggccctccaaggacacagcgtgtgcaggacaaggaggaacctcctttcccatgctcagccggctccctgggaagggttttcaccaagtgccttggggttcatatgagcgccccaagatagtagtgacaccacaggtcaccataacacatacgataacagtttgacatattgcgagaattaccacaaggagacgtggagtgggcatgctgctggaagagcggcactgacggggttggagagggggtccctgagaagtagatcctgaagaggctgtttctgaaaaactaaaccagattcgtgtagaatttgcattttataactgcttctcggagcctcccgtttactcacctaaatgtccccggtaacttggacaacggttattcaaaggttttcattactttgctcagatccatcagagcaatcactatctttggcggctacggccttagaaaacgtctttctccaataagactggaaagttggaatgactcctggacccacggtctgcagaacggatgctgtgtcagcacaaaaacacgaacccctcgtacatcagcctcagagctcctgggtgaccaggtgcaccgtcaatgagcagtcgtattttgaaaggaatctccttttctgagcactgggcctaacggtgggcttacactattccatcaaccgtgctgtgcacagatgtgctgccacctgggccttgccattccatttctagagccacaggcagagcagatttagcctcattcctaagaatcctaggattctcagaatggcgaccactgccttcaacttaacccatttatggctgaggttgcaatttttcgaatttttgcaatcagatcttggcagtgaccttaagcagaatataaacttgcacatgcttagcgttccaataatggaacactaggcatagatgggttttaaagtcacggcaaagagtcagactgtcttttgaagctctgaagccaggcattgacttctccctacctatgaaaggcctgcatggtgtcttcttccagttcaaggttgcttcctctacactgaagatctgtggttgagtgcggccacctccattgtgaccgtagcaggatcttctggagagcctgctgcctcacctcacactcatattacggagacggcttctttccttaagccttgtgggccaacctctgctagcttcaaacttatgttcacagcttcctcacatcattcagccttcacagaattgaagagagttgggacctcgctctgtattaggctttggcttaagggaatgttgtggctggtttgatctgtcagaccactaacactttctccctatccgcactatcatttgtgtgttcactggaggaccacttttaatttccttcaataacttttcctttgcattcacaacttggctaaccgttaggctgaaagctgggcctctcctgccagtcgtggctttcgacatgccttcctcactaagcttaaacatttctagcttttgatttaaagcgagagacgtgcgactcttcctttcacttgaacacttagaggccactgtggggttattagttaacctaatttcaatgttgtgcctcagggaatagggaggcctgaggaggggtggggtgggggggagcggggaggcgacagctgctgtcagaacattcgcattttatcaatcaagttcactgattcatatgggcgccccgagatagtagtgacaccacaggtcaccgtaacacatacagtaacagtttgacatattgcgagaattaacacgtggagatggggagacgtggagacgtggagtgggcgtgctgctggaagaggggcactgatggggttgctctcgtggggctgccacacgcctgtaatttataaaatgcacaatgaagtgcaataaaatgagatgcgccagtagttgccagaaagctgtgcccaagaggctctgctcacgttgttctgcctggacttgacttggattagttgtgtgacagctcatcgcaggccgggcagtgtagaccaacacacgctggcctcacggcttctgcggggcaggaaccgtgacccgccctggtgtggcgtgcttctagctgtcacaggtgcccatgtctgtgtgtcccccacaaccccccaacagtaccgcttggggcctggctcactctatcaaccactcacccgtggttatttaccaagaaaatgcaaagcaaaaaaagcaggggttgcaatcctagtctctgataaaacagactttaaaccaatgaagattaaaaaagacaaaaaagggcattacctaatggtaaagggatcaatgcaacaagaagagctaactatcctaaatatacacacacctaatacaggagcacccagattcataaaacaagttcttagagacctacagagagacttaggcaaccacacaataataatgggagactttaacaccccactgtcaatatttgagacagaaaattaacaaggatattcaggacttgaacgcagctctggaccaagcggacctaatagacatctacagaactctccaccctaaatcaacagaatatacattcttctcagcaccacacagcacttactctaaaattaaccacataattggaagtgaaacactcctcagcaaatgcaaaagaacagaaatcctaacagtctttcagaacacagtgcaatcgaattagaactcaggattaagaaacccaaaatcgcagaactacatggaaactgaacaacctgctcctgaatgactactgggtaaataacaaaattaaggcagaaataacgaagttctttgaaaccaatgagaacagagagacaacgtaccagaatccctgggacacagctaaagcagtgttaagagggaaatttatagtgctaaatgcccacatcagaaagcaggaaagatctaaaatcgacaccctgacatcacaattaaaagaactagagaagcaagagcaaacaaattcaaa

SEQ ID NO: 3050 - DNA, 3433 bp, Homo sapiens
gggccagcgtcggttgccgccttagcgggcgcctccttttcatccctcatccttcatccctggctttcgcgctctagcggagtgggatctgcgaacacgtgaggcgggggcgcggtccccaggctgccgagatggccctgagcgacgaaccggccgcgggcggccccgaggaggaggcggaggacgagacactggcctttggcgcggcgctggaagcgttcggcgagagcgcggagacccgggcgctgctgggccgcctgcgggaggtgcacggcggcggcgcggagcgcgaggtggccctggagcggttccgcgtaataatggacaaataccaggagcagcctcatctgttggacccgcaccttgaatggatgatgaacttgttgttggacatagtgcaagatcagacatctccagcttcccttgtacatctggcttttaaatttctttacatcatcaccaaggttcgaggctataaaacatttcttcgtttatttcctcatgaagttgccgatgtagagcctgttttagatttggtcacaattcagaatcccaaggaccatgaagcttgggaaacccgctacatgcttttgctctggctctccgtgacctgcctgatcccttttgatttttctcgccttgacgggaacctcctcacccagcctgggcaagcacgaatgtccataatggaccgtattctccaaatagcagagtcctacttgattgtcagtgacaaggcccgagatgcagctgctgtccttgtgtccagatttatcacacgtcctgatgtcaagcaaagcaagatggctgagttcctggactggagcctgtgcaatctggcccgttcctccttccagaccatgcagggggtcatcaccatggatgggacgctgcaggccctggcacaaatatttaaacatggaaaacgtgaagactgtttgccctatgctgccactgtcctcaggtgcctcgatggctgcagactccctgagagcaaccagaccctgctgcggaagctgggggtgaagcttgtgcagcgactggggctgacattcctgaagccgaaggtggcagcatggaggtaccagcgtggctgccgatctttggctgcaaatctgcagctcctcactcagggtcagagtgagcagaagccactcatcctgaccgaagatgacgacgaagatgacgacgtcccagagggggtggagcgtgtgatagagcagctgctggtcgggctgaaggacaaggacacggtcgtgcggtggtctgcagccaagggcatcggtaggatggctggcaggcttcccagagccctggcggatgatgtggtcgggtctgtgctggactgcttcagtttccaggagactgacaaggcgtggcatgggggatgtctggcgctggcagagctgggcaggagaggcctgttgctgccgtctcgactcgtggatgttgtcgccgtgatcctgaaggcgctgacctacgacgagaagcggggtgcctgcagcgtgggcaccaacgtcagggacgccgcctgctacgtgtgctgggccttcgcgcgtgcctatgagcctcaggagctgaagccctttgtgactgcaatctcgagtgcactggtgattgctgcggtgtttgaccgagacataaactgcagaagagcagcctctgccgccttccaggagaatgtggggagacagggcactttccctcatggtattgatattttgaccacagctgactattttgccgtcggtaacagatccaactgtttcctggttataagtgtgtttattgccggctttcctgagtacacgcagccaatgatagaccacctggttaccatgaagatcagccactgggatggggtcatccgagagttggctgcgagggcgctgcacaacctggcccagcaggcacccgagttcagcgccacgcaagtcttcccgaggctgctgtccatgacactgagtccagatcttcacatgaggcatgggtcgattctcgcctgcgcagaagttgcttacgccttgtacaaacttgcagcccaagagaacaggcccgtcacggaccatctggacgagcaggcagtgcagggcctgaagcagattcaccagcagctctatgatcgtcagttatacaggggtctgggaggacagctcatgagacaagcagtgtgtgttttaatagaaaagttgtcactttccaaaatgccctttagaggtgacaccgtaattgatggttggcaatggctgataaatgacactttgagacatctccatctcatctcaagtcactcccgccagcagatgaaggatgcagcagtctcggccctggctgctctatgcagtgaatattacatgaaggagccgggggaggcagatcccgcaattcaggaggagctgatcacgcagtacctggctgagcttcggaaccccgaggagatgactcgctgtggcttctcgttggccttgggcgcccttccaggcttccttctgaaaggccggctccagcaggttctcacaggtttaagagcagttacccacacttcccccgaggacgtaagttttgctgagtccaggagagacggcttgaaggccattgcgaggatttgccagactgttggtgtgaaagcaggagccccagacgaagctgtgtgcggagagaatgtttcccagatttactgtgcgctgctgggctgcatggacgactacaccacggacagcagaggggacgtgggcacctgggtccgcaaggccgccatgaccagtctgatggatctgacacttctgctggctcggagccagcctgagctgatcgaggcccatacctgtgagcgcatcatgtgctgtgtggcccagcaggccagtgagaagattgaccgtttccgtgctcacgccgccagcgtgttcctgacgctcctgcactttgacagccctcccatcccccacgtgccccaccgaggagaactggaaaagctgtttcccaggtccgatgtggcctccgtgaactggagtgcaccttcccaggccttcccacgcatcacccagctccttgggctgcccacctaccgctaccacgtcctgctggggctagtcgtgtccctgggcggcttgacggagtcgacgatccggcactccacccagagcctctttgagtacatgaagggcattcagagcgacccgcaggccctgggcagcttcagcgggacccttctgcagatctttgaggacaaccttctgaatgagagggtgtccgtgccgctgctgaagacgctggaccacgtgctcacccacggctgcttcgacatcttcaccacggaggaggagatccggaagaccacggccagccaggtgtacgagacattgctcacctacagtgacgtcgtgggcgcggatgtgctggacgaggtggtgactgtgctcagtgacactgcgtg

SEQ ID NO: 3051 - protein, 1085 aa, Homo sapiens
  VARIANT (1)...(1085): Xaa = Any Amino Acid
MALSDEPAAGGPEEEAEDETLAFGAALEAFGESAETRALLGRLREVHGGGAEREVERFRVIMDKYQEQPHLLDPHLEWMMNLLLDIVQDQTSPASLVHLAFKFLYIITKVRGYKTFLRLFFVADVEPVLDLVTIQNPKDHEAWETRYMLLLWLSVTCLIPFDFSRLDGNLLTQPGQARMSIMDRILQIAESYLIVSDKARDAAAVLVSRFIWDVKQSKMAEFLDWSLCNLARSSFQTMQGVITMDGTLQAQIFKHGKREDCLPYAATVLRCLDGCRLPESNQTLLRKLGVKLVQRLGLTFLKPKVAAWRYQRGCRSLAANLQLLTQGQSEQKPLILTEDDDEDDDVPEGVERVIEQLLVGLKDKDTVVRWSAAKGIGRMAGRLPRADDVVGSVLDCFSFQETDKAWHGGCLAELGRRGLLLPSRLVDVVAVILKALTYDEKRGACSVGTNVRDAACYVCWAFARAYEPQELKPFVTAISSALVIAAVFDRDINCRRAASAAFQENVGRQGTFPHGIDILTTADYFAVGNRSNCFLVISVFIAGFPEYTQPMIDHLVTMKISHWDGVIRELAARALHNLAQQAPEFSATQVFPRLLSMTLSPDLHMRHGSILACAEVAYALYKLAAQENRPVTDHLDEQAVQGLKQIHQQLYDRQLYRGLGGQLMRQAVCVLIEKLSLSKMPFRGDTVIDGWQWLINDTLRHLHLISSHSRQQMKDAAVSAALCSEYYMKEPGEADPAIQEELITQYLAELRNPEEMTRCGFSLALGALPGFLLKGRLQQVLTGLRAVTHTSPEDVSFAESRRDGLKAIARICQTVGVKAGAPDEAVCGENVSQIYCALLGCMDDYTTDSRGDVGTWVRKAAMTSLMDLTLLLARSQPELIEAHTCERIMCCVAQQASEKIDRFRAHAASVFLTLLHFDSPPIPHVPHRGELEKLFPRSDVASVNWSAPSQAFPRITQLLGLPYYHVLLGLVVSLGGLTESTIRHSTQSLFEYMKGIQSDPQALGSFSGTLLQIFEDNLLNERVSVPLLKTLDHVLTHGCFDIFTTEEEIRKTTASQVYETLLTYSDVVGADVLDEVVTVLSDTAX

SEQ ID NO: 3052 - DNA, 5578 bp, Homo sapiens
gggccagcgtcggttgccgccttagcgggcgcctccttttcatccctcatccttcatccctggctttcgcgctctagcggagtgggatctgcgaacacgtgaggcgggggcgcggtccccaggctgccgagatggccctgagcgacgaaccggccgcgggcggccccgaggaggaggcggaggacgagacactggcctttggcgcggcgctggaagcgttcggcgagagcgcggagacccgggcgctgctgggccgcctgcgggaggtgcacggcggcggcgcggagcgcgaggtggccctggagcggttccgcgtaataatggacaaataccaggagcagcctcatctgttggacccgcaccttgaatggatgatgaacttgttgttggacatagtgcaagatcagacatctccagcttcccttgtacatctggcttttaaatttctttacatcatcaccaaggttcgaggctataaaacatttcttcgtttatttcctcatgaagttgccgatgtagagcctgttttagatttggtcacaattcagaatcccaaggaccatgaagcttgggaaacccgctacatgcttttgctctggctctccgtgacctgcctgatcccttttgatttttctcgccttgacgggaacctcctcacccagcctgggcaagcacgaatgtccataatggaccgtattctccaaatagcagagtcctacttgattgtcagtgacaaggcccgagatgcagctgctgtccttgtgtccagatttatcacacgtcctgatgtcaagcaaagcaagatggctgagttcctggactggagcctgtgcaatctggcccgttcctccttccagaccatgcagggggtcatcaccatggatgggacgctgcaggccctggcacaaatatttaaacatggaaaacgtgaagactgtttgccctatgctgccactgtcctcaggtgcctcgatggctgcagactccctgagagcaaccagaccctgctgcggaagctgggggtgaagcttgtgcagcgactggggctgacattcctgaagccgaaggtggcagcatggaggtaccagcgtggctgccgatctttggctgcaaatctgcagctcctcactcagggtcagagtgagcagaagccactcatcctgaccgaagatgacgacgaagatgacgacgtcccagagggggtggagcgtgtgataggggtctccatccactgccctgttctcctcctgtggggtctcctgctgcacagagacagagccatcagcggagcccctcatggcggccatcctgggctcctgtccacacactgtcctgccctcctgccgtggttggatgaggtcttccctggacccaggcagggcctcttcatgtcccctccctagcagctgctggtcgggctgaaggacaaggacacggtcgtgcggtggtctgcagccaagggcatcggtaggatggctggcaggcttcccagagccctggcggatgatgtggtcgggtctgtgctggactgcttcagtttccaggagactgacaaggcgtggcatgggggatgtctggcgctggcagagctgggcaggagaggcctgttgctgccgtctcgactcgtggatgttgtcgccgtgatcctgaaggcgctgacctacgacgagaagcggggtgcctgcagcgtgggcaccaacgtcagggacgccgcctgctacgtgtgctgggccttcgcgcgtgcctatgagcctcaggagctgaagccctttgtgactgcaatctcgagtgcactggtgattgctgcggtgtttgaccgagacataaactgcagaagagcagcctctgccgccttccaggagaatgtggggagacagggcactttccctcatggtattgatattttgaccacagctgactattttgccgtcggtaacagatccaactgtttcctggttataagtgtgtttattgccggctttcctgagtacacgcagccaatgatagaccacctggttaccatgaagatcagccactgggatggggtcatccgagagttggctgcgagggcgctgcacaacctggcccagcaggcacccgagttcagcgccacgcaagtcttcccgaggctgctgtccatgacactgagtccagatcttcacatgaggcatgggtcgattctcgcctgcgcagaagttgcttacgccttgtacaaacttgcagcccaagagaacaggcccgtcacggaccatctggacgagcaggcagtgcagggcctgaagcagattcaccagcagctctatgatcgtcagttatacaggggtctgggaggacagctcatgagacaagcagtgtgtgttttaatagaaaagttgtcactttccaaaatgccctttagaggtgacaccgtaattgatggttggcaatggctgataaatgacactttgagacatctccatctcatctcaagtcactcccgccagcagatgaaggatgcagcagtctcggccctggctgctctatgcagtgaatattacatgaaggagccgggggaggcagatcccgcaattcaggaggagctgatcacgcagtacctggctgagcttcggaaccccgaggagatgactcgctgtggcttctcgttggccttgggcgcccttccaggcttccttctgaaaggccggctccagcaggttctcacaggtttaagagcagttacccacacttcccccgaggacgtaagttttgctgagtccaggagagacggcttgaaggccattgcgaggatttgccagactgttggtgtgaaagcaggagccccagacgaagctgtgtgcggagagaatgtttcccagatttactgtgcgctgctgggctgcatggacgactacaccacggacagcagaggggacgtgggcacctgggtccgcaaggccgccatgaccagtctgatggatctgacacttctgctggctcggagccagcctgagctgatcgaggcccatacctgtgagcgcatcatgtgctgtgtggcccagcaggccagtgagaagattgaccgtttccgtgctcacgccgccagcgtgttcctgacgctcctgcactttgacagccctcccatcccccacgtgccccaccgaggagaactggaaaagctgtttcccaggtccgatgtggcctccgtgaactggagtgcaccttcccaggccttcccacgcatcacccagctccttgggctgcccacctaccgctaccacgtcctgctggggctagtcgtgtccctgggcggcttgacggagtcgacggtgaggaggcgtcgggctggctggggcaggaggtggctccaggagtgcctggtgcttccctgtctcttgggagcgtgtatggagctgggccttttcttccattgctttctatctctctcgggcatatttggttagggggtcaggggcccagtgtcttcctcatgacccaggaggcttagggcctgtgggatggttgagtctgatgaaggtgggacagggccagcgccactctcttcctgcggccgcagccttggagctcccagcgtcccctcggggttcaatcctccaggacctgtgtctgatgcctgcatgtgggtacctgggctccatcaggttctagatcggcctccgccctccactttcagggctccaggcccagcttctcatgtctgtggggagggtctccagagccttggtctgtggctgagctgtggaacttgaaggcctctctgcatcttgtcactcgtggcccctgcaccttgggtcatgacctgctttatgtggcaaccctgtgacagctgctaagtcctagaaaacacgtaacaggacgtgaggtgccctctgcgccgtgtgggcgcgtgcggggagacccgggccccaggacgtgaggtgccctctgcgccgtgcgggcgcgtgcggggagacccgggccacatgcgagcggggccccgagacattctgcactcgggaattgcggggattatcaaatcccgcttcagtgggaaacgtgagcgaaacccaaggtgagtggccgcagcctttcgtcacgtgctctcccgcatgtcctgagtgagggctcaggctgagctgccgttgccgagagccttgtgtctgcttcgggtgtctgcactgtgagtggctccgtgctggcgtccgcaccagccgcttggggccagaccttcgcgtctctgcagctcggagcagttctgctcttcagcagatgcttgaccggctgtagccaagcctgaggggtggcaggctcgggggtcccactgccttctgaggtgtctccgtgttgcagatccggcactccacccagagcctctttgagtacatgaagggcattcagagcgacccgcaggccctgggcagcttcagcgggacccttctgcagatctttgaggacaaccttctgaatgagagggtgtccgtgccgctgctgaagacgctggaccacgtgctcacccacggctgcttcgacatcttcaccacggaggaggagtgaggctctgcttttcatgacttcccttccgattaagcctaagtagctcatgtattaaagaaaaagtcatcagacacagagatcagaattccaggaaatgatcttccagtgcgttctgggatccggaagaccacggccagccaggtgtacgagacattgctcacctacagtgacgtcgtgggcgcggatgtgctggacgaggtggtgactgtgctcagtgacactgcgtgggacgcagagcttgcagtggtgagagagcagcgcaaccgtctgtgtgaccttctgggcgtacccaggccccagctggtgccccagcctggtgcctgctgaagccagtcctggagcccatacctcacccctgcctggtgaggatgtcttgttcctgagggaggccggtgtggaaagcctcgcacagtggtgcctccagctgttgaagggtagcgctggcccttggaggctggcactagctgacagcttttcctctctgcacctgcgctctggtgacttggggtggacgcctctgccttcacttgaacacaaatgtgcttcctataaaatcatgtaccaagaagttcctgccttttgtctctgagcctgatgtgtgtaggggtgatggaaaggctcactgcccaggggtcagccagaggggaggtgggctgcactcctcctgcctggagaccaggcccccttcttgcctggtgctgtccctgctgtgggagacgtctggccacaggcagtgccccacccagtcttggagagagatgaatgttaaatcagaggttcaaatgctagagaactgagaagccctggtggcaggcatggtctggagtgctgggcagatgctgtttctgggcccgtctgcctggtgggggtgctgtcctcccccctgtgcacacgtgagcatcgtgcatgtggcccctctgcagtgcaggagtcactgattgatgggtgtgccgaccagcagcttcacaaatgtctgctgcaaggggaattgtcagagtccaatgtgtgcctctacagtaatgtgggaaataaataccattcttgaaat

SEQ ID NO: 3053 - protein, 647 aa, Homo sapiens
MAGRLPRADDVVGSVLDCFSFQETDKAWHGGCLAELGRRGLLLPSRLVDVVAVILKALTYDEKRGACSVGTNVRDAACYVCWAFARAYEPQELKPFVTAISSALVIAAVFDRDINCRRAASAAFQENVGRQGTFPHGIDILTTADYFAVGNRSNCFLVISVFIAGFPEYTQPMIDHLVTMKISHWDGVIRELAARALHNLAQQAPEFSATQVFPRLLSMTLSPDLHMRHGSILACAEVAYALYKLAAQENRPVTDHLDEQAVQGLKQIHQQLYDRQLYRGLGGQLMRQAVCVLIEKLSLSKMPFRGDTVIDGWQWLINDTLRHLHLISSHSRQQMKDAAVSAALCSEYYMKEPGEADPAIQEELITQYLAELRNPEEMTRCGFSLALGALPGFLLKGRLQQVLTGLRAVTHTSPEDVSFAESRRDGLKAIARICQTVGVKAGAPDEAVCGENVSQIYCALLGCMDDYTTDSRGDVGTWVRKAAMTSLMDLTLLLARSQPELIEAHTCERIMCCVAQQASEKIDRFRAHAASVFLTLLHFDSPPIPHVPHRGELEKLFPRSDVASVNWSAPSQAFPRITQLLGLPYYHVLLGLVVSLGGLTESTVRRRRAGWGRRWLQECLVLPCLLGACMELGLFFHCFLSLSGIFG

SEQ ID NO: 3054 - DNA, 4066 bp, Homo sapiens
gggccagcgtcggttgccgccttagcgggcgcctccttttcatccctcatccttcatccctggctttcgcgctctagcggagtgggatctgcgaacacgtgaggcgggggcgcggtccccaggctgccgagatggccctgagcgacgaaccggccgcgggcggccccgaggaggaggcggaggacgagacactggcctttggcgcggcgctggaagcgttcggcgagagcgcggagacccgggcgctgctgggccgcctgcgggaggtgcacggcggcggcgcggagcgcgaggtggccctggagcggttccgcgtaataatggacaaataccaggagcagcctcatctgttggacccgcaccttgaatggatgatgaacttgttgttggacatagtgcaagatcagacatctccagcttcccttgtacatctggcttttaaatttctttacatcatcaccaaggttcgaggctataaaacatttcttcgtttatttcctcatgaagttgccgatgtagagcctgttttagatttggtcacaattcagaatcccaaggaccatgaagcttgggaaacccgctacatgcttttgctctggctctccgtgacctgcctgatcccttttgatttttctcgccttgacgggaacctcctcacccagcctgggcaagcacgaatgtccataatggaccgtattctccaaatagcagagtcctacttgattgtcagtgacaaggcccgagatgcagctgctgtccttgtgtccagatttatcacacgtcctgatgtcaagcaaagcaagatggctgagttcctggactggagcctgtgcaatctggcccgttcctccttccagaccatgcagggggtcatcaccatggatgggacgctgcaggccctggcacaaatatttaaacatggaaaacgtgaagactgtttgccctatgctgccactgtcctcaggtgcctcgatggctgcagactccctgagagcaaccagaccctgctgcggaagctgggggtgaagcttgtgcagcgactggggctgacattcctgaagccgaaggtggcagcatggaggtaccagcgtggctgccgatctttggctgcaaatctgcagctcctcactcagggtcagagtgagcagaagccactcatcctgaccgaagatgacgacgaagatgacgacgtcccagagggggtggagcgtgtgatagagcagctgctggtcgggctgaaggacaaggacacggtcgtgcggtggtctgcagccaagggcatcggtaggatggctggcaggcttcccagagccctggcggatgatgtggtcgggtctgtgctggactgcttcagtttccaggagactgacaaggcgtggcatgggggatgtctggcgctggcagagctgggcaggagaggcctgttgctgccgtctcgactcgtggatgttgtcgccgtgatcctgaaggcgctgacctacgacgagaagcggggtgcctgcagcgtgggcaccaacgtcagggacgccgcctgctacgtgtgctgggccttcgcgcgtgcctatgagcctcaggagctgaagccctttgtgactgcaatctcgagtgcactggtgattgctgcggtgtttgaccgagacataaactgcagaagagcagcctctgccgccttccaggagaatgtggggagacagggcactttccctcatggtattgatattttgaccacagctgactattttgccgtcggtaacagatccaactgtttcctggttataagtgtgtttattgccggctttcctgagtacacgcagccaatgatagaccacctggttaccatgaagatcagccactgggatggggtcatccgagagttggctgcgagggcgctgcacaacctggcccagcaggcacccgagttcagcgccacgcaagtcttcccgaggctgctgtccatgacactgagtccagatcttcacatgaggcatgggtcgattctcgcctgcgcagaagttgcttacgccttgtacaaacttgcagcccaagagaacaggcccgtcacggaccatctggacgagcaggcagtgcagggcctgaagcagattcaccagcagctctatgatcgtcagttatacaggggtctgggaggacagctcatgagacaagcagtgtgtgttttaatagaaaagttgtcactttccaaaatgccctttagaggtgacaccgtaattgcttcggaaccccgaggagatgactcgctgtggcttctcgttggccttgggcgcccttccaggcttccttctgaaaggccggctccagcaggttctcacaggtttaagagcagttacccacacttcccccgaggacgtaagttttgctgagtccaggagagacggcttgaaggccattgcgaggatttgccagactgttggtgtgaaagcaggagccccagacgaagctgtgtgcggagagaatgtttcccagatttactgtgcgctgctgggctgcatggacgactacaccacggacagcagaggggacgtgggcacctgggtccgcaaggccgccatgaccagtctgatggatctgacacttctgctggctcggagccagcctgagctgatcgaggcccatacctgtgagcgcatcatgtgctgtgtggcccagcaggccagtgagaagattgaccgtttccgtgctcacgccgccagcgtgttcctgacgctcctgcactttgacagccctcccatcccccacgtgccccaccgaggagaactggaaaagctgtttcccaggtccgatgtggcctccgtgaactggagtgcaccttcccaggccttcccacgcatcacccagctccttgggctgcccacctaccgctaccacgtcctgctggggctagtcgtgtccctgggcggcttgacggagtcgacgatccggcactccacccagagcctctttgagtacatgaagggcattcagagcgacccgcaggccctgggcagcttcagcgggacccttctgcagatctttgaggacaaccttctgaatgagagggtgtccgtgccgctgctgaagacgctggaccacgtgctcacccacggctgcttcgacatcttcaccacggaggaggagatccggaagaccacggccagccaggtgtacgagacattgctcacctacagtgacgtcgtgggcgcggatgtgctggacgaggtggtgactgtgctcagtgacactgcgtgggacgcagagcttgcagtggtgagagagcagcgcaaccgtctgtgtgaccttctgggcgtacccaggccccagctggtgccccagcctggtgcctgctgaagccagtcctggagcccatacctcacccctgcctggtgaggatgtcttgttcctgagggaggccggtgtggaaagcctcgcacagtggtgcctccagctgttgaagggtagcgctggcccttggaggctggcactagctgacagcttttcctctctgcacctgcgctctggtgacttggggtggacgcctctgccttcacttgaacacaaatgtgcttcctataaaatcatgtaccaagaagttcctgccttttgtctctgagcctgatgtgtgtaggggtgatggaaaggctcactgcccaggggtcagccagaggggaggtgggctgcactcctcctgcctggagaccaggcccccttcttgcctggtgctgtccctgctgtgggagacgtctggccacaggcagtgccccacccagtcttggagagagatgaatgttaaatcagaggttcaaatgctagagaactgagaagccctggtggcaggcatggtctggagtgctgggcagatgctgtttctgggcccgtctgcctggtgggggtgctgtcctcccccctgtgcacacgtgagcatcgtgcatgtggcccctctgcagtgcaggagtcactgattgatgggtgtgccgaccagcagcttcacaaatgtctgctgcaaggggaattgtcagagtccaatgtgtgcctctacagtaatgtgggaaataaataccattcttgaaat

SEQ ID NO: 3055 - protein, 735 aa, Homo sapiens
MALSDEPAAGGPEEEAEDETLAFGAALEAFGESAETRALLGRLREVHGGGAEREVERFRVIMDKYQEQPHLLDPHLEWMMNLLLDIVQDQTSPASLVHLAFKFLYIITKVRGYKTFLRLFFVADVEPVLDLVTIQNPKDHEAWETRYMLLLWLSVTCLIPFDFSRLDGNLLTQPGQARMSIMDRILQIAESYLIVSDKARDAAAVLVSRFIWDVKQSKMAEFLDWSLCNLARSSFQTMQGVITMDGTLQAQIFKHGKREDCLPYAATVLRCLDGCRLPESNQTLLRKLGVKLVQRLGLTFLKPKVAAWRYQRGCRSLAANLQLLTQGQSEQKPLILTEDDDEDDDVPEGVERVIEQLLVGLKDKDTVVRWSAAKGIGRMAGRLPRADDVVGSVLDCFSFQETDKAWHGGCLAELGRRGLLLPSRLVDVVAVILKALTYDEKRGACSVGTNVRDAACYVCWAFARAYEPQELKPFVTAISSALVIAAVFDRDINCRRAASAAFQENVGRQGTFPHGIDILTTADYFAVGNRSNCFLVISVFIAGFPEYTQPMIDHLVTMKISHWDGVIRELAARALHNLAQQAPEFSATQVFPRLLSMTLSPDLHMRHGSILACAEVAYALYKLAAQENRPVTDHLDEQAVQGLKQIHQQLYDRQLYRGLGGQLMRQAVCVLIEKLSLSKMPFRGDTVIASEPRGDDSLWLLVGLGRPSRLPSPAPAGSHRFKSSYPHFPRGRKFC

SEQ ID NO: 3056 - DNA, 25035 bp, Mus musculus
  misc_feature (1)...(25035): n = A, C, G, or T/U
gcagggtggaggcaggattagaatttagactgaccgggtctccaggctggtgagctccacctggctgcactgggggaaaggccaggatccaagctgatagccttgctgagaaacagagcaggagggaaaggaggtagcagggacctttgtcagaaacccgtctcttaacgtggccctgtagcctcaatgggacccctgtcactgggattctgatgaaagagacagaggcatactaccccactcccctcaaacacacaccctcactttcatttatttctttagttcgtgttcacaggtcatttagcacatgtcaaccctgtgccaatgtcccacagtcacaccttgcaggactccattcatgtcttgatggagtaaaccccaccaagagcacgtgacaggaggaaataggagcagtgctagggaaagcccagagagtggcacagtcctgcaggaggggaccctaagggcagcaagaagctgatagactggtctcccagcacttgagagactgaggcaggaaggctatgaatctgagaccagcctgggctacatagtgaaaacctctctcgaaataaccagagcttaagaccagtgtgtggcctgccattcatgtgaaggtcaccaacagacagaggtaagtaaagagaaggaaaagacaaagtgtgcaagccagggtgtatgggggggggggtgtcgaggcctgaggagttccggttcttggcccacatgccttgtttgtaaggtgcttcattgtgctgtatatttcattttttaaaacatttatttattttatgtatatatctgcatgtatctgtgtgccagaagagggcatcagagcccagtacagatggttgtgagccaccatgtggctgctgggaattgaactcagggcctctggaagtgctcgtaactgctgagccatctctccagccccatgcagtgtgttttaaattcagtaatttccccctcaattgtagcacacccaaacacacacacaaaccacaggtgcacacagtgtgtgactgactcactgagtggaatctgtagactctgtacttagtaggttcataaaaagagcacactccccggtgtgctggcagtatgattcccgtattggagaaacaggagggactgagggttccaggctggcctaggctatgctatgggaccttgtatctggaaacagagaggggatgaagggagaggagagagaaagcaagcatgatggggccgcagtgggaatgcatggttcaactcaaagggtatggccccttttccaaggcaagaacttactttctggggtgcacagggagcaaaagaaatgaagtttttttttccctcaggttcattggcagagtgtctgcctaacttgcacaaggccctgggctccatccccccacataacacaaataaataaataaatgaaaaaaaattaaatatacaaaagaaacacaccacttcttttccatgattgtctgggaaaatttgagccccagactccagaatctgctcccccctcccttctctcagcccagcacaaaccacagagcggagccaagaacactgagtcagaagggcctgcctgctctggaaagccagttctgtgaacacaagtcaggttttccctgacaaagacgtttcgacatgagcctcggtgtctccatctgtaaaatggagctagtaaaccaggcagttcacaagttgttacaaagccccagtgtgtgtcaaaggtttttaggaaatactatgtacattgcacacgttttaatgtttattttatttctttttaaactgtggggcacaagtccatggaggtcagagaacaaccggaagtatctggttctctccttctgcctcacacagggcctgagccatgttgccggcccacattgcatactttttaacccagacaggcatctgtctcctacctccaatcacctgattttggaggaggaacaattctaagtactctgacttagaatgtctccccagccctggcttccggtgttccagcctggaacctcagacctgagcttcagtgagattccaggagcaagtttaccaagttagaggaagccaggcaggggagatggcattccaggcggcatgtcagctcgtgagtcagggctgggaaggcccgttctgggtccctggaggtgggggaggacttgcctctctggctctgggcccaggccgggttgctcatttgcatatatctgcatgtatgtaagtttcacctgcttacattggcagggctgagagagacacctgtgcagaaagcacagcaggatccaattttacagggctggctacttgatggagcatcaacccagaatcttggtcctgctccatgacctgatgaaaagcctttggacctctgaatggaacacaggctctttccctgggctcccctggttgcccaggccaggaacctcagtctttctcctactcttcccggtcccactcaccaagtccacttgggggttgtcctttcttcacctttctcttggctctcttcttttccattgcctctgccaccacgcccttggggagtcccacttcactgcacatttgacccattgcaagtctctcttcctcaaatctctgccgccctatgagcccttccccaatccaccgtggtacccaaggcaacccagggaagcagcccctctactcccatctgggtccaaccttcccatcactcaaggtcacagcacactgcctccttggcttccatggctcttaccttgcagcctaatgaacaaaggccctgcatgtgccttttctgttaataagaacaggactcccttacctgggatgtgtagcacaggagttccaattattcatattatttataatattaatataatataatgactatgatataataattactataactcattattaatcttatttcttttcttactgccttcatagcagacactgctctccagcagcctcctcctctttctcaggcttttctctgcccttgctgcatagcatttctccagggaagagagtcagtcccctggcagtgatggtagccagcgagctggggatccccattgctttaagaaagggtatttggcccttttgtgcctcagtgttctcatttgtaaaagagaggataatatacgtatctgcattggatatggactctatcttatacagaaatattgtcatcattagataaagagaggcacttaagtccttagcatagtgcttgccacacagacaacatattgtataatcgttactcttactcaaagcagaggactcaaatccccagagtacccccttcaacctctaagaccctgggacaggttcccccagtcccttggcactgtctccagatgccaggtcttcacctggatcttccagtggccccagacatccaagggaccaggacctggccctccagccttttgtgtgggaaagcaacagaggccccattgggttgaatgatggttgggaatataggctcagctctggtcaaggcacttgccatccagaacttgggctgcagagctacacacacacacacacacacacacacacacaagggggtgggggctcagaggctggaaggaagagcagtccagcctagttggcctaagcagttgtaaatgataacagctcatttcacgttgcactcactttcccaaggaggccactgacccttggcacagcccccaccctgaccacagccatctctcttgcctgctatcttccctctcaccacctcctccaggcccttccagcagcaggtgaggaactccaggctgggtgatcctcttccaattggaacagaaaaggatggtctatgatgcagggtagggggccctggagtggatgcaggagacacccttctctcagctaccacattggcctgcactccctccctcctcctggccagccttcccccttagagccgggtgggggtggcttgaatgagagggggggttactgggaactgcttctaatcttccctttgttccccacccccacccctgtgtaaacggagggaaagacactgattttgtttgttgctgggcaggttatagtattgttttgcagacatgattctttgtctcattttgggaatgaggactgatgttgcacggctcctggggccattccctgtctctttgctccctaaaacagtattttcccatcccccccccaccagacctacagaggtgaggccaatagtaccaaggagactctgaagtccaaactgggatcctgggatggccaacagccgacctccttttaaataatgaagagaaagaagaagaagaagaagaaaagcaaagagcgacaaggaaactgaccttcactgtccaagcagaagcaacagcccacacccgtgtaaagagacccttcgcctaccggggaacctggaaggcagagggagacatgtgttgggtgtttaaatggtggtgtagttggtgcgtgtgacgtgtgtgtataagttatgagagtgatcgcctataagcgtgtgccggtctgtaggttctgctaaatgtgctgggtgcccctgcacacacactggctttctcatccgttgcccgctacaggcatttttctaactccaagtccccttccagtcttcacctcgctgcctggcgaggaagaacggagtgccaagtctgaatttctgtgcgatacagggatctgaggaaggctgcagacctagccaagccgccttcggtccggaccggcaaattcgttgcaggcgggttggccttcaacaggcttgcaaagttttgaagggctctggtgtatgctccccgcagttatcctctacccgtccggctccctgtgggggtccttggtctactggtgggcgatatgggacactccgccaagaaaccctgcgtcacccagctaggtctggcctcagtcccggagctccgcgaagctcagcacagagtggcttcctcccaaagcccggcgccacggtaacactttcttccaacactccctgattttgagttttcttctggagatggtgccctggtcaaagaattattcagagctaagctcttagctttggcgtctttcgtgtacttgtgtatttaaaatgtccgggtcaatctctggtagacttcttggatgtcaaacaaagaaaactgaggctgtgagggtggcatggggttgtagctaagatcgtgtgggagataggggaagactcttgtgggagacccacgccaagtggtgcccggactgggtagcgctgacaccaagactgatccacggccatcatctttaggattatttggaaaacaacacgcagaaagagctctcctccgggtggaaagtagaaatgagctcaagggaaacccctgagccggacggcagagaccttcagctccactccagcatcatcagggctcaccaaatgctccatcagaaaaagcgaaggagacccgggacgcggggctctaccataaagaggcgggttgagaggaggttgctgcaagattgaatttagtttcccaaaacgtaattacaaaggacccctccaaatagaactttaaagcttgcggcgagcaaacaaacacaaaaccaagattttatttgggagcagtgaccacagaggaggagaaaagaggcgcgtgtaattccaaaatgaccaccaagcccgcagaaatctggtagggagtgagaatctttatttccccgatcagatcggttcaagtggggagtggactcgtactttcagaactccacgcctgactcagcacaagccacccttacacttcactgagccccttcaaatgtacggcaggaagcccttggctgtcaactgccaggaaaactcggctgttttcctggggaattctgctacaggaggagcagaaagcagcctcaagcaaggaatatatcttatataaacccgcaaattaggaaaacccaagcgtgaggcaagcctttaatcccagcacttggaagacagaagcaggcagatctctgagatctctgtgggttccaggatagcctggtctacatagtgagctccaggacagccaagtggtaggtacccagtttagaaaaacaaaccaacaacaaacaaacaacaaacaaaacacaagcgccataccgatgtgtcctaaacccactgggattccgttgctccaacgccccagccttcctgccacccacacctctgctaagagtaattatagaaaagggttactttgccctccctctcccctctcagtcctctctttccccccctccctcccttccttcctctccttcttttctgtttcatgttcttggattctggattctgttttctgttcttagattcttgcaaaccaccatacagcaaacaccagagggctggaatcgcagtcctgctccctcctctcccggagcattctggtaggaactggctgatcaggccagctacacggaggctgtgctggggagggaacccgggatttgcctgtctctgttctcaccaagcactgccttccctggctcacagccactgcttctacttttcctgtggttgagaggctgatgttgtgttggggtgggggatgcctaagaggatgcctaggtgtgccagcaagtgcttgggttcctcatacctcatgctgacggtgcagtgaggctggtgatgttggagggagacaaacggtaactaccgttcacagcagggttcttgtgaggatgcgccggagcgtatgaattctgcagggttaccgcagaaggacaggtccaactttctttcaggatgctcctgagcacacagggaagctcagaggaggccttcaccagggaccctgctttggatgtgatccaaagagtctaccaggacactcacctctgcccttcctccagcaggggcccagcactgaaaggattctggttacctgcccccccccccccggaagtgtctcccatcatcctctccattcacgctagaaagcaaatctgccctcacagccagccctgcctcaaagcacatcttcttgctttgaatcttacagcgtgagagagaagccatccctggaaacaccacagcagactcccttctaaagaacagcacagccaggctgtggtggcaagtgcgcctttcatccctgcacccgggaggcagagacaggtggatctctgagttcagttccaggtcagcctggtctagttccagggtagccagggctaaacagagagaccctgtcttgaaagattgaaagagcagaacagtgctagagacagaaagacttggaaagcaacatcttcagctgctcatcgccccagctctaaggaggaaggcatactgaaacccggggaaaggtggtctcacatgaaaagaacatttccctaccaaacaaactcacaccttcccccagccaacctgacaaagaggatctcctacagagccccctaatctgagctccaggatcacggggtagagacctctatggcagtggccagcaggtattttcctggagaaattaatttctgtgcaattggagaggggggtgtaaaagcaaattagttttctcctgtctgtgagtttcaacagtcctgatatacagtgcctagaaatgtctctttctgtttacttatttttttatgtgtatgggtgttctgtctgggtactatgcatctgcctggtgatcagagaggccagaagaggttctcagatcttctggaactggaatggcatatggttgtgaacctccatgtgggcgctgggaattgaacaggaagaagcagtcagtgttcttaaccatggagctatctctccagccccagactttgtctattttagaaggcctacatctgctctgagaccagggccttcatccactccttgccatttcttctaatagctgtctgtcctctttcatctacctaacaccccaagattgccacttttactctgagccctggtgtgtgtgtgtgcgcgcgcgcgtgtgtgcaagcataaagatggcatgtgtaacagagggatcgagtgtgtaggttttctagggaatctgtgaggacttctggaataggagataacgctgggtagtgatggtgtttgcctttgtctttaatcccagcgagggaggcaggaggcaggaggcaggaggcaggaggcaggaggcaggaggcaggaggcaggaggcaggaggcaggaggcaggaggcaggaggcaggaggcaggaggcaggaggcaggaggcaggaggcaggaggcaggaggcaggaggcaggaggcaggaggcaggaggcaggaggcagatctctgagttccaggccagcctggtctacagaatgagttctggacagccagcactacacagagaaatcctgtcttagaaaatcaaaccaaaccaaaagaattgtctctctcattttgcaaagcagcttagatgtgtgggaaagggtagcccacacatgagcatatatgttcacgtttggacagccttatttctgagaaggaaaattagtgatttgacttgtaatatacaagcatatgtgccaggtaagcacaatgtgttttaaataaaaatattacatttatttatgtttgggttatgcgtatgtgtgaagatccatgcataacagagcccacatatggagctcaagagactagctcttgggagtttgttttttcttccattatatggtcctggggactccaactcagatggtcaggcttggtggcaacctaattgctcttcatctcttgtctgctgagccatctcatccacctcaatcctgtgcttttattcaaagagttgcccatggttggggatgcagctgtatatacaccacaccttaaagtctgtgtttgccggtccataaatgagcctcttttcgtagagggatattggtatgtaacaatatatgttggatgaagactctatgtatttttgtgcacgtggcaacagatgcttgcatacatggtgttcattaaggcctcctgtcctgctaagagacaggtcccgaacacagtctggaagtacaatggagttagccatattttctgtgccctcccaggagccatcaaactagattcatccccactcccagattttgccccagttcctgggaggctacattttgcagagtgccagaaaaggcggggctcggtacaggcgaatcccagacagcagattccctccagcagcctcaagggcctgcaggagctgtggtgtcgcaactaaaccggggcccctgccggaagcggaagcttgcattgggggtggtgaggcgcagtggcggcggtcgcggcgtgccaggctctgggcgctcggcgggggcgtgcgcgccacgcgcgtgcggggcaggctgggcgccaggcggcaccctccaggccccagcgtctgtttaccaacaaactgccatcgctctgcagctacgcattccgacgcgctgaataagcggccggcgctggctagctgctttttccactccctcgcagagccctggcagcgtggggccatgcagacccgcgcgacgcgcacacaggttctgagtctccaaagcgtctctagttaccgcgcagcttccctcgtcccctagccatcccaggcccaatttcctagcaccttgaacatcgttactgagacttcctgactctaccgattccccaggaactcggagttgatgcagggatgtggggtccggagctcgcatccctcccgtttcccggtgcacgctaacacgaggggtggggggcgggctcagcttgaggtcaccaaggaatagccaatccggggtgtctaagtgggcgggggacccctggggtcccgggaaccgaacccagaggaaaagatggggaagggtaaaaccacggggtaccccaaaaaaccctttcccgggtgcgagttctctgccggaagaggctcagagagacatttttccaggcatctgaagtgtaagagtggcttgctggagctggagactttgaaaggagctggcagaaagagtagacagcgtgcgggccatgacctaggccctgtggcccggcaccggccgcaatgacctctttaccctgtccccttcctgaccgtggtgcctccaacgttgtcttcccggacctcgcccccgccctgtcggtagtggctgcttacccgctcggactatccccgggaaccgcagcttctcccgatttgtcctactcccagtcctacggccacccccggtcctattcccaccctgggccggcaaccccaggagactcctacctgccccgccagcaacaattggtggcgccatctcagccctttcacaggccggctgaacacccgcaggagctcgaagcaggtaagtgtgaccgcggcggctctcctcacctctggggtctgggttgtctttgcataaatttcgcgttcttctgcttgcgcgcaactagagggattcaaacgcttctctctccgatacccaggaatctgcggtagggggagggcgaaggatgggggaggagcggaggcaagttgatctaggtctcctttttaaattcgacctggtttcgatttgcagttttgaaaagccaggcgggagggctccctaccccaccccctggagcagtggagctgtgtgagtacctgtgtaacggaaatttgccctaatccagatggagaggtggagatctaaccccttccctgtgattctcctcatccttcactccgttccgacatcatcccttttgagttctggtctcagaaaccagtatataaatcaaacactactaaacagaaatcagtttccagttggagataggtagacaactaggctgggttccttctcctttcctgggccccacccccttttcctggaggtgcctataccctgcaggatctgggtataagacccccaccaactgttgctcaaataataaacttacaggctggtctaccagtctccagctctttccctggcctcctctgccttgtgcctaagacatctttaccatctccacctttaactttgggatacattagacccagcttcggttgcctgcagcaaatctgagctccactggaaggcttcggtgaagacaggggagcagctggccttcctagctccgacctatgcacagcccaactgacagaccctggctggcagtacgaggatgctctccatagacccactgactccttgaacatcaaaatggtccaattgttcttggcatagtcctcgaagatgcgcaagtctgtgatgtgacttcacataatcagccccaaaccaagatgtttctctccttttccctggtcattctggcataaattcatgacacatacacccccaaccaaaaccacattagaatagaggctcacattccttgttctatggttggagaaactgagatagaaggaatgcatatagatagatccaggacacaacttttttttccaggctcctggaccagggcaagttcactttcctcaatggacggagccaggaaaggggactttaggaacttctcaggaccccagaaagttaacagctttctggagcagagtgggggtgggcctgctaggttgctgggtctccttggaggagggacagtccgtctgagtggcagagttttgcatacagatctacaaaggaaccgcttggactcttctttttagatatactaatatacactggggaagtaaaggcaaggggggtcctgagtttgaggacaagtcgggcaacctgctatccgtcctgtgtgtgcacatgaggacagacagtgtgcattttgggactggagaggaagaacctgtccttattgggagacctgtctggcaataaggtggacctgtcttccatatgccttccctagcttggtccaagaacaatggactgaagaattctttctattacgtactttacccggatacaacgaaaaaataaaataaaataaaacaaaacagagactccatgttcacaaacagattctttaaaaaaaaaatataccgtagcatttcgctattgaaattatgcgggccgccgcccattcttgaatgaatgattggagtacgagagagggcttggggtgtcctacgcccatactacgggtgcacctccgtcccagggaggcatttggctcagaaagagcctcagcaacacccctttggggctgcgggtgtggctgccgcgcctccacggaggccctggggacccgttatcgcgaccgaccggggtagatccagttgtgacttgccaaaactagtgtggaaaaaggcagctgttccggaaggcacctggaaggtgatctgctctgcgagttcagcagtccaggctgtcttccttcgcgctctgctcgctattacccgaactgcgcggtccaggcagccaagaaggcatgggttgtcgcttggctgccggccccgggtgagcagtagaagtcggagtaggagagacaagacaggcgcgggcgggagcgcgggcgggagcgggagcgggagcggaaacccaatggtttttctgggaattggctgaggttggaatccaggggacaggatttgaggaccacagcccccaaggccaccggtgagggatgtgggggaggtgaaggcagtggtgactgcggcccacgagcagagaccctaacatctgttgggtgaacccagctaagaatggatggggagctgaaggacagaagctgctactgctgccaggatacaggcagggacatctcacccgctctattctggggtcctcatagtagacctgcacggaaagaggcagctgtcaccccaacattttgtcatcccgggcaggcattttgcctcttcccatttctcatccccttgcacagtctcagtatcccataaagtggtccaggtcggggccccggtttcaagaatggaaacccatgccctcaatcttgacgccaacctgaagccgcttcctataatagtgggagttgggggcctgtgggggacaccagaccttttgctacagcctgcagcccagcgatgacaatataacaacccgtattgctggcggaacattaagctttccggacctgaatcactttccttctgaagcaaccgcgctggggcccgcaggaaatacatcttgtttctagatccctgaaactttgagtattactcttaggtttcttgagtctttgatacactgctctgctcatctccagaccttagctcagctctccacgagtcttttgccctgttctattctaagcaggtccaccaaccaacataccagcaccctgccaccctgcaggagcctgggcacccttaccctggcccttggcgatttgtgttcttaggtcctatagtggtagcttcagcaggacaagaactcaagagctgaagcttgtattgactgttgctggtgttgaaatggcagggataggcaaggcttgttccactgcacacacacaccgagactcaggttgatagtgaaggctgctgttgtttttgctgattgcccatggtgtgggatgcgatgagcttattaagaaatgcccgactcacctggtccctttgcatgcttacagcttagtgttcttctgcctcccagaatcagagaagctggcactgtctctggtgccctcccagcagcagtccctgaccaggaagctgcgcaagcccagaaccatctactctagcctgcagctccaacacctgaaccagcgtttccagcacacccaatacctggccctgcccgagagagctcagctggcagcacaactcggactcacccaaacccaggtagggccagtcctgtccctgctcaaggcaaaacttcccattctctgccctctgagaacccacaaaggagtcccacaattttgctgacacggctcttggataagcagtgcccatagctggtccacagcatgagttggggggtacatgttagaggagaatgagactcaagaagaggagtgtgcccagacaggaagctgagactgggggattccagaactgaagagctggagcaaaggttcccaggactcactctctgtggccaggtcccttcccacacctttcatagacactcctaatccgtcctcttttcctctcaaaggtaaagatctggtttcagaacaaacgctccaaatataagaagctcctgaaacagagctctggggagccggaagaggacttctctgggagacccccctccctgtctccccactctccagccctaccattcatctggggtctacccaaggcagacaccctgccttccagtggctatgacaacagccactttggtgcctggtatcagcatcgctccccagatgtgctggcactgcctcagatgatgtgagtctggagggaggctggtcagacttcagccctcctgtcaagcccaggacccgagcacctgctccccttctgggaggagaggaaaccagctccagatggattttctcagaagacaagacaccgaaggagaaaaagggaaagaatggtgtggaagcctggctctccaaagcagagagttagatcaggggctttggacggccacaatcttgccactccctctccttcaaatgactgcagccccaagcacagccctaggatccaaaccaggaagaaaacaaatattattcctggcctgcaccatgggggcccagacagcccttccaggaacaaaaccagaagtggacacagggtctgtgttgttggccaccatagagtctccgactttcatttactaattactggtggtggcccagtggtagagtgagtgtttaacatgtaaaaggccccagctccaaagcaaaacttgtggacctgtgggcagcttgtgcttctccgctttaaacggctctctagcgccatatctacccattttgaattgatagccatgggcttaatcgtccatataattcaacagtatgtattaagagcctaggcccacgactctccatccttaacacctaacaagttcacctgcacacattgttggaagcccagaaggagaaatgggacaaacagattaccaggatcagtgcaggcatagctcctcgctgttgcctcgatcaaagaaactgctctcaaatcacaagctattaaaatgtatatatgtattaaaaaagaatcagagtcctgagtatattagctagccatgttcgtctcctgtatttatcccttctggagctagctgctccgctcatcttttcttcctcatctgatatatcctccccttcaccagaagtcatagacaccactttttaaattaatgatttatttatttcattttatatgcattgatgttttgcctgcatggatgtctgtatgagaatattgggacccccctgaaactggagttacagacagtagtgagctgccatgtgggtgctggaaatcgaacctggatcctctggaagagcagccagtgttcttaaccactgagccatctctccagcccaacattagattctcggtatgcctctgctgccagctagctctggggttctggctcaggaacattgtaacagcctgtggcttcatctgaaatgggaagatgctcctacacggaatggctcattcagaatggtcttcctcagcagacccctctgggggccagttgtagagggagccggggcacttcacagccacggtattctaccaggagaagactgagctagggcagtccttctggaagaagtgacctgctggaggtggaatggctttagcctacagaaaggggtaagggggaggagaatactagaaggaactggaactctccatctaataggcatctttggatctcctgctgggtagctcctagcaacatggccaggacaggtgctttaggctaacatgtggccgaacagaggactggaggcagtgtggcaagaagcaaaggaaaagcaggacagaggccgtttgggcactgtccagaggctgtaagtccagtgtgggctgggggaggagggtggtcagcttccagagcatcaggactgcagcatcaggattcatcctggaccgcagctcacaccacacatacagcatgggggtgggggaggacagggtcagcattcagggttcagggaattcagcccagagtggccccaggggctggggaggggcctccagttccaggcaaaaggcttcaaaggctagcttgctctcactgcctgaacctgttcccaatcacattaaactgagggcaccaagtctttggttgaaaagcccagtagggcacttccagccaaccccgagccagaaaagaagcttagtttggggtcatagggaggacagaggggtactgcattcagtggaaggatctcacctagggatgtctgtacacattccttctttgtcccactactgggtcagtggtcacacccagtccccgagagactcacagaagatggccccgtgggcagcaaatggcaggtcatagggcagtgtggagtgaacctacccactgtggagaccctcccatcccctttctccctttcaacctcccccctccccctgccccaccgcccttggaccctggctccactgctctaggggtggctggccccagatgtctcctctaggtcttctttgaggccaagggcctcggggtgctgttccctgccatgcaggctacacactcctctttccacagagcaagataagatctaccgccccatctcggaaagcctccaaaggcagattaattggacagcccaacacgagtcgcatcgttaaaacaacagcctgggttgtaaagttaagtagcagaagccgtaattgctctttcagccagggaccagctgagcctgcggcaccccttcccttacccccatgtgcccttcccatgtgacactcttttccacttgggagctgatccagttgccttggacttctaggtgctgatggactcggaggaatcccaacaagaaagatgcctcatctccatctctctagataccatggttactgaatcctgtgctccactggcaacactgtgtctgtcagtaaagcaaagggaagagggaaggtagactttggtcaaaaaagtgtcccagcagtggatacttgcttactttatgttagccctggctgtcctggaaagcactctgcagactgggctggcctggaactcagatctgcctgtctttgtctcccaagcactgggattaaagggctgtgtgctgttgcggctgtagccgctgcctccaggcttgccaggtttcttaagctgtgttttatttcttctcccttcagacaggaacgataacaggatttgcttcgctgtacagttgtgatgatgaactgataaaatgcctgtaacagccttgacatggtgcctgggacacagtaggcgctttataaatgacattcgcatctgccactggggcagtcagtcgaaggggtcagcttgctttcaaggtgagattctgtagtgtctattcacctctcacctaagcaaataaacctgcctccccaggatagggaggaaggatggggctggagatatatcccagcatatcccggacaacactgttagagagcaggactcaggcaaggtcccctgctcaaagtggacagcggctttgcccttctaacatcgtctgaggctacagaacaggggtagagtgtccagggcacactctgtcacatccatggtctcagccacaggaaaatggcctctttctgcatagctcaccaccccccatcactcctctgtactattttaaggtatgccccccattctctcccccagaccaaatgagattcaattaattcaattaaagcaatttggaagcagctcctgaaggctttggatgtgagataattaccagtaatttgcttctgtgaagaggaaaaggttacacggggtctagcgtggggaaggaggcagccccctcctcaccaaatgcacccagatctagaaaggattccacacagcaatcttagctgccctcccattggccaaattgcttgcaggtggnnnnnnnnnnnnnnnnnnnnnnnnnnnnnnnnnnnnnnnnnnnnnnnnnnnnnnnnnnnnnnnnnnnnnnnnnnnnnnnnnnnnnnnnnnnnnnnnnnnnnnnnnnnnnnnnnnnnnnnnnnnnnnnnnnnnnnnnnnnnnnnnnnnnnnnnnnnnnnnnnnnnnnnnnnnnnnnnnnnnnnnnnnnnnattggctccagaggcgatggaatgttatccaggtagctaaggcctgtgtagacggagctttggagatcaaggactttcctagaatttatagaggatatgggtcaatggggcaggatccactggaggtggacagtgactgcctgttcccgagtctcttgagatgccctctgtgtccccctcccccagtctctcctcactacactccagcacattctgcttctgctaggagtctgatcaaagttcctttcatcgacctggtggcaatctgctgtctgtctggccccagggccattgaagcttctgccttccccaaagcatgttacaggtaggtatccctgtccccaccccagattacctcagatacccctttccttgccagaccttaggtagtctagaaactgaggagggcagggctgggcaggaagagggaagaagcttagtgccccattccttgggatcccctgtttcaggtcatcatgatttaacaattaaaatgcagaagaaaaggcactgattaggggcacatgcctacctgtcatcccagttgaggcagagctgggtttgaggccaacctgatctatgcagtgagttttagaacagagcagcaaaggctacagcctctggatcctgtctttaaaaaaaacaaaaacaaaaacataaaggagggagggagagagagagagagagagagagagagccactagtccggaactgtctgtcactatcatctacctttgcttctctcagaggggtctctcagctctttttctctccccactgtgcctcaccttccccctgctgtaggcctgttggaggtggagcccaggaaaaattccctcagtgtgtcctccatggctgctgcttgtcccagtggacaagctcccagagtgaagccagtgtcatcgcaggcctcctcgtgtcaccccatgcctctttcttctcatgtcccagctggccagatccacaaatgaaagaatacagcgaccctgtcatcccagagtgcgtgctgacaggcgggcccaaggatcctggcacaggagtaacacaaatattagaaggtagagacaagaggaccaatagtgtaaggttatccttagctacactgcaagttcaaagccagcctgggctacatgggacttggtcaaggaagggaagtggggggggggggggacactagaaaacaggatgggtgtgaccatatatgcttttaattccagcattctggaatcctaggccagccaggtctcaaaaataaattaaataataagtaaataaaaacttaaaaagaagtctgcagtttctctctctctgtctctttctctctctgtgcatgtgtgaaggaacataggccttttttatttctcccttctggcttctctcttaccccatcccttttcttggctaatgttttctcccctatctccctaggtgctgctgtgggggagggggagggggagggggttggatggcctctcagaaatccgatgaattgatgatttcattttctttgcttgcttctttcccctgagctctggctagaactcccacccccagctcctccctacactccatgactcccagacgtgcccctagcatccagcgctgcctgagtcttaggctagctacagattgggtgggggcgggggcgggggcgggcgagcttcttctggacttctccatgcatccttctgctccgctgcccaagccttctaccactgactcccagcctgaggggggtgggggtggggtcccaaggcggcaaagaaggctatgggtttggagccctgtgtttggtagtgatcgctgggtgaactgagcaagttatatagtctctgagactcgcatgatttcctcttggctaagaactggtgctgtggctaccacttcccctcaaggctaaagttttctgaggcagaagacctcagagtctcccattagcctgacagctctctccaggaacaccactctgcttccatgaatcagactagatgcagtctacagctttgggcaaccctggagttggctggcactgagccactgagccaggtttggccagcccagaaaggggaaaggagtagaccccacaaaggaaggatcgcaggctttctgattgtcacctcctcatgggtgctgatcctcagctttgctgactcccagacagagagattaggtcacttgcaggggacaatgcccctctgcagattccacgtcgggcatgttcccacctggactggttccctctcaagagctcagctgagaccttaggaagacacttgtcttgtccactgtccagaaggagactggcccccattgccaagcctacgactaaaacccaaggcaattaggtcaagtgagttacctggtctctttctttgtcctgcttttactcaagggagccaagatggtttacatgcccccaccatattgaagttgccagagatcagactggggtgggctcctggctcagaagctcagtctccacctagtcaccccacccccaccaactctgatatttccactccctttataaggaggggctgagccgggcagtggtggcacaggcctttaatcccagcacttgggaggcagaggcaggcggatttctgagtttaaggccagcctggtctacagagtgagttccaggacagccacagctatacacagagaaaccctgtcttgaaaaaccaaaaaaaaaaaaaaaaaaagaggggctgatcacaacgggatgggcagctacgatcctcatctctccccttcccactagcaaggcctacacagccgctggtccactcctcgcttggtctctgcaagctggggcctgctgtagactactcctccctgccctggagctgtagggaattctttgctctaacacatcctcgggggaagccaggctgcacgaggctgggcttctgacatgcctctgccttgcccctgtcacattccctgagcccagggggatcagctggacccaccaatgcagagccttctacccctgtgaccgtagacctttgtctcacctcctggaggctcgtggctccctctctaagcttggaatgctgccttcagactcagatctggacccttccagccttgggcaactccatctgaaaagtaagaagcaaccccccccttgcactgctctgaagacagacgccatcgtttggtcctctggactatggatagatagtcagcctagagactgggcagtttatccctctgggtcttctatttcctcacctctgcatgtgtgctaatgaggaaactgcggcacccaggggtcaggggttcagctcagttggtagagcatttgcttaatatgaacaaatgaatccccggttccatcctgagcactgcagaagccaagtgcacccctccaagcatgctggaagcagaggtcagtgggtcacaagttcaacgttactcttagctgtactctgaaaatcagaagcccaatgtaatccttagctaaaatgtgagtttggggccagcctggactacgggagagcctgtctcaaaacaacaacaaaaaagtattgtctaaaggcctttggaggagggagaacgcaccgtgggtaagctgtgaattacagaagcaatggtggaagatacagtggcttgcccatcagcctggcacacgactttggcatcgggatgtctgtccttctctgctgctcccttctgctcaccaccgtggggtcctacaggactgccacagcttggtttctgttgtcctgcagagggcagggtttatgggctctgacaggttacagtccatcagcaagagaagcccaggcaggaactcaaggcagaactggaggcaggaagggaggtagagactattgtttatgggcttcctctctgtggcttgctcagcttgctctcttagacaacccggaaccacctgcccagggggcggggctctcccatgtcaatcataaatcaagaaaacgccacacagacatacccgcaggccaatctgatgaggacgatttctcacttgaggtggctctctcttcccaggtgactctagtctgtgacaaaaactaaccagtgcaaagatacacttctaccctggggatcccaaaacataaaaaactactttcccagccgggcagtggtgatgcacggctcgaattgcagcacttgaactgaagcagaggcaggcaggtggagctctgagttcaaggccagccaaggctacacatagaaaccctgtctcacaaccaccaccaccaataacaaaacctccacgaaactgggatggtggggtgacttggtgtgtaagagtacctgctatcacccaacctgacaacctgagttcaaagagaagcgactcctaaaagttgacctctgatctcacctttgttctcttactcctcccccacccccaccctgcccgtgtgaaagcacaaacatgaataaatgaataaatttaataaagatgtttttgaaaaagctccacagagtgccgtgttatagcaactaccgttagaatctcacccaaggcctcctgtgtctccacccttctcagcttcggagcctgctctaagcatgcatctctatgggggcccactgtgggcagagccctggtgtgggctccctcagatttccagcagcacgggtgggcaactgtgggtgtgaactgctttgtgatgaggggagacagttacagaggaagcagctaaagtgaaggtcctactgtgcttccaggccagtccagtgggtcttacgagggtggcttccaaggagtaaggccccgcctggatatttatttatttatttatttataattattttgttttggggcagagtcttcatgcatagtccaggctaccctcaaacttacaaccttcctacatcctcctcctgagtgctgagagtacagacacgtgccaccatgtcgtcggcctgacttcttcattcacagaacaactccaaacctctaaccccagaacacttccatggtggcggggaaccacagctctttcttcggtatttgatagacaccaaacaattctgagaattctacagcattgaacacaagcacatgtgcacactcacacactagcacacatccatgcatgtgcacacatgtacgcgcacacacaaacacacacacacacacacacacacacacacacttcccaggaataagagactcactgtggtggctaaatacaggacatatataagacctcagtaagggtctctggtatttccatctaagaagggaaatgtaaaacctcagctactgtcagggtacaggcctgcctcctcctctcatcccatctgctggtcctaggctataagccctgttctaagtgactatctcgtaactatagctaaagcacggttgacttacatcaggaccagtaaaagatcttcaccatagaaggaggaattctttttttaaatttttactgtgtgaatgtgtgttcacgagcgtgagtatgctacagcttttggtagttggttctgtctgtctctcttgcttctgttgttcgacatattccaggttaaccggcttaggaccttctgaaattctggggctcttctgtctctgcctcccatttctctgtcgaagtgtcttgacagatttgcaccacaacatcaggctcttgtttcgtttttgtttttctccagacaatatttctctgcgtagctttggctgtcttggatctcaggctgtagaccaggctggccttgaactcatgccgatcctcctgctggaatcaaagacaccaccaccacccagcttttatttattttatttgtttatttatttatttatttattttaacattggttggtttcaggaatcaaactcatttccttgtgcagtcagcacttgatccaccaagtcatttcaccagccacagaaagaggaattctaccggagaccacctcccacagacaaggaaggcccgcccaccttcgaacatccaactgagggtcctaagacctccctgggtcagcagtgtccgaattgcccgtagttgactaaagggaaaagtggtagcagtctgccgggctctcatcctggtgacaagctttgtagcaagccgttcacatgtgcgagctatatcccacttcatctcctcagcagctctctgagaggcatgattggctgcgttttatagcagagtgaaagtcgagttcagagagggcaggtggctgacctggggttacacagcctcagctatctcacctataagatggaatcataatggcactggcctcgccagttggttatcaggattcactaagacgggactcaggaaagcccttggcgcagaagctgtgtgcctggcacatagtaggtcctcagcaggtatcttgccaccctagaactttggagaagtttcttctgctcccttccacccagcctgccttcctgctccctcgggcctccgcactcctccagctgcccctgccccctggactgaggacgccccacccttccccgtgtctcccattggtgattcctgagctcagggtacaactgactggccccaggggtgggtgtgggactgtgccacacgcgtcgcatgacgtggctgggtgccctcggtgtggcgcacagggaagcttgtgctgttgctgtttgccaggtgcgaggtgaactgcctgaggtggggtgggggtggggtacgcccctccctcatgcagctgatcctccagggtgtggagcctccagcttactcagcaaacacttccagccctgaagtaatttgtcctgggagacaacccaggaatttgggcccacaggccctgcctgttggttctccttctcaggctgccccctccccgaatgctccccagcacctcctcaccttgagcagagagcagccccttcctgaatgcctcctgaatctctgagcatcctagactctcctgggactcagcacatcatgccccccccccaagttcccaggtgttttctgaaacactccag

SEQ ID NO: 3057 - DNA, 1500 bp, Mus musculus
atgacctctttaccctgtccccttcctgaccgtggtgcctccaacgttgtcttcccggacctcgcccccgccctgtcggtagtggctgcttacccgctcggactatccccgggaaccgcagcttctcccgatttgtcctactcccagtcctacggccacccccggtcctattcccaccctgggccggcaaccccaggagactcctacctgccccgccagcaacaattggtggcgccatctcagccctttcacaggccggctgaacacccgcaggagctcgaagcagaatcagagaagctggcactgtctctggtgccctcccagcagcagtccctgaccaggaagctgcgcaagcccagaaccatctactctagcctgcagctccaacacctgaaccagcgtttccagcacacccaatacctggccctgcccgagagagctcagctggcagcacaactcggactcacccaaacccaggtaaagatctggtttcagaacaaacgctccaaatataagaagctcctgaaacagagctctggggagccggaagaggacttctctgggagacccccctccctgtctccccactctccagccctaccattcatctggggtctacccaaggcagacaccctgccttccagtggctatgacaacagccactttggtgcctggtatcagcatcgctccccagatgtgctggcactgcctcagatgatgtgagtctggagggaggctggtcagacttcagccctcctgtcaagcccaggacccgagcacctgctccccttctgggaggagaggaaaccagctccagatggattttctcagaagacaagacaccgaaggagaaaaagggaaagaatggtgtggaagcctggctctccaaagcagagagttagatcaggggctttggacggccacaatcttgccactccctctccttcaaatgactgcagccccaagcacagccctaggatccaaaccaggaagaaaacaaatattattcctggcctgcaccatgggggcccagacagcccttccaggaacaaaaccagaagtggacacagggtctgtgttgttggccaccatagagtctccgactttcatttactaattactggtggtggcccagtggtagagtgagtgtttaacatgtaaaaggccccagctccaaagcaaaacttgtggacctgtgggcagcttgtgcttctccgctttaaacggctctctagcgccatatctacccattttgaattgatagccatgggcttaatcgtccatataattcaacagtatgtattaagagcctaggcccacgactctccatccttaacacctaacaagttcacctgcacacattgttggaagcccagaaggagaaatgggacaaacagattaccaggatcagtgcaggcatagctcctcgctgttgcctcgatcaaagaaactgctctcaaatcacaagctattaaaatgtatatatgtattaaaaaagaa

SEQ ID NO: 3058 - protein, 236 aa, Mus musculus
MTSLPCPLPDRGNVVFPDLAPALSVVAAYPLGLSPGTADDLSYSQSYGHPRSYSHPGPATPGDSYLPRQQQLVAPSQPFHRPAEHPQELEAESEKLALSLVPSQQQSLTRKLRKPRTIYSSLQLQHLNQRFQHTQYLALPERAQLAAQLGLTQTQVKIWFQNKRSKYKKLLKQSSGEPEEDFSGRPPSLSPHSPALPFIWGLPKADTLPSSGYDNSHFGAWYQHRSPDVLALPQMM

SEQ ID NO: 3059 - DNA, 26199 bp, Homo sapiens
  misc_feature (1)...(26199): n = A, C, G, or T/U
tttctttcttgtaactggatacctgagggtcaacagtttctccaaactgagccccagattccagagttagctgcccattccctcagcccagcaccaaaccataaagtagcgcaaaatgcactgagtcagaggcctggattgaaaatcctgctctgtacacatgagtgaggttttccctagcaaggcactttaagacatgggcctcggtgtcttcatctgtaaaatggggcaaataaccacctacttcacaagttattatgagggcccactgtagttatagatgtccacgtgctttggggaaggccatatatattgtagggaaaatgtcatattccctaggcatttgcgcagactcctcctgtcccctgccccttgctgacttgccaggaggactcaaaatacatcattattttgatttagaaagtcctcagccccagccccaagtctttcctgcttgtgatcttctgggcttgagcttcatggtgattccaggagcgagttccccaagttggaggaaggcagctggggaggtggcattccaggcggcatgtcagcgagtgagtcagggctggggcggtcctcctcctcctccctggaggtgggagagggcctgcctaactagcttctggctcagggcccagatgaggttactctcatttgcatatatctgcatatatgtaaatttcacctgtgcacactggcaggactgggaaagacacttgtgcaggggcaaactagtcagtgtggctggctgcttgctggaacatctaacccaggatcttggtccatggttcattcccaccataaaatgcctgaatgtgtgaaccaggcacctgtctcctctggttgcccaggccggcaacttcacagtcatttttgcttctaccctctctggtacagttacctagcccagtagggtttgtctttgagccactcttctcatgcttctcttcctttccgttgcctttgccaccacccccttgaaccttcccttctcacttcatgcttgacctattgcaacagcctcctaactgggctctctctgccacctgactcatccctcccaacccaccctcgtacccaagatgcccctgggaagcttctccactcccatcctggtcttctccactgcccatgggccccatttgaagctcttggttggcgtttgagaccctccacagggtggagcctcctgactctcagtctcagctctttcctcactttcttgcctttcagccaagtggatgtgggccctgcacacaccttttatgtgccccagtctcctcatttgtttttttttttgtttgttttgttttttttgagacagagtctcgctctgtcgcccaggctggagtgcagtggcgcgacctcggctcactgcaagctctgcctcccgggttcacgccattctcctgcctcagcctcccgagtagccgggaccacaggcgcccgccaccacgcccggctaattttttgtatttttagtagaggcggggtttcaccgcgttagccaggatggtctcgatctcctgacctcatgatccgcccgcctctgcctcccaaagtgctgggattacaggcgtgagccaccgcgcccggcccagtctcctcatttgtaaagtggggataagnnnnnnnnnnnnnnnnnnnncgcagtggcttatgcctgtaatcccagcactttgggaggccaaggcgggcagatcacaaggtcaggagatcaagaccatcctggttaacgcggtgaaaccccgtctctactaagaatacaaaaaaaaaattagccgggcgtggtagcgggtgcctgtagtcccagctactcgggaggctgaggcaggagaatgacgtgaacccaggaggcggagcttgcagtgagctgagatcacaccactgcactccagcctgggtgacagagtaagactccatctcaaaaaaaaaaaaaaaaagaaaaagaacaggattctcgtggccaaggtatggtggctcacgcctgtaatcctagcactttgggaggccgaggcaggtggatcacttgagatcaggagttcgagaccagcctggtcaacatggtgaagccccatctgtactaaaaatacaaaattagccagaaatcacttgaacctggggcagaggtttcagtgagctgagatcgtgccactgcactccagcctgggcaacagagtgagactccgtctcaaaaaacaaacaaacaaacaaacaaaaaacccaacaacaacaacaacaacaaaaacaagagtaggattcttgattgagcataggagttagagaccagtctgggcaacatagtgagactttgtctgtacaaaaatttaaaaattagccaggcatggtggcacatgcctgtagtcccagctacttgggaggatgaggcaggatgatcacttgagcccacgaggttgaagctacagtgagttgtgttcttgccactgcactccagccttggcaacagagtgagaccctatctacaaaaaaaaaaaaaaaaaaaaaaaaaaaaaaaaaaaaggactctctttgcaggattgtatgaagatttctaagaaaatgcatgtggctgggcacaatggctcacacctgtaatcccagcactttgggaggccaaggcgggtgaatcacgaggtcaagagattgagaccatcctgggcgacatggtgaaacccaatctctactaaaaatacaaaaattagctgggcgtggtggcaggtgcctgtagtcccagctacttgtgaggctgaggcaggagaattgcttgaacccgggaggcagaggttgcagtgagccgagactgcgccacggcactccagcctggcaacggagcaagacctcatctaaaaagaaaaaaaaagaaagaaagagagaaagaaagaaggaaggaaagaaagaaagagaaagaaagaaagaaagagcgagtatgtaaagtatgtctactacacaagcccacaatattagccagtattaatgttatcacttctcttactgacattctatagaggacattcctctcctggggtcccctcctcttctcagccatcttcagcccttcctctgcccttgctgaatggtgcttctccaggtaagacaaccccatggtagttaagagggctaagctggcctgggttccagttccagcttttaggcaagttatttgacatttctgtgcctcggtttccagtttcctcatctataaaatgaggatactattgatagagtatgtcttatattcttttttttttttttgagacggagtctcgctctgtttcccaggctggagtgcagtggcgtgatctcggctcactgcaagctctgcctcctgggtttacgccattctcctgcctcagtctcctgagtagctgggactacaggcacatgccaccatgcctggctaatttttgtattttttttttttttagtagagatggggtttcactatgttggccaggctggtctggaactcctgacctcttgatccacccgcctcggcctcccaaagtgctgggattacaggcgtgagctactgctcccagccagagtgtcttatattcttatatagagagaatgtaccacatacaattcttgtgatgattcaataaaataatccatgtaagggcttagcaaagtgcctggagcacagacaacacttaagtgtttgctgatattatcaatattattgtgttacccaaggcacaaggcctcaggtcaccactgctccccttctcccctaaaggccctgggacaggctctgcaaggtttctcagaggggtctccaagaatagagccttcatctggatcctcttgtctacacacccagagatctactaccctgccctccctctctttcctgtggaaagcaccagaggcagcagtgccccattggttgggagtgtggggctgagctccccttcctcactagttttggggctcatgccagaatttgggctacaaagagctgttttcccccaaggtccagcctggacaggtgagagtcagctcagagtctgggaggggtgtgcaggggaggggagaggcaaactgacttgagaaggtggaaagtcttcagggctcagttccccaaccagcttgcaccgccctcaccccatgaaactagtgcaaaccctccccacttctctgcccattttccttccccctcaccacgtcctccagccttttccaggcagcagctagtgaacttccagtgtgggatcattttccaaggagaattaatgagggtgattgacagccgagggtggaagccaggctggaggaggtgcgccatgcaccaccccctccgtaaaccgctgagagtgggtccacgaccctcctctcggccaaccactcccgccccgcccccatagctgagcaaggtgagggggaggtttgggggagagacagcggagggagggtgggactgagttacctttcacctttacctctgcctaccctccccccacaccaggcctggggacccaagagcccaacacaggggtacacagggaaagcctgagtttgagattttttgtagttgtgattatttttctcacattgaagggaaggggtatgggtatgtctgtgcgcccatgcggccactccactctcctcctcaaggcaatatttccctcgttctcccaagcccaaaccagcagaggtaaggctgtctcctcccaggctgagctgccctgatcaggattcagagaccagaccttttgttatgaaagaaaagcagtctggacttccaaagggtctggttcgggtggggtcactggtcaaaaagttaaaccaataaccccacccttgtagaccctccatcaactccagggggtccagagggcaggtgtgagtgtgtgtgtgtgtgtgtgtgttgtggggggggtggttgtgtgtgtacgtgtggtggccgtgtgctgtgtttgttgtgtatgtgtgatgtggctgtgtggttgcctatggagtgtatgctgaggctattgggtggcagaagtatacgtctgtgcatctatgtgtttgtggtgtttttggtgtgtgtgtctgtgtgtgcgcgcgcgcgctctgtgttgtattgtgtgcgctagtgcacgcattgtcttcgatgttgccgctagaggaaccttccaactcccactactcccacctccggctttcaccctgcacccggcgatgaagacgtcggcgaaacgcctactttccatgcctaggtctgggaaggtctgaagatcccggcggagctgccttcgttcggggccgggcaaattcgttgcagccgggttggcctcagggcctctcgccggctcgctatgtttccccggggcgccctggcaggccagccggcggtctgtcagtccagctcctggtgcgggcgcctcgttttggtccaccgggtccggggctgggacaccgagggaaaacttcagagctccgggccaccgagcctggaagttacgcgtcccccagcccacgcgtccccaatcccggggtatttcctgctccctcatccagcgaagttcagcgtcgcgtgtctccccagcggcgcagcctgcctccaagacaccctcaaaaccgcctcattttttgttaaccgttttctctctctctctctctctgtctctctctctcttcctccgtccccccaccccgtgtcccaagaatttttcctagttttgtttttaacatgtttagtgtgtgcataaaacatcccagctaatctcaaatagacttttcctgagcagaggctgaaatttgcaagtaatgcaaagaagactccgggagagcgtcgccgatggtggagcgggagacgggcgtggggagccccactgcagtgctgggatcgaagtggtgctgaccccaagacctctcccctcctcctcccccgggagcttctccagggttatttgggaaatgagggggaactccaatccctgagaaagcgctcaggggcttgctgaggtgagcgcaaatggaagcacaaggccgggctggccgtgggctcagtaaccagtcggctgcccggcttgcgccagcactaaatgctcgatcagaaagagaaaaagaggcgcaataattccaaatttcaggaaaagtcaaatcggagaggggggacgcaggtctcttcagactgcccattctccgggcctcgctgaatgcgggggctctatccacagcgcgcggggccgagctcaggcaggctggggcgaagatctgattctttccttcccgccgccaaaccgaattaatcagtttcttcaacctgagttactaagaaagaaaggtccttccaaataaaactgaaaatcactgcgaatgacaatactatactacaagttcgttttggggccggtgggtgggatggaggagaaagggcacggataatcccggagggccgcggagtgaggaggactatggtcgcggtggaatctctgttccgctggcacatccgcgcaggtgcggctctgagtgctggctcggggttacagacctcggcatccggctgcaggggcagacagagacctcctctgctagggcgtgcggtaggcatcgtatggagcccagagactgccgagagcactgcgcactcaccaagtgttaggggtgcccgtgatagaccgccagggaaggggctggttcggagggaattcccgctaccgggaaggtcggaactcggggtgatcaaacaaggaatgcatctcacctccgtgggtgcttgtgctgcgcaaggaattattaccggagcggttgcgatggcctttgcccggcgacccaagaagagtaagcaaactaccgtccacccagcggatcaggtccaatccctgcgcctcggcccaatccctagagccccgcggcgccgtatcccctcccccccaactctggaccccgccgtctgtccccgcggcatcaccagggtgctggagttttccgagcaggccccttgcgctaagcgagaggatctgtgagggaaagttgggagagccacttctggcttttgtgaagatcccgggcctgaggtattggtagtgacaggagagagttctctttttttcttccttctttccatccctcctcctccccccacttcttctttttggttttctcatggttttggattttagtttttgcaatttgtcataaagcaaatgacaaaggcttggagttcttagtccagctcagttcttttatcccttctgggtaaaccagtctcagagaaggcaaatgactgatgcaaaatatcccaaccagcaacttcgtggctgaactggaccagaacccaagcctcaagagtctcaagccagctctccctctttaaaaatttttttgtaaaatatggaatgcttcataaatttgcatgtcatcctggtgcaagggccatgctaatcgtctctgtattggttcaactttttttcctaagcaagcatcctctctcccctctgatccaatacgagattactgtgcttcccagcccacatcctcaccacgtccacctttcctgaggttggtgagatgagactcctattggagaggatccctccctggggagcctgcttctgaggagaccccaggttatcccaagctggtgccccagccccacaccctctggaatatgggagaagggagccttgaagaaacaggtgatgatggaaggagatgtttcctcatttgtaaaatggggataatagtgcctggagtttgagcgtgtgtgtgtgtgtgtgtgtgtgtgtgtgtgtatgcacgcacaggacttggatgttgtgagtgcttgataaattccaaagggctgcagagtatgtcctgctgctgcataggggtgaagatcctctgagtccagagaagccctgagagcttagaacttaagacaagtatgcactggggatctcttggctttggaggatgcccaaagccaactgtggcagaaccctgccagaaaacccatgcctgcccttctttcctgggtctgacaagaaaggattctgtgcacatggttctaagagggaatgtctttccacttatcctgtcaactccagctcaaaagcacttcctttgggaaaccctccctcacagccaaccccacccaaaaaacattctcttcctttgatgcacaactttgatgccatccctggaaactctcctcagcactgctgtaaggctgcctccatccctgtagaggaaaatggtgatggtagaatgaaaggtttagaaggatatatatcctcacaggttcacagctccagctctaaggagatggtggcatggcgagaattaaggaagaaagggagaaaggtagtcccacatagaataagcatttctctactgagcaaaccctccacagcctgttggacgagaggggagtgggttctccagctgccctgcaaaagccccttcttcccggctccaaggcttcaagatgaagagctccaagccaggtgctagagtctctccttggaaaaactcacctctatctattccactggggagtctagtttgaaatagacttgctcttcctccttgcaggacacctgactgaacttcaaccacccctgcacacccatttgattgattttgtctaaggaggcttgggctccattccccagccagtgttttctcctattcttccaggctgctgcctcctcctcctcctcctcctcatcctcctccttcttttttcgacatagagtctcactcggtcagtcaggctggagtgaagtggcatgatctcaactcactgctgccttaacctccagggctcaagtgatcctcctgcctcagtctcctgagtagctgggactacgggcatacaccaccatgaccagctaatttttgtactttttgtagagatgagtctccctatgttgcccaggctgatctcaaactcctgagctcaaccgatctgcctgcctgggccaaatgctgggattaccggcctgagccaccttgcctgatctctctttcttatcaccatcctcttccatctcccagttctacgagggctaccttcactctgaacgctaacaatgagagcatgtgtgtgtgtacaaacatgaatatgcctgcccagttgcataaagtgggaacaggtgtttgggtatgctggggaatttgtgaagactggcagtttagggacacatctaacataaggcatcttagatgtgtgtggacaggtatttctcatagagcaggaacacaagtatacattttatatgcttggatcttctgtattttctagtaggtacaccagtgatttgacttgtatactcatgaatccatgtaagagacaagtactagatagtgtttttatttagggatagtgctaattcatctttaggtatgtagatgtatacacatcacagcctaaagtgtttgcagatttacaaatgaacctctctttttatagaggaatgctagtgtgaacatcagtgtaggtacctccatgttggtatatgtgagtatacatgttgtatttgaatggagtccctgtgtagttgtgtacacgtgtcaataaatgcttgtatacgtggacacgtgtccatcgaggccatggatactaatgtttagaagcaagtcctgaacacagcctggaaaatgcgccagggagactggcctgcagtatttcctgtgcccgcccaggagccatccaactggactcatctcccactcccagatttcgtccgggttcaagcaacacttcagccccctgcggcgccaggtaaggcggggcaccgcacaggctaaagcccagagggcggatcccttcttcagcctcgggggcctgcaaggagctgcggtgtcgcaaccaaaccagggcccctgccggaagcggaagccagcacgcagggcggtggggtgcagcggcggcggtctcggcgtgccaggcccagggcgccccgcgggggcgtgcgcgccacacgcgtgcggggcaggctgggcgccgggcggcaccctcccagccccggcgtctatttaccaacaaactgccggcgctcagcagcggcgcattccgacgcgctgactaagcggttggcgctggcggtctgcacttgactccccttcaggtccaccgcggctggaccagaatcgacgtgcagatccccgaaatcgggagactgcaaatgcagattccctgcgtctccgcagcccccgggcctctgcccaccacccagctccctgtctcttgggcatccagtctcgccacctctctagcatttctgccattataaccgaggttcctggactgcaccaatcgctctgcaaccccagcacctctcggaggagaccccgaggtagaccggcctggagcatgcgcaccgcccctctcccatttaccacttctctacagcgggctgtcccggggggcggggcccggctgcaagtctccgtgaggtcaccgcgggcggtagccaatccgggacgtctaagagggcggggcccccgtcgggtcccgggaaccgaacccgatggagaggagggggcccccatggatttagggggggaggggaaagtcatgggggggcacccccccggaacccctttcccaggcgcgcgttctccgctgaaagaggctcagagagacactttctccgggatcttaagtgtgggggctgctggctggggggcccgtccggcccaacgccggaggcttggaaaagagagttggcagcgggagcggactacgtgccgggccatggcccttctgcccgggccctggccacaatgacctctttgccctgccccctccccggccgggacgcctccaaagctgtcttcccagacctcgcccctgtcccgtcggtagcggctgcctacccgcttggcttgtcccctacaaccgcagcctcccccaatttgtcctactccaggccgtatggccacctcctgtcttacccctacaccgagccagcgaaccccggagactcctacctgtcctgccagcaacccgcggcgctctctcagcccctctgcggacctgcagagcaccctcaggaactcgaggcaggtaagttcggccgtggaggctcttcccacctctggggttcggctcctgtgcgcccctaaacttctccctcgcctggttggacgcagctagcgggattcaaaccttccttggattccctgggatgtgggggtggggggagggcgaagggatggggcgggagacacggggggaggggcgggggagagttgatctaggtctcctttcaaaaccgacctggtttcgatttgcagttgtgtaaagacaggcgagagggcccccccaaccccccacctggagcagcggggctgtctgtacctactagtaacagaaaactgaagcaatccagatgtggggatgggggcctagcccctttgtcagaatcccccagcccccgtcctgtactccctttctgccccattgtcgcccctctctgcgttagtcttgtctcagaaagcagtgatcaagccaaacactgaaaaacagatcaagtcctggtaggagggctgtagacatcgaggcttattctgggctctgtcctctcccttccctggccttacccgctctcctcagaccaggcctgaccttgactggaagctggcctggcagaatctgggagtaggacccttctatccattgttctgagaaggtagccaaaggctggtaggaaagtcgctcatctctccctgactacctcagccttccagccaaaggagccggccatcgctgtcatctccactctttggctttggggtaggttaggccacagttcccgttgcctggagcaactctgagctcctgagaaagtgctcactggaaggcctcaatgaagcggagaacctggcccgtctttgggatcctgggccttgcagctgagctgacatacaatgtgggtatggcattgcccacaatcccatctgcactggctccagcttagcctccaggtctctggactctctgcctccatctaattgctcaccccctcctcctgcaattgtctttggcagtctcttccaaggaggcacacccattaggtgacttcactggagtcagctcaggaccaagacatcttcctcccttctcctgtggctctgacatgctcacaaaccatcagagccagaagtgaccctaggatttagaagctcaacttctttgatgtatagatgggtaaagcatgtggccaggagcatcgattttagggagcttcctccaacccccccaaaattaactgccttctgtgacagaactgtggctgtctcctgggctgcggagtgtggctggagtgggcgcagttgcagggaggagtagttctagtttttcaaatgaatccctttgactgtcctttagtgtatgctaataggatatgtttgtgtgtgttatgtgtttggggactggggtgggaatatcatgaccttgtcctcaggggaattgctggcagtagggttggtgttgtcagtcttgtctgagatctaaggacaacagagtggagagttcattttctttaaggactttcccccatccagcgaaaaaccacacacacccagatttccttagaatacatttctagcatttctctgctggaactggtgggtttgggcgctctagagtggagggcatgtgatggagagcatggggtcctccttttacttccactctatgtccactcctgccttgggaaaaggtttggctccaagtgagcggtgccaccaccccgttgagccgtagggagcagcgggcctggagggaggccttggggctccatgatcgcgacccgggcagatctcgtaacttgctggaactggggtagggaaaggcagctgtccgggaaggaacttggagggggtctgctgggagagttggggcgcggagggctatgcgaattcagcaaccgggtcggcctcagagactctgcgtccccgctcgaattgcgcagtccacgcagccagagaggcgcgggtgggctctgggctgccagcccagagctgccagcagtggggtcgaggcaggggaggcaggacaggcgcgggcgggagcggaaacccaacggtttttctgggaattggttgaggcagggtcgaggagggaggatctcagaagcccgcagcgcccgaggccacgggtgagggatgcgggggaggtgacggcagctggtgaccgcggctggccgagggcgggtacactgacgtgtggagggtgagcccgactaggggaagaaggtggggggacgcgggcggacagaagccgctctctctcggctcaggtcggctggacagacccgcagggaatgcggcgaacgctgccctaagcgcccgggcattgcggctgctccatccgccctactcctcccattgcctgggacctctgcagcgtccccgtagagccgcgcaggttagggtggctggcttggaagaacagaaacccctcggcccaaccctcccctgtccctcagcattctagggctgggctgtcccgcggccgagattcctggagagctaggcgggccagagctgaccagatcccccgcggcggcaccgcagcgcgatccaggagtggccccgccgggctacgctgcgcgctcttggaacccgggtcaccttccctgccgccggaaccgctctgtgcgcgctgcccaacgaaggaaggggctgccccacgcagacccggcttctgggggtccctggaaacccaggcggccacggtgtggcgggggagacatggtcacttttcctgcagggtgcgcctgagcagaggggcagcccgttacagtaggcgaggccagggcaaacccggggtcactatcagcgctgcgagactggtattcaaggtcctctcagccgggcctctcacccaccccgctggccgcagccggaggctgccacgcggacaccgtctcaagcctctgagcattgctctgagcctctgcctgcaatgtccttcctctgtcatctctaggcctcggctcagccctggacctagcctttctgccccgccctaccccaagctggcgccaccgcccgtggctgaactccgacctcccaccgcaggcgccgcggtaccctggctgtggccctcggcgctttcttcctagggtcacaggacccatacgagtgggagctccctgggagcagaactgcgtcttgtatcacctggcgcggtgaacgtgggggttgaaacgctccacgcggaaggtagagggcaggggccaagggggcgatcctggtggctgcgctttttgctatttgctgccgacggcatgcagacgagatgcaaataagcttatgaaactgtccgtcctaccccctcgctccctcctcgccccctacaccgtgttgtgctgcccaccagactcggagaagccgcggctgtccccggaaccctccgagcggcgccctcaggcccccgccaaaaagctccgcaagccgaggaccatctactccagcctgcagctgcagcacctaaaccagcgtttccagcacacgcagtacctggcgctgcccgagagggcccagctggcagcgcagctcggcctcacccagacccaggtggggccagtgtcgtccttccccatctctcaccttccctggttctctgggaactcatcccccagccccagctgtgaatgactgatggattggtgctgtggccctgttgtcacagttctccagggaatgttcatagctggctcttagtaagccttggggggaatgtgttgaaaggtgtgcatgtatgtgcgggtggggtggagtgggtcaggaagaggagggtaggtcagacagggagacatggatactagctcagaggcaggaactcagaaggctcctggggctgtgggggactgaagcaaatgttcccagcctagggaactgctggtctcccaggactgtgcctgcacctggatccctttcccttcctcgaaacttttcacacatatcttcctcctgatctttcattctttccccttttcttcccgaaggtaaagatctggtttcagaacaaacgctccaagtataagaagctcctgaagcagaattctggggggcaggaaggggacttccctgggaggaccttctctgtgtctccctgctccccacccctcccctccctctgggatctacccaaggcagggaccctgcccaccagtggctatggcaacagctttggagcctggtatcagcatcactcctcagatgtcctggcttcgcctcagatgatgtgaatctggggaagggcgggtcaggcccacagccttcctgcaaagcccaggacccaggcagtccacctgcaccccttctgggctgggaggaaaccagctccagatgggttttctctggaggacaagcagttagaggagaaaaaggaatggagcagagcctgtacccctaaccctaacagctaaatcaaggacctcagccttatataatcattgtccccaccactaccatggactggacaccttcactccagctggacaaagactctggagagagagccattggctggagttgagactgtccccagaacccttggtcttgccactcccccactccttcttccctctctccctttctcctctccctgctttcttgaaaaggactgaatcgccactacagcctgggtgcaaaatcagcaagaaacattgagtatttttttttctttgtatgcctttggccttgcacaacccatttgtgagcaaaagcagaagtggaccaccatcagctcccacccacccagcgatttttccttggaggtcagcccgttacccccataactgatttacctacttaccatactgggaggtagaagagatgcagagaaatgtggaatttgtggacctatgggtaatttatgctttcctcctaaaaaaaaaaaaaaaagccctctttcccaccccctccccatctcccctttttgaatagataatggatccaattatccatataattcaataggtatttattgagaggctcccttctattccccatccctaatccctaacgaacccacgggcacacacttttggaaacctggtaaagtaacacttagggggaaatggggacaaactggctctctggattagtgcgggtatagacacccccaaataggtgggtaggcccattgattcagctccttgcagctgtctctgttcaaaggaactgtgcagatttagaacgaattggagcttgagcttcacaccaccagcttccagagattaaagtttgtacaaaacattgcattctggctgtgagatgtgtttgtttcctgacttcttatgggtagcggctggtcatgcatctcttctggcccatctgacttttctaccatggaattacaggtatcagaggcactggattctagatttgtcttggccactaactagctctgtgattctggctctggaatgttctaacaacgtccacagtttcatatgctcccatgtgaacccaggagatgctcatgcagggtctgagtgctccttcccaggagatgctctcctggcccagttcaggagggagccaggcaccttaccagcccccaggccccacctttagcccagggagaggccctgttcaccttgagagagggcacacccacggatccggtccagtcctacctggagaagtgtgctgcttgggggcaggatggcctcagctcaccttggggaaggaggaggggcaggtctgagaaggaaaacaccaaaaagaactggaattctcttccatccaacaaacatttggagaccctgtgctctgctagatcctagggataccatggtgactgaagcaaacaaatgaccagacgctggtgtggtgagttccaggcaaaggaaaacacagatggtggcgtgggtattgtcaagggcctccaatccagcctgggccagaggggtcagtgctgggcgagaagggcgggcggcctggggagcagcaggacctgacagactcctggccaccacacctcactggactacatagcaccacccctgctcccaccaggatcagcaggataaggaacgccttgggagaggagctgaggacaagggtggcagaataattcagcgaatccagcccagcatggcctgaggggctgggggaggggcctccaaatccaggcaaaaagcttccaagttgagcttccctctgactgcctagacctgttcccagacactgcaaactcggtgcctgtcccagtctgaaaagcccactcagacacttccagccaaccgctgcaggccagagagaagcccaaattggagtcatgtgtagggcagaggggtatgaaatcccccagctcctgacgcctacagtcagttcctcctcagcccctgttcctcaccctgtgttgggtcagtgaccacccctattccacaaaacactcccagagaattctcttggggatggcacatggcatgggtagaccaaagccaagatccaggagtggtgaggaatgggagtgccaggaggataaatatcttcctcttcctacaatgccttcccctgctccaagccccaggctccactggctctctgtcaccccaggcccagttctctcctcttggtctcctctgaggccacaggccctccaggcagctgttcccgcccactgcaggttgcacactcctctttctacagacccaagataagatctaccgccccatctaggaaagcctccaaaggcgagattaattggacagcccaacacaagtcacattgttaaaacaacagcccaggttgtaaagttaagtagcacaaggagtgtaattactctctcagctagaggccctgagctgacagcatccacccccctctggccccctctccttctatccatccttttcaggggaaatgggaacctcttttccatttgggagctggcccagtttccctgagctcctgggcagtgatgggcctggagctcccgggcagtgatgggcctggagctcccagtggaggaggtgcccggttcccttccctcaggccatcagggctgtagaaggagaaccccatggttcctttccctgaggaagccccactgggaaaattgggtcagtaagggagggggaccaagactgggtggtgaagaacaggggctttaagctataaagagtcccggctctgtcatcttctagcagtgtgacttttggtgagttacttaacctctctctgagccttgctttttcccatcccccacccccacccaagatgagaatactaataggacttgctttgcagagtgattgtgatgacaaaatgagatagtgcttgtaacacgcttgacatggtgcctggaacatagtaagcacttaataaacggcatttacgactgctgttattatcaggggaagaagaggaggggttacagtgagggggaattcttactgccatccattcaccttctgcccctgggagaactgcctcctaaggaggcagacgaggaatgaggctggagaactcaaaacatccctggtcaccaccatccgagagctggatacaggcaaggtcccaaatgcagaagacgcagcacagtgcatctgaagtcagctgaaactggaagacgggaaagtgtgttcagagaacgtccagggcactacaagggtctcagctacagggaagctgacttgggcttccccacctttctgggtcactcaaccttccctctccccgtatactattttaggtcatgcctccatgttttcccccaacaaaatgagatttaattaattcaattaaagcaattttgggagcagctcctgaaggctttcaatgtgagataattacaagtaatttgctgccgtgaagaggaaaagggcacatggggtctgaggggaagggaggtagccccctcctcaccaaatacacacagatcttgagggattccacactgcaatcttaactgccctcccactggccaaattacttgcaggtgggaagagggagaatgtggtggtgatggttgagggggaagacacccagtgacaggctgcccctcctccacccccaaatctgaggtgggggtggggagctggttgttccccgacaaaatgtctgcaatgccatagcagctgattactcagctccaaacctcatttgagtttggatgcctggacttgcctctgggattgtatccagagagtcaatggaatgttatcccagtagctgaggcctgtgtagacgggggctttggagatcaaggacctccccagaatttataagggatatgggtagagaaaggaaaagtctttagaaggtggacagtgatttcctgcttccaccaaggagctgacgggacactcatttctctcctccctgctcgaagtctgtctagtttctgcctggtgtctaatctcaattcctcccattatagtgatggcaaagctcctctcagttgaatgcacagaggcttcttccttccaaaaggcatcctacaggtgtttcccctcccctctgcccctgggataaccctttccttcccaggcctcatttggccaggaggaggcaggagggggacatgatggagctgagaggtagatgctgggaggcaggggtttaaaacaaggtgtggggatggacttcagggctctgcaaagaccctctcaagcccgcccatgaaggagctggctttcaagagcctagggttccccttgacctgggagccccgttccaggaggtgagtaatgttttaacaatgatggttgaaaagaaaaagtcaccgaccccatagtgtttctctttcatatctccccctctcatttcaaggtggggtaaagaggaagagttccgtcagctcttgtttctcctcacctcaccccaccccacctcgtgcccctgcccctactctgagcagcatggctgttggacctggggagccaggagaaattctatcagtgagtccttgggtgactgctctctctccttccaagatgaaaacacttcgagagagacaagcggcctcctcaccacgcctccacttccccatttcctggcctgtgcagattgcttaaaaagggggaatagggctgggcgcggtggctcatgcctgtaatcccagcgctctgggaggccgaggtgggcggatcatgaggtcaagagctggagaccgtcctggccaacatggtgaaaccctgtctctgcaaaaatacaaaaattagccaggcatggtcgcgggcacctgtagtcccagctactagggagactaaggcaggagaatcacttgaacccaggaggcagaggttacagtgagccgagattgcgccactgcactccagcctggtgacagagccagactccgtctcaaaaaaaaaaaaaaaaaattggtggtgggggtggaaataaaaggcccttctactcctaacctcacaatacaaaggccccaaagaaatgcttggagacaagcaggcccagggagctaggcacacagacaccgcatgtgcacacatgaacccacagaagacacgcacacaggcaggcggacacacacaatggggtgcagggagtgggcagagccacatgtagacacatgtgtacatgaagcattcccatggttgtacatggacataacacagagagatgccctcgcagcttatatactcacagagagaagcacaacacagcgaagcaccaaaagggagatgcccggcgacttgaccgtaggcagaaacagacatgcatgtccagaaatatacagactagcttccttgtgtgcaagcagcacatgtgtgtaggcggggcgggggcagtctctttttctctacctctttcttctcctgccaccttccctttctctctccctttcccagctctccatctattttctgggaacatttctctggtgagtggttgaggagagaggctgaacagccacagaaactcgataattttattctgacttgattgtttgtgttccctgaagctttgcctacttcttttcctaagctctagcaagaaaagcttctgtccccagcccttcctggtacaactcatggctcccagacatgtccttggagtccagctctgccacgggaacccagaggctatttaagggggcttaagtggcctttccttcagaagtctccactgatccctcttccccacttcccgacattgactccaatccagggaagcaggagggggcttgggatcacaaagtggtgaggaaggcacagctctgcgaaccaaagatctgtatctgatactacttgctgtgtgaccttgggcaagttacataccctctctgaaactcagataatttctcttgctaagttctgggtgcagggaccagagtgggctaatgtgtgtctaccaccactctccactctagtctggggctttgtaaaggcagaccctgcctctaccatcagactgagctcccctgtgcctcagatgggatgcatcctacagctggctcttcccagccccccagtttgatgatgctgaggtactcagccccactggcaccctagggggcatgtctggccagctcaggaaggggaaaggagtcggccccaagcttcctccaaacatcaagctttctgattcagtgtctcacagtgccaggccttcagcctctctgacccaaaactggagagatgacttcatttccaggggagggtgccactctctgtggagggcatgtggaagagattcctctcagctctgtatgaaccattcctttcagagtttagttgcttggggttaagcctgaagaagatcattttgccgctgcatgagacttcactcaggtctgtggcccccattctctcaccctccccatctccagctgatgtaacatagagcccacatcatgaggttggagcacccacctggatcatcccactttgatcacgaggttccctgggcatctcctccacctacaagcccaccccatgattatcttctctgtcctggtttgcaccttaacctgatccattaagacttgcactctttcttcagactgggggttgccagagagcgcttcatgggcctcccctcttggactggggactcctgggcaccctggcttcttcctctgcctgctcacccctccctcaaccctgatgctcccactctctttggggtggagaggctcagcacatggggttgggtagaggcctaagaggggatggggccacgtggtacttgccaggccacgccctttccactgcctgccttgcctgccagagagccacaagaccactcctctcgggctggacccaggagctgctttctctgtctctgcaagctcgggcctgctgcaaactcctcctcccagccctggagccgccgggaattctttgctccaacagatcctgggggaagccagactgcaggaggctcctgacatgcctctgcccagctcctgtcacattccccaagcccagggggatcagctggatccaccaatgcaggcttcttccaccccttgtgacccaggtctttgccttaccgcctcaaatcctcctacccacctttctaaaccgtgaattctgtcttgggactcacctctgactttggatccctcccactcccagccccttggcagccctacccgagcaataattattatccccccagctcccttggaataacatttacctccttctccatacagcctttataaagtcttcatggatttgcactctgagatgcaggcactcagtcgagaggccttgggcaagtcacttcacatctctgggtctttatttcttcacctatgcagtagggccaatgatcaaatgatgtctccaaaggtcatggagacaaggagagtgcacccctagtaagttgtgaaaaataccaggtatgctaggagatatggtggcttattccttcaccctggctagaccaacttggtgctggaagtgtctctctttccatcccctaacttcttctctgacccaccagttcaccatataatggagaatagtatagttctacccccaggaacacaaaataacaaagagccagattcctgattcaagtccaactcgatgaccttgggcaagtttcttaacctctgtgtaccgcacctttcttacctggaaaatgaagatgagagcatgtgcttcacagagttttttgtgggaactatatgagttgaaacccaaaagtcagccaggcgcggtggctcacgtctgtaatcccagcactttgggaggccgaggcaggcagatcacttgaggtcaggaattcaagaccagcctggccaacatggtgaaaccccatctctactaaaaatacaaaaaaaattagccgggtgtggtggtgcatgcctgtaatcccagctactcgggttgctcaggcaggagaatcgcttgaacccaggaggcagaggttgcagtgagccgagatcacgccactgcactccagcctgggtgacagagcaagactacatctcaaaaaaaaaaaaaaaagaaaaagtcacaataatacagtaagcattcagcaaggattcataattattagtatctctgactgacaagcaaggaaaacactctctgtccacgaggaatcttgcccaagtaccagttcctctattgctcttctctgcttggaagtctctattcccaggtgtcaggatggccaagtggtctaaggaagtctctattcccaccaagcatctttttgggttggagccacctgtcagtaaagccctggtgtgggctatcttcttcagccaccctgtagtgtgggtgatgggctggacagaagctgctttgtgactagtggaggaggttgtgcaggagactggctaaagtgtgaggatgtctgactgcgctccctgggcagccctctgaacacctcaggtgggaagacaactgaagagggaaggccatacagtgcctgcctcagtcagagctaatgcagaggcagacaatgcccctgacttcttcattcgtgaaagattgccccctcctgtaaccccagattccctccaactacgcaaaaaagcagagataaaactgtctccggctgggcacggtggctcacgcctgtaatcccagcactttgggaggccaaggcgggtgggtcacttgaggtcaggagttcaagaccagcctggccaacatggtgaaaccccatctctactaaaaatacaaaaattagccgggtgtggtggcaggtgcctgtaatcccagctacttgggaggctgaggcaggagaatcgcttgaacctgggaggcagaggttgtggtgagccgagattgcgccactgcactccagcctgggcgacagaatgagactccgtctcaaaaaaagaaaaaacaacaataacaacaaaaatatctctttttactgatatttgattgcatgcttagaaaactcaagaaactccagaggaaaaaatcttccagaattaagagaattttggcatggtggctagatatgagataaatataagacatcagtaactgttctttagtatagcaataaataaggaaaaatattccttttaaaatggaaatgcaaaacaaaatctgtaagcatatagacgtggagaccagatatttagctgatcagtaactgagatatataaacccctgtcatcatcccttctgctggttctaggcacatgatggtttcctgggtgatcatccttctattatctgagtcatgagatcaagaaagcacttttccagtagagggaggaattttgtaggtgatctcccctgacagagaagaaagggtcaactttggactcatggagggtacatagaactccctgggccaactgaggaggacgctgaggagtgtcctacctgcctatggctgatttaatctaaaacggacagtacaggccggcgcggtggctcacacctgtaatcccagcactttgggaggctgaggtgggcagatcacatgaggtcaggagttcaagaccagtctagccaacatggtgaaaccccacctctactaaaaatacaaaaattagccaggcatggtggtgggtgcctgtaatcccagctactcgggaagctgaggcatgagaatcccttgaaccccggaggcggaggttgcagtgaaccaagattgcaccactgcactctagcccaggtgacaagagtgaaactccatctccaaaaaacaaaacaaaacaaacagaaacctgacagtacagtttgttgagctcccatcattgtgttaagccctttatatgtgttatctcatttaatttcctcagctgccctgcaaaagagatttggttagctccattatattgatgagggaaagtccggctcagagaccacaagcgactgacctgaggttacacagtctcattgatctcaccaacaaaatgggataataatgacactgatcttggcaggtagctgtgaggatgaaatgagacagtgcctgtggaagctcctggcatagggcttagcacacagtaggtcttccgttagcaccatccctgcccagatcttgggaggaactctctgctcttctgcttgccttcctttccagccccaattctgctccctctggccttctgacttctttagttgcccaccctcccctggctgaaggcacatcatcctcccccactcaccatcagtggttcctgagctcagggcaggcctaactgacctagggagtgggtgtgggacagtgccacacacattgcatgacgtggccaggcaccctcagtgtgcagggaagcacacgctgctgccaggtgcgaggtgaactgcctggggtgggggatacccctcccctgctccagctaatcctccagggtgtggagtctctgttccctgctgactcagcagacacttccaatcctgctctgatttgccccaggagacaacccaggaatttgggccttgaggccccacccactgttcccatccccaggtttgtctccttccaaggtgcctatcctggctgcctgacccctaagcccctcctctgactcctcatcttgggcagaggcagccaggagactcctggcccttcctcaatgcttcctgggcctctgagcttcccaggacgctcctggagcttaacaggcctggtccatactctctcccacccccaaaaagtctgctagattccccaacaaaacaggccaattgaagaaaagcattcaggggtgtcagatcactgggaccacctgcttgtgatccagaggcctctcttggttctgcaagggtttgagagcccactcagcagtgcctgtccaggtgtagcctcgtgtagggagaggagccccagcactaagaacaatcacctgctgtg

SEQ ID NO: 3060 - DNA, 2447 bp, Homo sapiens
cgctgactaagcggttggcgctggcggtctgcacttgactccccttcaggtccaccgcggctggaccagaatcgacgtgcagatccccgaaatcgggagactgcaaatgcagattccctgcgtctccgcagcccccgggcctctgcccaccacccagctccctgtctcttgggcatccagtctcgccacctctctagcatttctgccattataaccgaggttcctggactgcaccaatcgctctgcaaccccagcacctctcggaggagaccccgaggtagaccggcctggagcatgcgcaccgcccctctcccatttaccacttctctacagcgggctgtcccggggggcggggcccggctgcaagtctccgtgaggtcaccgcgggcggtagccaatccgggacgtctaagagggcggggcccccgtcgggtcccgggaaccgaacccgatggagaggagggggcccccatggatttagggggggaggggaaagtcatgggggggcacccccccggaacccctttcccaggcgcgcgttctccgctgaaagaggctcagagagacactttctccgggatcttaagtgtgggggctgctggctggggggcccgtccggcccaacgccggaggcttggaaaagagagttggcagcgggagcggactacgtgccgggccatggcccttctgcccgggccctggccacaatgacctctttgccctgccccctccccggccgggacgcctccaaagctgtcttcccagacctcgcccctgtcccgtcggtagcggctgcctacccgcttggcttgtcccctacaaccgcagcctcccccaatttgtcctactccaggccgtatggccacctcctgtcttacccctacaccgagccagcgaaccccggagactcctacctgtcctgccagcaacccgcggcgctctctcagcccctctgcggacctgcagagcaccctcaggaactcgaggcagactcggagaagccgcggctgtccccggaaccctccgagcggcgccctcaggcccccgccaaaaagctccgcaagccgaggaccatctactccagcctgcagctgcagcacctaaaccagcgtttccagcacacgcagtacctggcgctgcccgagagggcccagctggcagcgcagctcggcctcacccagacccaggtaaagatctggtttcagaacaaacgctccaagtataagaagctcctgaagcagaattctggggggcaggaaggggacttccctgggaggaccttctctgtgtctccctgctccccacccctcccctccctctgggatctacccaaggcagggaccctgcccaccagtggctatggcaacagctttggagcctggtatcagcatcactcctcagatgtcctggcttcgcctcagatgatgtgaatctggggaagggcgggtcaggcccacagccttcctgcaaagcccaggacccaggcagtccacctgcaccccttctgggctgggaggaaaccagctccagatgggttttctctggaggacaagcagttagaggagaaaaaggaatggagcagagcctgtacccctaaccctaacagctaaatcaaggacctcagccttatataatcattgtccccaccactaccatggactggacaccttcactccagctggacaaagactctggagagagagccattggctggagttgagactgtccccagaacccttggtcttgccactcccccactccttcttccctctctccctttctcctctccctgctttcttgaaaaggactgaatcgccactacagcctgggtgcaaaatcagcaagaaacattgagtatttttttttctttgtatgcctttggccttgcacaacccatttgtgagcaaaagcagaagtggaccaccatcagctcccacccacccagcgatttttccttggaggtcagcccgttacccccataactgatttacctacttaccatactgggaggtagaagagatgcagagaaatgtggaatttgtggacctatgggtaatttatgctttcctcctaaaaaaaaaaaaaaaagccctctttcccaccccctccccatctcccctttttgaatagataatggatccaattatccatataattcaataggtatttattgagaggctcccttctattccccatccctaatccctaacgaacccacgggcacacacttttggaaacctggtaaagtaacacttagggggaaatggggacaaactggctctctggattagtgcgggtatagacacccccaaataggtgggtaggcccattgattcagctccttgcagctgtctctgttcaaaggaactgtgcagatttagaacgaattggagcttgagcttcacaccaccagcttccagagattaaagtttgtacaaaacattgca

SEQ ID NO: 3061 - protein, 234 aa, Homo sapiens
MTSLPCPLPGRDASKAVFPDLAPVPSVAAAYPLGLSPTTADNLSYSRPYGHLLSYPYTEPANPGDSYLSCQQPAALSQPLCGPAEHPQELEADSEKPRLSPEPSRPQAPAKKLRKPRTIYSSLQLQHLNQRFQHTQYLALPERAQLAAQLGLTQTQVKIWFQNKRSKYKKLLKQNSGGQEGDFPGRTFSVSPCSPPLPSLWDLPKAGTLPTSGYGNSFGAWYQHHSSDVLDQMM

SEQ ID NO: 3062 - DNA, 1770 bp, Homo sapiens
ctcccaccgcaggcgccgcggtaccctggctgtggccctcggcgctttcttcctagggtcacaggacccatacgagtgggagctccctgggagcagaactgcgtcttgtatcacctggcgcggtgaacgtgggggttgaaacgctccacgcggaaggtagagggcaggggccaagggggcgatcctggtggctgcgctttttgctatttgctgccgacggcatgcagacgagatgcaaataagcttatgaaactgtccgtcctaccccctcgctccctcctcgccccctacaccgtgttgtgctgcccaccagactcggagaagccgcggctgtccccggaaccctccgagcggcgccctcaggcccccgccaaaaagctccgcaagccgaggaccatctactccagcctgcagctgcagcacctaaaccagcgtttccagcacacgcagtacctggcgctgcccgagagggcccagctggcagcgcagctcggcctcacccagacccaggtaaagatctggtttcagaacaaacgctccaagtataagaagctcctgaagcagaattctggggggcaggaaggggacttccctgggaggaccttctctgtgtctccctgctccccacccctcccctccctctgggatctacccaaggcagggaccctgcccaccagtggctatggcaacagctttggagcctggtatcagcatcactcctcagatgtcctggcttcgcctcagatgatgtgaatctggggaagggcgggtcaggcccacagccttcctgcaaagcccaggacccaggcagtccacctgcaccccttctgggctgggaggaaaccagctccagatgggttttctctggaggacaagcagttagaggagaaaaaggaatggagcagagcctgtacccctaaccctaacagctaaatcaaggacctcagccttatataatcattgtccccaccactaccatggactggacaccttcactccagctggacaaagactctggagagagagccattggctggagttgagactgtccccagaacccttggtcttgccactcccccactccttcttccctctctccctttctcctctccctgctttcttgaaaaggactgaatcgccactacagcctgggtgcaaaatcagcaagaaacattgagtatttttttttctttgtatgcctttggccttgcacaacccatttgtgagcaaaagcagaagtggaccaccatcagctcccacccacccagcgatttttccttggaggtcagcccgttacccccataactgatttacctacttaccatactgggaggtagaagagatgcagagaaatgtggaatttgtggacctatgggtaatttatgctttcctcctaaaaaaaaaaaaaaaagccctctttcccaccccctccccatctcccctttttgaatagataatggatccaattatccatataattcaataggtatttattgagaggctcccttctattccccatccctaatccctaacgaacccacgggcacacacttttggaaacctggtaaagtaacacttagggggaaatggggacaaactggctctctggattagtgcgggtatagacacccccaaataggtgggtaggcccattgattcagctccttgcagctgtctctgttcaaaggaactgtgcagatttagaacgaattggagcttgagcttcacaccaccagcttccagagattaaagtttgtacaaaacattgca

SEQ ID NO: 3063 - protein, 164 aa, Homo sapiens
MKLSVLPPRSLLAPYTVLCCPPDSEKPRLSPEPSRPQAPAKKLRKPRTIYSSLQLQHLNQRFQHTQYLALPERAQLAAQLGLTQTQVKIWFQNKRSKYKKLLKQNSGGQEGDFPGRTFSVSPCSPPLPSLWDLPKAGTLPTSGYGNSFGAWYQHHSSDVLDQMM

SEQ ID NO: 3064 - DNA, 1126 bp, Homo sapiens
ctcccaccgcaggcgccgcggtaccctggctgtggccctcggcgctttcttcctagggtcacaggacccatacgagtgggagctccctgggagcagaactgcgtcttgtatcacctggcgcggtgaacgtgggggttgaaacgctccacgcggaaggtagagggcaggggccaagggggcgatcctggtggctgcgctttttgctatttgctgccgacggcatgcagacgagatgcaaataagcttatgaaactgtccgtcctaccccctcgctccctcctcgccccctacaccgtgttgtgctgcccaccagactcggagaagccgcggctgtccccggaaccctccgagcggcgccctcaggcccccgccaaaaagctccgcaagccgaggaccatctactccagcctgcagctgcagcacctaaaccagcgtttccagcacacgcagtacctggcgctgcccgagagggcccagctggcagcgcagctcggcctcacccagacccaggtaaagatctggtttcagaacaaacgctccaagtataagaagctcctgaagcagaattctggggggcaggaaggggacttccctgggaggaccttctctgtgtctccctgctccccacccctcccctccctctgggatctacccaaggcagggaccctgcccaccagtggctatggcaacagctttggagcctggtatcagcatcactcctcagatgtcctggcttcgcctcagatgatgtgaatctggggaagggcgggtcaggcccacagccttcctgcaaagcccaggacccaggcagtccacctgcaccccttctgggctgggaggaaaccagctccagatgggttttctctggaggacaagcagttagaggagaaaaaggaatggagcagagcctgtacccctaaccctaacagctaaatcaaggacctcagccttatataatcattgtccccaccactaccatggactggacaccttcactccagctggacaaagactctggagagagagccattggctggagttgagactgtccccagaaggaggtcagcccgttacccccataactgatttacctacttaccatactgggaggtagaagagatgcaga

SEQ ID NO: 3065 - protein, 164 aa, Homo sapiens; identical to SEQ ID NO: 3063

SEQ ID NO: 3066 - DNA, 1414 bp, Homo sapiens
gggtcaccttccctgccgccggaaccgctctgtgcgcgctgcccaacgaaggaaggggctgccccacgcagacccggcttctgggggtccctggaaacccaggcggccacggtgtggcgggggagacatggtcacttttcctgcagggtgcgcctgagcagaggggcagcccgttacagtaggcgaggccagggcaaacccggggtcactatcagcgctgcgagactggtattcaaggtcctctcagccgggcctctcacccaccccgctggccgcagccggaggctgccacgcggacaccgtctcaagcctctgagcattgctctgagcctctgcctgcaatgtccttcctctgtcatctctaggcctcggctcagccctggacctagcctttctgccccgccctaccccaagctggcgccaccgcccgtggctgaactccgacctcccaccgcaggcgccgcggtaccctggctgtggccctcggcgctttcttcctagggtcacaggacccatacgagtgggagctccctgggagcagaactgcgtcttgtatcacctggcgcggtgaacgtgggggttgaaacgctccacgcggaagactcggagaagccgcggctgtccccggaaccctccgagcggcgccctcaggcccccgccaaaaagctccgcaagccgaggaccatctactccagcctgcagctgcagcacctaaaccagcgtttccagcacacgcagtacctggcgctgcccgagagggcccagctggcagcgcagctcggcctcacccagacccaggtaaagatctggtttcagaacaaacgctccaagtataagaagctcctgaagcagaattctggggggcaggaaggggacttccctgggaggaccttctctgtgtctccctgctccccacccctcccctccctctgggatctacccaaggcagggaccctgcccaccagtggctatggcaacagctttggagcctggtatcagcatcactcctcagatgtcctggcttcgcctcagatgatgtgaatctggggaagggcgggtcaggcccacagccttcctgcaaagcccaggacccaggcagtccacctgcaccccttctgggctgggaggaaaccagctccagatgggttttctctggaggacaagcagttagaggagaaaaaggaatggagcagagcctgtacccctaaccctaacagctaaatcaaggacctcagccttatataatcattgtccccaccactaccatggactggacaccttcactccagctggacaaagactctggagagagagccattggctggagttgagactgtccccagaaggaggtcagcccgttacccccataactgatttacctacttaccatactgggaggtagaagagatgcaga

SEQ ID NO: 3067 - protein, 21 aa, Homo sapiens
MATALEPGISITPQMSWLRLR

SEQ ID NO: 3068 - DNA, 1803 bp, Homo sapiens
cgctgactaagcggttggcgctggcggtctgcacttgactccccttcaggtccaccgcggctggaccagaatcgacgtgcagatccccgaaatcgggagactgcaaatgcagattccctgcgtctccgcagcccccgggcctctgcccaccacccagctccctgtctcttgggcatccagtctcgccacctctctagcatttctgccattataaccgaggttcctggactgcaccaatcgctctgcaaccccagcacctctcggaggagaccccgaggtagaccggcctggagcatgcgcaccgcccctctcccatttaccacttctctacagcgggctgtcccggggggcggggcccggctgcaagtctccgtgaggtcaccgcgggcggtagccaatccgggacgtctaagagggcggggcccccgtcgggtcccgggaaccgaacccgatggagaggagggggcccccatggatttagggggggaggggaaagtcatgggggggcacccccccggaacccctttcccaggcgcgcgttctccgctgaaagaggctcagagagacactttctccgggatcttaagtgtgggggctgctggctggggggcccgtccggcccaacgccggaggcttggaaaagagagttggcagcgggagcggactacgtgccgggccatggcccttctgcccgggccctggccacaatgacctctttgccctgccccctccccggccgggacgcctccaaagctgtcttcccagacctcgcccctgtcccgtcggtagcggctgcctacccgcttggcttgtcccctacaaccgcagcctcccccaatttgtcctactccaggccgtatggccacctcctgtcttacccctacaccgagccagcgaaccccggagactcctacctgtcctgccagcaacccgcggcgctctctcagcccctctgcggacctgcagagcaccctcaggaactcgaggcagactcggagaagccgcggctgtccccggaaccctccgagcggcgccctcaggcccccgccaaaaagctccgcaagccgaggaccatctactccagcctgcagctgcagcacctaaaccagcgtttccagcacacgcagtacctggcgctgcccgagagggcccagctggcagcgcagctcggcctcacccagacccaggtaaagatctggtttcagaacaaacgctccaagtataagaagctcctgaagcagaattctggggggcaggaaggggacttccctgggaggaccttctctgtgtctccctgctccccacccctcccctccctctgggatctacccaaggcagggaccctgcccaccagtggctatggcaacagctttggagcctggtatcagcatcactcctcagatgtcctggcttcgcctcagatgatgtgaatctggggaagggcgggtcaggcccacagccttcctgcaaagcccaggacccaggcagtccacctgcaccccttctgggctgggaggaaaccagctccagatgggttttctctggaggacaagcagttagaggagaaaaaggaatggagcagagcctgtacccctaaccctaacagctaaatcaaggacctcagccttatataatcattgtccccaccactaccatggactggacaccttcactccagctggacaaagactctggagagagagccattggctggagttgagactgtccccagaaggaggtcagcccgttacccccataactgatttacctacttaccatactgggaggtagaagagatgcaga

SEQ ID NO: 3069 - protein, 234 aa, Homo sapiens; identical to SEQ ID NO: 3061

SEQ ID NO: 3070 - DNA, 25539 bp, Mus musculus
  misc_feature (1)...(25539): n = A, C, G, or T/U
gggctagcagtacaataaggaacaagcaaggcagtaagcaaagtcctgtgatcactcccacgatagctgtttctaagggcttgtcagaatgaccaaaatatctgagcccactaccgtgtccaagccccaaatcagattcttgcctgaagcctacttctttcattccactctaaaattaagattcctgcctgaccttatttccttgccatggcctaatgtcagtttcctacttgaagcccatttccttgtccttagccaatgtcagattcctgccgagctgccatcctaaggctccccacagtgttttaaatcagttttgttcaagtgtgaggcacaatgtaacagtgaactcaaagtgggtgactcaaggatgtatgtcgcaaaaggagtccctcagcagagtaatcatgtagtaatcatgtaatcatgtagcctagagtcacagtgtagtgaagctcactagactgacaggctggggggaatctgtggccatggccatgagccgcagtacaaccagtgtcaccaactggtctgtccaccacaagctggtgctgtgtgtcatggacaccacagagcctgttctgtggcatctatagttccacttgcttgatgtgccaggacagtgttccagctgaaggactcctatgagaattctgctccctagacctggccgacagggagaaatgaccaatcagaagcacttcacctggcctgctgcagccttggcttccccctggcacagtggcctcagcgtgctgacactctttcagtagcaactttgagccttaaaagcaagagggtcgcagagagcaagacaggtgctacagcacctcaacccagtgtctgaggtcacagaaggtcacctgtaccaagtaaccagagctgtccctttgcctgaccacattattttcatgtatgtctataattttgttatagtcacccctgttcccttctcttatcccccactcctattgatgtcccttcccttcccaactagtcctcctgagcacagcttccatcctgtaggaaagctccttaaacaggaagctaagcaactcaaaatagcttcaggaagtccctgaaactgaccgtattcactaggcctcccctaccaactagagcaagcaataaaacgctgagagttcctctcagaggagctgagctaagctacaaagaagagtctcagccaagccacggtgacaaaccagccaagctgtatggaagaggtttataccagagtcactgcaaaggacactgtccagcctgttgagttgtctgcagtgtgctccaagttcccatctctgtcatctgacaccagtgctgggatgggctttgctgatgaagatgtctttgggtaatttctgttccagtaagtaacccctcatccatgcttgtataagtaacctcaataaaactcattggttcacccagttgaactttggttgtacccacactttggtatgtcacgggttcccgatctgggatgaagagatttgtgttgcatctccccaggaagtacacacttgcatgtattatgcaatggcttcgtcagactgcttacaggagcatatgtaagagactgtctgcccaagcacagcaacttatgaacatctataccacagaggggaaacgtctctcccttccccaacaaccattagctgccaggagggatgaggtctcacgaggccctccccactccacgatagactgttgattagctcaatcttgtgcacattgggtttattcaggtgattacaggagagtcatgaccacatcaggctttgaagacgttgtacagaggctactatggctctttaaagagtcatcagagactcaactgccccatctttccactctcccatccttagcatgggactcccagcctcaagtgggctgctgtgtctccaggaattcatttccattccaagaagggtaaaagccagaaggcgtctccggagagtctctgtaatttcatttgggtaagtggccctccctagaacctctgtccgctcctcactggccacactgaaccacacagccacctatagctgtgaggtagggcaagaagagtattttcagctaggctgactgtcacccaaggcacactgggattctgttgaagaggtgtggctaaggtgtcctgaccacagcccacagacatacctttcatcccaggactgccgtggaccgcatggagtaagctgaaatactcttctgtcattaagcacccttacttaatacaaatttctaaactgcaatgagacacttctctcaggaagtcttcccagatttctctggtctcacatctcgcccatctatgcttttgttactatgacaaaatatgtggaataaacgaccaggaaggatgaaggattcatctggaccctcgttttggaggtttctatctctgctactggacctatcctttctttggacctgggatgagggtggactatcatagagaatcaaaatcactcacttcatgacagccaaggagcagacagaggaagactagaaagggtcagggccagggccatcaggcatccttcaaaggcatgcttgaagtcacccacttcttccagcctgatcccacctgttggtttccaccaatgccatcaagttacagatctgtcactggggtcagagtcctcatgagccaaccatttccccaaaggccactggctggcaaaacaaatagtccttacataggaactttcaggggacatcgaaactgtaacactctgtgaaatcctcctgtccaagctgggcaagccctagctctaccaccgagccacacccacagcctttaccatcctcttgacctttcgcatcatctggctccatctcatttggaactggtgccaaggccaaccctggccatgtagacatctatgtgggttgtgccatttggtgcatgcttttcctggatagcctttagccacagcctgacatgcccttagaggcttggtctgcagagaggcatgctcgatggcaccagctttctctctattcctgaaaagttctttcctgttcccagacttgcatcttctggaagacaaaaatcaaatcattacagacgactgtgaagcaaactcctctggggcagagctttgtgtacatctgagcttgaattacctatgtgatcaatatatagacaataactctagtagttcttagatatacggcccagcaagttacacggcctcctggttctctagtctactcatttgcaaaatagcatgttagcatgaggattgaagaagggaacatcgctgttcaggaaagggctcagcgtgtagcaagctcctcgtggtattatttaaggtctgaggatggggctgtttgtaggatacttgcctggaatgaatgctccccaccaccttataaaatcgggcaccatatgccggtaatcttggctctaaagagatagaggatcagaacttcaaggtcaacttggctacatagaaagtctgaggccagctgtggttatatgaccctgtatcgatcgagtatatatgttattccaatatacactatttgttcaatagagaagtgccaggaagcacatttttctccaacattttattcatatttcagtgtcccttaaagagtggagctctggtcctgtcagtatgtccctgtcaaccttcttctgtcccaggatcagcactcgcctacctacctgctccttcctgccttgatagctcacgctgtgctctcaggaaagagaagcaagcctaaagagaagcaagcctgatagccaggcctataatcaatcccagctactcaggaggctgaggcaggaggatcaggccttcctgggctacatacacagcaagttccaatttacactgggtgacagggagacagaccatctctcaagaaagaaaggataaagggaagaaaaataatgaagggaaaggaagaaaataaaaggtcagacaaaacaaaagccacagcgtgaatgggagccctgggaggtcatttgctgcaagacttttcagagcctttaatacagtgcagctctctaggacctgtaacttttatcttcagcttggaaccctaagtatctgccagagcaactgattccagagaatcaccctcaaaaatggtgtggagagaggaatgctattggtgaaatcacaggcatccatccatggagggaaaatcatgtcaggtggagggagaagccttgtccctgtgtcacaaaacagagcacatttccccagatcacagggtcactgtgtgcagagtgctgacctgggcctcgattttgttctgttggatttcaatgggactaagtaagcgagcattgccatctgtccagattctgcacttgacaactttctggctttaaggaaacccttggtgggaactgaacagtgcacaggaggttagtgggtgcctgactgttgcgaacagtgcatttctaaaatcatgaaaccctcacggccaggaggtggctttgctgagcttctacagatagaaagatggagatgcagatctctaagctcacacggcagaaagtggcagtgatggcggtgaacctgtgacactctgccatctcaggtgtgggcatctcttccagagggctgcatccttgtgtcccgagacttgttcttgtttcttctccactagtagcaacccaatactcagctgcatgtatccccaacaatcaagactgttttcagctaagtttagtcaaatcccaagatttggccagtaggatgtgagcagaagtaaggctgtaactcgcctctaactaccccagcccttgcctccccagcacaccctagttggaaagctgacagcatggattcagcagccattctggtccatgacacaacctagggagtggaaatcacataaaatagagcagaaaggcagtaacatagcactgcatagaaaaaacaccttaaacatacaggcttgtggcaccaatactgtttttcatcttccactggacatggtcagtggccaggccacatagacagctttgaggctgttcacaggggtacctttacccaggtgctgctgtactcaataaaagctatgatctcccagcccacaggtcaggaggaaggattaaaatatgcagctagccgggcgtggtggcgcacgcctttaatcccagcactcgggaggcagaggcaggtggatttctgagttcgaggccagcctggtctacaaagtgagttccaggacagccagggctacacagagaaaccctgtctcgaaaaaccaaaaaaataaaaaaataaaaaaaatatgcagctaaagttactcttgttatcatttcacctttgttgattgccttcactgttggttagaacttctgcagctgtggacttctagaaggacccaggttgaggagatggctcagttgatgagaacctgagtgtgacccccccaagcccacacttaaaaggctgtatcagggtccagaaattagctcactagttaagagcatcagctgctctcgaagaggatcgggtttgatttccggaacccacaatgaccaatgacgtgtaactccagtcttatagtatctgatgcccacttttggcctctgagagcaccaggcatgtgtgtggtacagacatggaggtagacaacatccatatacatgaaataaaaatagaagagtcaggcgtggtagcacttgtaatctcagtgctgggaacagaaacaggcagatcccagtggcaatcgagctgatggtcaaaattaaccaccacagcaaccatgcaggttgggctttgcagcctcttcattcattaatgtgctcattattgtccccagagtgccaggctccagcctagcatgctgtcacgaattccccgtcttgacaatgcaccatctgctgaggaagaaagccagagagggagaccaggcatgcctggaacgcatctcatgaggaagtcagctaagtctaagagccaaagtgacatggagaagtggatcccacatcttgctgaggggcatgtagattgaggcaggcatctcatggtagaccgaatggtcctgaggctcagtgtgaaggccttttgtgcccccagccatactgtcctggtgtgagcatcatagagtcacacacatgaacacagtcatacacccatatggacaaacacatgtgcacaagcaaatatgtacacacatgtacataagcgcgcacagagagagagagagagagagagagagaaagagagagagagagggagggagagagagagagagagagagagagagagagagagagagagagagagagagagaagccgctgagtcatgtaccagaacttccctttgcttcaggagaagccagaggaagccatcagggtccactactaaggatggaggcctggtgatgaatgcttaccacacgtgccaagcagcaaagaacatgtgtgagactctgcactcataatagtggcaaggaaacacaactaaacaaaaggaaatcctccgagaagctggccggtggcaagtaccatctgcagtttgacccactcgcacaaagcagcaccacaggtaattaataaggtcgcatgcatatccagagtacgcctcaagaatatcactgtgggactctggcttatgtgggtggggggcagtttggtttggggtgggatgggtctgggaggaattgagtttagagtgcggaagacttaggctcaaaaatcactggatgtattatgaaagtcttaaataatataaaattatatttaataaatatagttaagtgggcatctaggtgaggatcaggatgaagaaagaaaacccatgaggggccagaagatgctgcacccagggttggggaggtggagccgcaaagcagactatagtgaaaaactacgctaaacccaggcacaggcttgggctggtcctatccaaaggaacaggccctccaaccaaggaggatggtggggaaaggcccagaggcttcatagtcgatggctctgaccaaatgtgaaagcttccacggcacagaaagccaggctatacaggaaaacgggcccgctgctgcttctctggcctggaaccttccttctcttgctgagtggtctccagccagccctcacatcatatccactggactgcttcagaggtcagctgatgaggagggctctggagtcaggtcaacctgagctcctactctggttggctgcttgatcccaggcaagtaccttttcttcctcgatgaacctcagtttctctgtctacaaaatgggaagagtggtactaccgaagcagcaatgggcaggaactaaaaatgagcaaaatctacagatctttcattccagtggagatagatggtgtggggagagggggagaatgtgtttacaactgcattcccagcccccaaaactgctgaacacgtagcagagctgtcgcagagtgctgataaaaatacctatgaaggcaacttagggaaaagggttggtttcagctcgcagtccattgcgggagaatcacagtgacaggggcttgaggcggccaagcatactggatccatagaacagaagaagcaagtgtggggagcgagcggggaggcgtgtgctcactagtgctgagctgcctcctttagattggtccagggcccagcctgtgaaacggtattcctcacactcagagtcttcacgcttcaattgacccaattaagaaaaaactttcacaggcatcctcagaggtccatttcctagcgattctagatttcgttaagttgacaacactgactgtcacagtcactcagtatctgtagactatcatttccatagcatcagaagataagacaggtaggaagagttggggtactgccaggtaagaggaacagtaactgctctagccctggcagccaggaaagcccccccgcgccccgccccgcctcccccccccccagatgagatttggaggaagtgacaggatcagctataggtatggtgggctctggggatagagaggccagtgtggctggggagtaaggagcatgaactgaaaggaactgagcctgtcacgtagatgggccaagaatgctgcagaagctctggctcactcctggtgacaagctttggaagagcagacactacttggtccttccccaagctgtgaacaaaataatacaaactcctcttctgggattgaactcttgctgtatgccaggccccaatttcttggcagagaatctagggactctcactggctcaaagaatggtagatatcattaaccccattttccagagcagcaaaaatgagagagagagaccccaagaagccactgctggccttgaactgagccagatctctttggtgccagaccctggctggctctgaccacattgtcctaaaattctttgtttacagctctctttcctctgctgcagccagccactcggtctcattcatggttttattttactttcaaggtcccttgtgtccaaacctgcccaaggagcaacggaatgaatgaaccttctgggggcgggctctcccctcccgcccgcctctcaggcatctccagtttggatctggaattgggagggggctggacaggaattccaagcctccagagggtcaggagtagaggggagggggaaccgggagaaagcgaaagtgaagggagctgggagcccctgtgtggaggcgcagacagggaaggaaatctcccggtcagtaataattcatgggctcaggaagcagccccggctggagcgcaggagctgtgtacgcggctggccctgtggggaggggcctgaggaggctacttactaaagcgctgcctggctgggtcacggtcaaatggtatgggggtgggggatccaggtggggacagactatccctacagaccttggattctgaagacttcagggtttcctttcccgttggctctgttctaggcccgtttctggactagattaggtgctggggaaacacagtccttggagctggaagatgtcttccagaaaaccagtaagttcctacaagctttcagctctgtgcacttctggccaccatttgaaattgaaaacaaacaaacaaacaaacaaacaaaacccacgttctttttgtcaaggtcaagtggatgctgctttgaccccttctgggattacactgcgaagcagatatgcgtgactccgggaccccagtggccaccatctgctcagttatttcccccagattctctacagaggagaacgcccagacttcagtctgaaattctgggggggggggggactggcggcggggtgttgggtgggggcgacaggagatgaacgaagcctgtggggattcccagagtggtaaaaatctgcacatcgtgggcactgccctaagctaacacaaaactgtcccgctggctccaccaggctccagggtctgagaaggaaaagttctttttgttctgatctttatcttccaacgaaagtatagtagagccccgccaagtagttattaagtgactgaatgggacttgtgtttgttttgctaggaaaagaggagagaaaagaagaaaagattgtcttcgcgcctctcggacagctccagcatcacagtgcaggctggtgagttcataaaaaaacgcagtttcctgggccacactcggaactgctgaatggaacttggacagtctagtctgagaagcttttagttcaaagcactggccgcggttctgacggtacatcgaagctactgggacgctggattagacttttgagcgcggggatatgctcactttgggacggaggaaacaggccatgctaaaagggacctaccagcggtctcctaggaatccagatctgcgctcctggacagctcaaacccagagcgtacggtgagggtcagaagctccggggccactctctacttgggggacccagaggcaggcgcatagttattggccggggcggggcggagcaggggggtagttctattggtcccgctggcgccgtctcgtgattggctcctccccccggctataaggcgacgaccagcggggccgtgggagcgcgcgggagcgcacggcgggggcggcggctcggggacgaggcgagtagaggcccgcggccgggcgcccatggcgttcgcgctgctgcgcccggtcggcgcgcacgtgctgtacccggacgtgaggctgctgagcgaggacgaggagaaccgcagcgagagcgacgcgtcggaccagtcgttcggctgctgcgaagggctggaggcggcacggcgtggcccgggtcccgggagcgggcggcgggcgagcaacggcgcgggccccgtggtggtggtgcggcagcgacaggcggccaacgcgcgcgagcgagaccgcacgcagagcgtgaacacggccttcaccgccctgcgcacgctcatccccaccgagcccgtggaccgaaagctgtctaagatcgagacgctgcgtctggcgtccagctacatcgcccacctggccaacgtgctgctgctgggcgacgcggccgacgacgggcagccgtgtttccgcgcggcgggcggtggcaagagcgcggtccccgccgccgacggccgtcagccgcgctccatctgcaccttctgtctcagcaaccagcgcaagggggtgagtgcgcggcgcctcctgtagccgggcagtccggcttgggggtgagagccagcctcctaggagtcaggtacccccatggaagctaagagatctcggagcaacggcagggacagtgtctcctgccctaggattaaagtggagcagaacctcttgcttaacccccaaacagaaaggaaagagggagcccagaaagctccgctctgacctaattgcgtttttaagaggtgtgtgcactctggttccttcctcttgcctgatgctcaccctcggggcaggtattctgttgtcccctcaattatctctgcggcgcttcagataaaggcactgtccacatttacaggaaacaggctctggggttactaggtaggtatcactttgaactaacatctttaagaaattgttccagatcttaagacccgacccaggaacaggaaactgagaagaaaataggagcatatacctgtaccctagagcctgggttcccagcccgtgtgcggggaggggtccctggagagttcccagcccccagaaggatgtggggttagcaggggacactgttgtctgcttgtgtctaagttaagaggctggctgggcactggggagcagcagaagtctctggggccctcttaggcgaaacttggcataggcctgcttggcctaggctcaccctttccaacctgggaaaccttgcattgaggaaacatgcctgagttagatcagcagctactgttacaccgggagaaactgaggctcagagaatctcactttgctctccatagccagcaagggaaaaatcatggggtctgtacccagtcccctttcaactctgctcactggttcatagctccatcctgggaaggcctcagtggcctggcctcagaccagccctcagactcaaactgtcaggctgtcttcccagccctccgctgcctcagtttctctgagtgagtcttcttaacctctaactggtatgcatttgagggtccctgtcattgctccaggctggggagggaagtcagagctggcctttagatctacatctgggatgcaaaggctagctgggccaatcatggtactactttaaggcctgctatgcattcatccagataagcagtatggccctacttaagagccagtcaggtgctcacagtatagatagcatcagggccagggggatgatactgtggtttgatgggactttgcaagcccagggaagtccagtcccagatttgagactgaaaagctactgtactaaattcctaaaagatatatggaaacaggcaggcatgtgagaaaggggtgggaatgggtgatgtagagcatgcatggtaggacctggggattgcagtagtgctctggagcagtggttctcaaccatcttagtgcagcaaccctttaatacattcctcctgctgtggtgacctccaagcaaaaaattgtttcgttgctactttgtaactgtaattttgctactgttatgaatcctaatgtagacatttgttatgtggcccctgtgaaagggttgttccaccctcaaaggggttgtccagatacacaggttgagagctgccagtctagaccaagaagtgggaagatctcaaaggcagaggtagagtgccacagtgacaggagtcctcccagtgctgatatttgctcacactcttcatgaagaccccttagcagtcagagaaggagccctgtggccaccccccacctgcttggacagagacgacctggcactctggcctagctaactggaaaatgggaaaggtgacagcaggaaggccctgcccctgcctacaggctgcagaccagtccatctgtgcccaccaactcagcagtcagaatgggggctcctttgtaggacgggggactgacccatagttcatagggtctggcctgtggctgactgttgccttggaatctgtctgtgggattaagaacccagccaaatttggttatagaagccatgctcagtcacacaggctcctctgggaataggccagaggggtgatcctcgccagtgctggcccctccaggacttgtctggaagatgatagatgttttgggaagcccctacacacctctgagctccaaggccccagaccccattccatcccaggctactacctccttctgatcctgaatggtctggggttgaacatgttccctacagctcagggatgtgattaagttacctctgtggtaacagtattgagaggaaagtgaactcttgtctctgccttgttttccctctgtcccctgggagcagagctggacaggatccttttgtgaagctagtccctattggtgtacccagctccacagcagagggctgagagggtgccaggaggtgccattggaggtgctggaaattgtattataaatgtttattgaccattgactatgttcttaagctcttcttggagagagtgatggctcaggcctgtaaccccccccactccccagaaggccgaggcagaaggatcccaagtgtaaggcctgcagagcagcttagtgagaccctgtcttgaaaagtaaaaccagggcaggacttacagctcatcagtaggacgcttgcctgccacaaatgaggctgtgggttctgttcccagtaccacacacaaagagcttcactgtttaaatgtgccacctatgttagcttgtttgtcctgtaaagtaatatatgttacaggtggggaaactgaggctctgtccagcagggagtccccgatagagcaggagtgtctcgctctggacctggtcagaacctcttctcagggttcttggcagctgtattcaagttccactacatctgatctgagaccattccacagatgaagaaactgaggctcatggagataaactgtcccagcattcccagagaacccagttctctgaaagacctccagaattagggtaggaggtggtattccttgtctctgaggacctaagagtgaagcgggggagtattctgtcccctagctcccctctcccctagctctggctattcctgccagagtctgagaagcccaagccccaggctctgctgggaccatggcctcggccctcaaaatagccctgtctgtgaatgaacatactgtccctgggcccagagagcctccagggaggctgggatcacatctggatggatctgccccaacctgggctggggctggggcaggggcagaggcagagctcccagatggtcccctgaggtcaccaccagatcagccactcccagccaactgtgacctgaaaatggggaggcttgacaggtcatggggttctccccagctcttactaagcaacgggtgtatctgagccagttactcaacactggagtcctcaaaagagggagtgctaagctgggcataggctcaggcttgtaacccagcactcagatgaaggaaggcagaagccagaggatatggagttcaaagtcaacctaggctacatagctacataatgtcagaagtaaaggaagaagacagtgccagggctgtgagctctcagtgagggtctaacctatgtacaatctaagcatattggtgaaaagggcaaggctgaaggactaaaggtggcttcagggaagggactgctactattagcttgaaaccgcactgactggcacctgcagggctccagccccaggctggaagaatgcccttcccagccacttcctgggctctgggtctgacagcgatgcctccctccttggtttactccccagcagtaacacgtgaatgcaatatcattcatacagaaatcttcctcagcagactagagctgaggatatgtgttcccttgcacaggggagaccctgggtgaaggcaaggcagccaggaacctgcttttgagggtgacctaggcagaggctacccacatgcatccatgcacgtagcacacatgctccccaggcagcagctggaactgctagggggctttctttgccttttactgtaaaataatacttgacagtgtttgaaagtcgaatggccttggaatgcagcgcagtggcagagaatatacttagagaatgtatgagggggttctgagttaaatccccagcacctgctgcccaaaatgtacatattgcatatgtattaagttgggggggggcttgttttagtttttatttttgtttttgagacagggtctcattatgtagctctgtctagtttggaactcactatgtagacaaggctggcctccaactcatgagtaaactcctgtctctgggattctaagcttccaggagtgtgccgtcacatccagcagtgtattttagattccttaaggcaacagattgtcagatggggagggagcaggcaatgtaaactgctgtaaaaggtggtgatcctgatgtcccctctggagagatgcacccatagcaatgacacacacacacactacccccccaagtggcatttgctcccctctgacttgctgttgtccctaaacagggtcactccatgacactttctattagtccagaatctcttctgccttttcagcagactcaccctcctgacacctcttcctctcctgcagggcagccgtcgtgacctggggggcagctgcttgaaagtgaggggtgtagccccgctccgagggcctcggcgatgaacctggatccctggttttctccaagaaggactccagagaaagaggccatgagccagcccctagctggacagaggagaagattccagaagcccaaaccactcctgcgttgtgtaaggaccggaggacaatggcctgggcacagggctcaccctggagagccacaaggacccatctagccatccaggcctagctggccagggacaaggcagaaattttagaaaaccaaagactatttttgaaagtgtgtgtgtgtgtctgtgtgtctgtgtgaatgtagtatgtgagcaaatcggggagggggtcaaaataaaggtatttttaaataaatggtgtgtatcctggctaagtacgagggggcagtggacaatgagacttgcagaaaggctcctctttaggacttaagattgtcacagctgtggcaaaggctctacatctcggatgggacgctatagcaggctctcctccttcctttggatcagtgttaggaacaccattgggtggtggccaaagaaattcacattatctttttttttttttttttttaataaggaaaagattcatggttcaaattcaaaagctaccagggggcatatggtgtagggtctgcttcccccacatccccacaccaattcttcactcaggttacctatcacaggtttttatggtaccccctcgcccatcagtggaacttgctgctgtctggagaaacagcttattcttccgttagctacttatgctgccttctgagtatatttaactttgacctacccctcaccgtgacatcaacacctagcctgtatgatttgcctcaggcgctgaaggcagaagttcatatacacctcagcttagttttgggagactggtagatgacaggtgacaccttgagtccattcacttttaaaactaaaagcactggcccttgaggtggctcaaccattggcacttgccaccgtgcttgacagcctgagcttaatccttaaaaaacacacagtggaaggagagaagagacacaagtgtccatgtgtgcccccaaccccgacatgcatacacaaaaataaaatgagacccaagagagggatagagtgggccttcccttgtctgggtggtgagccagcagacctaggagttggcagccatgattccactgtggggattcatctgagaccagcacagccagcctggctactagagctcagggtagcagggggaattgggttttctggttcagtctaggagtctgtgaggccaagatcagagccactcagagaaagctgggaggaaggctgggagaggcaggaacagcagccaggcagccgccctaatctcagcaagggacgttcacacaccattgttaggcttttatttagcaagccttttcagttcttatttacgaacggctgatggctcccatgcccactctcccaggaagcacctaaccctctggtagaggctctatgaggctgccttatttttgcagatgagtagacagttgcttaatgtcagctgtgttagtctccacacgatcaagctgacccactcagccctctctaccaacaaaacagaggaaggcaagggagaccagaaatgtctgcctcccttgtcacataggctggagccagtggtatagcccacagcccattagcatgggacacaaaggagaagagtccccagaggccacactgcccaggagacctacccccacgcctgccctcttcctcaattcccggtgtccagggacactggtcttgcctgtcctgtgtcccagagcgcccacacttcccctccgggagctaattaggaaagcacattgctctccctgcgcctaccctgctccaggtaccgcagcctctggcaaagtcacaggaagaaggactgtgaccttgtcaatggcaggaaatctaggaggggggcagagcagacttgggtgctctgggctggaagcccacttctgccatcagatttgctgggtgacctgggaaatgttgcttgacccacctgggccttcccagccaaatctctaacaggccatagcagcaggaacagaaagagaagtgtttttacttggtgaaatggtttttaaaccaccctgaggagtgagcaattatctccacattgcagccaatggtaagcaagaaaaagcacacacctccctcagccctggattgtcacaaggcaacagctaggagactctctgtaggttcttcctgtaaggccctgtcctggtttctatctgcagaaaacagtatgtatctgttcccctgtttagtctttatcatatgagttcaagttcttcatagctctaacaacatcagctattccaaagactatggcagcatgcgaccctgcagtcccggataatctgggcacacatgtccagttatccacagccactaatttcaacctcttcatccagacgtgaagcacctcagagtcaactcagtggactcccaccacccacttgtgcccgtggacacagcaagcgctgaaaacatagagatatcaacttcagagcacacagttcaaaaagtgtggcccaaaaagctgacaatctatagccttccctctcagaagccagttctaattcagtaactgctaagctaggtcttaggtattccagccaaggggatctatgggtatagtaggcaagttatgcacaagtaagtgtggggtgtgtgtgtgtgtgtgtgtgtgtgtgtgtgtgcctgtgatttgccttattttacacagcagtgacatcattttggacactctgggtttttctcctcacagtatagtccttatgttgcttcacaaaacccttgatgttctaggagttcctacacctttcacagcggcaagctgttctgccacttgtggcctgttttttctgggcaatggactatgcgtctttgtaagccccaaggaaaactcaacacatgtctcaggcaaagcatagctgtggcccaagacctgtgagggtcattttcttcatgacctccccgaaaacttgccctttcctacttcaagatgggttaccaacagctaactctagccaagccatctagatcctcaggatggcagtgagcatcccccacccccaccatctttcctagacacattattagcatgagactgctctaggagttctagaaaatgtagacagacaagcaaccagcctatggcttcccagaagccccagagagacctggtcccagtaacccaggactctttctgtgtcgtgccacaagttgctcctgaaaaaccctcaaaaatcactcaaagccataggaaactgaagactagacaggaacagtgacgggccaggaccacacagtacttgagactgagcaagccttagaacctttggccatatatggttccttgatcggctcctattaggttaaataaaaataggtctgaaagtatagctcggtgatagagcacatacttcctatgcatgtggccctaatctcctgcaccccaaaatttaaaaaaagacctgcaaaggagttcccaacagtcacaaggaggaagatcacaaatcaagaccagcctcgttagacagagcatgtctcaaattttaaaaaaagaaagacagaaaagaacaagaaatgtaaaggtaatttgagtttgctagttatgtaagagaacacccttctagttaagtactaagtcttctagggggctggagagatggctcagtggtttagagcactagctgttcttccagaggtcctgggttcaattcccagtacccacatggctacttacaaccttctgtaactccagtaccagggaatccaatgccctctctcctctctgggcattaggcacagacacacatgcagacagggctcccatccatggaaaataaaagaaaaaattaaaactgaaataaactaaaaaataaccaaagcctataagcatgcacttaacctaagaaacaaatcatctaattaaaaaacaataaacaagccgggcgtggtggcgcacacctttaattccagcactcgggaggcagaggcagatggatttttgagttcgaggctagcctggtctacaaagtgagttccaggacagccagggctatacagagaaaccctgtctcgaaaaaccaaaaccaaaaccaaaaaaaaacaataaacaagtatccctctggggtcaaggtataggcaatactgtatcctcaaatgcttcaagaaaagaaagaaagagagagagagagagagagagagagagagagagagagagagagaaagaaagaaagaaagaaagaaagaaagaaagaaagaaagaaagaaagaaagaaagaaagaaagaaaggtgttcataagaaagcagggtaaagcaagggtgaatcagtaaagcacagggtgggcgcaaaggcaagggttgctaatgcctgcatggtaaaagcatggggtctcctggtaaagcaaggggtcttgctttaaggcattctgttgtaaagaagcagagtatgtaaaggcatggggttctctgcatccttatctattttgtgtgtgtgtaacaattgcaaaactgaaggaatgacagcgggctcttggcccatgctgacccagtggtttcttggcccctctaactcactctgtcccagcacccagtggaggacagaaccccccccccaaagactcaggtgtccctgccaacgactctcaggcccccatgccctcaggatgctgaggtggtcctggcccttggggcctcctgccactgtgatttatgtccctgtgagcctcagcagctgtgagctcaggtcccacagggcagccggcctggggggggggcagtttttgcttctcagcgtgtctaatccagaccagacttacagaccccaggggtctggggtcagaggacaggccaatagggcctggaaactaggagtcacaggctagaagcaacagccctagtctgaatatggttgcttaccacttctgtgtgatccagggtgggtgtctgccctctctgagccttgctgtgcctcacaaatacagcctatacacaacgaaatagaagggttttgtcagctgggagagatctaccttagagaggtcaaatagtcgtttttctcttatctcaaggttggttctcatagagcccaggctggctcagaactgactgtgcacctgagtttgaactcctggcaatacagagttcctgatctttctgcttcttcccaagtgctgttactactggcctatgtatgataccatgctcaatgcatgtggtgctgggaattgaacccagggcttctgcatgcagaaaacccttctaccaactaaaccacaccccctaagagctgcctttgtttttgtttttgaagtcacatcatctgtcttgtttgttgttttgtttttgtttgttttgcttttttctttcattgtattgtaactgtattgtattttagggtctactatctctgcctcagtctatgcactcaccatcaaacaatccatattgcaggtttaactagcttgcatgacatatatcattgcctcattttatagatgaagaagtgggggaccaggaggttgaagtgtttgcctaagtggacccgagccagagattctggctacctagccctggcaactctcacctaccaccagcctccacatctacaggtacatggctcattagtccaagggcctgctttgagtgaaagaaagcttcacttgaccttgacccttgacacactcacagggaaggtattgctgccagccactcttcaaggatcactcagctagacaattccaaaggcaacattcaaacctaaggagtccgactccggctcctgcaccctgattcactgtaggaagtaaaattctgaaggaataaaacagaatttatcaacatagaccaaattcccttgggctcagcatgtcagccttcagttaataaacatgcaatgacacttctctgtggcccacgtaagactctaggatgatgagactaaaatggatgtgttacctcaccttggttgtcacagcttatggaaaaagtcgacacttagcaaagagtaaaaatctgggctaggagtgttaccagtggcagagtacttgcctggcatgcacaaggccctagctcagttcccaacatccccatgccacaccaaatgaggcatgtgggaccttctgccggggtgaccagagccatcatcaaggcaaaaggctgctttgccaggccagtgtgcaccagagggttcccagcatcccctaaacagagtctggtgacttgtgatttgtgttctttcaccccaactcttcactgtggggtgtagaaaagtcaaggtaccctgctagacaggaggtggtaatagccaacacacactctgcctgactctaaacgtcagactaacaactcaccagctctctcccaggcactgccaagggtctccaaggccaagctaccaagtagcagaagcagactgtggtccaggtcctccgaacctagggcctgggctttttacctctgggctgtgccatcttcgtgctaattgcagaggtcatacccaacagccaccactgctgaggcctccagaactttcctccccacgggcttagcggacccctgtggagggaccagacacacagtcacctcatactatctgtacagacttgtggccaggcagactttacctaaacaaaaaggcttagattagggacaatcctgaggtcccataaccaggagtgactagtaagaccttcaaagtgagctccatgcttcatctcagctagaaaccaagaccgggcttgtagccaatagcagtaggcccaggttttggcgaaggggagaagggataagaaaacctcttatcacctaagaccagagccccagggtctccctagcccaacccaaaagagaaaggatgcaggaaggatgtggagagggaggcaggaatcgggccagaagcaccctcaagtcctctcctcccccctcctccctcacttccacttgaggagtcctctcttttctctctccctctcccctcctccttccttcccagtcctctctcccctcccccttcccttttgtcctccccccttcagnnnnnnnnnnnnnnnnnnnntctctcctacttctctctccccttcccctcccccctcccccctcctccctgttctttctccctgcccaggcccactgcctcccctagcccctgctcccagaaagccctggaaaggcagctttctttgagacaggaaggtgtcctcaagtctcaggaaggaaaaacagtcgagctgaacccaagaccgtctccaaggggctggggctggctccgggccagggctgacatcacctgggaaccactgcctctgcagctgcagcccgcctcctggggggatgcttctgctatttaaaaaataataataatactaaaaaaacttttccagtctggtgtttttaaatgtgctttatatagtgggccctggggtgtgggagattcaatcccctcccgtttgtcctcacagcccgggtttctcacaccgcactgggcagccttccgaatccacagctacttcctgggaatccagtggaatcagcccccaagccctccaagccctatctgtccctggatagattttgtctatctctatttgctcgacagcaacctcaaaaaaaacaaaccaaccgaccaaacaaacaaaaaacattactaatgtttacccatgtacaaacttaaaaatccctaatgtgacagggtggaagttagtgacccctagtcacccatctccacctctggtggagtccccgtttcttttaatcagtaaaatcttctgtagcgcttgctatgtgcctgctctctgcccaaaagtatcattaagctttatgagcaagggttttcagtgaccatgaccttgtaaacactgcagaagatacagccgcacccacagtctccccttcctattgaggggaaggaattgaggtgtggtctctgtatctgacggcaatcctccctgctcagccttctaagtacttcccttatagcttccctggctcctcttccttttataaagctacagacagagcgctgcagctcgctctgctctgactttgctctatttacttagaaatatctgagagttgggctgcactctacacatctaatctcagaactccggaggcagaggcaggaggatctctgagtttgaggccagattggtctacagaatgagttccaggagggctacacagagaaaccctatcttggaggggagggaaaaatatacatatacatatacatatatatacatatatgtcttagtcagggtttctattcctgcacaaacatcatgaccaagaagcaagttggggaggaaagggtttattcggcttacacttccatactgctgttcatcaccaaggaagccaggactggaactcaagcaggtcaggaaacaggagctgatgcagaggccatggagggatgttctttactggcttgcctcccctggcttgctcagcctgctctcttataaaacccaagactaccagccagggatggtctcacccacaaggggcctttcccccttgatcactaattgagaaaatgccttacagttggatctcatggaggcatttcctcaacagaagctcctttctctgtgataactccagctgtgtcaagttgacacaaaattagccagtacaattgaccccttgtcaacttgacacacaaaaacatcactagtaagcctcaacccttacaatcttattcatccccaagatctaaataactttaaaagtcccacagcctttacatattcttaaaatttcaatctctttaaaatatccatctcttttaaaatccaaagtctttttacaattaaaagtctcttaactgtgggctccactaaaacagtttcttccttcaagagggaaaatatcagggcacagtcacaatcaaaagcaaaagtcaatctccaaccgtccaatgtctgggatccaactcacgatcttctgggctcctccaagggcttgggtaacttctccagccaggccctttgtagcacacgcatcgtcctctaggctccagatgcctgtaccccactgctgctgctgctcttggtggtcatctcatggtactggcatctccaaaacactgcatgaccccttcagtcctgggccttcaattgcaactgaggctgcaccttcaccaatggccttccatggcctctcacagtaccgaacctcagctgctttgcgtgaccccttcatgccttcaaaaccagtaccacctgggtgacccttacatattaccaagtcccactgcagcaggagtacatccttggccatctctggaacactgcctctttgtgctttcagaaaacacttcccagaagatgtcacctcaatgatgctggtctcttcttaatcaccgctaatttcttagctccagctaaccagcatcaatagtcccagtaatgcaaagtttttgctttggtagttctggtatcttgttaatcacagctgattcttcagccccagctaaccagaactacagaatcttcacaaacaaaacagcaatggccctgaaaagagtctttaatttttcctctgaaatttcacaaaccagagctccatcttctgcagtgttctcaacattatcttccaagctcctacatgacatccgacagagctcttaacaacggatggatcttcaagcccaaagttccaaagtccttccacagtcctccccaaaacatggtcagattgtcacaggaataccccactctgctggtaccaatttgtcttagtcagggtttctattcctgcacaaacatcatgaccaagaagcaagttggggaggaaagggtttattcggcttacacttccatactgctgttcatcaccaaggaagccaggactggaactcaagcaggtcaggaaacaggagctgatgcagaggccatggagggatgttctttactggcttgcctcccctggcttgctcagcctgctctcttataaaacccaagactaccagccagggatggtctcacccacaaggggcctttcccccttgatcactaattgagaaaatgccttacagttggatctcatggaggcatttcctcaacagaagctcctttctctgtgataactccagctgtgtcaagttgacacaaaattagccagtacaatatatatatcatatatatatatatacacgtgtgtgtgtgtgtgtgtgtgtgtgtgtgatgcatatgaagatggtgtgtattcatgcacggaggtatccatggttagtatgttcacagactggatatgaagggtatgagagaataatgagggaggcatgtgatcagagcatatatgtgtgtga

SEQ ID NO: 3071 - DNA, 664 bp, Mus musculus
ccgcacgcagagcgtgaacacggccttcaccgccctgcgcacgctcatccccaccgagcccgtggaccgaaagctgtctaagatcgagacgctgcgtctggcgtccagctacatcgcccacctggccaacgtgctgctgctgggcgacgcggccgacgacgggcagccgtgtttccgcgcggcgggcggtggcaagagcgcggtccccgccgccgacggccgtcagccgcgctccatctgcaccttctgtctcagcaaccagcgcaaggggccgtcgtgacctggggggcagctgcttgaaagtgaggggtgtagccccgctccgagggcctcggcgatgaacctggatccctggttttctccaagaaggactccagagaaagaggccatgagccagcccctagctggacagaggagaagattccagaagcccaaaccactcctgcgttgtgtaaggaccggaggacaatggcctgggcacagggctcaccctggagagccacaaggacccatctagccatccaggcctagctggccagggacaaggcagaaattttagaaaaccaaagactatttttgaaagtgtgtgtgtgtgtctgtgtgtctgtgtgaatgtagtatgtgagcaaatcggggagggggtcaaaataaaggtatttttaaa

SEQ ID NO: 3072 - protein, 101 aa, Mus musculus
WSPPCARSSPPSPWTESCLRSRRCVWRPATSPTWPTCCCWAWTTGSRVSARRAVARARSPPPTAVSRAPSAPSVSATSRRRDLGGSCLKVRGVAPLRGPRR

SEQ ID NO: 3073 - DNA, 982 bp, Mus musculus
gcgcgcgggagcgcacggcgggggcggcggctcggggacgaggcgagtagaggcccgcggccgggcgcccatggcgttcgcgctgctgcgcccggtcggcgcgcacgtgctgtacccggacgtgaggctgctgagcgaggacgaggagaaccgcagcgagagcgacgcgtcggaccagtcgttcggctgctgcgaagggctggaggcggcacggcgtggcccgggtcccgggagcgggcggcgggcgagcaacggcgcgggccccgtggtggtggtgcggcagcgacaggcggccaacgcgcgcgagcgagaccgcacgcagagcgtgaacacggccttcaccgccctgcgcacgctcatccccaccgagcccgtggaccgaaagctgtctaagatcgagacgctgcgtctggcgtccagctacatcgcccacctggccaacgtgctgctgctgggcgacgcggccgacgacgggcagccgtgtttccgcgcggcgggcggtggcaagagcgcggtccccgccgccgacggccgtcagccgcgctccatctgcaccttctgtctcagcaaccagcgcaaggggggcagccgtcgtgacctggggggcagctgcttgaaagtgaggggtgtagccccgctccgagggcctcggcgatgaacctggatccctggttttctccaagaaggactccagagaaagaggccatgagccagcccctagctggacagaggagaagattccagaagcccaaaccactcctgcgttgtgtaaggaccggaggacaatggcctgggcacagggctcaccctggagagccacaaggacccatctagccatccaggcctagctggccagggacaaggcagaaattttagaaaaccaaagactatttttgaaagtgtgtgtgtgtgtctgtgtgtctgtgtgaatgtagtatgtgagcaaatcggggagggggtcaaaataaaggtatttttaaat

SEQ ID NO: 3074 - protein, 193 aa, Mus musculus
MAFALLRPVGAHVLYPDVRLLSEDEENRSESDASDQSFGCCEGLEAARRGPGPGSGRRNGAGPVVVVRQRQAANARERDRTQSVNTAFTALRTLIPTEPVDRKLSKIETLRLASSYIAHLANVLLLGDAADDGQPCFRAAGGGKSAVPAADGRQPRSICTFCLSNQRKGGSRRDLGGSCLKVRGVAPLRGPRR

SEQ ID NO: 3075 - DNA, 26061 bp, Homo sapiens
catcatcaaagcagccactactgtgagcctactgtgtgccaggcaccgtgccacatgcctcagcaacttgggctcagggcgagtctggagaggatggtaggaaagcacacagcaggggctgagaacagaaatggcttcagatccagctctgcctctcctagaaggtaagaccttgagcacagccccttaaccttgctgggtctaagcttcctcatctgtaaaatgaacttggtaataggatccatctgctagggatcattgtgagtattaaatgatcaggtgtgcaaagtgtgcagcacatagcaccatacaatgcagctgttgttactatcccttctctccacaaaccccgcaggatggccctcatcagccacagtttgcaaaggagaaaagtgaggccttttggaacacccctggacttgctccatgcctcgctttctccaattgtgaatcacgacggcaagccctgaacttattaaataatgcagtcaattcttattagtcactgattgtggagtcgtggattcatctactcactaaatttgtaacctcaaaatcaacactcgctggagctctcatggtcattgatggatacttgaggagtcatgaaaaatttgagttgccagttgggcgcagtggctcacgcctgtaatcctagcactttgggaggccgaggtgggcagataacaaggtcaagcgattgagaccatcctggccaacatggtgaaaccctgtctctactaaaaatacaaaaatcagccaggtgtggtggcgtgtgcctgtagtcccagctacttgggaggctgaggcaggagaactgcttgaacccgggaggcggaggttgcagtgagcagagatcccaccactgcactccagcctggcaacagagtgagaccctgtctcgaaaaaaaaaattttttttgagtcacttgatgcatgtttccaggtgagatcatacaaagtgacacgctgccttcttctttcagctctcacactgtaaacaactgtccttttcagtctattcagtgccacattttacaaatttttgtgtcttccgctggtgattgtactgttgacaatggccccgggcatggtgctgaggtgctgtctaatgttcctaagcaccagaaggctttgatgtgccttacagagaagatcatgtgagttagataagcttcattcaggcgtgagttacagtgctgttggccatgagtgcaatgtgagtgaatcaacaatatgtattaaacatggtgtctttcaacagaaacatgcataaaacaagcttaagtattgatgagttgatgaacatgttgggaacagaatggttcacaggaacctaagcctgtatttctcctaggagcagtggttcagtatttgctaattcagtgtttgcagtgactttctagaatataattatagcaaatcatgaaattcaactgtactttcaggttttttggtgcttttagttgtgaagataatatttgggaggcattttagtgagctacagtcacaattagtgttgctgtgtgacaaattaccccacaatttggtgtcttaagcatttccttatgctcacggattctgtagttcaggattcagaatgggtagagcagtgaagacttgtcactgtccatgatgtctgaggcttcaatggcaaagactcgataactggggctggaattgtatgaaagcctcttcactcatgtgtctgttcctggagctgggagaattgaaagaccagaacgaccagtcaaaagcatgtggcctctccatgtggcctgggcttcctcatagcatggcagcctcaggccattccaacttgttcttggcaactctgagctccaaactccttgagttttcaaagcagacttaaatggtagtttcatttagcattatcttgatcttccacaccattttggtgattctgccacacctggcactggtgtcagggtcaacctgagtcaggtgggtacctgaccacactaaattatttagcactgccttcaacttaaaagtctttaaacatgagctcatcctttccttaaagcgatggagctgaaggagggcacccatggcagcaccaacctcctctctattcttgaacaattccactctggcccaaacttgcatcctctactcaacaaaatcagtgctcttcaaccaagtaggctcactctccctggagcagagttttgtgagcatctgagcttaaactaccccgggggagggtcttcccttgttatcctcaccacaagcaacttatcaaagaattcctgtccactccctagctatgtgaccttaagcaaattacttaacctttctgctctttagtctactcacctatagaacgggaatattaatagtacttagctcatgaggctgctgtgaggattaaataagttcctagcagagtgcctggcatattgttacccctcaataatattattatttcaatttacattgcattttccctgaaagaagtaccacgaaatacacttttctccacctattatattttcaatgatatttttatgtcccttagaaagtggggctcggacatatgcctgtatgttccctctcttaccctgtctcttcctggtaaccagcacccacctgctcacttccacttcactcctatcaaacatgctgtctagaaagaatggatacccactcacactgaggtagatgtcagtggcaacagcccggagaaatgtctgctaaactgtattctctattaggtgtctggtgttgggggcaggaagtgagtctttaatcaagtaagcctaaaataagctcagaaaatgcagattgagaccaggcacggtagctcatgtttgtaatctcagcactttgggaggccaaggcagaaggattgcttgagtccaggaattagagactagcttaggcaacatagttgcctacaaaaaaaaaaattaaatctctacaaaaaaattaaaaattaactgggtttgtcacatgcctgtagtcctagttatttgggaggctgaggtgggaggattgcttgagcctgggaggtcgaggctgcagtgaaccatgattgcatcactatactccagcctgggcaacagagtaagacctcgtctcaaaaaaataagaaaacaaaatgcagattgaaatgaagcccaacaagcttttttgttgcaggatttctccgactctttaacatgctaatgttgttgcaggtcgctaggagggggatataaaatgcagcttctctgactttttttaaaaaaaatcatggaatcctgagcatccgcaagaacaagtgttcccaggaattcacccttaaaaatgatggcttggagggaccctggagggactgagttctagcatggtatcaagggcatcagccccatactagaggaaccagatggggtcaatggagcattctcattaactgaacataaaacaaaaccaaacaaaacctagcatctctatgtaaggacagtttacgtgtttatttaactcactcattcgacagatatttctggatgcgtattatgtgcggtgtactgatctgggtcttgatcttgcactctacgaatttctatgggatgacgcaagtggaaaaaaatgcttttgggccaaattctgcttccatcacttgctggttgtgagaacttaagaaaaccccttgtggccaggcgcggtggctcatgcctgtaatcccagcactttacgaggccaaagagggtggatcacttgaggtcaggagttcaagaccagcctgaccaatgtggtgaaacccagtctctactaaaaatacaaaatcagccaggcatgctggtgcatgcctgtaatcccagctacatgggaagctgaggcaggagaatcctcctgggaggcagaggttgcagtgagctgcgatcgcaccattgcactccagcctgggcaataattgtgaaactctgtcaaaaaaaaaaaaaaacccttgtaaggattatataatgaaaacagctaacacacagcacataccatgtgccaggactgttataaacgctacatacattgactcatttaatcctcataacaaccctatgaggcaggctttactgtgagccctgtttacagatgaggaaactgaggcccagaaaagtttggtaaatttcccaagatcacacatctggtaagtggcctaactgagaactgaaaccaggcagtcaggctcccaaatgtgcaaacttaaccatgtgacattattatctccagagttaacacctatggtatataacacctatggttagttgttttcaatagccattcttcccttcttcctcactaacagaaacccagtgttcagctgcacacacggacacctacctgcaaaagactatatactcagcctccttttcagttaagtatggtcaaatgacaagatcttgccaacgggatgtgaacggagtgaggttggtgttctacagattaaagcatgctcttccttctgcctctttctcctttttgccagttggaatgcagatagaatggctcctgtggccatgtggctctgtaagagaactaggaagtgaaagctatgtatggtgcagtaaaaagatagacagagcctgggtccccggcaccatctgttttagttatctaatgttgcataacaaaacaccctaaacttacgggattacaacattgataatttttgtgtttttagagacaaggtcttgctctgttgcccaggctggagtgcagtggtgtgatcatggctcactgcagcctcaaactcctgggctcaagcgaccctcctgcctcagcctccagagtagctgggaccacaggcatgcaccagagcatccagcaaatttcttttccttttttttcttttagagacagggtctcactatgttacccaggctggtctcaaactcctggcctcaaacgatcctttggcctcagccttgtgaagtcctgggattacaggtgtgagccactgcgcccagccaataattatttattatcttttttctttgtctttctgtattatctttcttctttttcacaggtcctgcaggtcaggaattcaggatccacatccaaggaggctcactcacttggctggcaaattggtgatggctgtaggctagggaccttggtctctctccacagacggcttgagtgtcctcatggcatggtggctgctgtccccagagtaaatgactcaagagaacaaggcaggagctcaatgcctttatgagctacattcagaagtcacataccgtcacttctgtcatattcttttggtcacatgagtcaaatctgattcaatgggggagggttctacacacgcagatgaatactaggaggcaaggatcattgctggcaatcttggaagctggcgaccacactgtggaatgccagagcagccctacctccaaaggccttgaatgagagagaaatgcattttacttgtctcactgaagttaaggttgtgaatatacacctatgaattcttgacacaaagtaagccctcaataaatgctaactgtcattagtctttttctctaagcaggttgaggcataagactttgtcttatattcccctctctacacacaaacatacacacatataccgccaccttctagactgaggtttggtacaaggtaggtgtgggaggctgtgtattagccttttcattcatttgttcaacaagtattcattatatatatatatacatatatatatacacatatatacatatatatacacatatatacacatatatatacatatatatacatatatatatgtatatatatatatatatatatagagagagagagagagagagagagatggagtcttgctctgtcacccaggctggagtgcagtggcgcgatctcggctcactgcaacctctgcctcccaggttcaagcgattctcctgactcagcctcctgagtagctgggattacaggtacaccaccacgcctggctaatttttgtattttcactagagacggggtttctccatgttggccaggatggtctcagactcctgacctcaatgatccacccgcctcggccacccaaagtgcaacaagtattcattattgcccacaccgtgatggaggcaagcacaaggagatggaaaacaacccatatctccatcattgggaagtcagataattccaagtgctagggtgcatgtggagaaagtggtccctcatgccctgctgctgggcatgtagactgaggcagccgtcatagagtgcagtaactgtatgtattctctccaccccagggatcctgcccccgagtgtacatcccagagaaatacacacgggagtccatgagagtcacacactgcaagtccatcacagctttgcttggggaggtgggaactggaggtagccagcatccatcactaaagcggtgggaaaaggaggcatggtggcacacgcacaccgtgcatgcttagcagcagtgggaaccaagggacttgagctggactcagcacacagagcagtgtcgaggaaacaaaatagcctatgacacagatctattgaaaccactatttatatacattaaaaacctccacacacaaatcaacgccatgcacattttataaagacacacatatatccaaaggcatgcgtcaaagatatgggagtgggtgccctgttaggggagggaaatggaagtgagaatcagggatgaagggagaaaagtcaaaatatggtgtgatgaacacaacaagactttgcagcaaggttggcaaaaagtggcaaagaggccttcaccatctgctactctgaacactggcagaggactagggatgtctggtcagacccaaaggggcagcattccaagcaggaaggacagctggagcacaggctcagagttgtgcacagcaggtgcctctgagaaacaaatgctttttgtagaagtgaagggtgcccatggtcagggaggcagggaccagcctctaccctctcagcctgtgacacctgtctcctcttacctggcagactcctactcagccctcacaggcctctaggctgcctcagaagccatgtggttagggaaggagcaatggctttggagtcagaccaatctcagctcccacattggcccaccgtgtgacctcgggcaagtcactttcccctctttgaacctccgtatcttcatctgtaaaatgggaataatgacaatacctacctcagaaggttgtgttgggaaggaagtgagatgagcaaaatacacaaagtacctgccccatggagcttatactctagtggagggagataggtggtagacaaataaatatgtaatgtctctactgctgtatccgcagtacccagaactgtgcctagcacatagcaggtgctcagttaatatttgtagaatgaataagtgaatgaatgaaagtcagtgacaaatgctataaaaagaaataaagcaggataaggggaaagggagagctgggggtgctggcaggttggagaagccattactgttagtgctggtggtcaggaagggcctccctgagataagatttgagtgaagatttgaaggaaatgagtgaacaaactatgagactatcaggggccaggggggccaggaagaagtgggctccaggtttagtggggaggccagtgtggctggagcagagtgagggacagagaatgggggaagctgaggtcccctgtgtaggtgagctgagaatgtggtaggagtcccctccgcactcccagggacaagacctagaaaagtcaatgctgctcagccctttcccaggcagttggctggggccagcccctaaaaacagtagcacaaactcctctcaggtactgagcactcctgtgtgccaggcccagctctactggcacaaactcatggaaccatcaccagccctgggaatgggtactattattatctcattttcagagcaggcaactgagactctgggaagcagctaaccttggaaccggaactgggtctctctgataccagaccctggcttgctcctaccacattgtcttgaaatcctttgtttacagctcgccttcccctctcggctgcagaaggcctgtctcagtctcattcatggttttcttctactcccagggtcccaagtgtcaaaatctgcctaaggagcaaataaatgaatgagcctacaaggcaagcccctcttcgccttccgggcccagttcacgccttggttggcatctccagttggaggtggaattgggagggggctggacagaggaatttcaagctgcctgagggtcagaagcagagaggagggggagaagggggagaaagcgaaagtgaagtgagctgggagcccctgtgaggaggcgcagacagggaaggaaatctcccggtaataattcatcggctcaggaagcagcagcctggcctggggctgtgtgtgggaccagccctgcggggagggggcccatgctggctgtttccctcctccccaaagcccagcctggctggggtcacggtcaaatgctggcggtggggggatccaggtgtgggaacagactctcccgcagaccctgggtcctaaggggctcctcccccggcagtcatgggaaatccctcgctccctcttcttcccctaattctggcctggatcagggaagccaggaaagcacagcatggcagagctgcaggcatcgtcaggaaaacagacgcccagaggagccaaaatgcacctagaagcctttcaactccactccctgcgctctgtctgctacaccggctgccactcgggcttattttcaaggccaagtggatgctggtttagctagtgcctggagagagctgagcagcaggcacgagtgagatcgagaccccggcaaccacctttggctcagcaattctctgaagaggacacatcaggctgaacaatctaaggtttctagaaggcaagcaggcattgaggaaagatagcccgtgtgtgtgtgatgggatggtggtggtaggattccaagaggtagtgaaaccggacaggctggagctagcgccgccactcccacctgtacgactgaaggccggagctctctgacctgtaactcagggctgccatcctgcagcctcagctgggcgcaatagagtatatagcaccgagtctggtacacagtagttccttaaccaaaacgtcagttccgtgagggtgaagaatttattttgttaatggctgtatcctcagacctaaaaccatgtctgacacatagtagggacccaacgaatatttgttgaaaaaacgaacgaactactggtgtttgtgtattgtggttttgttttgcttttttttttcttcttttttttaagtttgtcttcagggacaagacactgtcgaatcctcatttggaaagattatagcttttctccaagtgttctccacggacaccaccactatcaccaatggcttgttacaaaatgtaggttcctgggcccgttccagaactgctcaatcagaatgggagcaatttgggactctgtaatagcaaaagccccttccccagttcttacgcacgtgaaagctgcagaactacaggattagaattggagggcaggcagacactagctgtttctctgcaatctgaacgttccgaacgaggaaactgaggcccagagaggagaaagggatctgcccgcgtctcccaggtggtccaggctggagacaaaaagttcggatctgggcccaccccggccgaccctcccagacctccagcatctgccgggctagccagccgggaacgggggccttcggggtgggccgccggctcccgggccgctttcaacctgggggacggaggcggtgggagcgtcgccattggccagggcgcggcggacgcctccccattggccgggcggacgcctccccattggccgggcggagccctccgcccccggccggggcggccttgccattggcccctccctcgcctataaggcgggggccggcggggccgtgggagcgcgcgggagcgcacggcggggcgcggccgacgctgggacgcggcgcacggggggacgcggccggcgcccatggcgttcgcgctgctgcggcccgtcggcgcgcacgtgctgtacccggacgtgcggctgctgagcgaggacgaggagaaccgcagcgagagcgacgcgtcggaccagtcgttcggctgctgcgagggcccggaggcggcgcggcgcggcccgggccccgggggcgggcggcgggcgggcggcggcggcggcgcgggccccgtggtggtggtgcgacagcggcaggcggccaacgcgcgggagcgggaccgcactcagagcgtgaacacggccttcacggcgctgcgcacgctcatccccaccgagccggtggaccgcaagctgtccaagatcgagacgctgcgcctggcgtccagctacatcgcgcacctggccaacgtgctgctgctgggcgactcggccgacgacgggcagccgtgcttccgtgccgcgggcagtgccaagggcgccgtccccgccgccgccgacggcggccgccagccgcgctccatctgcaccttctgcctcagcaaccagcgcaagggggtgagtgtgctgcgtccctcgctgcggccgccaggtcggggtaggcggggggcagcgcctctgcgggaaccggagaggtgcaggggtccccaacgaggccagggggaagcgacgtggaattcgtgctgggtgcggcaccccaagcccagaaccactgacttaatgcccaggcccccaaacagaaggatgcgggaaaacccagagttcgggtctgatttaactgctcagtgtgggatatcccctccaacgaaaggtgtgctggaacttccttcctgctgggaagacggcatgaggactgagtaacaaagacccatcttttatggagtcttcctctgtgccgatgcgctccacatccacttttttgccttcacaagaatcccttcaggcaggtagtttttctgcccattttatcctgatgaggatctgagcatcagagatgggatcacctgcccacatttactcagctgggaagccggggcgctggccctgggcttgcccggtgtgtgttgcccccaccttgaaataattgtcccctgtcctaagatctaacccaagagcaggagactgagaagaaaggaggccacaaaccgccaaccgagagcctgaggtacccagcggatgagcagtaggagtgaagaaggggccctctgagagtccccagcccccaaaaggacgtggtgttgggagagggcactcttgggtcagctggagggagctggtgtgcagctcctgcaatgtgtcctgggcaagaaagtggatcaggctggtaggggtgggcgggggctgtgtggcagcagaggtggcctcttggctgaaaccttgcccaggctccaaggaacctgcttcatcccccgaccgtgtgcctttctggcctgggcttttcctacagtaaagaagcctgtctaacaacttgtattccagcagctaccatttacatccggggaaactgaggctgagagagtactgacttttggtggccaagtggaagggcatggggaattggagttaggcccctgactccctgctgtttggttctcacagctgccgttggtcccttgctccaccctgttctgcggaggcctctgcatcttggcctgagaccaccctctgtctggctcatcagatatccagcctggttgctcaacacttggctgcctcagttgccctgaatcgtcggtcttcttagcctcaggcttgtgccctctccagggtccctgctgctcccagctgtgggcccctgtcagtgccccaggctgggctgagaagccaggagtgggcctttaaggcttcctgggatgggagggcctgaaggggctctcagggatactccctgactgcctttcacccattcattccagttagcaacccttagctacccaacagctgccttctgttggctctgagaaccccagagaagcaggttgtaggtccccacccttccaccagtcaggacctgacagtacagccccagggtcagggcagggagatgaagatgaggatgctgtggtctgatggtgggggaggggaagcacaaagggattctcagagcccagagaaagcctccaacccagggtgagtgctgacagggtttctgtgtctcatttctgaaggatgctttagaacaggggcaggccgatgaaggggtaggaaagggtgttctaggattggggcatacagcaagagctcaggcctagagaaggaagagggaagaggttaaaagtggcaggagtgcagagggggagcacaatggccaataacagcagtgacagcagccttcatgagcactgatctgtgctaagcgctctttatgatttatcattaaaatcctgcaacagccaggaatgaggcgctgtggttatccccacttgcttagaggtgctgccagtggcgcagagacacacagtcagtgatggaaccaggattcaaactcaggcctgcctggttgggacgtgggataggttacagagggaagtccctgtaactgtcatgtgtccacccccatagcaagcaggctgggggacttctctgcaggtctcaggcctgtcccacagctcacaggggcctcccctgggcctggccgcttccctgggatctgtctatgggaccaagaactcagccaaatttggctgtagaaaccatgctctcaaccccacggtctcctctgggaataggcgagaggggcaatcctggccagctatggccccttgaagactctgctggaagaaaactggctggcttggggagctcttgctcccttctgagctttgtgggccagaagagctttaagacccaagaccccgttcctttaccctgagccaccacctccctcccatcctggccagtctggagttggggttgccgtggaaacagtttcctgtagcatctttctgttgaaggaggggttaggtgtggccctctgtggtagaattagcacgtgggaggtggaaagggggttcttgtctctgccctgttttccctttgtcacctgggggtgaggattggacaggatcatcttgtaaggctctcccctgttggtatacccagagggtagctgggaccaggaggcactgtccatagatgatgctgataataatacttatgaacatttattgaacatttactttgttcccaacactgtgccaaggctttacctagattagcttgtgtgatcctgtaaagtaattcccctttacgggggggaaactgaggctcagtgagatgaaatcacttgcctgaggtccagtagttggcccttggcaaagtagggatcgaagcctaggtctgtctcacttgagcctaactcctaaccatggtgcttcccgaagacccttggtgctgagttcctaagggacaaacaaactggggtcttgtcaggacttttttttttttttttttgcgatggagtctcgctctgtcgcccaggctggagtacagtggcacgatctcaactcactgcagcctccgcctcccgggttcaagcagttctcctgccccagcctcccaagtagctgggattacaggtgccagccaccacacctggctaattttttgtatttttagtagagacggggttttgccatgttggccaggctggtctcgaactcctggcctcaggtgatccgcctgcctcggcctcccaaaagtgctgggattacaggcataagccaccatacccggccgtcaagacctcttctaagtacacttagcagcttacacagctgcattcacattcgactgcaccttgagatggcaagtaaaatcattttgtccccatttcatagatgaagaaactgaggttcagggaggtgaacagtcccagcattcttctgggaccctaggtctccagctgacctccagacttggggtgggagggggcggctctccctgtccctgagcacttacagagtaaaagagaggaaggccagttttctaattcaaccttaatattgcaccccctcccctatctgcccttctcagccactcctgccagagtttgtctgagaagcccaagccccaggctctgctgggactgtggcctcagccctcaaaatagccctgcctgtgagtgaacatgctgtccctgggctgcaagagcctcgagggaggctgggctcgcatctggatggatctgccccaacctggacctgggggtggagggggcaggggacagagctcccagatggtcagctgtttctctaagtgggctgagaaagctgcctgttcctccatcatctagccaggctcagggtgatgagcatttacagtgggatttcagacactatcatgtcctggaaacaggacagattgttggacaacatagatttctagcccagctcttttacaactggctgggtgcctctgggccagtcattcagtggctggaggcctcaaaagagggggtgctttaacatctgtgacctctctggcttacggtgaggatgaaacccatgtgtccagtctgaaaatatcaatgagaagagctggtagagacagcccctgtaaggactgatggtttcagggactgccgccattagcccatcttccaatggctgccacttaattcaggcggccttgattggtgcctgctccaagtcaggtcctgggccaagagagcccaggctggaaatgggaccacagagtgaagaactccttttccctaccactccctgagatcccagtccagatggggagacaaaggagagaccctgccttgtccttctgagattcatccccatggaatgtccccagaaaggcaggaagtgctaggcaatttcaggaacagagaaacctttccagggagacaagacctgagagcacattcctgggaaaggggacgccctgagggaagtcaaggaggccagaaaccgagtccccttttaaaggtggacgagtgagccgctaggcatgcagtcaggcagggggaggaccactgtggggtgtgcttgttttgcccgtgtaaaatattatgctttaaaatatattggattttttttaagcaacagatcatatgggaaagaagtagaaaaggtaaaaaagtatagcgtgaatacaaaaattagccgggtgtggcggtgggcccctgtagtccccgctactcgggaggatgaggcaggagaatcacttgaacccgggaggcagaggttgcagtgagctgagattgtgccactgcattccagcctggcaacagagcaagactccatctcaaaaaacagtatagcatgagagagcctccctcccatcctctctccatcatcaaattcctctctgaagaaacccactcacaatttcccgtgtgtgcttctccccagcaatcacagcacacaggcgcattcagcctgccccttgcttttgtccctaaacattgtcatttggcagcagtctgtatcagtccagaaagggtttcttctgctttctgttgcagagaacttgatcgtgtggctgaactgtgatttattgatcaggatccctcttgagggatacagaggttagttccagtgttcacactggcctaatcgaacctctttatactctttctccccctctgcagggtggccgtcgtgacctggggggcagctgcttgaaggtgaggggggtggccccccttcgagggccacggagatgagcctggaccctggagaaggaggccaggagccagccactggctggacagggaagaagaccccaggagccaagcccaccccttctttgtgtagggaccgggggaccatggcctgttccgggacactctgggcagggccctcgggacatctccacccgatcctggagagctgtgaggatccattcagcctgcccagctctggctggtcagagacaaggcagaacttttggaaaaacaaagactgttggtgacagggtgtgtgtgtatctgtgcgtgagtgtgagtgtgtgtgagagagaattggtgagtttaaaataaaagctatttttaaataaaagacgtcgttctgagctgaggagagtcccgtggacatcggaggtcagaggtgggccctcccctggacctagagagaggcacagatgttctgggggctgccctgagccctggaagggtgggggtggggcgggggaaggcaggcagagccccctctccgggcgccataaccaaactttcctcagtctgctgtttatcagatgttcttaacaactgttaggtgtctgatatggttggtaaagaaatcttaattttacttatttttgaataaggcctgtgttcatttcattcacatggttcaaaactcagaaggtaccagagggtatgtgttgaaaagtctccgtgcccctgtcctccagccaccagctctcctctctgcaagcagcctagggcaccagtttcctgtgatgtcccattcactatgaatgatcaggcaaatacacaaatgacagcacatcgtacacacttttggctccttctttttttccttaatctagcttggtatcatcccaagtcagtacctaaagggtatttcatttcttcctgagctgcttattattccattttgtgaacatgccatcctttaacccatccctctttgatgcgatcaccaacaagccatgtggttttccacaagtgcaaatgagtgcatgctaaaggggaatattcttacccctgtgttagctgaaatgctttagaagaccgatgacacccagaggcacgtggcagggtgacaccctgaggtccgtccacctttgaagcccagagcagctccttccttgccctggagatgccccaagtggaaagccagcacctgttaccccaattacactcccaggagccctgggaggtgagagctggtgtcttccccactgcagacccagcagagacagcgatgcgtcagctgatcagtgcagctaggagttcttggctctcgggctggggctgtgtccctgtgaggtcaggatcagagaagctcgagaggcccgagggtgggagagccagggaaaggccagggcagccaggcagccaccctctcctcagcaaggtacattcatatgcctatttcaacagtttatttatttaacaaacacttttatttttatttttttagagacagggtctcactatgttgcccaggctggtctcaaactcctgagctcaagtgatctatttcatgtttactgactgcactctggccccagagtccacgttcgtatcccctctgttctgcctctaccccactcccctgcgtttgaccatctgagcctgaattgtggctccgattttgcaaattgacaaacagattgtcaataccctctgtgtggcaggcactgtgccagatgccacaggaatgagcccgaccaacctggtcttcctcacagatgaaaaccgaggcccagggagatcaagggagttgtggaattgccagtccctaggctggagcaggccatgaaattaccatgcttaattcctttggtgtaagaagtagaggaaggagggccccagggggccggggtcccccacccaggagagctttccaagcaccctctacctcacttccccgctgtttcaggaacactggtcgtgcttatcctgtgtcccagcgtggctgtgcttccccctttgggagctgattaggaaagcacattgctccccctgcgcctaccctcccaggtacagccagcctctggcaaagccacaggaaaaggactgtggccttgtcaatggcaggaagcctgggagtgggggcagagcagacacttgggtgctctggctggaggcccactccgccaccagatttgctgggtgaccccagagatgttgcttgacccctctgggcctccctggctcagtctctaactagtaagagcagctagaacagaaagataagtatttgttttgctttgtgagatagtttttaatagaccctgtatgcactggtaagtaatccaagttgtatcaaatggtatgcagtgaaaagtacagacctcctcaggcccctccccagaggcagcttcctgagtgtccttccaaaaaagcttctatactgataactgtttctgaaaaaatatttataggtttctctgcctgtgctttcattgtaaaacaaattcaaaatgctataagactctagaaatatcacttatcccagagacagccacagtgaagacgataatcccaccgagtattttttgttgttttgtttgagatagggtctcactctgtcacccaggctggagtgcagtggcacagtcatagctcgctgcaggcttaacctcctgtcctcaagtgatcctcccacctcagcctgcggagtagctggaaatacgggcatacaccaccaggcctggctaattttatttatttgtttattttgtagagacaggttcttactatgttatgcaggctggtctccagctcctgggctcaagcgatccacctcagcctcccaaagtgctgggattataggcatgagccactgcgcccagctctgcagcgtttttgttaaactagcacacatacgcttaacaaatcatttaaaccatgctaagtttacgcttttttttttttttttaagatggatctcactctgtcacccaggttggagtgcagtggcgtgatcttggctcactgcaacctccacctcccgggttcaagcgattctcctgcctcagcctcctgagtagctgggagtacagacgtgcaccaccacgcctggctaatttttgtatttttagtaaagacggggtttcaccatgttggcaaggctggtctcgaactcctgacctcaggtgacccacccatgttggcctcccaaagtgctgggattacaggcatgagttactgcgcccggccaagtttacactttttatggaagtataagacacattcaggaaagtgcacagggtgtaagggtacagctcaatggattttcacaagctgagcacacctgtacacccagcatggagatcaagaaatgcaattagcagcttcccaggagccagcccctcttgcacatctacacataccggttctttcctttgaatgagacacaaaaaagaataaactgacaataagtctccttctctcccagccaccagctccagtccccagaggcaattgctatgttaaggtaaccaggatcctatggattccggcagagatggtctgcatatataggcaaattacatagatattgtttttccacacaagtggtagcatttcacacactcctctctgcactggatttttttttcttaactgtacttcttggagacccttggttgcttacagagctgtttcacaccttttcatagctgcatagtgctccattatgcatattttgcagcttgctatcttcctggtaatggacagttaatgcccatgagcctttgtgagctgcaaggtcagcccacacacgtgaccggggagaagcacaggtgtggtctgcatatataggcagctcctctggggaacattttgtaacattgtccgctcccccagcatgcctgtcgcctccgggatggtccagcccagccaagcttctccaggccaacttgaggccacaggagtaaagctgctcagggagaagaaatccaggactgaaggggttggaatgaccgactcagccaggccaccttggaccccaaagggatacactctccctgcaagtcttgacacatgaagcagcagcacaagaataatctcagagttcatcatttcacaatgaagaaagtgagacaagacagagggcaacctgcctggggttccccagcaggtccttggccctgttgggacaccaagaacacaaatctccctccttgccatgcagggctgttttctctgactccacagttatgagcaggaaggcctcagaggtcacccatggcaacctgaagctcagagaggagcggtgatgggccacggttgcacagcatctggagctgagcagggctgagaacacaggacctcttgcacccacagcacttcaggttcccctcattgtcccaggccactcccattttatgaggcttttattaggttaaaaaatgaagcactacaaaaagagagtgctgaagactatggcatatttggtaagttaacttttttttttctttgagacacggttacaccctgtcacccaggctggagtgcaggtggcacgatcatggctcactgcagcctccacctcctggagtcaggtagtcctagcgcctcagcctcctgagtagctgggactacaggtgtgcaccatgatgcccagctaattttttattttgagggggtttcgccatgttgcccaggctagtctcaaattcctgggctcaagcaatcctccagcctcagcctcccaaagtgctgggattacaggtgtgagccactgtgcctggcctggcaagttaactcttaactacctccacacagtcaggagcgtgatgcattattgtggaacaccatataattagaggatttatagaaacattggttcatgggacgtacatatgaagttggatgtctttgttcaaccccatctgtgtctcttacgactgtatattttacctcgtgtagttgtgatatcaagtatagacctgaacaggtaaatgcgatacatgactttgaactggatcctgtactgcagaggggaaaatgtgacaggggaccttcttggtagagttgacaatttttttttttgagacatggtcacacaaaattgggatatgaacaatagattaaggtattgcatcaaagttaaattttctgtatttgctaacagcaccctgattgtgtcagaggatatccttgtgcttaagaattacatcctaggccgggcgtggtggctcagcttgtaatcccagcactttgggaggccgaggtgggcgcatcacctgaggtcaggagttcgagaccagcctggccaacatggtgaaaccctgtggtggcaggcgcctgtaatcccagctactcgggaggctgaggcaggagaactgctcgaacccgggaggcagaggttgcagtgagccaagatcgcaccattgcactccagcctgggtgacagagtgagactccgtctcaaaaaaaaaaaaaaaatacatcctgaagtactattaaggagaagtatgatgtaggtaacgtgctctctcaaatggttcagaagagaaataatatatgtgtgagagaaaaggatagagtaaatatgacaaacttaaaatgtggtgaatctgagtacagggtatatgggagttccctgcaccacttttgtcacttttctgcatgttgtaaatgattgcaaaatgaaaagttaaaaagaagttgggatcttggcctactgtgatgcgagggctgccaaatggtgtcctggccccctctgatgcaccctggctttagcttgtccaacagacgatggaaaatatccccagcagacccaggtgcctctgctcgtgactctcaggcccctgtgccccttaggaggctaaggtggtcccatcccccgagtctcctgccaccatgatttatgtccctatgagcctcagcagctgtgagcacaggtcccactgggcagccggctgggggggctggcgtttgcttctcagcgtgtctaatccagaccagatttgcagaccccatgggcctgggatagagctcccagggggctagggtcagagggcaggccagcagggcctggaaaccagggaggcactcaggatgaacaggctgcgagacagaagacctagcctattctaggttggccactgctcctgtgtgacccagggtaggcgtctggccctctctggcccttgcttttcctcacgtcagcacggccagcaactttgtcagctgggacacactggccttgtgggagggaaggctgataaaatctaggagttgtttttttctgaatggcttggaaaaatgcctgactcttttgaggacctactacgtgtcaggcctaggctatgcactttacataaaataaatacagcttcgcggggggcagtggctcatgcctgtaatcacagtgctttggaaggcggaggagggcagatcacttgaggccaggagttcaagaccagcctggccaacatggccaaaccccatctctgctaaaaatacaaaaattagctgggcatggtggtgcgtgcctgtaatcccagctactcaggaggccgaggcaggaaaatcccttcaacccaggagttggaggttgcagtgagccgagattgcaccactgcactccagcctgggcaatagagtaagaccccgtctctaaataaataaatacatacatacatacagcttgctcaaaagctggttagatatgtattattattgctccattttatagatgaggaaacggaggcacaaggaggttaaagaacttggccaaggtgacacagtggctggtggatttgaatcagatgttctagctgcagagccccactgggctctcaaccaccacccccacatgacctcaccaggtgcgtgcctagtcctgatgttgatggaactgactaatccaaggcacttctctgagtgacatacagagatggcctcacttgcaacaagccacataggtaggtactgttgctatccccatttcacagactagaaaaccaagcccaagggcacccagctaggcaatggcacagccaggattccaactgagggggtctagctccagatcccacagcctgcatcacagcaggagggtaaaactcagcaggaggcatgggatagagtgtaacattgtagaccaacataaggctggcagactttgtcagtcagtaagtccgtcaacaaacatgttttgaacttctccatgaaccacacaaggctctagggatgatcagagaataagccagatgtagtacctgacctcatggagtttacggcctactgaaaaagcaggctctgagcaaataataaaaatgggatgggtgcttctaagttatgtgggaacgcatggctgggagacctgtgtcgtcattaggaatgatgcttccaaggtgagagaaggctttgccgagtgtgaatggttctgcagcttccaggccacccctgcatcagtatgaatgatggggcacctgcaggacctgggtctcccctaaacacaacccctgaatccccaacatatctcctttgagtgcccagagcagccccatgaagctgtcaaagcaacagaaggctggttggacagaagtcgaaaataaaagcaaacacttacctagcaccgcctcagtgccaggcactgttccacggcctgtaactcatttactcctctacgacccagtgagacaggctgtcactatcctcacacggccatcaaaggacagaaccgggatgtggactgaggctgggtccagagcccactctcttcacctccctgctctgctgcctctgtgccaaatgctgagcatcccgagcgcctggtggcaccggcgcgttgtgggtgcctagcagatactcgggaaggaccaagaggcattgttctgtctcactcactctgcataaccaccctgtaaggccaacctaatccatttcagaggtggcactcaaagaaaagcagtgaccagcctgaggtcgcacggctaggagtgcagagttggacctcaaacccagctctgtggatcgtcccatctgcagaaaacccagtttggaagatattggcagaatcttgggtgttttgttttgttttgttttgtttttgtttttgtttttgttttcagacagagtctcgctccatcacccaggctggagtgcagtggcatgattcgactcactgcaacctccgtctcccaggttcaagcgattctcctgcctcggcctccagagtagctgggattcaggagcgtgccaccacacctggctaatttttgtatttttagtagagacagggtttcaccatattgaccaggctggcctcaaacttctgacctcaggagatctgcctgctgcagcctcccgaagtgctgggattacaggcgtgagccaccgcgcttggcctggaagatattggcaaagagcctttaaccatagagaagaaagggtgggcccagggctcagggagggagaaaagacactgaccaactgggaactctgtgggaacctctctcaccccacaacctcaccccacccaggggcctccccaggaagcagccagggctgagaagcaatggggccagggaggcgggccttggattcccaagaagcagaccccctcgcgcccccgggtgggagggctaaagagccacccaggagccaggcttgtcttctgctctctccaccctcactctcctcccagaggcagcccccgctcctccccacccccacccaccttccctgcctctctctgcccttgcagcccaggcccaccgcctcccctgcccctggctttcagaaagccctggaaaggcttccttctttgagacaggaaggtgtcctcaagtctcaggaaggaaaaacagtcaagctgaacccaccaagaccgtctccaaggggccgggactggcgcctggccaggactgacatcacctgggaaccgccacagccgcagctgcagtgcgcctcctggggggactcgcttttgctatttaaaaaataataataataataataaaacttttccagtctggtgtttttaaatgtgctttttatagtgggccctggggcgtgggtgttttggtgtctcctgtccgccttttcctcacgtcctgatttctcacactacacaatgtggcctttgaccaattacagcgaattcccggggattctgggtgggatctccttccaggccctgaccccctcagatgatctcttagctatctagatatgctgaatttctttctttctctttttttttttttgttttttgttttttgttttcttttttgagacagggtctcaccgtcgtccaggctggagtgcagtggtgtgagctcggctcactgcaacctatgcctcctgggctcaagcaatcctcccacctcagccccccaagtagctgggactacaggtgcacgccactacacccagctaatttttgcatttttttgagagatagggtctcactatgttgcccaggctgctctcaaactcctgagctcaagcaatccacctgcctcagcttcccaaagtgctagggttacagcatgagccaccacgcctggccaagatacactgaatttcaacttcaaaaaaataggccgggcgtggtggctcacgcctgtcatcgtagcactttggaaggctgaggcaggcagatcatctgatgtcaagagttcgagaccaggctggccaacatggcgaaaatccaactctactaaaaatacaaaaattagccaggtgtggtggcgcacaactgtaatcccagctacgagggaggctgaggcaggagaatcacttgaacccgggaggtggaggttgcagtgagccgagatcgtgccactgcactccagcctgggtgacagagtgagactctgtctcaaaaataaattaataaataaaaataaaaaaaatttacccatggtaccaaattcaaaaggcgtctaaggcctcagatgaaaaataagtctctctccctgccccttagtcacctggtctccatcccctaagggaccctcttttttttttttttttttttttgagacagagtctcacactgtcgcccaggctggagtgcagtggcgcgatctcatctcactgcaagctccgcctcccgggttcacgccattcccctgcctcagcctcccaagtaaccgggactacaggcgcccgccactcttttttattttattaaataaaatcttctgtagtgcttaatgtgtgccaggtactcttctaagcaattatctaatattaactcatgtaaccctcataaaaaccctatgaggtagggtttccactgactatttaacagtgaatattgccaaagattttttatgcatatagaagcacatctagatctataatcttaacccctcccttcctaaaaaacatacatagaagctaattatacatgctggcctgcaccttgctgtatttacttaaacta

SEQ ID NO: 3076 - DNA, 1014 bp, Homo sapiens
gacgcggcgcacggggggacgcggccggcgcccatggcgttcgcgctgctgcggcccgtcggcgcgcacgtgctgtacccggacgtgcggctgctgagcgaggacgaggagaaccgcagcgagagcgacgcgtcggaccagtcgttcggctgctgcgagggcccggaggcggcgcggcgcggcccgggccccgggggcgggcggcgggcgggcggcggcggcggcgcgggccccgtggtggtggtgcgacagcggcaggcggccaacgcgcgggagcgggaccgcactcagagcgtgaacacggccttcacggcgctgcgcacgctcatccccaccgagccggtggaccgcaagctgtccaagatcgagacgctgcgcctggcgtccagctacatcgcgcacctggccaacgtgctgctgctgggcgactcggccgacgacgggcagccgtgcttccgtgccgcgggcagtgccaagggcgccgtccccgccgccgccgacggcggccgccagccgcgctccatctgcaccttctgcctcagcaaccagcgcaaggggggtggccgtcgtgacctggggggcagctgcttgaaggtgaggggggtggccccccttcgagggccacggagatgagcctggaccctggagaaggaggccaggagccagccactggctggacagggaagaagaccccaggagccaagcccaccccttctttgtgtagggaccgggggaccatggcctgttccgggacactctgggcagggccctcgggacatctccacccgatcctggagagctgtgaggatccattcagcctgcccagctctggctggtcagagacaaggcagaacttttggaaaaacaaagactgttggtgacagggtgtgtgtgtatctgtgcgtgagtgtgagtgtgtgtgagagagaattggtgagtttaaaataaaagctatttttaaataaaagacgtcgttctgagctgaggagagtcccgtggacatcggaggtcaga

SEQ ID NO: 3077 - protein, 199 aa, Homo sapiens
MAFALLRPVGAHVLYPDVRLLSEDEENRSESDASDQSFGCCEGPEAARRGPGPGGGRRAGGGGGAGPVVVVRQRQAANARERDRTQSVNTAFTALRTLIPTEPVDRKLSKIETLRLASSYIAHLANVLLLGDSADDGQPCFRAAGSAKGAVPAAADGGRQPRSICTFCLSNQRKGGGRRDLGGSCLKVRGVAPLRGPRR
